United States Patent Application Publication US 2018/0126003 A1 - sequence listing, part 177

SEQ ID NO: 313982 - DNA, 6492 bp, Artificial Sequence
  derived and/or modified sequence
atggtgaacgagaacaccagaatgtacatccccgaggagaaccaccagggcagcaactacggcagccccagacccgcccacgccaacatgaacgccaacgccgccgccggcctggcccccgagcacatccccacccccggcgccgccctgagctggcaggccgccatcgacgccgccagacaggccaagctgatgggcagcgccggcaacgccaccatcagcaccgtgagcagcacccagagaaagagacagcagtacggcaagcccaagaagcagggcagcaccaccgccaccagaccccccagagccctgctgtgcctgaccctgaagaaccccatcagaagagcctgcatcagcatcgtggagtggaagcccttcgagatcatcatcctgctgaccatcttcgccaactgcgtggccctggccatctacatccccttccccgaggacgacagcaacgccaccaacagcaacctggagagagtggagtacctgttcctgatcatcttcaccgtggaggccttcctgaaggtgatcgcctacggcctgctgttccaccccaacgcctacctgagaaacggctggaacctgctggacttcatcatcgtggtggtgggcctgttcagcgccatcctggagcaggccaccaaggccgacggcgccaacgccctgggcggcaagggcgccggcttcgacgtgaaggccctgagagccttcagagtgctgagacccctgagactggtgagcggcgtgcccagcctgcaggtggtgctgaacagcatcatcaaggccatggtgcccctgctgcacatcgccctgctggtgctgttcgtgatcatcatctacgccatcatcggcctggagctgttcatgggcaagatgcacaagacctgctacaaccaggagggcatcgccgacgtgcccgccgaggacgaccccagcccctgcgccctggagaccggccacggcagacagtgccagaacggcaccgtgtgcaagcccggctgggacggccccaagcacggcatcaccaacttcgacaacttcgccttcgccatgctgaccgtgttccagtgcatcaccatggagggctggaccgacgtgctgtactgggtgaacgacgccgtgggcagagactggccctggatctacttcgtgaccctgatcatcatcggcagcttcttcgtgctgaacctggtgctgggcgtgctgagcggcgagttcagcaaggagagagagaaggccaaggccagaggcgacttccagaagctgagagagaagcagcagctggaggaggacctgaagggctacctggactggatcacccaggccgaggacatcgaccccgagaacgaggacgagggcatggacgaggagaagcccagaaacagaggcacccccgccggcatgctggaccagaagaagggcaagttcgcctggttcagccacagcaccgagacccacgtgagcatgcccaccagcgagaccgagagcgtgaacaccgagaacgtggccggcggcgacatcgagggcgagaactgcggcgccagactggcccacagaatcagcaagagcaagttcagcagatactggagaagatggaacagattctgcagaagaaagtgcagagccgccgtgaagagcaacgtgttctactggctggtgatcttcctggtgttcctgaacaccctgaccatcgccagcgagcactacaaccagcccaactggctgaccgaggtgcaggacaccgccaacaaggccctgctggccctgttcaccgccgagatgctgctgaagatgtacagcctgggcctgcaggcctacttcgtgagcctgttcaacagattcgactgcttcgtggtgtgcggcggcatcctggagaccatcctggtggagaccaagatcatgagccccctgggcatcagcgtgctgagatgcgtgagactgctgagaatcttcaagatcaccagatactggaacagcctgagcaacctggtggccagcctgctgaacagcgtgagaagcatcgccagcctgctgctgctgctgttcctgttcatcatcatcttcagcctgctgggcatgcagctgttcggcggcaagttcaacttcgacgagatgcagaccagaagaagcaccttcgacaacttcccccagagcctgctgaccgtgttccagatcctgaccggcgaggactggaacagcgtgatgtacgacggcatcatggcctacggcggccccagcttccccggcatgctggtgtgcatctacttcatcatcctgttcatctgcggcaactacatcctgctgaacgtgttcctggccatcgccgtggacaacctggccgacgccgagagcctgaccagcgcccagaaggaggaggaggaggagaaggagagaaagaagctggccagaaccgccagccccgagaagaagcaggagctggtggagaagcccgccgtgggcgagagcaaggaggagaagatcgagctgaagagcatcaccgccgacggcgagagcccccccgccaccaagatcaacatggacgacctgcagcccaacgagaacgaggacaagagcccctaccccaaccccgagaccaccggcgaggaggacgaggaggagcccgagatgcccgtgggccccagacccagacccctgagcgagctgcacctgaaggagaaggccgtgcccatgcccgaggccagcgccttcttcatcttcagcagcaacaacagattcagactgcagtgccacagaatcgtgaacgacaccatcttcaccaacctgatcctgttcttcatcctgctgagcagcatcagcctggccgccgaggaccccgtgcagcacaccagcttcagaaaccacatcctgttctacttcgacatcgtgttcaccaccatcttcaccatcgagatcgccctgaagatgaccgcctacggcgccttcctgcacaagggcagcttctgcagaaactacttcaacatcctggacctgctggtggtgagcgtgagcctgatcagcttcggcatccagagcagcgccatcaacgtggtgaagatcctgagagtgctgagagtgctgagacccctgagagccatcaacagagccaagggcctgaagcacgtggtgcagtgcgtgttcgtggccatcagaaccatcggcaacatcgtgatcgtgaccaccctgctgcagttcatgttcgcctgcatcggcgtgcagctgttcaagggcaagctgtacacctgcagcgacagcagcaagcagaccgaggccgagtgcaagggcaactacatcacctacaaggacggcgaggtggaccaccccatcatccagcccagaagctgggagaacagcaagttcgacttcgacaacgtgctggccgccatgatggccctgttcaccgtgagcaccttcgagggctggcccgagctgctgtacagaagcatcgacagccacaccgaggacaagggccccatctacaactacagagtggagatcagcatcttcttcatcatctacatcatcatcatcgccttcttcatgatgaacatcttcgtgggcttcgtgatcgtgaccttccaggagcagggcgagcaggagtacaagaactgcgagctggacaagaaccagagacagtgcgtggagtacgccctgaaggccagacccctgagaagatacatccccaagaaccagcaccagtacaaggtgtggtacgtggtgaacagcacctacttcgagtacctgatgttcgtgctgatcctgctgaacaccatctgcctggccatgcagcactacggccagagctgcctgttcaagatcgccatgaacatcctgaacatgctgttcaccggcctgttcaccgtggagatgatcctgaagctgatcgccttcaagcccaagcactacttctgcgacgcctggaacaccttcgacgccctgatcgtggtgggcagcatcgtggacatcgccatcaccgaggtgaaccccgccgagcacacccagtgcagccccagcatgaacgccgaggagaacagcagaatcagcatcaccttcttcagactgttcagagtgatgagactggtgaagctgctgagcagaggcgagggcatcagaaccctgctgtggaccttcatcaagagcttccaggccctgccctacgtggccctgctgatcgtgatgctgttcttcatctacgccgtgatcggcatgcaggtgttcggcaagatcgccctgaacgacaccaccgagatcaacagaaacaacaacttccagaccttcccccaggccgtgctgctgctgttcagatgcgccaccggcgaggcctggcaggacatcatgctggcctgcatgcccggcaagaagtgcgcccccgagagcgagcccagcaacagcaccgagggcgagaccccctgcggcagcagcttcgccgtgttctacttcatcagcttctacatgctgtgcgccttcctgatcatcaacctgttcgtggccgtgatcatggacaacttcgactacctgaccagagactggagcatcctgggcccccaccacctggacgagttcaagagaatctgggccgagtacgaccccgaggccaagggcagaatcaagcacctggacgtggtgaccctgctgagaagaatccagccccccctgggcttcggcaagctgtgcccccacagagtggcctgcaagagactggtgagcatgaacatgcccctgaacagcgacggcaccgtgatgttcaacgccaccctgttcgccctggtgagaaccgccctgagaatcaagaccgagggcaacctggagcaggccaacgaggagctgagagccatcatcaagaagatctggaagagaaccagcatgaagctgctggaccaggtggtgccccccgccggcgacgacgaggtgaccgtgggcaagttctacgccaccttcctgatccaggagtacttcagaaagttcaagaagagaaaggagcagggcctggtgggcaagcccagccagagaaacgccctgagcctgcaggccggcctgagaaccctgcacgacatcggccccgagatcagaagagccatcagcggcgacctgaccgccgaggaggagctggacaaggccatgaaggaggccgtgagcgccgccagcgaggacgacatcttcagaagagccggcggcctgttcggcaaccacgtgagctactaccagagcgacggcagaagcgccttcccccagaccttcaccacccagagacccctgcacatcaacaaggccggcagcagccagggcgacaccgagagccccagccacgagaagctggtggacagcaccttcacccccagcagctacagcagcaccggcagcaacgccaacatcaacaacgccaacaacaccgccctgggcagactgcccagacccgccggctaccccagcaccgtgagcaccgtggagggccacggcccccccctgagccccgccatcagagtgcaggaggtggcctggaagctgagcagcaacagatgccacagcagagagagccaggccgccatggccggccaggaggagaccagccaggacgagacctacgaggtgaagatgaaccacgacaccgaggcctgcagcgagcccagcctgctgagcaccgagatgctgagctaccaggacgacgagaacagacagctgaccctgcccgaggaggacaagagagacatcagacagagccccaagagaggcttcctgagaagcgccagcctgggcagaagagccagcttccacctggagtgcctgaagagacagaaggacagaggcggcgacatcagccagaagaccgtgctgcccctgcacctggtgcaccaccaggccctggccgtggccggcctgagccccctgctgcagagaagccacagccccgccagcttccccagacccttcgccaccccccccgccacccccggcagcagaggctggcccccccagcccgtgcccaccctgagactggagggcgtggagagcagcgagaagctgaacagcagcttccccagcatccactgcggcagctgggccgagaccacccccggcggcggcggcagcagcgccgccagaagagtgagacccgtgagcctgatggtgcccagccaggccggcgcccccggcagacagttccacggcagcgccagcagcctggtggaggccgtgctgatcagcgagggcctgggccagttcgcccaggaccccaagttcatcgaggtgaccacccaggagctggccgacgcctgcgacatgaccatcgaggagatggagagcgccgccgacaacatcctgagcggcggcgccccccagagccccaacggcgccctgctgcccttcgtgaactgcagagacgccggccaggacagagccggcggcgaggaggacgccggctgcgtgagagccagaggcagacccagcgaggaggagctgcaggacagcagagtgtacgtgagcagcctgtag

SEQ ID NO: 313983 - DNA, 6492 bp, Artificial Sequence
  derived and/or modified sequence
atggttaacgaaaacactcgcatgtacatacctgaggagaatcatcaggggagcaattacgggtcaccaaggccagctcatgctaatatgaacgccaacgccgctgccggtctggctcctgagcatatcccaacacccggggcagcactgtcttggcaagcagccattgatgcggcccgtcaagccaagttgatgggttcggcaggcaacgcaaccatttccacagtatcaagtactcagaggaagcgacagcagtacggcaagcccaaaaaacagggctcaacaaccgccacccgacctcctagagctctgctctgcctgaccttgaagaaccctatccgtagagcttgtatcagcatcgtggagtggaaaccttttgaaattattattctgttgacaatatttgctaactgcgtcgctctggccatttatataccatttcccgaagatgatagcaacgctactaattcaaatcttgagagagtggaatacctctttctcattatctttaccgtcgaggcatttctgaaagtgattgcctacggactgttgtttcatcccaacgcctacttgcgaaatggatggaatctcctcgactttatcattgtggttgtgggactgtttagcgccatcctggagcaagctactaaggctgatggcgcgaacgcattgggaggtaaaggcgccggctttgacgtgaaggctttaagagccttccgagtcctgcggcccctgaggctggtgtctggtgtcccatctctgcaggtcgtgttgaatagcatcatcaaagctatggtgcccctactccacatcgcattgctcgtgctcttcgtgataatcatctacgcgatcattgggctggaattatttatggggaagatgcataaaacgtgctataatcaggagggaatcgcagatgttcctgctgaggatgaccctagtccctgtgcgctagagaccggccatggacgccagtgtcagaacggaacagtatgtaaacccggatgggatggccctaaacacggcatcaccaacttcgataacttcgcttttgcgatgctgactgtcttccagtgcattactatggaagggtggaccgatgtgctctactgggtcaacgatgccgtcgggagagattggccatggatttattttgttaccttgattataattggcagcttttttgttctgaatctggtgctgggcgtgctctcaggagaatttagtaaagagcgtgagaaagccaaggctagaggggacttccaaaaactaagggaaaaacagcagctcgaggaggacctgaaggggtacctcgactggatcacccaggccgaggatatcgatcccgagaacgaggacgaaggtatggatgaggagaaacccaggaacagggggacaccggcagggatgctcgatcaaaagaagggcaagtttgcctggtttagccattctactgagacccatgtctccatgcctactagcgaaacagaatccgtgaacaccgaaaatgttgccggcggcgacatagagggagagaactgtggtgcccgcctggcgcaccgcatcagtaagtcaaagttttctaggtactggagacgatggaacaggttctgtcgtcgcaaatgcagggcagcggttaaatctaatgtcttttactggctagttatctttctagtgttcctgaatactttgaccattgcctctgaacattataatcagccaaactggctgactgaggtgcaggacaccgcaaacaaggccctgctggcccttttcaccgccgagatgctgctgaagatgtattctctgggactgcaggcctactttgtatcgctgttcaataggttcgactgcttcgtggtgtgcggagggatcctggaaactatactcgtcgaaacgaagatcatgtcccctttaggtattagcgtgttgcggtgtgtccgcttactgaggatctttaagattacgcgttattggaactctttaagcaacttggtagccagtcttttgaattcagttcgcagcatagctagtctgttactgcttttgttcctatttatcattattttctccctcctgggcatgcagctttttggcggaaaattcaactttgacgagatgcagacccgaagatctacatttgacaatttcccgcagtcactccttacggtattccagattctgaccggagaggactggaattcagtgatgtatgacggtattatggcttacgggggcccctcctttccgggaatgctcgtgtgcatttactttataattcttttcatttgtggtaactatatcttattgaatgtgtttttagccatcgctgtagataacctggccgatgccgagtcattgaccagcgcacaaaaagaagaggaagaggaaaaagagaggaaaaaacttgcccgcaccgccagtcccgagaaaaagcaggagctggtcgagaaaccagctgtgggcgaatccaaagaagagaagatcgagctgaagtccatcacggcggatggggaatccccgccagcaaccaaaattaacatggatgacctgcagcccaatgagaacgaagacaaaagtccataccctaatcccgagactaccggggaggaagacgaggaagaacctgaaatgccagttggtccacgacccaggccattgagcgagcttcacctgaaggagaaggccgtgccaatgccagaggccagcgccttcttcatcttttccagcaataaccggttcagacttcagtgtcaccgaatcgtcaacgacacgatttttaccaatctgatcttattttttatccttctatcctcgatctctctcgctgccgaggaccctgtgcaacacactagctttagaaaccacattctcttttatttcgacatcgtgttcacgacaatcttcacaattgagatcgccctcaaaatgacggcctacggtgccttcctgcataagggctcgttctgcaggaactactttaatatcttggatctgctcgtggtttccgtttctcttatcagcttcggaattcagtcgtctgccatcaatgtggtgaaaatcctcagagttctgcgtgtgctccggccgctgcgcgccattaaccgagcaaaaggcctgaagcatgttgtacagtgcgtatttgtggcgattcgcacgatcggcaatatagtgattgtgaccactctcctgcagttcatgttcgcctgtataggtgtgcagcttttcaaaggcaagctatacacttgttctgattccagcaagcagacagaagccgagtgtaagggcaactatatcacatataaagacggcgaagtggatcacccgatcatccagccacgcagctgggaaaactcaaagttcgatttcgacaacgtcttggccgcaatgatggcactattcaccgtctcaaccttcgagggatggccggagctgctgtacagatccattgactcacatactgaggacaagggcccgatctataactacagagtagaaatttccatatttttcattatctatatcatcattatagctttctttatgatgaacattttcgtaggcttcgtgatcgtgaccttccaggagcagggcgagcaagaatataagaattgtgaattagacaaaaaccagagacaatgtgttgaatatgctttaaaagcaagacccctgcggcggtacatcccgaagaaccagcaccagtataaagtgtggtatgtcgtaaactcaacctatttcgaatatctgatgtttgttctcattcttctgaacaccatctgccttgccatgcagcactacggtcagtcttgcctctttaagatcgccatgaatatactcaacatgctatttaccggcttgttcaccgtcgagatgatcttgaaactgatcgcgttcaagccaaaacactacttttgcgacgcatggaacacattcgatgccctgatcgtagttgggtctatcgtggacatagccatcaccgaggtgaacccagcggagcatacccaatgctccccctcaatgaacgctgaggaaaatagcagaattagtattaccttttttcggctgtttagagttatgaggctggtaaagctactcagtaggggcgaaggcattcgcacattgctctggacctttattaagtcctttcaggcactaccttatgtagccctgctcatcgtaatgctgttcttcatatacgctgtcattggtatgcaggtcttcgggaaaattgctttgaatgacacgacagaaatcaaccgtaataacaatttccagaccttcccacaggcggtgttgttactgttcagatgcgccactggagaggcatggcaggatattatgctggcatgtatgccaggcaagaagtgcgctcccgagagcgaacccagcaactccaccgaaggcgagacaccttgtggatcttctttcgccgttttctacttcatcagtttttacatgctctgtgcctttctgatcatcaacctgttcgtcgcagtgattatggacaactttgactacttaacacgtgactggtcaattttggggccacaccacttggacgaatttaagaggatttgggcagaatacgacccggaggccaagggcagaattaaacatctggatgtcgtcacactgcttcgtagaattcagcctcctctcgggtttgggaaactgtgtcctcatagagtggcttgcaagcgcttggtaagcatgaacatgcccctcaacagcgatgggacagtcatgttcaatgctacactcttcgcactggtgagaaccgcacttcgcataaaaacagagggaaaccttgaacaggccaacgaagaactgagggcaattatcaaaaagatctggaaacgcacaagtatgaagctcctggaccaggtggtgcctcctgccggtgatgacgaggtgactgttggaaagttctacgccacctttcttatccaggaatactttcgtaaattcaaaaaaagaaaggagcagggcctcgtcgggaagcctagtcagcggaacgcgctcagcctgcaggcaggtctgaggactctccatgacatcgggcctgaaattcgccgggctatttccggcgacctcactgcggaggaggagctcgataaagcgatgaaagaagccgtctccgcagcatccgaggacgacatcttcagacgtgcaggcgggctgtttggcaaccatgtgtcttactaccagtcggatgggaggagcgctttcccacagacttttacaacccagcgcccgcttcatattaataaagccgggagttcccagggcgacaccgagagtccttcacacgagaaactggtggatagcacttttaccccatcttcatatagctctacaggctccaacgccaacatcaacaatgcaaataacaccgctctcggcaggctgcctagacccgccgggtacccctccacagtgagcaccgtagaaggccacggtcccccccttagtcccgctatacgggttcaggaggtagcttggaagctgtcaagcaatagatgccactcaagggagagccaggcagccatggctggacaggaggagacttcccaggacgaaacctacgaggtgaagatgaaccatgacaccgaggcatgcagcgagcctagtttgctgtctaccgagatgttgtcataccaggatgatgaaaaccgtcaattgactctgccggaagaggacaaaagagatatccggcagagcccgaagagaggttttttaagaagcgccagtctgggacgaagggcttcttttcacttagagtgccttaaacgtcaaaaagacagaggaggcgatattagtcagaaaactgtattacctttgcatttggtccaccatcaggcgcttgcagtggccgggctcagtccgcttctacagaggagccactcacccgccagcttcccacgccctttcgccacccccccggcgactcctgggagccggggatggccaccacagccggtccccacactccggctcgagggcgtggagagctcagagaagcttaactcctcattcccatccattcactgcggatcttgggccgagactactcctggaggcggcggtagctcagccgctcgtagagttagacccgtgagcctcatggtcccttcgcaagccggtgctcccgggcgacagtttcacggaagtgcttcttcactggttgaagcagtgctgattagcgagggactggggcaattcgctcaggaccccaagttcatcgaagtcacaacccaggagctggcagatgcctgcgatatgaccatcgaagagatggaaagcgctgcagataacattttgagcgggggtgcaccacagtcccctaatggtgccctccttcctttcgtgaattgtagagatgccggtcaggatcgggcgggcggagaggaagacgccggctgtgtgcgggcgcgtgggagaccgagtgaggaagagctgcaagactcccgagtgtacgtatccagtttgtag

SEQ ID NO: 313984 - DNA, 6492 bp, Artificial Sequence
  derived and/or modified sequence
atggtgaatgaaaacaccaggatgtacatccctgaggagaaccaccagggcagcaactacggcagccccaggcctgcccacgccaacatgaatgccaatgctgctgctggcctggcccctgagcacatccccacccctggggccgccctgtcctggcaggccgccattgatgctgcccggcaggccaagctgatgggcagcgctggaaatgccaccatcagcacagtgagcagcacccagaggaagaggcagcagtatggcaagcccaagaagcagggcagcaccacagccacccggcccccccgggccctgctgtgcctgaccctgaagaaccccatccggcgggcctgcatcagcatcgtggagtggaagccctttgagatcatcatcctgctgaccatctttgccaactgtgtggccctggccatctacatccccttcccagaagatgacagcaatgccaccaacagcaacctggagcgggtggagtacctgttcctgatcatcttcaccgtggaggccttcctgaaggtgattgcctacggcctgctcttccaccccaatgcctacctgagaaatggctggaacctgctggacttcatcatcgtggtggtgggcctcttcagcgccatcctggagcaggccaccaaggcagatggagccaatgccctgggcggcaaaggagctggctttgatgtgaaggccctgcgggccttccgggtgctgcggcccctgcggctggtgtctggagtgcccagcctgcaggtggtgctgaacagcatcatcaaggccatggtgcccctgctgcacatcgccctgctggtgctgtttgtgatcatcatctatgccatcatcggcctggagctgttcatgggcaagatgcacaagacctgctacaaccaggagggcattgctgatgtgcctgcagaagatgaccccagcccctgtgccctggagaccggccacggccggcagtgccagaatggcaccgtgtgcaagccaggctgggatggccccaagcacggcatcaccaactttgacaactttgcctttgccatgctgactgtgttccagtgcatcaccatggagggctggacagatgtgctgtactgggtgaatgatgctgtgggccgggactggccctggatctactttgtgaccctcatcatcatcggcagcttctttgtgctgaacctggtgctgggcgtgctgtctggagagttcagcaaggagcgggagaaggccaaggcccggggggacttccagaagctgcgggagaagcagcagctggaggaggacctgaagggctacctggactggatcacccaggctgaagatattgatcctgaaaatgaagatgagggcatggatgaggagaagcccaggaacagaggcaccccagctggcatgctggaccagaagaagggcaagtttgcctggttcagccacagcacagagacccacgtgtccatgcccaccagcgagacagagagcgtgaacacagaaaatgtggccggcggggacattgaaggagagaactgtggggcccggctggcccaccgcatcagcaagagcaagttcagccgctactggaggcgctggaaccgcttctgcagaagaaaatgtagagctgctgtgaagagcaatgtgttctactggctggtgatcttcctggtgttcctgaacaccctgaccatcgccagcgagcactacaaccagcccaactggctgacagaggtgcaggacacagccaacaaggccctgctggccctcttcaccgctgagatgctgctgaagatgtacagcctgggcctgcaggcctactttgtgtccctcttcaacagatttgactgctttgtggtgtgtggcggcatcctggagaccatcctggtggagaccaagatcatgagccccctgggcatctctgtgctgcgctgtgtgcggctgctgcgcatcttcaagatcacccgctactggaacagcctgagcaacctggtggccagcctgctgaacagcgtgcgcagcatcgccagcctgctgctgctgctcttcctgttcatcatcatcttcagcctgctgggcatgcagctgtttggaggcaagttcaactttgatgagatgcagacccggcgcagcacctttgacaacttcccccagagcctgctgactgtgttccagatcctgactggagaggactggaacagcgtgatgtatgatggcatcatggcctacggcggccccagcttccctggcatgctggtgtgcatctacttcatcatcctcttcatctgtggcaactacatcctgctgaatgtgttcctggccatcgctgtggacaacctggctgatgctgagagcctgaccagcgcccagaaggaggaggaggaggagaaggagaggaagaagctggccaggacagccagccctgagaagaagcaggagctggtggagaagccagctgtgggggagagcaaggaggagaagattgagctgaagagcatcacagcagatggagagagccccccagccaccaagatcaacatggatgacctgcagcccaatgaaaatgaagacaagagcccctaccccaaccctgagaccaccggggaggaggatgaggaggagcctgagatgcctgtgggcccccggccccggcccctgtctgagctgcacctgaaggagaaggctgtgcccatgcctgaggccagcgccttcttcatcttcagcagcaacaaccgcttccggctgcagtgccacagaattgtgaatgacaccatcttcaccaacctgatcctcttcttcatcctgctgagcagcatcagcctggccgcagaagatcctgtgcagcacaccagcttcaggaaccacatcctcttctactttgatattgtgttcaccaccatcttcaccattgaaattgccctgaagatgacagcctacggggccttcctgcacaagggcagcttctgcaggaactacttcaacatcctggacctgctggtggtgtctgtgtccctcatcagctttggcatccagagcagcgccatcaacgtggtgaagatcctgcgggtgctgcgggtgctgcggcccctgcgggccatcaacagagccaagggcctgaagcacgtggtgcagtgtgtgtttgtggccatccgcaccatcggcaacatcgtgattgtgaccaccctgctgcagttcatgtttgcctgcattggagtgcagctgttcaagggcaagctgtacacctgcagcgacagcagcaagcagacagaagcagaatgtaaaggaaactacatcacctacaaggatggagaggtggaccaccccatcatccagcccaggtcctgggagaacagcaagtttgattttgacaacgtgctggccgccatgatggccctcttcaccgtgtccacctttgagggctggccagagctgctgtaccgcagcattgacagccacacagaagataaaggccccatctacaactacagagtggagatcagcatcttcttcatcatctacatcatcatcatcgccttcttcatgatgaacatctttgtgggctttgtgattgtgaccttccaggagcagggcgagcaggagtacaagaactgtgagctggacaagaaccagaggcagtgtgtggagtatgccctgaaggcccggcccctgcggcgctacatccccaagaaccagcaccagtacaaggtgtggtacgtggtgaacagcacctactttgagtacctgatgtttgtgctgatcctgctgaacaccatctgcctggccatgcagcactacggccagagctgcctcttcaagatcgccatgaacatcctgaacatgctgttcaccggcctcttcaccgtggagatgatcctgaagctgattgccttcaagcccaagcactacttctgtgatgcctggaacacctttgatgccctgattgtggtgggcagcatcgtggacatcgccatcacagaggtgaacccagctgagcacacccagtgcagccccagcatgaatgctgaggagaacagccgcatcagcatcaccttcttccgcctcttccgggtgatgaggctggtgaagctgctgagcagaggagagggcatccgcaccctgctgtggaccttcatcaagagcttccaggccctgccctacgtggccctgctgattgtgatgctgttcttcatctatgctgtgattggcatgcaggtgtttgggaagatcgccctgaatgacaccacagagatcaacagaaacaacaacttccagaccttcccccaggccgtgctgctgctcttccgctgtgccactggagaggcctggcaggacatcatgctggcctgcatgcctgggaagaagtgtgcccctgagagcgagcccagcaacagcacagaaggagagaccccctgtggcagcagctttgctgtgttctacttcatctccttctacatgctgtgtgccttcctgatcatcaacctgtttgtggccgtcatcatggacaactttgactacctgacccgggactggagcatcctgggcccccaccacctggatgagttcaagaggatctgggccgagtatgaccctgaggccaagggccgcatcaagcacctggatgtggtgaccctgctgcggcgcatccagccccccctgggctttgggaagctgtgcccccaccgggtggcctgcaagaggctggtgtccatgaacatgcccctgaacagtgatggcaccgtgatgtttaatgccaccctgtttgccctggtgaggacagccctgcgcatcaagacagagggcaacctggagcaggccaatgaggagctgcgggccatcatcaagaagatctggaagaggacctccatgaagctgctggaccaggtggtgcccccagctggagatgatgaggtgacagtgggcaagttctacgccaccttcctgatccaggagtacttcaggaagttcaagaagaggaaggagcagggcctggtgggcaagcccagccagagaaatgccctgagcctgcaggccggcctgcggaccctgcatgacatcggccctgagatcagaagagccatcagcggggacctgacagctgaggaggagctggacaaggccatgaaggaggccgtgtctgctgcctctgaagatgacatcttccggcgggccggcggcctgtttggaaatcatgtgtcctactaccagagtgatggccgcagcgccttcccccagaccttcaccacccagaggcccctgcacatcaacaaggccggcagcagccagggcgacacagagagccccagccatgagaagctggtggacagcaccttcacccccagcagctacagcagcacaggcagcaatgccaacatcaacaatgccaacaacacagccctgggccgcctgcccaggcctgctggctaccccagcacagtgtccacagtggagggccacggcccccccctgagccctgccatccgggtgcaggaggtggcctggaagctgagcagcaaccgctgccacagccgggagagccaggccgccatggccggccaggaggagaccagccaggatgagacctatgaggtgaagatgaaccacgacacagaggcctgcagcgagcccagcctgctgagcacagagatgctgagctaccaggatgatgagaaccggcagctgaccctgcctgaggaggacaagagggacatccggcagagccccaagaggggcttcctgcggagcgccagcctgggccggcgggccagcttccacctggagtgcctgaagaggcagaaggaccggggcggggacatcagccagaagacagtgctgcccctgcacctggtgcaccaccaggccctggccgtggccggcctgagccccctgctgcagaggagccacagccctgccagcttcccccggccctttgccaccccaccagccaccccaggcagccggggctggccaccccagcctgtgcccaccctgcggctggagggcgtggagagcagcgagaagctgaacagcagcttccccagcatccactgcggctcctgggccgagaccaccccaggcggcggcggcagcagcgctgcccggcgggtgcggcctgtgtccctgatggtgcccagccaggccggggcccctggccggcagttccacggcagcgccagcagcctggtggaggccgtgctgatcagcgagggcctgggccagtttgcccaggaccccaagttcatcgaggtgaccacccaggagctggctgatgcctgtgacatgaccatcgaggagatggagagcgctgctgacaacatcctgagcggcggggccccccagagccccaacggggccctgctgccctttgtgaactgcagagatgctggccaggacagagctggaggagaagaagatgctggctgtgtgcgggcccggggccggcccagcgaggaggagctgcaggacagccgggtgtatgtgagcagcctgtag

SEQ ID NO: 313985 - DNA, 6492 bp, Artificial Sequence
  derived and/or modified sequence
atggtgaacgagaacacccggatgtacatccccgaggagaaccaccagggaagcaattacggttccccccggcccgcccatgctaatatgaatgcgaatgccgctgcgggtctcgcccccgagcatattccaacccctggagcggctctgagctggcaggccgcgattgacgcagctcggcaagctaagctgatgggatctgccggcaatgccaccatctctacagtctctagcacccagcgcaaaagacaacagtacggaaagcccaagaaacagggttctaccaccgcaactagacctccccgagccctgctatgtctgaccctgaaaaaccccatcagacgtgcatgcatctctattgtagagtggaaacctttcgagataatcattttactgacaatatttgcaaactgcgtggccctcgccatctacatccctttccctgaagacgactcaaacgccacgaactccaacctggagcgcgttgagtatttgtttttaataatttttactgtggaggccttcctcaaggtgatcgcgtatggtctgctcttccaccctaacgcctatttgcgaaatggttggaacttacttgactttatcatagtagtcgtgggccttttcagcgccatcctagaacaagcgacgaaggccgacggcgctaacgccctcggtggaaaaggcgcaggtttcgatgtgaaagcactgcgagcttttagagtgctgaggccgctgagactggtgagcggcgtaccatctctccaggtagtgctgaatagtatcattaaggcgatggtccccttactgcacattgccctgttggtgcttttcgttattatcatctacgctatcatcgggctggagctgtttatgggaaagatgcacaaaacttgttacaaccaggagggcatcgccgatgtgccagccgaagacgatccatctccatgtgctcttgagacaggccatggcagacagtgtcagaatggaactgtgtgcaaacccggttgggacggtcctaagcacggcataaccaattttgataattttgcatttgccatgttgacggtcttccagtgtataactatggaaggctggacagacgtgctctactgggtgaatgatgcagtcggtagagattggccatggatttattttgtgacccttattatcatcggtagcttttttgtcctgaaccttgtcctcggggtactctccggcgaatttagtaaagaacgcgagaaagccaaggctagaggcgattttcaaaagttacgcgagaaacaacaactggaggaggacctgaaggggtacctggattggattactcaggcagaagacatcgaccctgagaatgaagacgagggcatggatgaagaaaagcctaggaatagaggaactcctgccggtatgctcgaccagaagaaggggaagttcgcatggtttagtcacagtaccgagactcatgtgtccatgccaacctctgaaacagaaagtgtaaacactgagaatgtggcaggcggcgacattgaaggcgagaattgcggtgcaaggctggcccacagaatctcgaaaagtaaattcagtcgttattggaggcggtggaatcggttttgtcgtcgaaaatgtagggccgcagtaaaaagcaacgtattctactggttggtcatctttctggtgtttctgaacaccctcacaatagctagcgagcattacaatcagcctaattggcttacggaagttcaggacaccgccaataaagcactacttgccctctttactgccgagatgttattgaaaatgtactcgttaggactgcaggcttatttcgttagcctgtttaaccggttcgattgctttgtcgtgtgtggcggaatcctcgagacgattctcgttgagactaagataatgagtcccctagggattagtgtactcaggtgcgtgaggctcttgcgaatcttcaaaatcactagatactggaactcgctcagcaatctggtggcttcactcctgaacagtgtacgaagtatcgccagcctgttgctcttactgtttctgttcataattattttttctctgttgggcatgcagctgtttggcgggaaatttaattttgatgaaatgcagaccaggagaagtacctttgacaacttcccacagagtctcctgaccgtcttccagattcttacaggagaagattggaattccgtcatgtacgacggtatcatggcatacggaggcccatcatttcctggcatgcttgtatgcatatatttcatcatcctttttatctgtggaaactatatcctgttaaatgtattcctggccatcgcggtagacaacctcgccgacgccgagtccctgacaagcgcacaaaaggaggaggaagaggaaaaagaacgaaaaaaactagctcgtactgcctcgccagagaaaaagcaggagctggtggagaagcccgccgtcggggaaagcaaagaggaaaagattgagcttaagtctatcacagctgatggcgaatccccccccgctaccaaaatcaacatggatgacttgcagcctaatgagaacgaggacaagtctccctatccaaaccctgaaacaaccggagaggaggacgaggaagagcctgaaatgcctgtcgggcccagacccaggccactgtccgagctgcatctgaaagaaaaagcagtacccatgcccgaggcctctgcgttctttatcttcagttctaataataggttccgactccaatgtcaccggattgtaaacgatacaatctttacaaatctcatcctattctttattttgttgtccagcatcagtttggccgcggaagatcctgtgcaacataccagctttaggaaccatatcctcttttatttcgacattgtgttcacaacaatttttacaattgagatcgctctgaaaatgacagcttacggagcatttctccataagggatccttttgccggaactattttaacattctcgatttgctggtggtgtcagtgtccctgataagctttgggatccagtccagcgcaattaatgtcgtgaagatattgagagtgctacgtgtcctccgacccctcagggctattaaccgggcaaagggtttgaagcacgttgtccagtgtgtgttcgtggctattcggactatcggaaacattgtgatcgtgacaactctgttacagtttatgtttgcctgtatcggagttcagttgttcaaagggaaactttacacctgttcagactcgtctaagcagactgaggcagaatgcaaaggcaattatattacatataaggacggagaagtcgaccatccaatcattcagccacgatcttgggaaaacagcaaatttgatttcgacaacgtgctggccgcaatgatggctctgttcacagtatcgaccttcgaaggttggcctgagctcctgtataggtccatagattcacacacagaggataaaggccctatctacaactacagggttgaaatcagcatttttttcatcatttatatcatcattatagccttcttcatgatgaacatctttgtcggatttgtgatagtgacctttcaggagcagggagagcaagaatacaaaaactgcgagctcgataagaatcaaagacagtgtgtggagtatgcccttaaggccaggccactgcggcggtatatcccaaaaaatcagcaccagtataaagtctggtacgtggtcaactctacttattttgagtacctgatgttcgtcctaatcctgcttaacacaatctgtctggccatgcagcactatggtcagtcttgcttgtttaagattgctatgaatattttaaacatgttatttaccggactgttcaccgtcgagatgatcttgaagctgatagcatttaaaccaaaacactacttttgcgatgcctggaacaccttcgatgctctgattgtggtggggagtatagtggatattgctatcaccgaagtgaatcctgccgagcacacacagtgctctccgagtatgaacgctgaggagaattcacgcatcagtatcactttcttcagactgtttcgagtgatgaggctggtgaagttgctctctaggggagaagggattcgcacactgctgtggaccttcatcaagtcttttcaggccctcccttatgtcgccctccttatcgtgatgcttttttttatctatgctgtgatcgggatgcaggttttcggtaaaatagcactcaacgacaccacagaaataaacagaaataacaatttccagacctttccccaagccgtactactcctcttcaggtgtgcaacgggtgaggcttggcaggacataatgttggcttgtatgccaggaaagaaatgtgcccccgagtccgagccttctaactctacagagggggagacgccttgcggttcgtcatttgcggtattctattttataagtttttatatgctctgcgctttcctcattattaacctgttcgtggccgtgatcatggataactttgactatttaaccagagactggagtatccttgggccgcaccatctggatgaatttaaacggatttgggcagagtacgatccagaagccaagggcaggatcaagcatttggacgtggttactctcttgcggcgaatacaacctcctcttggttttggcaagctgtgtccccacagagtcgcctgtaaaaggctcgtatccatgaatatgccacttaactccgacggaactgtgatgttcaatgcgacattgtttgctctggtgcgcacagccctgcggattaaaactgaggggaatctggaacaggctaacgaagagctccgggcaatcatcaagaagatttggaagaggacatcaatgaaactgctggatcaggtcgtgccccctgctggcgacgatgaggtgacagtcgggaaattctatgccaccttcctgattcaggaatacttccggaagtttaagaaacgaaaggagcaaggtctggtaggtaagccttcacaacgaaatgccttgtctcttcaagccgggctccggacactgcacgacattggacctgagattcggcgcgccatatccggagatctgacagccgaggaggaactggacaaggctatgaaggaagccgtgtcagctgcttcagaggatgacatcttcagaagggccggaggcctctttggcaaccatgtcagttactaccagtctgatgggcgctccgctttcccacagacatttacgacgcagaggccactgcacatcaacaaagctggaagcagtcagggagacactgaatcacctagtcacgagaagctcgtggatagcacttttaccccctcttcttactcaagtactgggtcaaacgcgaatattaacaacgcgaacaacacagctctcggaaggctgccacggcctgccggttatccctcaacggtctctacggtggaagggcacggcccacccctttctccggcaattcgcgttcaggaagttgcgtggaaactgagttccaaccgatgtcacagtcgcgagagtcaagcagcaatggctggtcaggaggagacttcacaggatgaaacctatgaggttaagatgaaccacgataccgaagcgtgtagcgagccctcactgctgagcacagaaatgctgagctatcaagacgatgagaataggcagcttacgttgccagaagaggacaaaagggacattcgacagagtccaaaacgcgggttcctaaggagcgcatcactggggcgccgggctagcttccacctcgaatgcctgaaaagacagaaggacagaggaggagatatctcccagaaaacagtgctgcctctccacctggtgcatcatcaagccctggcggtggcaggcttgtcacccttgctgcaaagatcacacagtccagcttcatttccgcggcccttcgctactccacctgccacacctggctctcgcggatggccgccacagcctgtgccaacactgagactcgaaggcgttgagtcctccgaaaagctcaatagctctttcccctcaattcactgcggctcctgggcagaaaccactcctggcggcggaggcagctccgccgcccgtcgtgttaggccagtgtctctcatggtccctagtcaagcaggagccccggggagacaattccatggaagcgcatcaagcctcgtcgaagctgtcttaatcagcgaagggctcggtcagtttgcccaggatcccaaatttatcgaggtcactacccaggaactggctgacgcgtgtgacatgaccatcgaggaaatggagtcagccgccgataacattctctccggtggggccccacagagcccaaatggagctctgctgccctttgtgaactgtcgcgacgcaggccaggatcgagccgggggagaggaggatgccggctgtgtgcgggcgcgtggcagaccatctgaggaagaactgcaggactctcgagtctatgtttcatctctatag

SEQ ID NO: 313986 - DNA, 6491 bp, Artificial Sequence
  derived and/or modified sequence
atggttaacgaaaacactcggatgtacatcccggaagagaatcaccagggctctaattatggatccccccgaccagcacacgccaatatgaatgccaatgcagctgctggattagcacccgagcacatacccactcccggagctgcactgagctggcaggctgccattgatgctgctagacaggccaagttgatggggtctgcaggtaatgccacaatctcaactgtgagctcaacgcagaggaaacggcaacaatatggaaagcctaaaaagcagggatcaacgactgccactcgaccccctagagctctcctttgcctcaccttaaaaaaccccatacgacgagcctgtatttcaatagtggagtggaaaccattcgaaattattatactgctcactatatttgccaattgcgttgccctcgccatttacataccattccctgaagatgacagtaatgctacgaattctaatctggagcgagtggagtacctcttcctcataattttcaccgtggaagcctttttgaaagttatagcgtacgggttactcttccaccctaatgcatacttgcggaacggctggaatttgttggattttatcatcgtcgtcgtcggcttgttctctgccatcctggagcaggcaaccaaagccgatggggctaatgctctcggcggaaaaggagctgggtttgatgtcaaagctctgagagcctttagagttttgcgccctctgaggctcgtgagcggggttccctcccttcaggtggtgctgaacagtattataaaggcaatggttcctctacttcatatagcactgctagtcctctttgtgataatcatctatgccataattggtctggagctttttatggggaagatgcacaagacctgctacaaccaggaggggatcgcggatgttcctgctgaagacgacccctccccttgtgcgcttgaaaccggacacgggcgtcagtgtcaaaatgggaccgtgtgtaaaccaggctgggatggccctaagcatggcatcacaaactttgataacttcgccttcgccatgctcacagtattccagtgcatcaccatggaaggatggaccgacgtgctctactgggtgaatgatgctgtggggagggactggccgtggatttatttcgttacgcttatcatcattgggtccttctttgtgctgaacctcgtgctgggtgtactgagcggagaattcagtaaggagagagagaaagctaaggccaggggcgatttccagaaattgagagaaaagcagcaacttgaggaggatctaaagggctacttggactggatcacccaggctgaggacattgatcctgaaaacgaagatgagggcatggacgaagaaaaaccaagaaaccgagggacccccgctgggatgttggatcagaaaaagggcaagtttgcatggttttcgcactccactgaaacccatgtgtccatgccgacatcggagaccgagtcagtcaacactgaaaatgtcgccggaggggatatcgaaggcgagaactgtggcgctcgtctggcccatcggatctccaagagtaaattttcaagatactggcgcaggtggaacagattttgccgcaggaagtgtagggcggctgttaaaagtaacgttttttactggttggtaattttcctcgtgtttctgaatactctaactatagcctctgagcactacaatcagcccaactggctgacggaagtccaggacaccgccaataaggccttattggctcttttcaccgctgagatgctgttgaaaatgtattcactcggcctacaggcctacttcgtctcactctttaacagatttgactgtttcgtggtgtgtggaggaattctggaaaccatccttgtggaaactaaaatcatgtcccccttggggatctccgtcctgaggtgcgtgcgtctgctgaggatattcaaaattacacgctattggaattcgttaagcaacctggtcgcatcactgttgaacagcgtacggagcattgctagcctactgctcctgctgttcctcttcatcataatcttctcactgttgggaatgcaactctttgggggaaaatttaacttcgatgagatgcagacaaggcgatcaacatttgacaatttccctcagagcctcttaaccgtcttccagattcttacaggcgaggactggaatagcgtcatgtacgacggcatcatggcgtatgggggaccttccttccccggaatgttggtctgtatctacttcatcattctgttcatctgtgggaattatattctgctcaatgtgttcctggctattgccgtggacaacctggccgatgctgaatcgcttacatccgcccagaaggaggaggaggaggagaaggaacgcaaaaagctggctagaacagccagtccagagaagaagcaggagctggtggagaaaccggcagtaggggaatcaaaagaagagaagattgaactgaagtctatcacggctgatggagagtcccctccagctactaagatcaacatggatgaccttcaaccaaatgagaatgaggacaagagcccttaccccaatccagaaacaacaggcgaagaggatgaagaagagcctgaaatgccagttggtccccgacccagacccctgtccgagctgcatctgaaagaaaaggcagtacccatgcccgaggcgagcgcattctttatcttctccagtaacaatcggtttagattgcagtgtcaccgtatcgttaatgatacaatctttacgaacctgatcctctttttcatattactttcctcgatctcgctagccgctgaagatccagtgcagcatacaagcttcagaaaccacatcctcttttacttcgacatcgtgtttacaacaatctttaccatcgaaatagccctgaaaatgacagcatatggggcattcctccataaaggttcattttgtcgcaattactttaacattctggacttgctcgttgtgtcggtgagcctgatttctttcgggattcagagttcagccattaatgtggtcaaaattctgcgtgtgttacgcgtgcttagacccctccgggctattaacagggcaaaagggttaaagcacgtcgtgcagtgcgtttttgtcgctatcagaaccatcggcaacattgtcatcgtaacaactttacttcaatttatgttcgcatgtatcggggtgcagctcttcaaaggtaaattatacacctgctctgacagttcaaagcagactgaggccgagtgtaaaggaaattacattacgtataaagatggcgaagtcgaccacccaatcatccagcccaggtcctgggagaacagcaagttcgactttgataatgtcctagcagccatgatggccctattcactgtctcgactttcgagggctggcctgaattactgtaccggagcattgactcacatacagaggacaagggcccaatttacaattaccgggtggaaattagcatctttttcattatttacatcattattattgcattttttatgatgaacatttttgtgggctttgtcatagtcacttttcaggaacagggagaacaggagtataaaaattgcgaactagataagaaccagcgtcagtgcgtcgagtatgctctcaaagctaggcccttaaggaggtatatacccaaaaaccagcaccaatacaaggtctggtatgtagttaatagcacctactttgagtacctcatgttcgtgttgattctgctcaacactatctgcctggccatgcagcactacggccagagctgtctgttcaagatcgctatgaacattcttaatatgctttttacagggctgttcactgtagaaatgatactgaagctgatcgcctttaaaccaaagcactacttctgcgacgcctggaataccttcgatgctctgattgttgttgggtctatcgtggacattgccattacggaagttaatcccgctgaacatactcaatgctctccctcgatgaatgccgaagagaactccaggatcagcataaccttctttaggctgttccgcgttatgagattagtcaagctgctttccaggggggagggcataaggactcttctgtggaccttcatcaagtcctttcaggcacttccttatgtcgccctgctgatcgtgatgctgttcttcatttacgctgtgatcgggatgcaagttttcgggaaaatcgcgttgaacgatacgacagagatcaataggaacaacaatttccaaacctttccccaagctgtcctcctgttatttagatgcgccactggcgaggcgtggcaggatattatgttagcgtgtatgcctggaaagaaatgcgctcctgagagcgaaccctccaattctaccgagggagagactccatgtggctcaagttttgccgtcttctactttatcagcttttacatgctgtgcgctttcttaataattaatttgttcgtagcagtcattatggacaactttgactacctaacccgggattggtcaattctcggcccacatcacctggatgagtttaaaagaatatgggctgagtatgatcctgaagcgaaggggaggatcaagcaccttgacgtggttaccctcctacgtaggatccagccacccctgggctttggaaagctttgtcctcaccgtgtggcctgcaaacgcctagtgagcatgaatatgcccctgaatagtgatgggacagttatgtttaatgcgacgttgtttgccttggtgcgcacggccctgaggatcaaaacggagggcaatctcgaacaggcaaacgaggagttgagggcaatcattaaaaaaatctggaagcgcacttctatgaagctgctcgaccaagtggtgccacctgccggagacgatgaggtgaccgtcggtaagttttacgccacatttctgatccaggagtactttcgtaaatttaagaagcgtaaggagcaggggttggtgggaaagccgagccagcggaacgcactcagcctacaagccggattgcgcacgctccatgacatcggccctgaaattcgccgagcaatatctggcgacctgactgcagaagaggaactggacaaggctatgaaggaagccgtatccgcggctagcgaagatgatatctttcggagggccggaggtctctttggtaaccacgtgagttattaccaaagcgacggcagaagtgcctttccccagactttcaccacccaacggcctctacacatcaataaagcagggagctcacagggggacacggaatcaccgagtcacgaaaagcttgtggactccaccttcaccccatcaagttactcctccacaggttctaacgccaacatcaataatgcaaataatacggccttggggcgtctgcccagacccgcaggatacccctccactgtgagcacagtggaaggtcacggcccacccctatcccccgcaataagagtgcaggaggtcgcctggaaactctcaagtaaccggtgtcacagcagagagtcacaggcagccatggctgggcaggaggagactagccaggacgagacatacgaggtaaagatgaatcatgatactgaggcttgtagcgaacctagtctgttgtcaaccgagatgctatcctatcaggacgacgagaatcgccagcttaccctacccgaggaagacaaacgcgacataaggcaaagtccaaaacggggttttcttcggtctgcttcactgggccgtcgggctagcttccatctggagtgcctgaagcgccagaaagatagagggggagacatttcccagaaaacagtgcttcctctgcacctggtgcaccatcaagctctggctgttgccggtctaagtcctttattacagcgtagtcacagtcctgcatcctttccgaggccctttgccacacccccagccactcctgggtctagggggtggccaccccagccagtacccacactgagactagagggggtcgagtcctccgaaaagctgaactcttcattcccaagtatccattgcgggagttgggcggagaccactcccggtggtgggggatctagcgcggcaagaagagtccgtcccgtttcacttatggtgcccagtcaagctggggcaccaggccgtcagttccacgggagcgcctcctctctggtggaggccgttctgatttctgagggtctcgggcaatttgctcaggaccctaaattcattgaagtcactactcaagagttggctgacgcctgcgatatgactattgaggagatggaatctgcggcagacaacattttgagcgggggtgctccacaatcacccaatggggctctcctgccttttgtaaattgtagagatgccggacaggaccgagcaggaggagaagaggacgccggatgcgtgcgcgctcgagggcgacccagcgaagaggaactgcaggactctagagtttatgtgtcatcacttta

SEQ ID NO: 313987 - DNA, 6968 bp, Artificial Sequence
  derived and/or modified sequence
ggaaggggcccggatgtactgaggatgcgttacagtttcactcgaggaggcagtagtggaaaggagcagtttttggggtttgatgccataatgggaatcaggtaatcgtcggcggggaagaagaaacgctgcagaccacggcttcctcgaatcttgcgcgaaagccgccggcctcggaggagggattaatccagacccgccggggggtgttttcacatttcttcctcttcgtggctgctcctcctattaaaaccatttttggtccatggtcaatgagaatacgaggatgtacattccagaggaaaaccaccaaggttccaactatgggagcccacgccccgcccatgccaacatgaatgccaatgcggcagcggggctggcccctgagcacatccccaccccgggggctgccctgtcgtggcaggcggccatcgacgcagcccggcaggctaagctgatgggcagcgctggcaatgcgaccatctccacagtcagctccacgcagcggaagcggcagcaatatgggaaacccaagaagcagggcagcaccacggccacacgcccgccccgagccctgctctgcctgaccctgaagaaccccatccggagggcctgcatcagcattgtcgaatggaaaccatttgaaataattattttactgactatttttgccaattgtgtggccttagcgatctatattccctttccagaagatgattccaacgccaccaattccaacctggaacgagtggaatatctctttctcataatttttacggtggaagcgtttttaaaagtaatcgcctatggactcctctttcaccccaatgcctacctccgcaacggctggaacctactagattttataattgtggttgtggggctttttagtgcaattttagaacaagcaaccaaagcagatggggcaaacgctctcggagggaaaggggccggatttgatgtgaaggcgctgagggccttccgcgtgctgcgccccctgcggctggtgtccggagtcccaagtctccaggtggtcctgaattccatcatcaaggccatggtccccctgctgcacatcgccctgcttgtgctgtttgtcatcatcatctacgccatcatcggcttggagctcttcatggggaagatgcacaagacctgctacaaccaggagggcatagcagatgttccagcagaagatgacccttccccttgtgcgctggaaacgggccacgggcggcagtgccagaacggcacggtgtgcaagcccggctgggatggtcccaagcacggcatcaccaactttgacaactttgccttcgccatgctcacggtgttccagtgcatcaccatggagggctggacggacgtgctgtactgggtcaatgatgccgtaggaagggactggccctggatctattttgttacactaatcatcatagggtcattttttgtacttaacttggttctcggtgtgcttagcggagagttttccaaagagagggagaaggccaaggcccggggagatttccagaagctgcgggagaagcagcagctagaagaggatctcaaaggctacctggattggatcactcaggccgaagacatcgatcctgagaatgaggacgaaggcatggatgaggagaagccccgaaacagaggcactccggcgggcatgcttgatcagaagaaagggaagtttgcttggtttagtcactccacagaaacccatgtgagcatgcccaccagtgagaccgagtccgtcaacaccgaaaacgtggctggaggtgacatcgagggagaaaactgcggggccaggctggcccaccggatctccaagtcaaagttcagccgctactggcgccggtggaatcggttctgcagaaggaagtgccgcgccgcagtcaagtctaatgtcttctactggctggtgattttcctggtgttcctcaacacgctcaccattgcctctgagcactacaaccagcccaactggctcacagaagtccaagacacggcaaacaaggccctgctggccctgttcacggcagagatgctcctgaagatgtacagcctgggcctgcaggcctacttcgtgtccctcttcaaccgctttgactgcttcgtcgtgtgtggcggcatcctggagaccatcctggtggagaccaagatcatgtccccactgggcatctccgtgctcagatgcgtccggctgctgaggattttcaagatcacgaggtactggaactccttgagcaacctggtggcatccttgctgaactctgtgcgctccatcgcctccctgctccttctcctcttcctcttcatcatcatcttctccctcctggggatgcagctctttggaggaaagttcaactttgatgagatgcagacccggaggagcacattcgataacttcccccagtccctcctcactgtgtttcagatcctgaccggggaggactggaattcggtgatgtatgatgggatcatggcttatggcggcccctcttttccagggatgttagtctgtatttacttcatcatcctcttcatctgtggaaactatatcctactgaatgtgttcttggccattgctgtggacaacctggctgatgctgagagcctcacatctgcccaaaaggaggaggaagaggagaaggagagaaagaagctggccaggactgccagcccagagaagaaacaagagttggtggagaagccggcagtgggggaatccaaggaggagaagattgagctgaaatccatcacggctgacggagagtctccacccgccaccaagatcaacatggatgacctccagcccaatgaaaatgaggataagagcccctaccccaacccagaaactacaggagaagaggatgaggaggagccagagatgcctgtcggccctcgcccacgaccactctctgagcttcaccttaaggaaaaggcagtgcccatgccagaagccagcgcgtttttcatcttcagctctaacaacaggtttcgcctccagtgccaccgcattgtcaatgacacgatcttcaccaacctgatcctcttcttcattctgctcagcagcatttccctggctgctgaggacccggtccagcacacctccttcaggaaccatattctgttttattttgatattgtttttaccaccattttcaccattgaaattgctctgaagatgactgcttatggggctttcttgcacaagggttctttctgccggaactacttcaacatcctggacctgctggtggtcagcgtgtccctcatctcctttggcatccagtccagtgcaatcaatgtcgtgaagatcttgcgagtcctgcgagtactcaggcccctgagggccatcaacagggccaaggggctaaagcatgtggttcagtgtgtgtttgtcgccatccggaccatcgggaacatcgtgattgtcaccaccctgctgcagttcatgtttgcctgcatcggggtccagctcttcaagggaaagctgtacacctgttcagacagttccaagcagacagaggcggaatgcaagggcaactacatcacgtacaaagacggggaggttgaccaccccatcatccaaccccgcagctgggagaacagcaagtttgactttgacaatgttctggcagccatgatggccctcttcaccgtctccaccttcgaagggtggccagagctgctgtaccgctccatcgactcccacacggaagacaagggccccatctacaactaccgtgtggagatctccatcttcttcatcatctacatcatcatcatcgccttcttcatgatgaacatcttcgtgggcttcgtcatcgtcacctttcaggagcagggggagcaggagtacaagaactgtgagctggacaagaaccagcgacagtgcgtggaatacgccctcaaggcccggcccctgcggaggtacatccccaagaaccagcaccagtacaaagtgtggtacgtggtcaactccacctacttcgagtacctgatgttcgtcctcatcctgctcaacaccatctgcctggccatgcagcactacggccagagctgcctgttcaaaatcgccatgaacatcctcaacatgctcttcactggcctcttcaccgtggagatgatcctgaagctcattgccttcaaacccaagcactatttctgtgatgcatggaatacatttgacgccttgattgttgtgggtagcattgttgatatagcaatcaccgaggtaaacccagctgaacatacccaatgctctccctctatgaacgcagaggaaaactcccgcatctccatcaccttcttccgcctgttccgggtcatgcgtctggtgaagctgctgagccgtggggagggcatccggacgctgctgtggaccttcatcaagtccttccaggccctgccctatgtggccctcctgatcgtgatgctgttcttcatctacgcggtgatcgggatgcaggtgtttgggaaaattgccctgaatgataccacagagatcaaccggaacaacaactttcagaccttcccccaggccgtgctgctcctcttcaggtgtgccaccggggaggcctggcaggacatcatgctggcctgcatgccaggcaagaagtgtgccccagagtccgagcccagcaacagcacggagggtgaaacaccctgtggtagcagctttgctgtcttctacttcatcagcttctacatgctctgtgccttcctgatcatcaacctctttgtagctgtcatcatggacaactttgactacctgacaagggactggtccatccttggtccccaccacctggatgagtttaaaagaatctgggcagagtatgaccctgaagccaagggtcgtatcaaacacctggatgtggtgaccctcctccggcggattcagccgccactaggttttgggaagctgtgccctcaccgcgtggcttgcaaacgcctggtctccatgaacatgcctctgaacagcgacgggacagtcatgttcaatgccaccctgtttgccctggtcaggacggccctgaggatcaaaacagaagggaacctagaacaagccaatgaggagctgcgggcgatcatcaagaagatctggaagcggaccagcatgaagctgctggaccaggtggtgccccctgcaggtgatgatgaggtcaccgttggcaagttctacgccacgttcctgatccaggagtacttccggaagttcaagaagcgcaaagagcagggccttgtgggcaagccctcccagaggaacgcgctgtctctgcaggctggcttgcgcacactgcatgacatcgggcctgagatccgacgggccatctctggagatctcaccgctgaggaggagctggacaaggccatgaaggaggctgtgtccgctgcttctgaagatgacatcttcaggagggccggtggcctgttcggcaaccacgtcagctactaccaaagcgacggccggagcgccttcccccagaccttcaccactcagcgcccgctgcacatcaacaaggcgggcagcagccagggcgacactgagtcgccatcccacgagaagctggtggactccaccttcaccccgagcagctactcgtccaccggctccaacgccaacatcaacaacgccaacaacaccgccctgggtcgcctccctcgccccgccggctaccccagcacggtcagcactgtggagggccacgggccccccttgtcccctgccatccgggtgcaggaggtggcgtggaagctcagctccaacaggtgccactcccgggagagccaggcagccatggcgggtcaggaggagacgtctcaggatgagacctatgaagtgaagatgaaccatgacacggaggcctgcagtgagcccagcctgctctccacagagatgctctcctaccaggatgacgaaaatcggcaactgacgctcccagaggaggacaagagggacatccggcaatctccgaagaggggtttcctccgctctgcctcactaggtcgaagggcctccttccacctggaatgtctgaagcgacagaaggaccgagggggagacatctctcagaagacagtcctgcccttgcatctggttcatcatcaggcattggcagtggcaggcctgagccccctcctccagagaagccattcccctgcctcattccctaggccttttgccaccccaccagccacacctggcagccgaggctggcccccacagcccgtccccaccctgcggcttgagggggtcgagtccagtgagaaactcaacagcagcttcccatccatccactgcggctcctgggctgagaccacccccggtggcgggggcagcagcgccgcccggagagtccggcccgtctccctcatggtgcccagccaggctggggccccagggaggcagttccacggcagtgccagcagcctggtggaagcggtcttgatttcagaaggactggggcagtttgctcaagatcccaagttcatcgaggtcaccacccaggagctggccgacgcctgcgacatgaccatagaggagatggagagcgcggccgacaacatcctcagcgggggcgccccacagagccccaatggcgccctcttaccctttgtgaactgcagggacgcggggcaggaccgagccgggggcgaagaggacgcgggctgtgtgcgcgcgcggggtcgaccgagtgaggaggagctccaggacagcagggtctacgtcagcagcctgtagtgggcgctgccagatgcgggcttttttttatttgtttcaatgttcctaatgggttcgtttcagaagtgcctcactgttctcgtgacctggagttaaccggaacagcgtcttcattcatttctgttgggaccagacgcggagcctgggtgcgcgagccgccctccgggaggaaggcgcccggctgcgtctgcagaggcggggagaggaggcg

SEQ ID NO: 313988 - protein, 462 aa, Artificial Sequence
  derived and/or modified sequence
MAAPDGRVVSRPQRLGQGSGQGPKGSGACLHPLDSLEQKETQEQTSGQLVMLRKAQEFFQTCDAEGKGFIARKDMQRLHKELPLSLEELEDVFDALDADGNGYLTPQEFTTGFSHFFFSQNNPSQEDAGEQVAQRHEEKVYLSRGDEDLGDMGEDEEAQFRMLMDRLGAQKVLEDESDVKQLWLQLKKEEPHLLSNFEDFLTRIISQLQEAHEEKNELECALKRKIAAYDEEIQHLYEEMEQQIKSEKEQFLLKDTERFQARSQELEQKLLCKEQELEQLTQKQKRLEGQCTALHHDKHETKAENTKLKLTNQELARELERTSWELQDAQQQLESLQQEACKLHQEKEMEVYRVTESLQREKAGLLKQLDFLRERNKHLRDERDICFQKNKAAKANTAASRASWKKRSGSVIGKYVDSRGILRRWPQRDRGIPTLQYQTQRDLEDCKHEMKKICKAEVTLEM

SEQ ID NO: 313989 - protein, 118 aa, Artificial Sequence
  derived and/or modified sequence
  misc_feature (1)..(1): Xaa can be any naturally occurring amino acid
XEKEMEVYRVTESLQREKAGLLKQLDFLRERNKHLRDERDICFQKNKAAKANTAASRASWKKRSGSVIGKYVDSRGILRRWPQRDRGIPTLQYQTQRDLEDCKHEMKKICKAEVTLEM

SEQ ID NO: 313990 - DNA, 357 bp, Artificial Sequence
  derived and/or modified sequence
taagagaaggagatggaggtgtatcgggtgaccgagagcctacagagagagaaggctgggcttttgaaacagctcgactttctgagggagcggaataaacacttaagggacgaacgcgatatctgtttccaaaaaaacaaggctgccaaagcaaataccgcagcatcccgagcttcatggaagaagagaagcgggtctgtgattgggaaatacgtggactccaggggcattttgcgacgctggccgcagagggatcgaggcatccccacactgcagtaccagactcagcgtgatttggaagactgtaagcacgagatgaagaagatctgcaaggccgaggtcaccctagaaatgtag

SEQ ID NO: 313991 - DNA, 357 bp, Artificial Sequence
  derived and/or modified sequence
tgagagaaggagatggaggtgtacagagtgacagagagcctgcagcgggagaaggccggcctgctgaagcagctggacttcctgcgggagaggaacaagcacctgagagatgagcgggacatctgcttccagaagaacaaggccgccaaggccaacacagctgccagccgggcctcctggaagaagaggagcggcagcgtcatcggcaagtatgtggacagccggggcatcctgcggcgctggccccagagggaccggggcatccccaccctgcagtaccagacccagagggacctggaggactgcaagcatgagatgaagaagatctgcaaggccgaggtgaccctggagatgtag

SEQ ID NO: 313992 - DNA, 357 bp, Artificial Sequence
  derived and/or modified sequence
tgagagaaggagatggaggtgtaccgggtgaccgagagcctgcagcgcgaaaaggcagggctcttgaaacaactggacttccttagggagaggaacaaacacctaagagatgaacgcgacatttgttttcagaagaacaaggcggcgaaggccaacacagcggccagccgcgcaagctggaagaagcggagtggctcagtgattggaaaatatgtggattctcgaggaattctaagaaggtggccccaacgcgatcggggtatccccaccctgcagtaccagacacagagggacttggaggattgcaaacacgaaatgaaaaagatctgcaaggcggaggtaactctagaaatgtag

SEQ ID NO: 313993 - DNA, 357 bp, Artificial Sequence
  derived and/or modified sequence
tgagagaaggaaatggaggtctacagggtgaccgagtccctacagcgggaaaaagcaggcttactcaaacagctcgacttcctgagagagcgtaataagcatctgcgtgatgaaagggatatttgcttccagaagaacaaagccgctaaagcgaacaccgcagcctcacgggctagctggaagaaacggtctggatctgtgattggaaaatacgtggactcccggggtatactgcggaggtggccccagcgcgacagaggcattcctactcttcagtatcaaacccaaagggacctcgaagattgtaaacacgagatgaagaaaatctgcaaggccgaggtgacattagagatgtag

SEQ ID NO: 313994 - DNA, 357 bp, Artificial Sequence
  derived and/or modified sequence
tgagagaaggagatggaggtgtacagagtgaccgagagcctgcagagagagaaggccggcctgctgaagcagctggacttcctgagagagagaaacaagcacctgagagacgagagagacatctgcttccagaagaacaaggccgccaaggccaacaccgccgccagcagagccagctggaagaagagaagcggcagcgtgatcggcaagtacgtggacagcagaggcatcctgagaagatggccccagagagacagaggcatccccaccctgcagtaccagacccagagagacctggaggactgcaagcacgagatgaagaagatctgcaaggccgaggtgaccctggagatgtag

SEQ ID NO: 313995 - DNA, 630 bp, Artificial Sequence
  derived and/or modified sequence
agagaaggagatggaagtgtaccgtgtgacggagagtctacagcgtgagaaggccgggctcctcaagcagctggatttcctaagggaaaggaacaagcaccttcgggatgaacgggacatatgttttcagaaaaataaggcagccaaggcaaacacagctgcttccagggcaagttggaaaaagagatctggctctgtgataggcaaatatgtggacagcagagggattcttaggagatggccacagagagatagaggcatcccgactcttcagtatcagacccagagagaccttgaagactgcaagcatgaaatgaaaaagatatgcaaagcggaagtgactctggagatgtaaatcagctcatcagtaaaacctttgggcctgatcatcatgaattcttgttctaaatagctgaataatgagatacaatttgggagccaaatctctgcaatagtggttggcctgttggttcctcagaatggaatggattgattgattgattcagcagacgtttactgattacctactgtgtaccagacattcttttgagttctgtaaagcctccaaaaataaattagacatgaggtcctaccattaatctccattattaaatgctcacttaataaata

SEQ ID NO: 313996 - DNA, 480 bp, Artificial Sequence
  derived and/or modified sequence
atgatgcttgtaggatttctcggatgctgtggagcagtccaagaatcccagtgcatgcttggactgtttttcggcttcctgttggtgatctttgctatagaaattgctgctgccatttgggggtactcccacaaggatgaggtcattaaagaggtgcaggaattctacaaagacacctataataagttgaagacgaaagacgagccccagcgcgagacacttaaggcaatccactatgccctcaattgctgcggactagccggcggtgtggaacaatttataagcgacatttgtcccaaaaaggatgttctcgagacattcaccgttaagtcctgtcccgatgcgatcaaggaggtctttgacaacaaatttcatataatcggagctgtaggcataggcatcgccgttgtgatgatttttggtatgatcttcagcatgattttgtgttgcgcgatcaggagaaatagagagatggtgtag

SEQ ID NO: 313997 - DNA, 426 bp, Artificial Sequence
  derived and/or modified sequence
atgctgggcttattcttcggctttctgctagtgatctttgctattgaaattgccgctgccatatggggctattcccacaaagacgaggttattaaggaagttcaggaattctacaaggacacttacaacaagctgaagactaaagacgagcctcaaagagagacactcaaagccatccactatgcccttaactgctgcggcttggcaggtggcgtagaacagttcatcagtgacatctgtccgaagaaggacgttttggaaactttcacagtcaaaagttgccccgatgcgattaaggaggtctttgacaacaagtttcatataatcggagctgtcggcattggaattgccgtggtcatgatctttggaatgatattttctatgattctatgctgcgccattaggagaaatagagaaatggtttag

SEQ ID NO: 313998 - DNA, 480 bp, Artificial Sequence
  derived and/or modified sequence
atgatgctggtgggcttcctgggctgctgcggggctgtgcaggagagccagtgcatgctgggcctcttcttcggcttcctgctggtgatctttgccattgaaattgctgctgccatctggggctacagccacaaggatgaggtgatcaaggaggtgcaggagttctacaaggacacctacaacaagctgaagaccaaggatgagccccagcgggagaccctgaaggccatccactacgccctgaactgctgcggcctggccggcggcgtggagcagttcatcagtgacatctgccccaagaaggatgtgctggagaccttcaccgtgaagagctgcccagatgccatcaaggaggtgtttgacaacaagttccacatcattggagctgtgggcatcggcattgctgtggtgatgatcttcggcatgatcttctccatgatcctgtgctgtgccatcagaagaaaccgggagatggtgtag

SEQ ID NO: 313999 - DNA, 426 bp, Artificial Sequence
  derived and/or modified sequence
atgctgggcctcttcttcggcttcctgctggtgatctttgccattgaaattgctgctgccatctggggctacagccacaaggatgaggtgatcaaggaggtgcaggagttctacaaggacacctacaacaagctgaagaccaaggatgagccccagcgggagaccctgaaggccatccactacgccctgaactgctgcggcctggccggcggcgtggagcagttcatcagtgacatctgccccaagaaggatgtgctggagaccttcaccgtgaagagctgcccagatgccatcaaggaggtgtttgacaacaagttccacatcattggagctgtgggcatcggcattgctgtggtgatgatcttcggcatgatcttctccatgatcctgtgctgtgccatcagaagaaaccgggagatggtgtag

SEQ ID NO: 314000 - DNA, 480 bp, Artificial Sequence
  derived and/or modified sequence
atgatgctggtgggcttcctgggctgctgcggcgccgtgcaggagtcccagtgcatgttgggcctgttttttggtttcctcctcgtgattttcgcaatagagatagccgctgccatctgggggtactcacacaaagacgaggttattaaagaagtccaggagttctataaagatacttataataagctgaagacaaaggacgagcctcaacgtgagaccctaaaggccatacattacgccctgaactgctgcggcctggccggtggtgtggagcaattcatctctgacatatgtcccaagaaagacgtgctggaaactttcacagtcaaatcctgccccgatgcgattaaggaagtgtttgacaacaagtttcacatcataggcgccgttgggataggcatagccgtggtgatgatctttgggatgattttttcgatgattctctgctgcgccatccgcaggaatcgagaaatggtgtag

SEQ ID NO: 314001 - DNA, 426 bp, Artificial Sequence
  derived and/or modified sequence
atgctgggcctgttcttcggcttcctgctggtgatcttcgccatcgaaatcgccgctgctatatggggatactcacacaaagatgaggtcatcaaggaagtgcaggagttttacaaggatacatataataagctcaaaactaaggacgaaccccagagggagaccctgaaggccattcattatgccctcaattgctgcggtcttgcaggaggtgtcgagcagtttatatcagatatttgtcctaaaaaggacgtgcttgaaacttttactgtgaaatcgtgtcccgacgcgatcaaggaggtgttcgataataagttccacataattggagccgtaggaatcggaatcgccgtagtgatgatttttggaatgatcttcagcatgatcttatgctgcgcgatcaggcggaatcgggaaatggtgtag

SEQ ID NO: 314002 - DNA, 480 bp, Artificial Sequence
  derived and/or modified sequence
atgatgctcgtaggcttcctgggctgctgcggagcagtgcaggagagccaatgtatgcttgggttgtttttcggcttccttctggtaatcttcgctattgaaattgctgcagccatctggggctacagccataaggacgaggtcattaaagaagtccaggagttctataaggatacatataataaattgaagacgaaagacgaacctcagcgcgaaacgttgaaggctattcactacgcactgaactgttgtggcctagctggcggtgtggagcagttcattagcgacatttgtccaaagaaagacgtgctggaaaccttcaccgtgaaatcctgtcccgacgcaatcaaagaagtcttcgacaacaagttccacattattggtgccgttggcattgggatagcggtggtgatgatatttggcatgatttttagtatgatcctgtgctgcgccatcagaaggaacagggaaatggtgtag

SEQ ID NO: 314003 - DNA, 426 bp, Artificial Sequence
  derived and/or modified sequence
atgctggggttgttctttggattcctgcttgtgatctttgcaattgagattgccgcagccatctgggggtacagtcacaaagacgaagtcattaaggaggtgcaggaattctacaaggacacgtacaataagttaaagaccaaagacgagccgcagagggagaccctgaaggcaatccactacgccctaaactgctgcggccttgcgggtggggtagagcagttcatctcagatatttgcccaaaaaaggacgtactggagacgttcaccgtcaaatcctgcccagacgctataaaggaagtctttgacaataagttccacatcatcggcgctgtcggaattggcatcgcagtcgttatgattttcggtatgatttttagcatgatcctgtgttgcgcaattaggagaaatagagaaatggtctag

SEQ ID NO: 314004 - DNA, 915 bp, Artificial Sequence
  derived and/or modified sequence
agccgcctgcatctgtatccagcgccaggtcccgccagtcccagctgctgcggggctgtgcaggagtcccagtgcatgctgggactgttcttcggcttcctcttggtgatattcgccattgaaatagctgcggccatctggggatattcccacaaggatgaggtgattaaggaagtccaggagttttacaaggacacctacaacaagctgaaaaccaaggatgagccccagcgggaaacgctgaaagccatccactatgcgttgaactgctgtggtttggctgggggcgtggaacagtttatctcagacatctgccccaagaaggacgtactcgaaaccttcaccgtgaagtcctgtcctgatgccatcaaagaggtcttcgacaataaattccacatcatcggcgcagtgggcatcggcattgccgtggtcatgatatttggcatgatcttcagtatgatcttgtgctgtgctatccgcaggaaccgcgagatggtctagagtcagcttacatccctgagcaggaaagtttacccatgaagattggtgggattttttgtttgtttgttttgttttgtttgttgtttgttgtttgtttttttgccactaattttagtattcattctgcattgctagataaaagctgaagttactttatgtttgtcttttaatgcttcattcaatattgacatttgtagttgagcggggggtttggtttgctttggtttatattttttcagttgtttgtttttgcttgttatattaagcagaaatcctgcaatgaaaggtactatatttgctagactctagacaagatattgtacataaaagaatttttttgtctttaaatagatacaaatgtctatcaactttaatcaagttgtaacttatattgaagacaatttgatacataat

SEQ ID NO: 314005 - DNA, 480 bp, Artificial Sequence
  derived and/or modified sequence
atgatgctggtgggcttcctgggctgctgcggcgccgtgcaggagagccagtgcatgctgggcctgttcttcggcttcctgctggtgatcttcgccatcgagatcgccgccgccatctggggctacagccacaaggacgaggtgatcaaggaggtgcaggagttctacaaggacacctacaacaagctgaagaccaaggacgagccccagagagagaccctgaaggccatccactacgccctgaactgctgcggcctggccggcggcgtggagcagttcatcagcgacatctgccccaagaaggacgtgctggagaccttcaccgtgaagagctgccccgacgccatcaaggaggtgttcgacaacaagttccacatcatcggcgccgtgggcatcggcatcgccgtggtgatgatcttcggcatgatcttcagcatgatcctgtgctgcgccatcagaagaaacagagagatggtgtag

SEQ ID NO: 314006 - DNA, 426 bp, Artificial Sequence
  derived and/or modified sequence
atgctgggcctgttcttcggcttcctgctggtgatcttcgccatcgagatcgccgccgccatctggggctacagccacaaggacgaggtgatcaaggaggtgcaggagttctacaaggacacctacaacaagctgaagaccaaggacgagccccagagagagaccctgaaggccatccactacgccctgaactgctgcggcctggccggcggcgtggagcagttcatcagcgacatctgccccaagaaggacgtgctggagaccttcaccgtgaagagctgccccgacgccatcaaggaggtgttcgacaacaagttccacatcatcggcgccgtgggcatcggcatcgccgtggtgatgatcttcggcatgatcttcagcatgatcctgtgctgcgccatcagaagaaacagagagatggtgtag

SEQ ID NO: 314007 - DNA, 4748 bp, Artificial Sequence
  derived and/or modified sequence
agcaacagagtttagactgtctttgcttcatcatctgaaggtaaaattttccagatacggcagacggctttcagagtacaataaacagggaatgagaactatttacatggaagtttctttctcatgatgcggtggagaagcctcggccacttggttctgccagatgttcctggggttactgtaaatgggaaggacaggcagagctaaacaaggtttatcatttaaaagtgcctgtgtgaagtcacttttgctggaaaactgcagcttgggagctttctttgtattcacatcccactcttctgtcaagtacactttaccctgaccttatgagtggatgaagatacctcagttgtctgactttgccaattgcttaatttcagaatttaaaaaggggaaagaaaaacatcctgctaaaatatgaacatctgagtgtcttattttccaacatcgtcaatagctgtgagcgtcagcattaaatattctcccaaggagtgccatgatattgaagtcactttattaataacagctgtatctgcaaaacagtcaagagactcggacgttgaaagccagagatgacactgagcatgcttttattgcggcctaccatctttaagtgggacatattgattgatgagtgattgcctgtccatacactctctcatcatcctgttccttggattggacttcactaagcaatttatcactcaccttcagacttacatgtgggagttttcacaacagtagttttggaatcattagaacttggattgatttcatcatttaacagaaacaaacagcccaaattactttatcaccatggctttgaacgttgccccagtcagagatacaaaatggctgacattagaagtctgcagacagtttcaaagaggaacatgctcacgctctgatgaagaatgcaaatttgctcatccccccaaaagttgtcaggttgaaaatggaagagtaattgcctgctttgattccctaaagggccgttgttcgagagagaactgcaagtatcttcaccctccgacacacttaaaaactcaactagaaattaatggaaggaacaatttgattcagcaaaaaactgcagcagcaatgcttgcccagcagatgcaatttatgtttccaggaacaccacttcatccagtgcccactttccctgtaggtcccgcgatagggacaaatacggctattagctttgctccttacctagcacctgtaacccctggagttgggttggtcccaacggaaattctgcccaccacgcctgttattgttcccggaagtccaccggtcactgtcccgggctcaactgcaactcagaaacttctcaggactgacaaactggaggtatgcagggagttccagcgaggaaactgtgcccggggagagaccgactgccgctttgcacaccccgcagacagcaccatgatcgacacaagtgacaacaccgtaaccgtttgtatggattacataaaggggcgttgcatgagggagaaatgcaaatattttcaccctcctgcacacttgcaggccaaaatcaaagctgcgcagccgcggccgcggccacagtcatgactcagtcgactgccaaagcaatgaagcgacctctcgaagcaactgtagacctggcctttccccctggtgctcttcatcctttaccaaagagacaagcacttgaaaaaagcaatggtaccagcgcggtctttaaccccagcgtcttgcactaccagcaggctctcaccagcgcacagttgcagcaacacgccgcgttcattccaacagggtcagttttgtgcatgacacccgctaccagtattgtacccatgatgcacagcgctacgtccgccactgtctctgcagcaacaactcctgcaacaagtgtccccttcgcagcaacagccacagccaatcagataattctgaaataatcagcagaaacggaatggaatgccaagaatctgcattgagaataactaaacattgttactgtacatactatcctgtttcctcctcaatagaattgccacaaactgcatgctaaataaagatgtagttcttctggacagaccacaactctaagaagctagtgctgctatctcatatatgagtattaaatatggtatgcttagtatattccaacctaagatagttaactacctgagaccagctgtgatgtttaaagacataaaggataaagtttacttttaaagggtttctaaacatagtttctgtcctaggaatattgtcttatctccataactatagctgatgcagaaagtccagccagtttactcatttcgattcagaatatttcaaatttagcaataaacaattagcattagttaaaaaagaaacatattccaagggcaggttcgattctagctctaattactgtcatgtcatttacccactggatcaaagggtatgtttcacttcttgacaatataaatgctgcagcaaagatgagaggtgaagtaaaaccgatacctgtcctgcaggtctaaaatttgaatggaaattcaagcacaagtactggggacacatcaaagtgtggtgtttggtttgcctggagatgccacgttgaatcatgtgattctagattaacattaaatagattgaaaaagaaactttgcacggtatgagcttcataccccaccaaacaaagtcttgaaggtattattttacaagtatatttttaaagttgttttataagagagactttgtagaagtgcctagattttgccagacttcatccagcttgacaagattgagaggcccatgccaacagtctaatctaagagattagtctttcaaactcaccatccagttgcctgttacagaataactcttcttaactaaaaacctagtcaaacaaggaagctgtaggtgaggagatctgtataatattctaatttaagtaagtttgagtttagtcactgcaaatttgactgtgactttaatctaaattactatgtaaacaaaaagtagatagtttcactttttaaaaaatccattactgttttgcatttcaaaagttggattaaagggttgtaactgactacagcatggaaaaaaatagttcttttaattctttcaccttaaagcatattttatgtctcaaaagtataaaaaactttaatacaagtacatacatattatatatacacatacatatatatactatatatggatgaaacatattttaatgttgtttacttttttaaatacttggttgatcttcaaggtaatagcgatacaattaaattttgttcagaaagtttgttttaaagtttattttaagcactatcgtaccaaatatttcatatttcacattttatatgttgcacatagcctatacagtacctacatagtttttaaattattgtttaaaaaacaaaacagctgttataaatgaatattatgtgtaattgtttcaaacatccattttctttgtgaacatattagtgattgaagtattttgacttttgagattgaatgtaaaatattttaaatttgggatcatcgcctgttctgaaaactagatgcaccaaccgtatcattatttgtttgaggaaaaaaagaaatctgcattttaattcatgttggtcaaagtcgaattactatctatttatcttatatcgtagatctgataaccctatctaaaagaaagtcacacgctaaatgtattcttacatagtgcttgtatcgttgcatttgttttaatttgtggaaaagtattgtatctaacttgtattactttggtagtttcatctttatgtattattgatatttgtaattttctcaactataacaatgtagttacgctacaacttgcctaaaacattcaaacttgttttcttttttctgtttttttctttgttaattcatttaaactcattgaaaacatagtatacattactaaaaggtaaattatgggaatcactgaaatatttttgtagattaattgttgtaacattgtctttcttttttttcttttgtttcatgattttgatttttaaaattattagcacacaactattttcagccctttaataatggagcatcaaaaacatcacctgtaaccccaagcaaatatagaagactgtattttttactatgatatccattttccagaattgtgattacaatatgcaaagagtcataaatatgccatttacaataaggaggaggcaaggcaaatgcatagatgtacaaatatatgtacaacagattttgctttttatttatttataatgtaattttatagaataattctgggatttgagaggatctaaaactatttttctgtataaatattatttgccaaaagtttgtttatattcagaagtctgactatgatgaataaatcttaaatgctttgtttaattaaaaaacaaaaatcaccaatatccaagacatgaagatatcagttcaacaaatactgtagttaagagactaactctccacttgtatgggaactacatttcactcttggttttcaggatataacagcacttcaccgaaatattctttcagccataccactggtaacatttctactaaatctttctgtaacacttaaagaattccctcattcattaccttacagtgtaaacaggagtctaatttgtatcaatactatgttttggttgtaatattcagttcactcacccaatgtacaaccaatgaaataaaagaagcatttaaaaggaaaaaaaaaaaaaaaaaaaaaaaaaaaa

SEQ ID NO: 314008 - DNA, 318 bp, Artificial Sequence
  derived and/or modified sequence
atgtccctaaagtcctggcaccctcagagtaaaaccaaaagagtcggcgctagtgaggggaatcctcagtggggttcagggtctatggaggctcccttgctgtcgtctttccttcccccactggccagtgaggccgagttgaccggcaatacatggttcctccatcgctgctcgtgcatattaaatctcgaggaaagcatggatagcgactggggtgcttggtggggtgtatccctccctcggcgggctccattcttgatttatgggtccgatgggccctggtgtacccaggccggctttcccggatggggtcactag

SEQ ID NO: 314009 - DNA, 342 bp, Artificial Sequence
  derived and/or modified sequence
atgcacaccgtgccctggggcgtggacttcgccctgatcgccatgaagaacttcatcagccagtggtcgtccttcttcaggtccgggatgggaaagagccagaccggttatctgcccagggttccccgcgagcaaccctttgctgcagggctgtggggattggctgccgcattgtcccatctcgcggtcaatgctttcagcctcttatgtccacccttgccgaaaacaagctgttcactgaatccccacggtgatgttgaatctaggaaggtacacgcaacagtggagaacgtctacatttcagcattgaatctgccttgggtacgggtgaaatggtgctag

SEQ ID NO: 314010 - DNA, 450 bp, Artificial Sequence
  derived and/or modified sequence
atgaaagaagcactgcaccagatcgtggtcaggtgcagtgaactggttagcagcacatcattgcccaggctgtctgttagtcgcctgcaaggaccccctgactctcagccactcggcacgcttggccagggaggctggaaattgttagggatcgttgggagcctggcacctgaaaccctgggaggcctgggcactgagtttggtccttgtacccatccactcccattcgatatggttcgcgagcgtgaaagggacgatgaactgcggcaggggtggctgctgcagtgccctcagtgtgccagaaccctgttgtgccattgcggtcccttcttaactcccccatcccaaacctctagctcaggttttcaactatgttctctaaagccatcaggcagtttagtcaccgcgacagagccattgagtaacttcgcattctcatattttccgtag

SEQ ID NO: 314011 - DNA, 255 bp, Artificial Sequence
  derived and/or modified sequence
gtgctgcacagcttcaccgacgccatcttcgacgagtggatgaagagattcaacccccccgccgacgcctggccccaggagctggcccccatcggccacaacagaatgtacaacatggtgcccttcttcccccccgtgaccaacgaggagctgttcctgaccagcgaccagctgggctacagctacgccatcgacctgcccgacttccaggccaacttcatctgcagctacctggtgagcgtgcaccaggagtag

SEQ ID NO: 314012 - DNA, 255 bp, Artificial Sequence
  derived and/or modified sequence
gtcttgcactcatttactgacgccatatttgatgaatggatgaagcgcttcaatcctcccgcggatgcatggccacaagagttagccccaattggccacaatcgcatgtacaacatggttccattctttcccccagtgaccaatgaggagctgtttctgacctcggatcagctgggatattcgtacgccatagatcttcccgacttccaggccaatttcatatgtagctatctggtgtccgttcatcaggaatag

SEQ ID NO: 314013 - DNA, 255 bp, Artificial Sequence
  derived and/or modified sequence
gtgctgcacagcttcacagatgccatctttgatgagtggatgaagcgcttcaaccccccagcagatgcctggccccaggagctggcccccatcggccacaacaggatgtacaacatggtgcccttcttcccccctgtgaccaatgaggagctgttcctgaccagtgaccagctgggctacagctatgccatcgacctgcctgacttccaggccaacttcatctgcagctacctggtgtctgtgcaccaggagtag

SEQ ID NO: 314014 - DNA, 255 bp, Artificial Sequence
  derived and/or modified sequence
gtgctgcacagcttcaccgacgccatcttcgacgagtggatgaagcggtttaaccctcccgctgacgcttggccgcaggagctggctcctattggccataaccgcatgtacaatatggtacccttcttcccacccgtgacaaacgaagagctgttcctcacatctgatcagcttggatattcttacgccattgatctccccgacttccaagctaatttcatatgttcttacctcgtatctgtccaccaggaatag

SEQ ID NO: 314015 - DNA, 255 bp, Artificial Sequence
  derived and/or modified sequence
gtcctacactcgtttacggatgccattttcgacgagtggatgaaaagatttaatccacctgctgacgcctggccacaagagttggcacccattgggcacaaccggatgtataacatggttccattcttcccgcctgtgaccaatgaggagctgttcctcacaagtgatcaactgggctacagctatgctattgatctgcctgatttccaagctaacttcatctgcagctacctggtgagcgtccaccaggaatag

SEQ ID NO: 314016 - DNA, 274 bp, Artificial Sequence
  derived and/or modified sequence
gttcttcattcctttactgatgccatctttgatgagtggatgaaaagatttaatcctcctgcagatgcctggcctcaggagctggcccctattggtcacaatcggatgtacaacatggttcctttcttccctccagtgactaatgaagaactctttttaacctcagaccaacttggctacagctatgccatcgatctgccagatttccaggcaaatttcatctgctcatatctggtttctgtgcatcaggagtgagactgaagttctagggcgt

SEQ ID NO: 314017 - protein, 1738 aa, Artificial Sequence
  derived and/or modified sequence
MLKRKQSSRVEAQPVTDFGPDESLSDNADILWINKPWVHSLLRICAIISVISVCMNTPMTFEHYPPLQYVTFTLDTLLMFLYTAEMIAKMHIRGIVKGDSSYVKDRWCVFDGFMVFCLWVSLVLQVFEIADIVDQMSPWGMLRIPRPLIMIRAFRIYFRFELPRTRITNILKRSGEQIWSVSIFLLFFLLLYGILGVQMFGTFTYHCVVNDTKPGNVTWNSLAIPDTHCSPELEEGYQCPPGFKCMDLEDLGLSRQELGYSGFNEIGTSIFTVYEAASQEGWVFLMYRAIDSFPRWRSYFYFITLIFFLAWLVKNVFIAVIIETFAEIRVQFQQMWGSRSSTTSTATTQMFHEDAAGGWQLVAVDVNKPQGRAPACLQKMMRSSVFHMFILSMVTVDVIVAASNYYKGENFRRQYDEFYLAEVAFTVLFDLEALLKIWCLGFTGYISSSLHKFELLLVIGTTLHVYPDLYHSQFTYFQVLRVVRLIKISPALEDFVYKIFGPGKKLGSLVVFTASLLIVMSAISLQMFCFVEELDRFTTFPRAFMSMFQILTQEGWVDVMDQTLNAVGHMWAPVVAIYFILYHLFATLILLSLFVAVILDNLELDEDLKKLKQLKQSEANADTKEKLPLRLRIFEKFPNRPQMVKISKLPSDFTVPKIRESFMKQFIDRQQQDTCCLLRSLPTTSSSSCDHSKRSAIEDNKYIDQKLRKSVFSIRARNLLEKETAVTKILRACTRQRMLSGSFEGQPAKERSILSVQHHIRQERRSLRHGSNSQRISRGKSLETLTQDHSNTVRYRNAQREDSEIKMIQEKKEQAEMKRKVQEEELRENHPYFDKPLFIVGREHRFRNFCRVVVRARFNASKTDPVTGAVKNTKYHQLYDLLGLVTYLDWVMIIVTICSCISMMFESPFRRVMHAPTLQIAEYVFVIFMSIELNLKIMADGLFFTPTAVIRDFGGVMDIFIYLVSLIFLCWMPQNVPAESGAQLLMVLRCLRPLRIFKLVPQMRKVVRELFSGFKEIFLVSILLLTLMLVFASFGVQLFAGKLAKCNDPNIIRREDCNGIFRINVSVSKNLNLKLRPGEKKPGFWVPRVWANPRNFNFDNVGNAMLALFEVLSLKGWVEVRDVIIHRVGPIHGIYIHVFVFLGCMIGLTLFVGVVIANFNENKGTALLTVDQRRWEDLKSRLKIAQPLHLPPRPDNDGFRAKMYDITQHPFFKRTIALLVLAQSVLLSVKWDVEDPVTVPLATMSVVFTFIFVLEVTMKIIAMSPAGFWQSRRNRYDLLVTSLGVVWVVLHFALLNAYTYMMGACVIVFRFFSICGKHVTLKMLLLTVVVSMYKSFFIIVGMFLLLLCYAFAGVVLFGTVKYGENINRHANFSSAGKAITVLFRIVTGEDWNKIMHDCMVQPPFCTPDEFTYWATDCGNYAGALMYFCSFYVIIAYIMLNLLVAIIVENFSLFYSTEEDQLLSYNDLRHFQIIWNMVDDKREGVIPTFRVKFLLRLLRGRLEVDLDKDKLLFKHMCYEMERLHNGGDVTFHDVLSMLSYRSVDIRKSLQLEELLAREQLEYTIEEEVAKQTIRMWLKKCLKRIRAKQQQSCSIIHSLRESQQQELSRFLNPPSIETTQPSEDTNANSQDNSMQPETSSQQQLLSPTLSDRGGSRQDAADAGKPQRKFGQWRLPSAPKPISHSVSSVNLRFGGRTTMKSVVCKMNPMTDAASCGSEVKKWWTRQLTVESDESGDDLLDI

SEQ ID NO: 314018 - protein, 668 aa, Artificial Sequence
  derived and/or modified sequence
MLKRKQSSRVEAQPVTDFGPDESLSDNADILWINKPWVHSLLRICAIISVISVCMNTPMTFEHYPPLQYVTFTLDTLLMFLYTAEMIAKMHIRGIVKGDSSYVKDRWCVFDGFMVFCLWVSLVLQVFEIADIVDQMSPWGMLRIPRPLIMIRAFRIYFRFELPRTRITNILKRSGEQIWSVSIFLLFFLLLYGILGVQMFGTFTYHCVVNDTKPGNVTWNSLAIPDTHCSPELEEGYQCPPGFKCMDLEDLGLSRQELGYSGFNEIGTSIFTVYEAASQEGWVFLMYRAIDSFPRWRSYFYFITLIFFLAWLVKNVFIAVIIETFAEIRVQFQQMWGSRSSTTSTATTQMFHEDAAGGWQLVAVDVNKPQGRAPACLQKMMRSSVFHMFILSMVTVDVIVAASNYYKGENFRRQYDEFYLAEVAFTVLFDLEALLKIWCLGFTGYISSSLHKFELLLVIGTTLHVYPDLYHSQFTYFQVLRVVRLIKISPALEDFVYKIFGPGKKLGSLVVFTASLLIVMSAISLQMFCFVEELDRFTTFPRAFMSMFQILTQEGWVDVMDQTLNAVGHMWAPVVAIYFILYHLFATLPPSLIRDLCGTQDACPSCLPLQPPNPLPGSQTLARLTHQALTTPPGMRSSQLFSKISLLLGICVAWESILGSLSLSHNLR

SEQ ID NO: 314019 - DNA, 71 bp, Artificial Sequence
  derived and/or modified sequence
cactacaaaccacgctcaaggcaataaaagaacacaaacaaatggaaaaacattccatgctcatggatggg

SEQ ID NO: 314020 - DNA, 6816 bp, Artificial Sequence
  derived and/or modified sequence
ccgcccgcgggcaccatgacagctctgagcgctggggttacagactgtggttttgtgcttgctcaccaaagctaacctcagcatgctcaaaaggaagcagagttccagggtggaagcccagccagtcactgactttggtcctgatgagtctctgtcggataatgctgacatcctctggattaacaaaccatgggttcactctttgctgcgcatctgtgccatcatcagcgtcatttctgtttgtatgaatacgccaatgaccttcgagcactatcctccacttcagtatgtgaccttcactttggatacattattgatgtttctctacacggcagagatgatagcaaaaatgcacatccggggcattgtcaagggggatagttcctatgtgaaagatcgctggtgtgtttttgatggatttatggtcttttgcctttgggtttctttggtgctacaggtgtttgaaattgctgatatagttgatcagatgtcaccttggggcatgttgcggattccacggccactgattatgatccgagcattccggatttatttccgatttgaactgccaaggaccagaattacaaatattttaaagcgatcgggagaacaaatatggagtgtttccatttttctacttttctttctacttctttatggaattttaggagttcagatgtttggaacatttacttatcactgtgttgtaaatgacacaaagccagggaatgtaacctggaatagtttagctattccagacacacactgctcaccagagctagaagaaggctaccagtgcccacctggatttaaatgcatggaccttgaagatctgggacttagcaggcaagagctgggctacagtggctttaatgagataggaactagtatattcaccgtctatgaggccgcctcacaggaaggctgggtgttcctcatgtacagagcaattgacagctttccccgttggcgttcctacttctatttcatcactctcattttcttcctcgcctggcttgtgaagaacgtgtttattgctgttatcattgaaacatttgcagaaatcagagtacagtttcaacaaatgtggggatcgagaagcagcactacctcaacagccaccacccagatgtttcatgaagatgctgctggaggttggcagctggtagctgtggatgtcaacaagccccagggacgcgccccagcctgcctccagaaaatgatgcggtcatccgttttccacatgttcatcctgagcatggtgaccgtggacgtgatcgtggcggctagcaactactacaaaggagaaaacttcaggaggcagtacgacgagttctacctggcggaggtggcttttacagtactttttgatttggaagcacttctgaagatatggtgtttgggatttactggatatattagctcatctctccacaaattcgaactactactcgtaattggaactactcttcatgtatacccagatctttatcattcacaattcacgtactttcaggttctccgagtagttcggctgattaagatttcacctgcattagaagactttgtgtacaagatatttggtcctggaaaaaagcttgggagtttggttgtatttactgccagcctcttgattgttatgtcagcaattagtttgcagatgttctgctttgtcgaagaactggacagatttactacgtttccgagggcatttatgtccatgttccagatcctcacccaggaaggatgggtggacgtaatggaccaaactctaaatgctgtgggacatatgtgggcacccgtggttgccatctatttcattctctatcatctttttgccactctgatcctcctgagtttgtttgttgctgttattttggacaacttagaacttgatgaagacctaaagaagcttaaacaattaaagcaaagtgaagcaaatgcggacaccaaagaaaagctccctttacgcctgcgaatctttgaaaaatttccaaacagacctcaaatggtgaaaatctcaaagcttccttcagattttacagttcctaaaatcagggagagttttatgaagcagtttattgaccgccagcaacaggacacatgttgcctcctgagaagcctcccgaccacctcttcctcctcctgcgaccactccaaacgctcagcaattgaggacaacaaatacatcgaccaaaaacttcgcaagtctgttttcagcatcagggcaaggaaccttctggaaaaggagaccgcagtcactaaaatcttaagagcttgcacccgacagcgcatgctgagcggatcatttgaggggcagcccgcaaaggagaggtcaatcctcagcgtgcagcatcatatccgccaagagcgcaggtcactaagacatggatcaaacagccagaggatcagcaggggaaaatctcttgaaactttgactcaagatcattccaatacagtgagatatagaaatgcacaaagagaagacagtgaaataaagatgattcaggaaaaaaaggagcaagcagagatgaaaaggaaagtgcaagaagaggaactcagagagaaccacccatacttcgataagccactgttcattgtcgggcgagaacacaggttcagaaacttttgccgggtggtggtccgagcacgcttcaacgcatctaaaacagaccctgtcacaggagctgtgaaaaatacaaagtaccatcaactttatgatttgctgggattggtcacttacctggactgggtcatgatcatcgtaaccatctgctcttgcatttccatgatgtttgagtccccgtttcgaagagtcatgcatgcacctactttgcagattgctgagtatgtgtttgtgatattcatgagcattgagcttaatctgaagattatggcagatggcttatttttcactccaactgctgtcatcagggacttcggtggagtaatggacatatttatatatcttgtgagcttgatatttctttgttggatgcctcaaaatgtacctgctgaatcgggagctcagcttctaatggtccttcggtgcctgagacctctgcgcatattcaaactggtgccccagatgaggaaagttgttcgagaacttttcagcggcttcaaggaaatttttttggtctccattcttttgctgacattaatgctcgtttttgcaagctttggagttcagctttttgctggaaaactggccaagtgcaatgatcccaacattattagaagggaagattgcaatggcatattcagaattaatgtcagtgtgtcaaagaacttaaatttaaaattgaggcctggagagaaaaaacctggattttgggtgccccgtgtttgggcgaatcctcggaactttaatttcgacaatgtgggaaacgctatgctggcgttgtttgaagttctctccttgaaaggctgggtggaagtgagagatgttattattcatcgtgtggggccgatccatggaatctatattcatgtttttgtattcctgggttgcatgattggactgaccctttttgttggagtagttattgctaatttcaatgaaaacaaggggacggctttgctgaccgtcgatcagagaagatgggaagacctgaagagccgactgaagatcgcacagcctcttcatcttccgcctcgcccggataatgatggttttagagctaaaatgtatgacataacccagcatccattttttaagaggacaatcgcattactcgtcctggcccagtcggtgttgctctctgtcaagtgggacgtcgaggacccggtgaccgtacctttggcaacaatgtcagttgttttcaccttcatctttgttctggaggttaccatgaagatcatagcaatgtcgcctgctggcttctggcaaagcagaagaaaccgatacgatctcctggtgacgtcgcttggcgttgtatgggtggtgcttcactttgccctcctgaatgcatatacttacatgatgggcgcttgtgtgattgtatttaggtttttctccatctgtggaaaacatgtaacgctaaagatgctcctcttgacagtggtcgtcagcatgtacaagagcttctttatcatagtaggcatgtttctcttgctgctgtgttacgcttttgctggagttgttttatttggtactgtgaaatatggggagaatattaacaggcatgcaaatttttcttcggctggaaaagctattaccgtactgttccgaattgtcacaggtgaagactggaacaagattatgcatgactgtatggttcagcctccgttttgtactccagatgaatttacatactgggcaacagactgtggaaattatgctggggcacttatgtatttctgttcattttatgtcatcattgcctacatcatgctaaatctgcttgtagccataattgtggagaatttctccttgttttattccactgaggaggaccagcttttaagttacaatgatcttcgccactttcaaataatatggaacatggtggatgataaaagagagggggtgatccccacgttccgcgtcaagttcctgctgcggctactgcgtgggaggctggaggtggacctggacaaggacaagctcctgtttaagcacatgtgctacgaaatggagaggctccacaatggcggcgacgtcaccttccatgatgtcctgagcatgctttcataccggtccgtggacatccggaagagcttgcagctggaggaactcctggcgagggagcagctggagtacaccatagaggaggaggtggccaagcagaccatccgcatgtggctcaagaagtgcctgaagcgcatcagagctaaacagcagcagtcgtgcagtatcatccacagcctgagagagagtcagcagcaagagctgagccggtttctgaacccgcccagcatcgagaccacccagcccagtgaggacacgaatgccaacagtcaggacaacagcatgcaacctgagacaagcagccagcagcagctcctgagccccacgctgtcggatcgaggaggaagtcggcaagatgcagccgacgcagggaaaccccagaggaaatttgggcagtggcgtctgccctcagccccaaaaccaataagccattcagtgtcctcagtcaacttacggtttggaggaaggacaaccatgaaatctgtcgtgtgcaaaatgaaccccatgactgacgcggcttcctgcggttctgaagttaagaagtggtggacccggcagctgactgtggagagcgacgaaagtggggatgaccttctggatatttaggtggatgtcaatgtagatgaatttctagtggtggaaaccgttttctaataatgtccttgattgtccagtgagcaatctgtaattgatctataactgaattccagcttgtcacaagatgtttataaattgattttcatcctgccacagaaaggcataagctgcatgtatgatgggttactatcaatcattgctcaaaaaaatttttgtataatgacagtactgataatattagaaatgataccgcaagcaaatgtatatcacttaaaaatgtcatatattctgtctgcgtaaactaaggtatatattcatatgtgctctaatgcagtattatcaccgccccgcaaaagagtgctaagcccaaagtggctgatatttagggtacaggggttatagctttagttcacatctttcccatttccactagaaatatttctcttgagagaatttattatttatgattgatctgaaaaggtcagcactgaacttatgctaaaatgatagtagttttacaaactacagattctgaattttaaaaagtatcttctttttctcgtgttatatttttaaatatacacaagacatttggtgaccagaacaagttgatttctgtcctcagttatgttaatgaaactgttgcctccttctaagaaaattgtgtgtgcaagcaccaggcaaagaaatggactcaggatgcttagcggtttaaaacaaacctgtagataaatcacttgagtgacatagttgcgcaaagatgttaagtttcttaagaaaccttttaataactgagtttagcaaaaagaataaaactatatagctcaatttatttaaaaaaatctttgcatgtgtgatgttatcattggcttcatttcttacccaaggtatgtctgttttgccataaatcagcagagtcatttcattctgggtgatcctaacacaccattgctacgttagatttgaaatgacatctctgttaaaagaatcttctatggaaataatggtgccctgcaaaatcttcctttgaactcacaggttagggatcacacaacttacttaatcgttttttgtttttgttttttttccttatatgtcaatggcccatgtcctccgggaaaattagaaaagcaaaatgattacaaagtgctgttagatttcttgtgctgggccagccaagtagaagtggacttgacttggacctttaactattttattacagattggacatttgctgttcagatgttttttaacagagggattatctcagaatcctgtgacctccaggttgttttataatctatttttctctatttaacattcctcagatagataggcaaataggacattccttctgtgtcacagaagtatcgtggtagtggcagtctacagtttatatgattcattgtaactatgagataaagaacaaccagtcatgtggccaaaaggattagatttgatttgatgttcacttggagtttactttttgtacatacaagataaaataaatattggatttgtaaaat

SEQ ID NO: 314021 - DNA, 5217 bp, Artificial Sequence
  derived and/or modified sequence
atgctgaaacgcaaacagtcttcaagagtggaagctcagccagtgaccgattttggacctgatgaaagtctgtcagacaacgccgacatcctctggattaacaagccttgggtgcactctctcctgcgcatttgcgccatcatctctgtcatctccgtttgtatgaacacgccaatgaccttcgaacattatcctcccttacaatatgtgactttcactctcgataccctgctgatgttcttatacaccgctgagatgattgcgaagatgcacatccgtgggattgtcaaaggagattcatcctacgtgaaagatcggtggtgtgtgtttgatggctttatggtgttctgcctgtgggtcagtctcgtgcttcaggttttcgagattgccgacattgtggaccagatgagtccatggggcatgcttaggattcctagacctttgatcatgatccgcgcattcaggatttacttcagattcgaacttcccaggacaaggatcacgaacatcttgaagcgcagcggcgagcaaatttggtcagtgagtatctttctgctcttcttcctactgctatacgggattttaggcgttcaaatgtttggcactttcacctaccattgcgtagtaaacgataccaagccaggcaatgttacttggaactccctcgccatacctgacacacattgttctcctgagctggaggaagggtatcagtgtccccccggatttaagtgtatggatctggaagacctaggattatctcgccaggaactgggctatagcggattcaatgaaattgggactagcatctttacagtgtacgaagccgccagccaggagggctgggtttttctgatgtaccgagctatcgactctttcccgcgatggcggtcatacttctactttataaccctcattttctttctggcatggttggttaagaacgtcttcatcgcggtgattatcgagacttttgcggaaataagagttcagttccaacagatgtggggaagccgcagttctactacgagtaccgccactacgcagatgttccatgaagacgcagccgggggttggcagctcgtagccgttgacgtcaacaagccccagggccgggctccagcctgtctgcagaagatgatgcgctcatccgtgtttcacatgtttatccttagtatggtaaccgtggatgtgatcgtcgcggcctcaaattactacaagggtgaaaattttcggagacagtacgatgagttctacctcgcggaggtcgcttttacggtgttgtttgatctcgaggccctgctgaagatttggtgtctcggttttactggctatattagttctagcttacacaaattcgagctgcttcttgtcataggcaccaccttgcatgtctaccccgacctttatcattctcaatttacttatttccaagttcttcgagtcgtcaggctgattaagatttcccctgccctggaagattttgtctataagatcttcgggcctggaaagaaactcggaagtctggtggtgtttacagctagcttgctaattgtcatgagtgccatttcccttcaaatgttttgtttcgtcgaggaattagaccgatttacaaccttcccacgcgcattcatgtctatgttccaaatcctgacccaggaaggctgggttgatgtgatggatcaaacccttaatgccgtgggccatatgtgggctccggtggtcgctatatacttcatcctctatcacttgtttgccaccctgatcctgttatccctgtttgtggccgtgattttggataatctggaactggatgaagacctgaagaagctaaaacaattgaagcagtctgaagccaacgctgacacaaaagaaaaactgccgctgagactccgcattttcgagaaatttcctaaccggcctcagatggtgaaaataagcaagctgcccagtgatttcactgtaccgaagattcgggagtcatttatgaagcagttcatcgatagacagcagcaggacacttgctgtctgcttaggtctttgcccaccactagctcttcatcttgcgatcattccaaacgatccgccatcgaggataacaaatacatcgatcagaagcttcgcaaatcagttttttccatcagagctaggaatctgctagagaaggaaaccgctgtaacaaaaattcttagagcctgtactcgccaaagaatgctatctggcagttttgaaggtcagcctgccaaggagcgatccatcctaagtgttcagcatcatattcgtcaggaaaggcggtcattgaggcacggctcaaatagtcagagaattagtcgcgggaaaagccttgagactctgacccaggatcatagcaacacagtgcggtaccgaaacgcacagagagaagacagcgagatcaaaatgatacaggagaagaaagaacaagccgaaatgaaacggaaggtacaggaagaagaactacgggagaaccatccctactttgacaagcccctctttatagttggtagagaacaccggttcagaaacttttgtcgcgtggtggtgcgcgctcggttcaatgcatcaaagacagatccagtaaccggcgccgttaaaaataccaaataccaccagctgtacgacctgttgggtcttgtaacctatctcgactgggtgatgatcattgtgaccatttgctcctgcatctcaatgatgttcgagtccccgtttcgccgggtgatgcacgctcccactctacagattgcggaatacgtcttcgtgatctttatgtccatcgagctcaatctgaagatcatggccgacggacttttcttcacccccacggctgtgatcagggattttgggggggtgatggacatttttatttacctggtgagcctgatctttctgtgctggatgcctcagaacgtccccgcagagagcggagcacaactgctgatggtcctgaggtgtctccgacctttacggatttttaagcttgtgccacagatgcggaaagtggtacgcgaattgtttagtggctttaaggagatcttcctggtcagtatcctgctccttaccctaatgctggtgttcgcctccttcggggtgcagctgtttgccggcaagctggcaaaatgcaacgaccctaacattatccgcagggaggactgtaacggcatctttcgtatcaacgtgagcgtcagtaaaaacctgaatctcaagctccggcctggggaaaaaaagcccggcttttgggtgccacgagtttgggcaaacccccgcaactttaacttcgacaatgtcggcaacgctatgctcgcactttttgaggtcctgtccctgaaaggatgggtggaagtgagggacgtgatcatccaccgggtcggccccatccacggaatctacatacacgtctttgtatttctaggttgcatgatcggcctgactctctttgtgggcgtagtcattgcaaatttcaacgagaataagggaacagcccttctcacagtggatcagcggagatgggaggacctgaaatcgcgtctgaaaattgcccagcccctacacttgccacccagaccagacaacgacggattccgggccaaaatgtacgacattacacagcacccatttttcaagaggaccattgctctcctcgtgttggcccagagcgtgctgttgtcagttaagtgggacgtagaagacccagtgaccgtccctctcgccactatgagcgttgtattcacctttatattcgtcctcgaggtcaccatgaagattatcgccatgagccccgccggcttctggcaaagtcgtaggaatcggtacgacctgctggttacctctttaggggtggtatgggtggtcctgcatttcgctttgctgaatgcctacacatacatgatgggcgcctgtgtgatagtgttccgcttctttagcatctgcggcaaacacgtcactctcaaaatgctcctcctcacggtcgtagtgagcatgtataagtccttctttatcatcgtggggatgttcctgctcttactgtgctacgcattcgcgggcgtcgtcctattcggtacagttaaatacggtgaaaatataaacagacatgccaacttcagctctgccggcaaagctattaccgtgctgtttcgcatcgttacgggagaagactggaataagatcatgcatgattgcatggtgcaaccccccttctgcacccccgacgagtttacatattgggctacagattgtggcaactacgccggggcccttatgtacttttgttcattctatgtgataattgcctacatcatgctgaatttacttgtcgccattattgtggagaacttttccctcttctattcaaccgaggaggatcagctgctgtcatacaacgatctccggcacttccagatcatttggaacatggtggacgacaaaagggaaggagtcatcccaacatttcgggtcaaatttctgttacggttgcttcgcggccgcctggaggtggatctggataaggataagttactgtttaagcacatgtgttatgaaatggagagattacacaatggaggcgacgtcacattccacgacgtgctatcaatgctgtcgtacagaagcgtggacatcaggaagagtctccagctggaggagctgttagctagagagcagctggagtacaccatagaggaagaagtggctaaacagaccattcgcatgtggcttaagaaatgtttgaaacgtatacgagccaaacagcaacaatcatgcagcattatccacagtctgcgggagagccagcagcaagagttgtcccgattcctgaacccaccctcgatcgagacaactcagccttcagaggacacgaatgctaacagccaggataactctatgcagcctgaaacaagttcccagcagcagttgctaagcccaactctgagcgaccgaggcggcagccggcaggatgccgctgatgcgggcaagccccaaagaaagtttggtcaatggcgcctgccttccgcacccaaacccatttctcattcagtaagttctgttaatctccggtttgggggtagaaccacgatgaagtctgtggtgtgcaagatgaaccctatgacagatgcagcatcctgcggcagcgaagtcaagaagtggtggacgcgtcagctaacggtcgagtccgacgaatctggcgatgatttactcgacatatag

SEQ ID NO: 314022 - DNA, 5217 bp, Artificial Sequence
  derived and/or modified sequence
atgctgaagaggaagcagagcagccgggtggaggcccagcctgtgacagactttggaccagatgagagcctgagtgacaatgctgacatcctgtggatcaacaagccctgggtgcacagcctgctgcgcatctgtgccatcatcagcgtcatctctgtgtgcatgaacacccccatgacctttgagcactacccacccctgcagtatgtgaccttcaccctggacaccctgctgatgttcctgtacacagctgagatgattgccaagatgcacatccggggcatcgtgaagggggacagcagctatgtgaaggaccgctggtgtgtgtttgatggcttcatggtgttctgcctgtgggtgtccctggtgctgcaggtgtttgaaattgctgacatcgtggaccagatgagcccctggggcatgctgcgcatcccccggcccctcatcatgatccgggccttccgcatctacttccgctttgagctgcccaggacccgcatcaccaacatcctgaagaggtctggagagcagatctggagcgtgtccatcttcctgctcttcttcctgctgctgtatggcatcctgggcgtgcagatgtttggcaccttcacctaccactgtgtggtgaatgacaccaagccaggaaatgtgacctggaacagcctggccatcccagacacccactgcagccctgagctggaggagggctaccagtgccccccaggcttcaagtgcatggacctggaggacctgggcctgagccggcaggagctgggctacagcggcttcaatgagatcggcaccagcatcttcaccgtgtatgaggccgccagccaggagggctgggtgttcctgatgtaccgggccatcgacagcttcccccgctggaggagctacttctacttcatcaccctcatcttcttcctggcctggctggtgaagaatgtgttcatcgctgtgatcatcgagacctttgctgagatccgggtgcagttccagcagatgtggggcagccgcagcagcaccaccagcacagccaccacccagatgtttcatgaagatgctgctgggggctggcagctggtggccgtggatgtgaacaagccccagggccgggccccagcctgcctgcagaagatgatgaggagcagcgtcttccacatgttcatcctgtccatggtgacagtggatgtgattgtggccgccagcaactactacaagggggagaacttccggcggcagtatgatgagttctacctggccgaggtggccttcaccgtgctgtttgacctggaggccctgctgaagatctggtgcctgggcttcaccggctacatcagcagcagcctgcacaagtttgagctgctgctggtgattggcaccaccctgcacgtgtacccagacctgtaccacagccagttcacctacttccaggtgctgcgggtggtgcggctcatcaagatcagccctgccctggaggactttgtgtacaagatcttcggccctgggaagaagctgggcagcctggtggtgttcaccgccagcctgctgattgtgatgtctgccatcagcctgcagatgttctgctttgtggaggagctggaccgcttcaccaccttcccccgggccttcatgtccatgttccagatcctgacccaggagggctgggtggatgtgatggaccagaccctgaatgctgtgggccacatgtgggcccctgtggtggccatctacttcatcctgtaccacctgtttgccaccctcatcctgctgagcctgtttgtggccgtcatcctggacaacctggagctggatgaggacctgaagaagctgaagcagctgaagcagagcgaggccaatgctgacaccaaggagaagctgcccctgcggctgcgcatctttgagaagttccccaaccggccccagatggtgaagatcagcaagctgcccagcgacttcaccgtgcccaagatccgggagagcttcatgaagcagttcatcgaccggcagcagcaggacacctgctgcctgctgcggagcctgcccaccaccagcagcagcagctgtgaccacagcaagaggtctgccatcgaggacaacaagtacatcgaccagaagctgaggaagagcgtcttcagcatccgggccaggaacctgctggagaaggagacagctgtgaccaagatcctgcgggcctgcacccggcagaggatgctgagcggcagctttgagggccagcctgccaaggagaggagcatcctgtctgtgcagcaccacatccggcaggagcggcgcagcctgcggcacggcagcaacagccagaggatcagccggggcaagagcctggagaccctgacccaggaccacagcaacacagtgcgctacagaaatgcccagagagaagattctgagatcaagatgatccaggagaagaaggagcaggccgagatgaagaggaaggtgcaggaggaggagctgcgggagaaccacccctactttgacaagcccctcttcatcgtgggccgggagcaccgcttcaggaacttctgccgggtggtggtgcgggcccgcttcaatgccagcaagacagatcctgtgactggagctgtgaagaacaccaagtaccaccagctgtatgacctgctgggcctggtgacctacctggactgggtgatgatcatcgtgaccatctgcagctgcatctccatgatgtttgagagccccttccggcgggtgatgcacgcccccaccctgcagattgctgaatatgtgtttgtgatcttcatgagcattgagctgaacctgaagatcatggctgatggcctcttcttcacccccacagctgtgatccgggactttggaggagtgatggacatcttcatctacctggtgtccctcatcttcctgtgctggatgccccagaatgtgcctgctgagagcggggcccagctgctgatggtgctgcgctgcctgcggcccctgcgcatcttcaagctggtgccccagatgaggaaggtggtgcgggagctgttcagcggcttcaaggagatcttcctggtgtccatcctgctgctgaccctgatgctggtgtttgccagctttggagtgcagctgtttgctgggaagctggccaagtgcaatgaccccaacatcatcagaagagaggactgcaatggcatcttccgcatcaacgtgtctgtgtccaagaacctgaacctgaagctgcggcctggagagaagaagccaggcttctgggtgccccgggtgtgggccaaccccaggaacttcaactttgacaacgtgggcaatgccatgctggccctgtttgaggtgctgagcctgaagggctgggtggaggtgagagatgtgatcatccaccgggtgggccccatccacggcatctacatccacgtgtttgtgttcctgggctgcatgattggcctgaccctgtttgtgggcgtggtgattgccaacttcaatgaaaataaaggaacagccctgctgactgtggaccagaggcgctgggaggacctgaagagccggctgaagatcgcccagcccctgcacctgccccccaggccagacaatgatggcttccgggccaagatgtatgacatcacccagcaccccttcttcaagaggaccatcgccctgctggtgctggcccagagcgtgctgctgtctgtgaagtgggatgtggaggaccctgtgacagtgcccctggccaccatgtctgtggtgttcaccttcatctttgtgctggaggtgaccatgaagatcatcgccatgagccctgctggcttctggcagagcagaagaaacagatatgacctgctggtgaccagcctgggcgtggtgtgggtggtgctgcactttgccctgctgaatgcctacacctacatgatgggcgcctgtgtgattgtgttccgcttcttcagcatctgtgggaagcacgtgaccctgaagatgctgctgctgactgtggtggtgtccatgtacaagagcttcttcatcatcgtgggcatgttcctgctgctgctgtgctacgcctttgctggggtggtgctgtttggaacagtgaagtacggggagaacatcaacagacatgccaacttcagcagcgctgggaaggccatcaccgtgctcttcagaattgtgactggagaggactggaacaagatcatgcatgactgcatggtgcagccccccttctgcaccccagatgagttcacctactgggccacagactgtggcaactatgctggggccctgatgtacttctgcagcttctacgtgatcatcgcctacatcatgctgaacctgctggtggccatcatcgtggagaacttcagcctcttctacagcacagaggaggaccagctgctgagctacaatgacctgcggcacttccagatcatctggaacatggtggatgacaagcgggagggcgtcatccccaccttccgggtgaagttcctgctgcggctgctgcggggccgcctggaggtggacctggacaaggacaagctgctcttcaagcacatgtgctatgagatggagcggctgcacaatggaggagatgtgaccttccatgatgtgctgtccatgctgagctacagatctgtggacatcaggaagagcctgcagctggaggagctgctggcccgggagcagctggagtacaccatcgaggaggaggtggccaagcagaccatccgcatgtggctgaagaagtgcctgaagaggatccgggccaagcagcagcagagctgcagcatcatccacagcctgcgggagagccagcagcaggagctgagccgcttcctgaaccccccatccattgagaccacccagcccagcgaggacaccaatgccaacagccaggacaacagcatgcagcctgagaccagcagccagcagcagctgctgagccccaccctgagtgacagaggaggcagccggcaggatgctgctgatgctgggaagccccagaggaagtttggccagtggaggctgcccagcgcccccaagcccatcagccacagcgtgtcctctgtgaacctgcgctttggaggccgcaccaccatgaagtctgtggtgtgcaagatgaaccccatgacagatgctgccagctgtggcagcgaggtgaagaagtggtggacccggcagctgactgtggagagtgatgaaagtggagatgacctgctggacatctag

SEQ ID NO: 314023 - DNA, 5217 bp, Artificial Sequence
  derived and/or modified sequence
atgctgaagcggaagcagagcagccgggtggaggcccagcccgtgacagatttcgggccagacgaatcactgagcgacaatgccgacattctgtggatcaataaaccttgggtacatagcttgctgcgcatttgtgccatcatttcggttatctccgtttgcatgaataccccaatgacttttgaacattacccaccattgcagtatgtcacatttacactggataccctgctgatgttcctctatacggctgaaatgatcgctaaaatgcatatcagaggaattgtgaaaggcgacagttcttacgtcaaggaccgctggtgtgtgttcgatgggttcatggtgttttgtctttgggtatcccttgtgctccaggtttttgagattgccgacatcgtggaccaaatgtcgccatggggcatgttgaggattccccggccgctgattatgatcagggcctttcggatatactttcgctttgagctgccccgcacccgcatcactaacattctaaagaggtcaggagaacagatctggtctgtgagtatcttcttgctgttctttctgctcctgtacgggattctcggcgtgcagatgttcggcactttcacatatcactgtgttgtgaatgatacaaaacctggtaacgtgacttggaatagtttggccatccctgacacccattgcagtccagagcttgaggaaggctaccagtgcccaccaggatttaaatgtatggatttggaggatctgggcctgtcccggcaggagctgggctatagcggctttaacgagatcggcactagcatctttactgtctacgaagctgcctcacaggaggggtgggtgttcctgatgtatcgcgcaattgactcttttccgcggtggagaagttatttttactttataaccctcatatttttcctagcttggttggtgaaaaacgtattcatcgcagtcataatcgaaacctttgcggagatccgtgtccagttccagcaaatgtggggcagccggtcttccaccacaagcacagccaccacccagatgtttcacgaagacgctgccggaggctggcagcttgtcgctgtggatgtgaataagccccagggaagagctcccgcctgtcttcagaaaatgatgcgatcttctgtcttccacatgttcatactgtccatggtgacagtagacgttatagtcgccgcctcaaactactacaaaggcgagaactttaggaggcagtacgacgagttttacctcgcagaggtggcttttacagtgttattcgatctcgaggccctgttgaaaatctggtgtttgggattcacgggttacatttcctcatccctccataagtttgagcttctgctcgtgatcggcactacactccacgtttacccggatctataccatagccagttcacttacttccaggtcctgcgtgtggtgaggctaatcaagatctctccagctctagaggacttcgtgtacaagattttcggccccggtaagaagttgggttcactggttgtgttcactgcctccctgttaatcgtaatgtcagcgatctctctccaaatgttctgtttcgtagaggaacttgataggttcactacattccctcgggcatttatgtcaatgttccagattctcacgcaggaaggctgggtggatgtgatggaccagactctgaatgctgtgggccatatgtgggccccagtggtggctatttacttcattctgtaccacctgtttgccaccttgattttgctctcgctgttcgtggctgtgattctggacaacctcgaactcgacgaagatttgaagaagctcaagcaactcaaacagtcagaagccaacgctgacactaaagaaaaactgcctctccgtttgagaatatttgagaagtttcccaacagacctcagatggttaagattagtaagctgcctagcgattttacagtgcccaaaatccgcgaaagtttcatgaagcagtttatagaccgccagcagcaggacacctgctgtctcctccgctcacttcctacaacttccagttcatcctgcgatcactccaagcgttctgctatagaggacaacaaatatattgaccagaaacttcgaaagtctgtgttttctatccgggctaggaatctgcttgaaaaagaaacggcagtgacaaagatactcagagcttgcacaaggcagagaatgctgtcaggctcattcgaagggcagccagccaaagaacgctctatactcagtgtgcagcaccacattcgtcaggagagacgctctctaaggcacggtagtaactcccagcggatttcacggggcaaatctctagaaacgctcacccaggaccacagtaacactgtccgatataggaacgcccagcgggaagatagcgagattaaaatgattcaggaaaagaaagagcaagccgagatgaaacggaaggttcaggaagaagaacttcgcgaaaaccacccatactttgataaacctctctttatcgtcggccgagagcaccgcttccgcaatttttgcagggttgtcgtaagagctcggttcaacgcttccaagactgacccagtgacaggcgcagtcaagaataccaagtatcaccaactgtacgacctgttgggtctagtgacatatctggactgggtcatgatcatcgtcacaatatgctcgtgcatttccatgatgtttgagtcaccttttcggcgggtgatgcacgcccccacccttcagattgcagaatacgtctttgtaatcttcatgtcaattgagctgaacctgaaaataatggccgacggccttttcttcaccccaacggcggtgattcgggattttggtggggtcatggacatctttatctatttggtgtccctgatctttctttgctggatgcctcagaacgtccccgcggaatctggggctcagttactcatggtcttgagatgcctgcgtcctctgcgcatcttcaagctcgtgccacagatgcgaaaggtggtgagagaactgtttagcggctttaaagagattttcctcgttagtatattgctcctgacccttatgctcgtcttcgcctcttttggagtgcagctcttcgcaggcaaacttgctaagtgcaacgatccaaacattatcagacgggaagactgcaatggcattttcagaatcaatgtctcagtctcgaagaatctgaaccttaagcttagacccggagaaaagaaacccggtttttgggtaccccgcgtgtgggcaaatcccagaaattttaactttgataatgtgggaaacgcaatgttagctctgtttgaggtgctgtctctgaaaggatgggtcgaagtgcgcgatgtgatcattcaccgcgtcggccccattcacgggatctacattcacgttttcgtcttccttggctgcatgattggcctgactctcttcgtcggcgtggtgatagcgaactttaacgaaaataaaggcactgcattgctcaccgttgatcagagacggtgggaggatctgaagagtaggctcaaaatcgcccaaccgcttcacctacctcctcgtccggacaacgacggttttagagccaagatgtatgacatcacccagcaccccttctttaagcggacgatcgccctgctcgtcctggcacaaagtgtgctactctctgtgaagtgggacgtcgaggatcccgttaccgtgcccctagcaaccatgtcagtcgtgtttacattcatcttcgtgctggaagttacaatgaagataatcgccatgtcgcccgctggtttttggcaaagtcgtaggaatcgctacgatctgctggtgactagcctgggagtggtgtgggtggttctgcattttgccttgttaaacgcatatacgtacatgatgggcgcatgtgtaatcgtgttccggttcttctctatctgtggtaagcacgtcacccttaagatgttgctgctgacagttgtggtatctatgtacaagtcattctttatcatcgtgggaatgttcttattacttctttgctatgcttttgcaggtgtggttctgtttggtacagttaaatacggcgaaaatattaacagacatgcgaacttttcttcagctggtaaagcaattaccgtcttatttcgcattgtgacaggggaggattggaacaagatcatgcacgactgtatggtgcagccccctttttgtactcccgatgagtttacctactgggctactgattgtggtaactacgccggggctctcatgtatttctgctcattctacgtgatcatcgcttacataatgctgaatctgctggttgctattattgtggagaatttcagcctgttttacagtaccgaggaggatcagctgctctcctataacgatctcaggcactttcagataatctggaacatggtagacgacaaacgcgagggcgtgattcctaccttcagggtgaaattcctgctccggcttctgagaggtcggctggaggtagacctggataaagacaagctgctgtttaaacatatgtgttatgaaatggagagactgcacaatggcggcgatgtcacgtttcatgatgtcctaagcatgcttagctatcgttcagtggacatccgcaaatccctgcagttggaggagttactggccagggaacaattagaatatacaatcgaggaagaggtggccaaacagactattcggatgtggctgaaaaagtgcttaaaacgaatcagggccaaacaacagcagagctgttccatcatacattctctgcgcgagtcacagcaacaggagttatcacggttcctgaacccaccatctattgagacaacgcagcctagtgaggacaccaatgcgaatagccaggacaattctatgcagcccgaaacatcgagccagcagcagctgctatccccaacgctttctgaccgcgggggctctcgacaggatgcagcagatgcgggaaaaccccagcggaagttcgggcagtggcggctaccttctgcccctaagccaattagccactcggtttcctcagtcaacttgaggttcggaggtcgcactactatgaagagcgtcgtgtgcaagatgaatcctatgacagacgcagcctcatgtggatccgaggtgaagaagtggtggactcgacaacttacagtagagtcagacgagtctggagatgatctcctggacatctag

SEQ ID NO: 314024 - DNA, 5217 bp, Artificial Sequence
  derived and/or modified sequence
atgctcaaacgcaaacagtcaagccgcgtcgaggctcaacctgtgaccgactttggtccagacgaaagtctcagtgataacgctgacatactatggatcaataagccatgggtccatagcctgctgcgcatttgtgctatcatctccgtcatatctgtatgcatgaacacacccatgacattcgagcactacccaccacttcagtacgtcacgttcacattagatactctcctgatgttcctgtacactgccgaaatgatcgcaaaaatgcacattagagggattgtgaaaggcgatagctcttatgtcaaagataggtggtgtgtttttgacggcttcatggttttttgtttatgggtgtctttggtcctgcaagtgttcgaaattgcggacatagtggatcagatgagcccctggggaatgctccgtattccacgaccattgattatgatcagggccttcagaatatattttaggttcgagttgccaaggaccaggatcacaaatatcttgaaaaggagcggcgagcagatctggtccgtgtcaatctttctgttattttttctcctgctctatggaattctgggggtacaaatgtttggcacttttacctaccactgcgtggttaacgacactaaacctgggaacgtgacatggaactcactcgccatccccgatacgcactgttcgccagagctcgaagagggctaccaatgtcctcccggattcaagtgtatggatttggaggaccttggcctgtctcggcaggaattgggttacagcggcttcaacgagatcggcacatcaattttcacagtgtatgaggctgccagccaggagggttgggtcttcctcatgtaccgggcaattgactcattcccaaggtggagatcatacttctacttcatcaccttaatcttcttcctggcatggttggtgaaaaacgtgtttattgccgttataatcgagactttcgcagaaatccgcgtacaatttcagcagatgtgggggtctcgctcctcaacaacttccaccgcgaccacacaaatgttccacgaagatgccgctggaggctggcagcttgtggcagttgacgtcaataagccccagggaagagcacctgcatgtcttcagaaaatgatgcgaagttccgtgtttcacatgttcatcctcagtatggtaacagtggatgtcatcgtggccgctagtaattactataaaggggagaacttccgcagacagtacgacgaattttacttggctgaggtcgccttcacggtcctgttcgaccttgaagcactgctcaaaatctggtgcttgggcttcacgggctatatttcatcctctctgcacaagttcgaactgctgttagtgataggcacaaccctgcatgtgtacccagatctttaccactcacagttcacctattttcaggttttgagggtcgtgagactgattaagatcagtcccgcattagaagacttcgtatataagatatttggccctggcaaaaagcttggctccctggttgtctttacggcatccctactcattgtgatgtctgccatcagtctacagatgttctgttttgtcgaggagctagacaggtttacaacgttcccacgtgcatttatgtctatgtttcagatacttacgcaagagggctgggtcgacgtgatggatcagactctgaacgctgtaggacacatgtgggctcctgtggtggcgatttactttattttataccacttgtttgcaacactaatcctactgtctctgtttgtagccgttatcctggacaacttggagctggacgaggacctgaaaaagctgaaacagcttaagcaaagtgaggccaacgcggacacaaaagaaaaattgccacttcgcctcaggatcttcgaaaagttccccaatcggccacagatggtgaaaatctccaaactgcctagtgattttactgtcccaaagattcgggagagcttcatgaaacagtttattgaccggcagcagcaggacacctgctgtctgctccggtctctgcctacaacatccagcagttcctgtgatcactccaaaagatctgcgatagaggataacaagtacattgaccaaaagttaaggaaaagcgttttctccataagggcgcgaaaccttctcgagaaggagaccgccgtgaccaaaatcctgcgagcctgtactaggcagcggatgttaagcggatcttttgaggggcaacctgctaaagagcgttccatcctgtccgtccaacatcatatcaggcaagaacgacggagcctgcgccacggtagtaatagccagaggatctcgagagggaagtccctggagaccctaactcaagatcacagtaataccgtgcggtaccgcaatgctcagagagaggacagcgaaatcaaaatgattcaggaaaaaaaagagcaggccgagatgaagaggaaggtccaagaggaggagcttagagaaaatcacccgtacttcgacaagcccctgttcattgtggggagggagcaccgcttccggaatttctgtagggtggtcgtgcgcgctcggttcaacgcgtcaaagactgacccggtgactggagccgtaaaaaatacaaagtaccatcagttgtatgacctgttgggcctcgtaacatacttagattgggtaatgattatcgtcaccatctgcagctgtatttctatgatgtttgagagtccttttagacgtgtgatgcatgccccaactctgcaaattgccgagtatgtattcgttattttcatgagtattgaactcaacctgaagatcatggcagacgggctgtttttcacacccactgccgtcattcgggacttcggcggagtaatggatattttcatttacctggtctccctgatttttttgtgttggatgcctcagaacgtaccagccgaatctggagctcagttactgatggtgctgagatgtctgcggcctctgcggattttcaaactggtgccacaaatgaggaaggtcgttagggaactcttctccggcttcaaagagatctttctggtgtccatacttctgctcaccctcatgctggtatttgcctccttcggcgttcagttattcgctgggaaactggccaagtgtaacgatccgaatattattaggcgggaggactgtaacggcattttcaggattaacgtatcagtcagtaaaaaccttaacctgaagctgcgccctggtgaaaagaaacctggcttctgggtccctcgagtgtgggctaatcctaggaacttcaatttcgataatgtgggaaatgcaatgttagcactgttcgaagtactgagcctgaaaggttgggtcgaagtgcgcgacgtgattattcacagagttggacctattcacggtatttatattcacgttttcgtttttcttggatgcatgataggcctgaccctcttcgtcggcgtggtgatcgcaaactttaacgagaacaagggcactgctctgctgaccgtcgaccagcgacgctgggaagacctgaaatcacgtctgaagattgcacagccgttacatctgccgcctcgacccgacaacgacggttttcgggctaagatgtatgacattacacaacatcctttttttaagcggacaatcgcactgctcgtgctggcgcagagcgtccttctgtctgtgaagtgggatgtggaagaccccgtgaccgtgccactagcgactatgagtgttgtgttcacgtttattttcgtgttggaggtgacaatgaagatcattgctatgagtcccgctggattctggcagagtcggagaaataggtatgacctcttggtgacgtccctgggcgtggtctgggtggttctccactttgccttgctgaatgcttacacatacatgatgggggcttgcgtcatcgtctttcgctttttctccatttgcggaaaacacgtgactcttaaaatgctgctgcttaccgtcgtggtgagcatgtataagtccttctttatcatcgtaggaatgtttttgctcctcctctgctacgcattcgccggagtggttctgtttggaaccgtgaaatacggagaaaatataaatcgccacgcaaacttctccagtgccggtaaggcaatcactgtgctttttcggatcgtaaccggagaagactggaacaagattatgcacgattgtatggtccagccccctttctgtacccccgacgagtttacatactgggccaccgactgtggcaattacgccggagcgcttatgtacttctgctctttttatgtgatcattgcctacatcatgcttaatcttctggtggcgatcatcgtggagaacttctctctgttttatagcacggaggaggaccagcttctgagctacaatgacctacgccattttcagatcatttggaacatggtagacgacaagagggaaggcgttattcctacctttcgcgtaaagttcttgttgaggctactgcggggacggctcgaggtggatctggacaaggacaagctcctgttcaagcacatgtgctatgagatggagcggctacataatgggggagatgtgaccttccatgatgtgctttcaatgttatcatataggtctgtcgacatcaggaagagcctgcagctcgaagaattgctggccagagaacaacttgagtacacaattgaggaagaagtggccaaacagacaattaggatgtggctgaagaagtgcttaaaacggatcagggctaaacaacagcagagctgttcaatcatacactctcttcgcgagagccagcagcaagaactgagcagattcctgaaccctcctagcatagaaacaacccagccttctgaagacaccaacgccaactcacaggacaattccatgcagccagagacctcttcgcagcagcagctgttgtccccaacactctctgacagggggggatcgagacaggatgcggctgacgcaggaaagccccaaaggaagtttggacagtggagactgccttcagcaccaaagccaatttcccatagcgtcagctccgtgaatctgcgatttggtggaaggaccactatgaagtccgttgtgtgtaaaatgaatccaatgacagatgcagcctcatgcggaagtgaggtgaaaaaatggtggacccggcagctgactgtcgaatccgacgagagtggcgatgatctcctcgatatctac

SEQ ID NO: 314025 - DNA, 5217 bp, Artificial Sequence
  derived and/or modified sequence
atgctgaagagaaagcagagcagcagagtggaggcccagcccgtgaccgacttcggccccgacgagagcctgagcgacaacgccgacatcctgtggatcaacaagccctgggtgcacagcctgctgagaatctgcgccatcatcagcgtgatcagcgtgtgcatgaacacccccatgaccttcgagcactacccccccctgcagtacgtgaccttcaccctggacaccctgctgatgttcctgtacaccgccgagatgatcgccaagatgcacatcagaggcatcgtgaagggcgacagcagctacgtgaaggacagatggtgcgtgttcgacggcttcatggtgttctgcctgtgggtgagcctggtgctgcaggtgttcgagatcgccgacatcgtggaccagatgagcccctggggcatgctgagaatccccagacccctgatcatgatcagagccttcagaatctacttcagattcgagctgcccagaaccagaatcaccaacatcctgaagagaagcggcgagcagatctggagcgtgagcatcttcctgctgttcttcctgctgctgtacggcatcctgggcgtgcagatgttcggcaccttcacctaccactgcgtggtgaacgacaccaagcccggcaacgtgacctggaacagcctggccatccccgacacccactgcagccccgagctggaggagggctaccagtgcccccccggcttcaagtgcatggacctggaggacctgggcctgagcagacaggagctgggctacagcggcttcaacgagatcggcaccagcatcttcaccgtgtacgaggccgccagccaggagggctgggtgttcctgatgtacagagccatcgacagcttccccagatggagaagctacttctacttcatcaccctgatcttcttcctggcctggctggtgaagaacgtgttcatcgccgtgatcatcgagaccttcgccgagatcagagtgcagttccagcagatgtggggcagcagaagcagcaccaccagcaccgccaccacccagatgttccacgaggacgccgccggcggctggcagctggtggccgtggacgtgaacaagccccagggcagagcccccgcctgcctgcagaagatgatgagaagcagcgtgttccacatgttcatcctgagcatggtgaccgtggacgtgatcgtggccgccagcaactactacaagggcgagaacttcagaagacagtacgacgagttctacctggccgaggtggccttcaccgtgctgttcgacctggaggccctgctgaagatctggtgcctgggcttcaccggctacatcagcagcagcctgcacaagttcgagctgctgctggtgatcggcaccaccctgcacgtgtaccccgacctgtaccacagccagttcacctacttccaggtgctgagagtggtgagactgatcaagatcagccccgccctggaggacttcgtgtacaagatcttcggccccggcaagaagctgggcagcctggtggtgttcaccgccagcctgctgatcgtgatgagcgccatcagcctgcagatgttctgcttcgtggaggagctggacagattcaccaccttccccagagccttcatgagcatgttccagatcctgacccaggagggctgggtggacgtgatggaccagaccctgaacgccgtgggccacatgtgggcccccgtggtggccatctacttcatcctgtaccacctgttcgccaccctgatcctgctgagcctgttcgtggccgtgatcctggacaacctggagctggacgaggacctgaagaagctgaagcagctgaagcagagcgaggccaacgccgacaccaaggagaagctgcccctgagactgagaatcttcgagaagttccccaacagaccccagatggtgaagatcagcaagctgcccagcgacttcaccgtgcccaagatcagagagagcttcatgaagcagttcatcgacagacagcagcaggacacctgctgcctgctgagaagcctgcccaccaccagcagcagcagctgcgaccacagcaagagaagcgccatcgaggacaacaagtacatcgaccagaagctgagaaagagcgtgttcagcatcagagccagaaacctgctggagaaggagaccgccgtgaccaagatcctgagagcctgcaccagacagagaatgctgagcggcagcttcgagggccagcccgccaaggagagaagcatcctgagcgtgcagcaccacatcagacaggagagaagaagcctgagacacggcagcaacagccagagaatcagcagaggcaagagcctggagaccctgacccaggaccacagcaacaccgtgagatacagaaacgcccagagagaggacagcgagatcaagatgatccaggagaagaaggagcaggccgagatgaagagaaaggtgcaggaggaggagctgagagagaaccacccctacttcgacaagcccctgttcatcgtgggcagagagcacagattcagaaacttctgcagagtggtggtgagagccagattcaacgccagcaagaccgaccccgtgaccggcgccgtgaagaacaccaagtaccaccagctgtacgacctgctgggcctggtgacctacctggactgggtgatgatcatcgtgaccatctgcagctgcatcagcatgatgttcgagagccccttcagaagagtgatgcacgcccccaccctgcagatcgccgagtacgtgttcgtgatcttcatgagcatcgagctgaacctgaagatcatggccgacggcctgttcttcacccccaccgccgtgatcagagacttcggcggcgtgatggacatcttcatctacctggtgagcctgatcttcctgtgctggatgccccagaacgtgcccgccgagagcggcgcccagctgctgatggtgctgagatgcctgagacccctgagaatcttcaagctggtgccccagatgagaaaggtggtgagagagctgttcagcggcttcaaggagatcttcctggtgagcatcctgctgctgaccctgatgctggtgttcgccagcttcggcgtgcagctgttcgccggcaagctggccaagtgcaacgaccccaacatcatcagaagagaggactgcaacggcatcttcagaatcaacgtgagcgtgagcaagaacctgaacctgaagctgagacccggcgagaagaagcccggcttctgggtgcccagagtgtgggccaaccccagaaacttcaacttcgacaacgtgggcaacgccatgctggccctgttcgaggtgctgagcctgaagggctgggtggaggtgagagacgtgatcatccacagagtgggccccatccacggcatctacatccacgtgttcgtgttcctgggctgcatgatcggcctgaccctgttcgtgggcgtggtgatcgccaacttcaacgagaacaagggcaccgccctgctgaccgtggaccagagaagatgggaggacctgaagagcagactgaagatcgcccagcccctgcacctgccccccagacccgacaacgacggcttcagagccaagatgtacgacatcacccagcaccccttcttcaagagaaccatcgccctgctggtgctggcccagagcgtgctgctgagcgtgaagtgggacgtggaggaccccgtgaccgtgcccctggccaccatgagcgtggtgttcaccttcatcttcgtgctggaggtgaccatgaagatcatcgccatgagccccgccggcttctggcagagcagaagaaacagatacgacctgctggtgaccagcctgggcgtggtgtgggtggtgctgcacttcgccctgctgaacgcctacacctacatgatgggcgcctgcgtgatcgtgttcagattcttcagcatctgcggcaagcacgtgaccctgaagatgctgctgctgaccgtggtggtgagcatgtacaagagcttcttcatcatcgtgggcatgttcctgctgctgctgtgctacgccttcgccggcgtggtgctgttcggcaccgtgaagtacggcgagaacatcaacagacacgccaacttcagcagcgccggcaaggccatcaccgtgctgttcagaatcgtgaccggcgaggactggaacaagatcatgcacgactgcatggtgcagccccccttctgcacccccgacgagttcacctactgggccaccgactgcggcaactacgccggcgccctgatgtacttctgcagcttctacgtgatcatcgcctacatcatgctgaacctgctggtggccatcatcgtggagaacttcagcctgttctacagcaccgaggaggaccagctgctgagctacaacgacctgagacacttccagatcatctggaacatggtggacgacaagagagagggcgtgatccccaccttcagagtgaagttcctgctgagactgctgagaggcagactggaggtggacctggacaaggacaagctgctgttcaagcacatgtgctacgagatggagagactgcacaacggcggcgacgtgaccttccacgacgtgctgagcatgctgagctacagaagcgtggacatcagaaagagcctgcagctggaggagctgctggccagagagcagctggagtacaccatcgaggaggaggtggccaagcagaccatcagaatgtggctgaagaagtgcctgaagagaatcagagccaagcagcagcagagctgcagcatcatccacagcctgagagagagccagcagcaggagctgagcagattcctgaacccccccagcatcgagaccacccagcccagcgaggacaccaacgccaacagccaggacaacagcatgcagcccgagaccagcagccagcagcagctgctgagccccaccctgagcgacagaggcggcagcagacaggacgccgccgacgccggcaagccccagagaaagttcggccagtggagactgcccagcgcccccaagcccatcagccacagcgtgagcagcgtgaacctgagattcggcggcagaaccaccatgaagagcgtggtgtgcaagatgaaccccatgaccgacgccgccagctgcggcagcgaggtgaagaagtggtggaccagacagctgaccgtggagagcgacgagagcggcgacgacctgctggacatctag

SEQ ID NO: 314026 - protein, 218 aa, Artificial Sequence
  derived and/or modified sequence
MLKRKQSSRVEAQPVTDFGPDESLSDNADILWINKPWVHSLLRICAIISVISVCMNTPMTFEHYPPLQYVTFTLDTLLMFLYTAEMIAKMHIRGIVKGDSSYVKDRWCVFDGFMVFCLWVSLVLQVFEIADIVDQMSPWGMLRIPRPLIMIRAFRIYFRFELPRTRITNILKRSGEQIWSVSIFLLFFLLLYGILGVQMFGTFTYHCVVNDTKPGLSL

SEQ ID NO: 314027 - protein, 218 aa, Artificial Sequence
  derived and/or modified sequence
MLKRKQSSRVEAQPVTDFGPDESLSDNADILWINKPWVHSLLRICAIISVISVCMNTPMTFEHYPPLQYVTFTLDTLLMFLYTAEMIAKMHIRGIVKGDSSYVKDRWCVFDGFMVFCLWVSLVLQVFEIADIVDQMSPWGMLRIPRPLIMIRAFRIYFRFELPRTRITNILKRSGEQIWSVSIFLLFFLLLYGILGVQMFGTFTYHCVVNDTKPGLSI

SEQ ID NO: 314028 - DNA, 2007 bp, Artificial Sequence
  derived and/or modified sequence
atgttgaagcggaagcagtcatctcgtgtggaagcacaaccggttaccgacttcggtcctgacgagagcctttcggacaacgctgatattctctggattaataagccttgggtgcatagcctgttgaggatctgcgccataatttccgtgatctccgtgtgcatgaatacacccatgacgtttgagcattatccacctctgcagtacgtcactttcactctagacaccttattgatgttcctctatactgcggagatgatcgctaagatgcacatccgcggaatcgtaaaaggggactccagctacgtgaaagaccgatggtgcgttttcgacgggttcatggtcttctgcctgtgggtgagcctggtcctccaggtcttcgaaattgctgacattgtggatcaaatgtccccttggggtatgctccggatccctaggcctctgatcatgatcagagcctttagaatctattttcggttcgagctaccccggacaaggataactaatattttgaaacggagcggtgagcagatctggtccgtgtcaatctttctgttgttctttcttttgctctacgggatcctgggagtgcagatgttcggcacatttacatatcattgcgtggtgaacgacactaaaccaggaaatgtcacatggaactccctcgcaattcctgatacacactgttccccagagcttgaggaaggttaccagtgtccacccggctttaagtgcatggacctcgaagatcttggacttagccgccaggagcttggttacagtggatttaacgagatagggactagcatctttacagtctacgaggctgcaagccaggaaggatgggttttcctgatgtatagggccattgactctttcccccgatggaggtcgtacttctatttcatcacccttatcttcttcctggcttggcttgtaaaaaatgtgttcatagctgtaatcattgagacctttgcagagatccgggtccagtttcagcaaatgtgggggagccgctcctctaccacatcgactgctaccacccagatgtttcacgaagatgccgccggggggtggcagcttgtagcagtagatgttaataagcctcagggacgcgcccccgcttgcctacagaagatgatgcggtcctcagtgttccatatgttcattttgtctatggttacggtcgatgtgatagtggctgcttctaattattacaagggcgaaaactttaggaggcaatatgatgaattttacctagcagaggtggcattcaccgtgctgttcgacttggaggccctcctgaagatctggtgtcttggatttactggatacattagtagtagtctacacaaattcgaactgttgctggttatcggcacgaccctgcatgtgtaccccgatctataccactctcagttcacgtatttccaggtcctgcgggtggtgcggttgataaagatatcacctgcactggaggacttcgtatataagatcttcgggcctgggaagaagttgggatctctggtggtattcaccgcatcactactcattgtcatgtcggctattagtctccaaatgttttgcttcgtagaggaactggataggtttacaacttttcctagagccttcatgtccatgtttcagattctgacccaggagggatgggtggacgtaatggaccaaactcttaatgctgttggtcacatgtgggcccccgttgtggcaatttacttcatcttataccacctgttcgcaactctcccaccttccctaattcgtgatttatgtggcacgcaggacgcgtgtcccagctgcctgcctctgcagccaccaaacccacttcccggatcccagaccctggctagactaacgcaccaggcactcacaacacccccaggcatgcggtccagtcagctctttagtaagatatcactactactcggtatctgtgttgcgtgggaatcaattttgggatccctttcactgagccacaacttgagatag

SEQ ID NO: 314029 - DNA, 657 bp, Artificial Sequence
  derived and/or modified sequence
atgctgaagcgtaaacagtctagtagggtcgaagcacagcctgtaacagatttcgggcccgacgaatccctcagcgataatgccgatatcttgtggatcaacaaaccgtgggttcactccctgctgcgaatttgcgccatcatatctgtcatctccgtgtgcatgaacacccctatgacattcgagcactatcctccattgcagtacgtgacctttacactcgacacactgctgatgtttctttatacggccgagatgattgccaagatgcatatacgcggcattgtgaagggcgacagcagctatgtcaaagataggtggtgcgtttttgatggcttcatggtcttttgtttgtgggtcagcctcgtactgcaagtgtttgagattgccgatatcgtcgatcagatgtcaccatgggggatgttgcgaatccccaggccccttattatgattagagctttccggatctactttcggttcgaactgccgcgaaccaggataactaatatactgaaaaggagcggagagcagatctggtctgtgagcatcttcctgctctttttcttgctgctgtacggaattctcggtgtacagatgttcggtacatttacttaccattgcgtggtgaacgataccaagccaggcttatcgctttag

SEQ ID NO: 314030 - DNA, 657 bp, Artificial Sequence
  derived and/or modified sequence
atgctaaagcgaaaacagtcctctcgggtggaggcgcaacctgttaccgattttggcccggacgagagcctttcagacaatgctgatattctgtggataaacaagccctgggtgcacagcctgcttcgtatttgtgccatcatcagcgtgatctccgtgtgtatgaatacacccatgacctttgaacattacccacctctgcagtacgttaccttcacactggatacgttgcttatgttcctctataccgccgaaatgattgccaaaatgcatatccgcggcattgtgaagggtgactcttcgtacgtgaaggatcgatggtgcgtgttcgacggcttcatggtgttctgcctgtgggttagcctcgtgctgcaggttttcgagattgctgatattgtcgatcagatgtccccctggggcatgctacgcataccacgccccctaataatgattagagccttccgcatttattttaggttcgaactcccaaggacgaggataacaaatatactcaaacggtcgggggaacagatatggtccgtcagtatctttctgctcttctttctgctgctttatgggattttaggggtacagatgttcggcactttcacataccattgcgtggtcaatgatacgaaacccgggctcagcatctag

SEQ ID NO: 314031 - DNA, 2007 bp, Artificial Sequence
  derived and/or modified sequence
atgctgaagaggaagcagagcagccgggtggaggcccagcctgtgacagactttggaccagatgagagcctgagtgacaatgctgacatcctgtggatcaacaagccctgggtgcacagcctgctgcgcatctgtgccatcatcagcgtcatctctgtgtgcatgaacacccccatgacctttgagcactacccacccctgcagtatgtgaccttcaccctggacaccctgctgatgttcctgtacacagctgagatgattgccaagatgcacatccggggcatcgtgaagggggacagcagctatgtgaaggaccgctggtgtgtgtttgatggcttcatggtgttctgcctgtgggtgtccctggtgctgcaggtgtttgaaattgctgacatcgtggaccagatgagcccctggggcatgctgcgcatcccccggcccctcatcatgatccgggccttccgcatctacttccgctttgagctgcccaggacccgcatcaccaacatcctgaagaggtctggagagcagatctggagcgtgtccatcttcctgctcttcttcctgctgctgtatggcatcctgggcgtgcagatgtttggcaccttcacctaccactgtgtggtgaatgacaccaagccaggaaatgtgacctggaacagcctggccatcccagacacccactgcagccctgagctggaggagggctaccagtgccccccaggcttcaagtgcatggacctggaggacctgggcctgagccggcaggagctgggctacagcggcttcaatgagatcggcaccagcatcttcaccgtgtatgaggccgccagccaggagggctgggtgttcctgatgtaccgggccatcgacagcttcccccgctggaggagctacttctacttcatcaccctcatcttcttcctggcctggctggtgaagaatgtgttcatcgctgtgatcatcgagacctttgctgagatccgggtgcagttccagcagatgtggggcagccgcagcagcaccaccagcacagccaccacccagatgtttcatgaagatgctgctgggggctggcagctggtggccgtggatgtgaacaagccccagggccgggccccagcctgcctgcagaagatgatgaggagcagcgtcttccacatgttcatcctgtccatggtgacagtggatgtgattgtggccgccagcaactactacaagggggagaacttccggcggcagtatgatgagttctacctggccgaggtggccttcaccgtgctgtttgacctggaggccctgctgaagatctggtgcctgggcttcaccggctacatcagcagcagcctgcacaagtttgagctgctgctggtgattggcaccaccctgcacgtgtacccagacctgtaccacagccagttcacctacttccaggtgctgcgggtggtgcggctcatcaagatcagccctgccctggaggactttgtgtacaagatcttcggccctgggaagaagctgggcagcctggtggtgttcaccgccagcctgctgattgtgatgtctgccatcagcctgcagatgttctgctttgtggaggagctggaccgcttcaccaccttcccccgggccttcatgtccatgttccagatcctgacccaggagggctgggtggatgtgatggaccagaccctgaatgctgtgggccacatgtgggcccctgtggtggccatctacttcatcctgtaccacctgtttgccaccctgccccccagcctcatccgggacctgtgtggcacccaggatgcctgccccagctgcctgcccctgcagccccccaaccccctgcccggcagccagaccctggcccggctgacccaccaggccctgaccaccccacctggcatgaggagcagccagctgttcagcaagatcagcctgctgctgggcatctgtgtggcctgggagagcatcctgggcagcctgagcctgagccacaacctgaggtag

SEQ ID NO: 314032 - DNA, 657 bp, Artificial Sequence
  derived and/or modified sequence
atgctgaagaggaagcagagcagccgggtggaggcccagcctgtgacagactttggaccagatgagagcctgagtgacaatgctgacatcctgtggatcaacaagccctgggtgcacagcctgctgcgcatctgtgccatcatcagcgtcatctctgtgtgcatgaacacccccatgacctttgagcactacccacccctgcagtatgtgaccttcaccctggacaccctgctgatgttcctgtacacagctgagatgattgccaagatgcacatccggggcatcgtgaagggggacagcagctatgtgaaggaccgctggtgtgtgtttgatggcttcatggtgttctgcctgtgggtgtccctggtgctgcaggtgtttgaaattgctgacatcgtggaccagatgagcccctggggcatgctgcgcatcccccggcccctcatcatgatccgggccttccgcatctacttccgctttgagctgcccaggacccgcatcaccaacatcctgaagaggtctggagagcagatctggagcgtgtccatcttcctgctcttcttcctgctgctgtatggcatcctgggcgtgcagatgtttggcaccttcacctaccactgtgtggtgaatgacaccaagccaggcctgagcctgtag

SEQ ID NO: 314033 - DNA, 657 bp, Artificial Sequence
  derived and/or modified sequence
atgctgaagaggaagcagagcagccgggtggaggcccagcctgtgacagactttggaccagatgagagcctgagtgacaatgctgacatcctgtggatcaacaagccctgggtgcacagcctgctgcgcatctgtgccatcatcagcgtcatctctgtgtgcatgaacacccccatgacctttgagcactacccacccctgcagtatgtgaccttcaccctggacaccctgctgatgttcctgtacacagctgagatgattgccaagatgcacatccggggcatcgtgaagggggacagcagctatgtgaaggaccgctggtgtgtgtttgatggcttcatggtgttctgcctgtgggtgtccctggtgctgcaggtgtttgaaattgctgacatcgtggaccagatgagcccctggggcatgctgcgcatcccccggcccctcatcatgatccgggccttccgcatctacttccgctttgagctgcccaggacccgcatcaccaacatcctgaagaggtctggagagcagatctggagcgtgtccatcttcctgctcttcttcctgctgctgtatggcatcctgggcgtgcagatgtttggcaccttcacctaccactgtgtggtgaatgacaccaagccaggcctgagcatctag

SEQ ID NO: 314034 - DNA, 2007 bp, Artificial Sequence
  derived and/or modified sequence
atgctgaagcggaagcagagcagccgggtggaggcccagcccgtgaccgactttggccccgatgagagtctgtccgacaatgctgatatcctctggatcaacaagccttgggtgcacagcctactgagaatatgcgctattataagcgtgatttctgtttgcatgaacaccccgatgacttttgagcactaccctcccctccagtatgttacctttactttggacaccctgctcatgttcctctatactgcagagatgatcgccaagatgcacatccgaggtatcgtaaagggagattcaagctacgtgaaagatagatggtgtgttttcgatggcttcatggttttctgtctgtgggtgagcttggtgcttcaggtgttcgaaatcgcagacattgtggaccagatgtccccctggggcatgctccggattccaaggccgctcataatgatccgggcttttcgaatctatttcagatttgaactgcctcgcacccggataacaaacatactcaaacgcagcggggaacaaatttggagcgtgtcaatctttctgcttttcttcctccttctctacggaattctaggagtccaaatgtttggcacatttacatatcactgcgtcgtcaatgacacaaagcctggaaatgtgacttggaactcccttgccatacctgatacccattgtagccccgaacttgaagaaggctaccagtgtcctcctgggtttaagtgcatggacttggaagatcttggattatctcgccaggaattgggatactcgggcttcaacgagataggcacatccatttttaccgtgtacgaggctgcaagccaggaaggatgggtatttctgatgtatagagccatagattcctttcctcgttggagaagctacttctacttcattacactcatcttctttctcgcctggcttgtgaagaatgtttttattgccgtgataatcgagacatttgctgaaataagagtgcagttccagcagatgtggggcagtcgctctagcactacttctactgctacgacccaaatgtttcatgaagacgccgccggggggtggcagttagtggctgtggatgtaaataagccccaaggccgcgcccctgcttgtttgcagaaaatgatgaggtcctccgtgttccatatgttcattctgagcatggttacagtagatgttatcgtggccgcgtcaaactactacaaaggcgagaactttcgcaggcagtacgacgagttttacctggccgaagtagcctttaccgtactctttgacctcgaggctctgcttaaaatatggtgtttagggtttaccgggtatattagttcaagcctacataagttcgagttactgctcgtaatcggaaccacattacacgtgtatccagacttatatcatagccagttcacttattttcaagtgctgcgagtggtgcgtctgataaaaatctcccccgcacttgaggacttcgtgtacaaaatatttgggccgggcaagaaactaggcagtctagttgtgtttactgcatctctgctgattgtcatgtctgccatttctttgcaaatgttttgcttcgtggaggagttggatagatttaccacgtttcctcgcgcattcatgagcatgttccaaatcctgactcaggaggggtgggtggacgtgatggatcagacactgaacgcagttggtcacatgtgggctccagttgtggccatctactttatactgtaccacctcttcgctacattacctccaagccttatccgggacttatgcggtacacaagacgcatgcccatcctgcctaccgctgcagcctcccaaccccctacctggtagccagactttggctcgcctgactcaccaggcgcttactacccctcccgggatgagaagttcccagctctttagtaaaatctctcttctgttaggaatctgtgtcgcatgggagtcaatactgggctctctcagtctgtcccacaacctaagatag

SEQ ID NO: 314035 - DNA, 657 bp, Artificial Sequence
  derived and/or modified sequence
atgctgaagcggaagcagagcagccgggtggaggcccagcccgtgacagactttggccctgacgagtctctctcagataacgcagacatactttggattaataagccttgggtgcactcattactgaggatctgtgccattataagcgtgatatccgtttgtatgaacacacctatgacgtttgaacactaccccccactgcagtacgtcacatttactctggatactcttctgatgttcctgtacacagctgagatgatcgctaagatgcacattagaggcattgtcaaaggggattcaagttacgttaaggaccgttggtgtgtgtttgatggattcatggtcttctgtctttgggtgtcgttggtgctccaagtgttcgaaatagccgacatcgtagatcagatgtcaccatggggcatgttgcgcattccccgccctctaatcatgattcgcgcattcagaatctattttcggtttgagttgcctcgaactcgaatcacgaatattctgaaacgtagtggagagcagatctggtcagtgtccattttccttttgttctttttgctactatatgggatattgggtgtgcaaatgtttgggacatttacataccactgtgtcgttaacgataccaaacccggcctgtctctctag

SEQ ID NO: 314036 - DNA, 657 bp, Artificial Sequence
  derived and/or modified sequence
atgctgaagcggaagcagagcagccgggtggaggcccagcccgtgacggacttcgggcctgacgagagcctaagtgacaatgccgatattctctggattaataagccatgggtacacagcctgcttcgtatatgtgccataatctcggttattagtgtctgcatgaatacccctatgacgttcgagcattatccccctctgcagtacgtgaccttcactttggatacactgctgatgttcctgtacactgcggaaatgatcgccaaaatgcatatacggggcatcgttaaaggggactcctcctacgtgaaggaccggtggtgcgtgttcgacggattcatggtgttttgcctgtgggtctctctggtgctgcaggtcttcgaaattgctgatatcgtggatcagatgagcccgtgggggatgcttaggattccacgccctctgattatgatccgcgcgtttcggatctacttccgcttcgaactgccacgaacacgcatcaccaatattcttaagcgttccggggagcagatctggtctgtctccatcttccttctctttttcctccttttgtacggcattctgggggtgcagatgtttgggacgtttacataccattgcgtcgtgaacgacaccaaacccggcctgagcatttag

SEQ ID NO: 314037 - DNA, 2007 bp, Artificial Sequence
  derived and/or modified sequence
atgctgaaacggaagcagtcctccagagtggaggctcagcccgttaccgatttcgggccagacgagagcctgtctgataacgctgatatcctctggataaacaagccctgggtacatagccttctccggatctgcgctataatctccgttatctctgtatgtatgaatactcccatgacctttgagcattatccccctctgcagtatgtgaccttcactttggatactcttctgatgttcctgtataccgcggaaatgattgcgaaaatgcacattcgcggtatagtcaagggcgatagctcttacgtgaaagatcggtggtgtgtttttgacggctttatggtgttctgcctctgggtttccttagtgctccaggtgttcgagattgcagacatcgtggaccagatgagcccttgggggatgctcaggatccctcgcccactcattatgattagggcattcagaatatactttcgcttcgagctgccacgcacacgtattaccaatattctgaaaagaagcggggagcagatctggagcgtttccatcttcctgctcttctttttactgttgtacgggatcctgggggtgcagatgtttgggacattcacatatcattgtgttgtgaatgacaccaaacccggtaacgtgacttggaattcactggccatccccgatactcattgcagtcccgaactggaagaggggtaccagtgtcctcctggattcaaatgcatggatctggaagatctcggtctgagtcggcaggagctgggctattccggtttcaacgaaatcggcaccagcatctttacggtgtacgaggccgctagccaagagggctgggtgtttttaatgtacagagcaattgattcctttccacgttggagatcctatttctattttataacgctaatctttttcctcgcttggcttgtgaaaaatgtgttcatcgccgttatcattgagaccttcgcggaaatcagggtgcagttccaacagatgtggggaagtagatcctccactaccagtactgccactacacaaatgttccacgaagatgcagccggtgggtggcagttagtcgctgtggacgtcaacaaaccccaagggagggccccagcatgcttacagaagatgatgcgaagttcggtgtttcacatgtttatcctctctatggtcactgttgacgtgatagtggctgcctcaaactactacaagggggagaattttaggcgccagtacgatgaattctatctcgcagaagtggcattcactgtgcttttcgatctggaagctcttctcaagatttggtgtttaggcttcactgggtacatcagtagcagcctgcacaagttcgaactcctgctggttattggtaccactctgcatgtctacccagacctgtatcatagccagttcacatattttcaagtgctccgcgttgtgcggctgattaagatcagccccgctctggaagactttgtttataaaatatttggacctggaaaaaaactgggatccctagtggtttttacagctagcttgctgattgtgatgtcagccatctcattacagatgttctgcttcgtggaagagctagaccggttcacaacattccctcgggcatttatgtcaatgttccaaattctcacccaggaggggtgggttgatgtgatggatcagactttgaacgcagttgggcatatgtgggccccagtggtggcaatttattttatactgtatcacttgtttgcaaccctaccgccttccctgatcagggatctgtgcggtacacaggatgcatgcccaagttgcctccccttgcagcctcccaaccccctgcccggatcacagactctcgccaggcttacacatcaggcactcacaacacctccgggaatgaggtcttcccaacttttcagcaaaataagtctgctgttaggcatttgtgtggcttgggagtccatcctcggctcactgtccctctcccacaacctgcgctag

SEQ ID NO: 314038 - DNA, 657 bp, Artificial Sequence
  derived and/or modified sequence
atgctcaagcgtaaacaatcttcccgcgtggaggcacagccggtaaccgacttcggcccagacgagtccttgtccgacaacgctgatatcctctggattaacaaaccgtgggtgcactccttactgcggatctgtgcaataattagcgtaatcagcgtgtgcatgaacacccccatgaccttcgaacactaccccccattgcagtacgtcacctttacacttgatacccttctgatgtttttgtataccgccgaaatgatcgccaaaatgcacatccgtggcatcgtgaagggcgacagcagctacgtcaaagatcggtggtgtgtgttcgatgggttcatggtcttctgcctatgggtgtctctcgtgctgcaggttttcgagatcgctgatatagtagaccaaatgtcgccatgggggatgctccggattccccgtccccttattatgattagagcttttcgcatatactttaggtttgaactgccaagaactaggattacaaatattcttaaaaggtctggtgagcagatctggagcgtctcaatttttctgctcttttttttgctgttatacggtattttgggggtgcagatgttcggtacgtttacttatcactgcgtggtcaacgatacgaaaccgggactcagcctgtag

SEQ ID NO: 314039 - DNA, 657 bp, Artificial Sequence
  derived and/or modified sequence
atgcttaaacgcaaacagtcatcaagggtcgaggctcagcctgtgaccgacttcggaccagatgagagcctgtccgataatgccgacattctgtggattaacaagccctgggtccatagcctcctcaggatctgcgcgattatatcagttatttccgtgtgcatgaatacacctatgactttcgagcactaccctcctttacaatatgtgacattcacactcgatacgctcctgatgtttctgtataccgccgagatgatcgcaaagatgcatattcggggtattgtgaagggggactcctcttacgtgaaagaccggtggtgtgtgtttgatgggtttatggttttttgtttgtgggtatcacttgtgctccaggtattcgaaatcgcggacatagtcgatcaaatgtcaccttggggcatgctgcggatacccaggcccctaatcatgatccgggcttttcgcatctattttcggtttgagctgccaagaacccgcatcaccaatatattgaagcgatccggtgagcaaatatggtcagtttctatcttccttctgtttttcctactcctgtatggaattctcggagtccagatgtttggaaccttcacgtatcattgtgtcgttaatgatacaaaacccggacttagtatatag

SEQ ID NO: 314040 - DNA, 2864 bp, Artificial Sequence
  derived and/or modified sequence
gaggggcccgcgtccccgcccgccctgggcgccgcgcctggcactgatcctgccggtcgcccactgtcgccgccgccgccgcccgcgggcaccatgacagctctgagcgctggggttacagactgtggttttgtgcttgctcaccaaagctaacctcagcatgctcaaaaggaagcagagttccagggtggaagcccagccagtcactgactttggtcctgatgagtctctgtcggataatgctgacatcctctggattaacaaaccatgggttcactctttgctgcgcatctgtgccatcatcagcgtcatttctgtttgtatgaatacgccaatgaccttcgagcactatcctccacttcagtatgtgaccttcactttggatacattattgatgtttctctacacggcagagatgatagcaaaaatgcacatccggggcattgtcaagggggatagttcctatgtgaaagatcgctggtgtgtttttgatggatttatggtcttttgcctttgggtttctttggtgctacaggtgtttgaaattgctgatatagttgatcagatgtcaccttggggcatgttgcggattccacggccactgattatgatccgagcattccggatttatttccgatttgaactgccaaggaccagaattacaaatattttaaagcgatcgggagaacaaatatggagtgtttccatttttctacttttctttctacttctttatggaattttaggagttcagatgtttggaacatttacttatcactgtgttgtaaatgacacaaagccagggaatgtaacctggaatagtttagctattccagacacacactgctcaccagagctagaagaaggctaccagtgcccacctggatttaaatgcatggaccttgaagatctgggacttagcaggcaagagctgggctacagtggctttaatgagataggaactagtatattcaccgtctatgaggccgcctcacaggaaggctgggtgttcctcatgtacagagcaattgacagctttccccgttggcgttcctacttctatttcatcactctcattttcttcctcgcctggcttgtgaagaacgtgtttattgctgttatcattgaaacatttgcagaaatcagagtacagtttcaacaaatgtggggatcgagaagcagcactacctcaacagccaccacccagatgtttcatgaagatgctgctggaggttggcagctggtagctgtggatgtcaacaagccccagggacgcgccccagcctgcctccagaaaatgatgcggtcatccgttttccacatgttcatcctgagcatggtgaccgtggacgtgatcgtggcggctagcaactactacaaaggagaaaacttcaggaggcagtacgacgagttctacctggcggaggtggcttttacagtactttttgatttggaagcacttctgaagatatggtgtttgggatttactggatatattagctcatctctccacaaattcgaactactactcgtaattggaactactcttcatgtatacccagatctttatcattcacaattcacgtactttcaggttctccgagtagttcggctgattaagatttcacctgcattagaagactttgtgtacaagatatttggtcctggaaaaaagcttgggagtttggttgtatttactgccagcctcttgattgttatgtcagcaattagtttgcagatgttctgctttgtcgaagaactggacagatttactacgtttccgagggcatttatgtccatgttccagatcctcacccaggaaggatgggtggacgtaatggaccaaactctaaatgctgtgggacatatgtgggcacccgtggttgccatctatttcattctctatcatctttttgccactctgcctccctctcttatccgtgacctctgtggcactcaagacgcctgtccatcctgccttcctctccagcctccaaaccctctgcctggaagccagactctggccagacttactcaccaggccctcaccacaccacctggaatgcgttcctcacagctcttttccaaaatcagtcttctccttggcatctgcgtggcttgggagagcatccttggctctctgtcattgtctcacaatcttcgataagtagtgttcggaaagtgcccccctggcccatgtgcccagatgggctctccaagtctaaatgcttcaaaatggtacagaactaaatgtgtgaatttatgatggggcttcatttctggtcctccttcttcacacttgcgtggccgcccttcccatccgctctccaattttctttcacgtttctgctttctgagaagaaataagactgatttctgggatggagcatgagagagacagatgcagagagagagagagacaaagcgtgtttccgtgggagatgcccacacacctcacttgggagcatcggcagtgttggtacccacacaggtgtgttttgacatccaagacttgaccctaattcttcttggaacctgatggggagagaaccttgctgggggccccacatgggccaggggcagccagggcagagttgggcagctgcctgagagttctcggtggagaggcccggaatatcccacaagaacaagtctccgttagttccaagtggaatgacagccctttctgagtttccctgagttgagagctaatacatgtgttgtgggaacaacagcccaagccaaaggccacgcggaggccaggcgtggtgactcacacctgtaatcctagcactttgggaggccaagatccacggatctcatgagctcaggagttcaagaccagcctggtcaaccttgtctct

SEQ ID NO: 314041 - DNA, 1126 bp, Artificial Sequence
  derived and/or modified sequence
gtgcttgctcaccaaagctaacctcagcatgctcaaaaggaagcagagttccagggtggaagcccagccagtcactgactttggtcctgatgagtctctgtcggataatgctgacatcctctggattaacaaaccatgggttcactctttgctgcgcatctgtgccatcatcagcgtcatttctgtttgtatgaatacgccaatgaccttcgagcactatcctccacttcagtatgtgaccttcactttggatacattattgatgtttctctacacggcagagatgatagcaaaaatgcacatccggggcattgtcaagggggatagttcctatgtgaaagatcgctggtgtgtttttgatggatttatggtcttttgcctttgggtttctttggtgctacaggtgtttgaaattgctgatatagttgatcagatgtcaccttggggcatgttgcggattccacggccactgattatgatccgagcattccggatttatttccgatttgaactgccaaggaccagaattacaaatattttaaagcgatcgggagaacaaatatggagtgtttccatttttctacttttctttctacttctttatggaattttaggagttcagatgtttggaacatttacttatcactgtgttgtaaatgacacaaagccaggactctcactctgacacccaggctggagtgcagtggcatgatctcagcttactgaaacatccatctcccaggttcaagagattctcctgcttcagccccccaagtagctgggactacaggcgtgtgccaccacacccgggtaatttttgtatttttagcagagacagggcttcatcatgttggccaggctggtctcgaactcctgacctcaagagatctgcctgcctcagcctcccaaagtgctgggattaaaggcctgagccaccatgtccagccttatttttaaaaaaaaatttcagttcaatattactgcattttaaagccccacacataagcagaaaaactgtcagcaccattttaccgttactattagcccagacataaatgtagttttactcttagagactcaagaaatatccaaactcaaaataaaacagaaaatgttaattgatttg

SEQ ID NO: 314042 - DNA, 736 bp, Artificial Sequence
  derived and/or modified sequence
ccgcccgcgggcaccatgacagctctgagcgctggggttacagactgtggttttgtgcttgctcaccaaagctaacctcagcatgctcaaaaggaagcagagttccagggtggaagcccagccagtcactgactttggtcctgatgagtctctgtcggataatgctgacatcctctggattaacaaaccatgggttcactctttgctgcgcatctgtgccatcatcagcgtcatttctgtttgtatgaatacgccaatgaccttcgagcactatcctccacttcagtatgtgaccttcactttggatacattattgatgtttctctacacggcagagatgatagcaaaaatgcacatccggggcattgtcaagggggatagttcctatgtgaaagatcgctggtgtgtttttgatggatttatggtcttttgcctttgggtttctttggtgctacaggtgtttgaaattgctgatatagttgatcagatgtcaccttggggcatgttgcggattccacggccactgattatgatccgagcattccggatttatttccgatttgaactgccaaggaccagaattacaaatattttaaagcgatcgggagaacaaatatggagtgtttccatttttctacttttctttctacttctttatggaattttaggagttcagatgtttggaacatttacttatcactgtgttgtaaatgacacaaagccaggtttgtcaata

SEQ ID NO: 314043 - DNA, 2007 bp, Artificial Sequence
  derived and/or modified sequence
atgctgaagagaaagcagagcagcagagtggaggcccagcccgtgaccgacttcggccccgacgagagcctgagcgacaacgccgacatcctgtggatcaacaagccctgggtgcacagcctgctgagaatctgcgccatcatcagcgtgatcagcgtgtgcatgaacacccccatgaccttcgagcactacccccccctgcagtacgtgaccttcaccctggacaccctgctgatgttcctgtacaccgccgagatgatcgccaagatgcacatcagaggcatcgtgaagggcgacagcagctacgtgaaggacagatggtgcgtgttcgacggcttcatggtgttctgcctgtgggtgagcctggtgctgcaggtgttcgagatcgccgacatcgtggaccagatgagcccctggggcatgctgagaatccccagacccctgatcatgatcagagccttcagaatctacttcagattcgagctgcccagaaccagaatcaccaacatcctgaagagaagcggcgagcagatctggagcgtgagcatcttcctgctgttcttcctgctgctgtacggcatcctgggcgtgcagatgttcggcaccttcacctaccactgcgtggtgaacgacaccaagcccggcaacgtgacctggaacagcctggccatccccgacacccactgcagccccgagctggaggagggctaccagtgcccccccggcttcaagtgcatggacctggaggacctgggcctgagcagacaggagctgggctacagcggcttcaacgagatcggcaccagcatcttcaccgtgtacgaggccgccagccaggagggctgggtgttcctgatgtacagagccatcgacagcttccccagatggagaagctacttctacttcatcaccctgatcttcttcctggcctggctggtgaagaacgtgttcatcgccgtgatcatcgagaccttcgccgagatcagagtgcagttccagcagatgtggggcagcagaagcagcaccaccagcaccgccaccacccagatgttccacgaggacgccgccggcggctggcagctggtggccgtggacgtgaacaagccccagggcagagcccccgcctgcctgcagaagatgatgagaagcagcgtgttccacatgttcatcctgagcatggtgaccgtggacgtgatcgtggccgccagcaactactacaagggcgagaacttcagaagacagtacgacgagttctacctggccgaggtggccttcaccgtgctgttcgacctggaggccctgctgaagatctggtgcctgggcttcaccggctacatcagcagcagcctgcacaagttcgagctgctgctggtgatcggcaccaccctgcacgtgtaccccgacctgtaccacagccagttcacctacttccaggtgctgagagtggtgagactgatcaagatcagccccgccctggaggacttcgtgtacaagatcttcggccccggcaagaagctgggcagcctggtggtgttcaccgccagcctgctgatcgtgatgagcgccatcagcctgcagatgttctgcttcgtggaggagctggacagattcaccaccttccccagagccttcatgagcatgttccagatcctgacccaggagggctgggtggacgtgatggaccagaccctgaacgccgtgggccacatgtgggcccccgtggtggccatctacttcatcctgtaccacctgttcgccaccctgccccccagcctgatcagagacctgtgcggcacccaggacgcctgccccagctgcctgcccctgcagccccccaaccccctgcccggcagccagaccctggccagactgacccaccaggccctgaccaccccccccggcatgagaagcagccagctgttcagcaagatcagcctgctgctgggcatctgcgtggcctgggagagcatcctgggcagcctgagcctgagccacaacctgagatag

SEQ ID NO: 314044 - DNA, 657 bp, Artificial Sequence
  derived and/or modified sequence
atgctgaagagaaagcagagcagcagagtggaggcccagcccgtgaccgacttcggccccgacgagagcctgagcgacaacgccgacatcctgtggatcaacaagccctgggtgcacagcctgctgagaatctgcgccatcatcagcgtgatcagcgtgtgcatgaacacccccatgaccttcgagcactacccccccctgcagtacgtgaccttcaccctggacaccctgctgatgttcctgtacaccgccgagatgatcgccaagatgcacatcagaggcatcgtgaagggcgacagcagctacgtgaaggacagatggtgcgtgttcgacggcttcatggtgttctgcctgtgggtgagcctggtgctgcaggtgttcgagatcgccgacatcgtggaccagatgagcccctggggcatgctgagaatccccagacccctgatcatgatcagagccttcagaatctacttcagattcgagctgcccagaaccagaatcaccaacatcctgaagagaagcggcgagcagatctggagcgtgagcatcttcctgctgttcttcctgctgctgtacggcatcctgggcgtgcagatgttcggcaccttcacctaccactgcgtggtgaacgacaccaagcccggcctgagcctgtag

SEQ ID NO: 314045 - DNA, 657 bp, Artificial Sequence
  derived and/or modified sequence
atgctgaagagaaagcagagcagcagagtggaggcccagcccgtgaccgacttcggccccgacgagagcctgagcgacaacgccgacatcctgtggatcaacaagccctgggtgcacagcctgctgagaatctgcgccatcatcagcgtgatcagcgtgtgcatgaacacccccatgaccttcgagcactacccccccctgcagtacgtgaccttcaccctggacaccctgctgatgttcctgtacaccgccgagatgatcgccaagatgcacatcagaggcatcgtgaagggcgacagcagctacgtgaaggacagatggtgcgtgttcgacggcttcatggtgttctgcctgtgggtgagcctggtgctgcaggtgttcgagatcgccgacatcgtggaccagatgagcccctggggcatgctgagaatccccagacccctgatcatgatcagagccttcagaatctacttcagattcgagctgcccagaaccagaatcaccaacatcctgaagagaagcggcgagcagatctggagcgtgagcatcttcctgctgttcttcctgctgctgtacggcatcctgggcgtgcagatgttcggcaccttcacctaccactgcgtggtgaacgacaccaagcccggcctgagcatctag

SEQ ID NO: 314046 - DNA, 225 bp, Artificial Sequence
  derived and/or modified sequence
atgaagttccaggagtgccacagcgaggtgatgagacacggccagaagatctaccccagccaccacagaatcgagatggccgtggagatcgccagcctgaagtgccagcacagcagcatcaaccagagccccaccagaaagaacagcaacagcaccaccggctggctgctgtgggacctgctgatgggcatcggcaacagcggcagcaacgtggtgctgacctag

SEQ ID NO: 314047 - DNA, 405 bp, Artificial Sequence
  derived and/or modified sequence
atgatccccgtgagaggcctgtggtactgctacctgcaggtgaagaaggtgagactgagagaggccgagagactgggccccaagagccagtgccccgccgagtgcggcgccgccagctggatcagctgggtgctgcagcaccagcagctgctggccagcgagtgggccaccaaggacggcagaggcacctggggcagcaagcccagctgcaccgtgcccgccctgagcgccaccagccagctgctgcagctgggcagactgaacagcgacctgcagttcgtgagacagagagccaagaagagcgtgagcagccccagcctgctgcagttctggtgctgcctgagcagactgagcttccacgccctgaaccagaagatcaacagcaccaacatcaacatcacctag

SEQ ID NO: 314048 - DNA, 240 bp, Artificial Sequence
  derived and/or modified sequence
atgaagctggccaagacagctgtgctggaccctgccacctacaccagcttcagccctggcctgagcacctgcagcagcagccagcccccaggggacaggaggaagggcctgctgggctgtgtgggcagcggccactgccccctgcccaccccagcccagttccccaaggtgcagaggcctcccaccctgctgggcggcaagaacaccagcacccagaccaccctgcaccctgtgatctag

SEQ ID NO: 314049 - DNA, 397 bp, Artificial Sequence
  derived and/or modified sequence
caactgggagctctcagtaaaattgcatgataaagttcataccgtagtagcatcaaacaatgggtcagtgttctcggtggaagttgatgggtcgaaactaaatgtgaccagcacgtggaacctggcttcgcccttattgtctgtcagcgttgatggcactcagaggactgtccagtgtctttctcgagaagcaggtggaaacatgagcattcagtttcttggtacagtgccctggagaaagcttctggattgactgtgagaagcttggcagaaggtgctgcggcctggtggctggctcagcaggaggcctgggattgaaagctctcggtttgtacaagctcttttggatttgtaacacttttattttaaatctccaataaatgtaaatattttggtc

SEQ ID NO: 314050 - protein, 280 aa, Artificial Sequence
  derived and/or modified sequence
MAPAKATNVVRLLLGSTALWLSQLGSGTVAASKSVTAHLAAKWPETPLLLEASEFMAEESNEKFWQFLETVQELAIYKQTESDYSYYNLILKKAGQFLDNLHINLLKFAFSIRAYSPAIQMFQQIAADEPPPDGCNAFVVIHKKHTCKINEIKKLLKKAASRTRPYLFKGDHKFPTNKENLPVVILYAEMGTRTFSAFHKVLSEKAQNEEILYVLRHYIQKPSSRKMYLSGYGVELAIKSTEYKALDDTQVKTVTNTTVEDETETNEVQGFLFGKLKLVY

SEQ ID NO: 314051 - protein, 278 aa, Artificial Sequence
  derived and/or modified sequence
MAPAKATNVVRLLLGSTALWLSQLGSGTVAASKSVTAHLAAKWPETPLLLEASEFMAEESNEKFWQFLETVQELAIYKQTESDYSYYNLILKKAGQFLDNLHINLLKFAFSIRAYSPAIQMFQQIAADEPPPDGCNAFVVIHKKHTCKINEIKKLLKKAASRTRPYLFKGDHKFPTNKENLPVVILYAEMGTRTFSAFHKVLSEKAQNEEILYVLRHYIQKPSSRKMYLSGYGVELAIKSTEYKALDDTQVKTVTNTTVEDETETNEVQGFLFGKLKS

SEQ ID NO: 314052 - protein, 261 aa, Artificial Sequence [sequence omitted]

SEQ ID NO: 314053 - protein, 372 aa, Artificial Sequence
  derived and/or modified sequence
MAPAKATNVVRLLLGSTALWLSQLGSGTVAASKSVTAHLAAKWPETPLLLEASEFMAEESNEKFWQFLETVQELAIYKQTESDYSYYNLILKKAGQFLDNLHINLLKFAFSIRAYSPAIQMFQQIAADEPPPDGCNAFVVIHKKHTCKINEIKKLLKKAASRTRPYLFKGDHKFPTNKENLPVVILYAEMGTRTFSAFHKVLSEKAQNEEILYVLRHYIQKPSSRKMYLSGYGVELAIKSTEYKALDDTQVKTVTNTTVEDETETNEVQGFLFGKLKEIYSDLRDNLTAFQKYLIESNKQMMPLKVWELQDLSFQAASQIMSAPVYDSIKLMKDISQNFPIKARLRMNILICLFQSTLNVKNLRSRHLYNKT

SEQ ID NO: 314054 - DNA, 843 bp, Artificial Sequence
  derived and/or modified sequence
atggcccccgccaaggccaccaacgtggtgagactgctgctgggcagcaccgccctgtggctgagccagctgggcagcggcaccgtggccgccagcaagagcgtgaccgcccacctggccgccaagtggcccgagacccccctgctgctggaggccagcgagttcatggccgaggagagcaacgagaagttctggcagttcctggagaccgtgcaggagctggccatctacaagcagaccgagagcgactacagctactacaacctgatcctgaagaaggccggccagttcctggacaacctgcacatcaacctgctgaagttcgccttcagcatcagagcctacagccccgccatccagatgttccagcagatcgccgccgacgagcccccccccgacggctgcaacgccttcgtggtgatccacaagaagcacacctgcaagatcaacgagatcaagaagctgctgaagaaggccgccagcagaaccagaccctacctgttcaagggcgaccacaagttccccaccaacaaggagaacctgcccgtggtgatcctgtacgccgagatgggcaccagaaccttcagcgccttccacaaggtgctgagcgagaaggcccagaacgaggagatcctgtacgtgctgagacactacatccagaagcccagcagcagaaagatgtacctgagcggctacggcgtggagctggccatcaagagcaccgagtacaaggccctggacgacacccaggtgaagaccgtgaccaacaccaccgtggaggacgagaccgagaccaacgaggtgcagggcttcctgttcggcaagctgaagctggtgtactag

SEQ ID NO: 314055 - DNA, 837 bp, Artificial Sequence
  derived and/or modified sequence
atggcccccgccaaggccaccaacgtggtgagactgctgctgggcagcaccgccctgtggctgagccagctgggcagcggcaccgtggccgccagcaagagcgtgaccgcccacctggccgccaagtggcccgagacccccctgctgctggaggccagcgagttcatggccgaggagagcaacgagaagttctggcagttcctggagaccgtgcaggagctggccatctacaagcagaccgagagcgactacagctactacaacctgatcctgaagaaggccggccagttcctggacaacctgcacatcaacctgctgaagttcgccttcagcatcagagcctacagccccgccatccagatgttccagcagatcgccgccgacgagcccccccccgacggctgcaacgccttcgtggtgatccacaagaagcacacctgcaagatcaacgagatcaagaagctgctgaagaaggccgccagcagaaccagaccctacctgttcaagggcgaccacaagttccccaccaacaaggagaacctgcccgtggtgatcctgtacgccgagatgggcaccagaaccttcagcgccttccacaaggtgctgagcgagaaggcccagaacgaggagatcctgtacgtgctgagacactacatccagaagcccagcagcagaaagatgtacctgagcggctacggcgtggagctggccatcaagagcaccgagtacaaggccctggacgacacccaggtgaagaccgtgaccaacaccaccgtggaggacgagaccgagaccaacgaggtgcagggcttcctgttcggcaagctgaagagctag

SEQ ID NO: 314056 - DNA, 786 bp, Artificial Sequence
  derived and/or modified sequence
atggcccccgccaaggccaccaacgtggtgagactgctgctgggcagcaccgccctgtggctgagccagctgggcagcggcaccgtggccgccagcaagagcgtgaccgcccacctggccgccaagtggcccgagacccccctgctgctggaggccagcgagttcatggccgaggagagcaacgagaagttctggcagttcctggagaccgtgcaggagctggccatctacaagcagaccgagagcgactacagctactacaacctgatcctgaagaaggccggccagttcctggacaacctgcacatcaacctgctgaagttcgccttcagcatcagagcctacagccccgccatccagatgttccagcagatcgccgccgacgagcccccccccgacggctgcaacgccttcgtggtgatccacaagaagcacacctgcaagatcaacgagatcaagaagctgctgaagaaggccgccagcagaaccagaccctacctgttcaagggcgaccacaagttccccaccaacaaggagaacctgcccgtggtgatcctgtacgccgagatgggcaccagaaccttcagcgccttccacaaggtgctgagcgagaaggcccagaacgaggagatcctgtacgtgctgagacactacatccagaagcccagcagcagaaagatgtacctgagcggctacggcgtggagctggccatcaagagcaccgagtacaaggccctggacgacacccaggtgaaggtgttccaggaccccgaggccttcttctag

SEQ ID NO: 314057 - DNA, 1119 bp, Artificial Sequence
  derived and/or modified sequence
atggcccccgccaaggccaccaacgtggtgagactgctgctgggcagcaccgccctgtggctgagccagctgggcagcggcaccgtggccgccagcaagagcgtgaccgcccacctggccgccaagtggcccgagacccccctgctgctggaggccagcgagttcatggccgaggagagcaacgagaagttctggcagttcctggagaccgtgcaggagctggccatctacaagcagaccgagagcgactacagctactacaacctgatcctgaagaaggccggccagttcctggacaacctgcacatcaacctgctgaagttcgccttcagcatcagagcctacagccccgccatccagatgttccagcagatcgccgccgacgagcccccccccgacggctgcaacgccttcgtggtgatccacaagaagcacacctgcaagatcaacgagatcaagaagctgctgaagaaggccgccagcagaaccagaccctacctgttcaagggcgaccacaagttccccaccaacaaggagaacctgcccgtggtgatcctgtacgccgagatgggcaccagaaccttcagcgccttccacaaggtgctgagcgagaaggcccagaacgaggagatcctgtacgtgctgagacactacatccagaagcccagcagcagaaagatgtacctgagcggctacggcgtggagctggccatcaagagcaccgagtacaaggccctggacgacacccaggtgaagaccgtgaccaacaccaccgtggaggacgagaccgagaccaacgaggtgcagggcttcctgttcggcaagctgaaggagatctacagcgacctgagagacaacctgaccgccttccagaagtacctgatcgagagcaacaagcagatgatgcccctgaaggtgtgggagctgcaggacctgagcttccaggccgccagccagatcatgagcgcccccgtgtacgacagcatcaagctgatgaaggacatcagccagaacttccccatcaaggccagactgagaatgaacatcctgatctgcctgttccagagcaccctgaacgtgaagaacctgagaagcagacacctgtacaacaagacctag

SEQ ID NO: 314058 - DNA, 843 bp, Artificial Sequence
  derived and/or modified sequence
atggccccagccaaggccacgaacgtcgttcgtctgttgctgggttctacggctctgtggctctcccagcttgggtccggaactgtcgccgcttccaagtccgttacagcccatctggcagctaaatggcccgagacaccgctcttattggaggctagcgaatttatggcagaggagagtaacgaaaaattctggcagttcctcgagacagtccaagagctggctatttacaaacaaactgaatcagattattcttactacaatctcattctgaagaaggcggggcagttcctggacaacctgcacattaatttgctcaaatttgcattttccattcgggcctattcacctgccatccagatgtttcagcagatcgccgctgacgaaccacctccagatggctgcaatgcttttgtcgtgatccacaagaagcatacatgtaagataaacgagattaaaaaactcctcaaaaaagcggcaagccggacccggccctacctgtttaaaggcgatcataagttccccaccaataaggaaaacttaccagtggtgattctctacgctgagatggggactcgcacattcagtgcctttcacaaagtgctcagcgaaaaggcccaaaatgaagagatcctttatgtgctacgccattacatacaaaagccaagctcaagaaaaatgtatctctccgggtacggagttgagttagcaattaaaagtacagaatataaagctctcgatgacacccaagtgaaaaccgtgaccaacacaacagtggaagacgagactgagaccaatgaggttcaggggttcctcttcggcaagctgaaactggtctactag

SEQ ID NO: 314059 - DNA, 837 bp, Artificial Sequence
  derived and/or modified sequence
atggcccctgctaaagccaccaatgtggtgcggctgctgcttggctccaccgccctgtggctgagtcaactgggctctggcaccgttgccgcctctaagagcgtcaccgcacaccttgccgccaaatggccagagaccccactgcttctggaggcttcagagttcatggctgaagaaagcaacgaaaaattctggcagtttctcgaaacagtgcaggaattagccatctacaagcagactgagagcgactactcatactataatctgattcttaaaaaggctggccagttccttgacaaccttcatatcaacttactcaagttcgcctttagcatccgagcctacagccctgccattcaaatgtttcaacagatagcagctgatgaacctccccccgacggttgtaacgcgttcgtcgtaatccataaaaagcatacatgtaaaataaacgagataaagaaactccttaaaaaggctgctagtcgaacccggccatatctcttcaagggtgaccacaaatttccgaccaacaaagaaaacctgcctgtagtcattctatatgcggaaatgggaactcggacgttctcagcttttcacaaagtactcagcgaaaaggcgcagaatgaggagatcctttatgttctgcggcattatatacagaagccgtcctctcgtaagatgtacttgtctggatacggagtcgagctggcaataaagtccactgaatataaagccttggacgatacccaggtgaaaaccgtgacaaacacgaccgttgaggacgaaaccgagaccaacgaggtgcaggggttcctctttgggaagctaaagagctag

SEQ ID NO: 314060 - DNA, 786 bp, Artificial Sequence
  derived and/or modified sequence
atggctcctgctaaagctaccaatgtggtgcgcctcctgctgggctccacggccttgtggttatctcagttggggagcggtacagtcgccgcctctaagtccgtgactgcacacctggccgctaaatggccagaaaccccactgttgctggaggccagtgagtttatggccgaagaatctaacgaaaaattttggcaattcttggaaaccgttcaggagctcgccatctacaagcagacagagagtgactacagctattacaatctcatcctaaaaaaagccgggcaattcctggataatttgcacatcaacctcctgaaattcgcgttttctatccgagcctattcgccagcaatacagatgttccaacagattgcagccgacgaacctcccccagacggctgcaatgcttttgtggtgatccataaaaagcacacctgcaagatcaacgagatcaaaaaactgctgaaaaaggcagcctcccggacccgaccttacttatttaagggggatcataaatttccgaccaataaggagaatttgcctgtggtgattctgtacgctgagatgggaacaaggaccttttctgcattccataaagttctgtccgaaaaagcccagaacgaagaaattttgtatgtgctgcgccactacattcagaagccatcaagcagaaagatgtacctttcggggtacggcgtggagcttgctatcaagagcacagagtataaagctcttgacgatacacaggtcaaggtattccaagaccctgaagcctttttctag

SEQ ID NO: 314061 - DNA, 1119 bp, Artificial Sequence
  derived and/or modified sequence
atggcccctgccaaagccaccaacgtcgtgaggcttctgctaggatcaacagccttgtggcttagccaactgggatctggaaccgtagctgcatccaagtctgtaaccgctcacctcgccgctaagtggcccgaaacccctctgctcctggaagctagcgaatttatggccgaagagtctaatgagaagttctggcagttccttgaaacagtgcaggaacttgcaatctataagcagactgagtccgattattcgtattacaacctgattctgaagaaggcggggcaatttctggacaacctgcacattaacctattgaagttcgcctttagcataagggcttacagcccggctatccagatgtttcagcaaatcgcagctgacgagccccctcccgatgggtgtaacgcgttcgttgtgattcataagaagcatacatgtaagatcaacgaaattaagaagttgctaaagaaagcagcctcgaggactagaccctacctgttcaaaggcgaccacaaatttccaactaataaggaaaacttgcccgtagtcatcctgtacgcagaaatgggtacgcgcaccttctcggccttccataaagttctgtctgaaaaagctcagaatgaggagatactgtatgttctccgccactacatacagaagccatcctcacgcaaaatgtacctgtctggctacggggtcgaacttgcaatcaagtctactgagtacaaggcattagacgatactcaggtgaagactgtgaccaatacaactgtggaagacgagaccgagacaaacgaggtgcagggatttctgttcgggaaattgaaagagatctatagtgacctgcgcgacaaccttaccgcctttcagaaataccttatcgaaagtaacaaacaaatgatgccattgaaggtttgggagctgcaggacttgagcttccaggccgcatcacagattatgtcagcacccgtgtacgacagcataaagctaatgaaagatatttctcagaatttcccaataaaggctaggttgaggatgaacattctgatctgtttgttccaatcaacactgaatgtgaaaaatctaagaagcaggcacttatacaataagacttag

SEQ ID NO: 314062 - DNA, 843 bp, Artificial Sequence
  derived and/or modified sequence
atggccccagccaaggccaccaacgtggtgcggctgctgctgggcagcacagccctgtggctgagccagctgggcagcggcaccgtggccgccagcaagtctgtgacagcccacctggccgccaagtggccagagacccccctgctgctggaggccagcgagttcatggccgaggagagcaatgagaagttctggcagttcctggagaccgtgcaggagctggccatctacaagcagacagaaagtgactacagctactacaacctgatcctgaagaaggccggccagttcctggacaacctgcacatcaacctgctgaagtttgccttcagcatccgggcctacagccctgccatccagatgttccagcagattgctgctgatgagcccccaccagatggctgcaatgcctttgtggtgatccacaagaagcacacctgcaagatcaatgagatcaagaagctgctgaagaaggccgccagcaggacccggccctacctgttcaagggggaccacaagttccccaccaacaaggagaacctgcctgtggtgatcctgtatgcagagatgggcaccaggaccttcagcgccttccacaaggtgctgtctgagaaggcccagaatgaggagatcctgtatgtgctgcggcactacatccagaagcccagcagcaggaagatgtacctgagcggctacggcgtggagctggccatcaagagcacagagtacaaggccctggatgacacccaggtgaagacagtgaccaacaccaccgtggaggatgaaacagagaccaatgaggtgcagggcttcctgtttgggaagctgaagctggtgtactag

SEQ ID NO: 314063 - DNA, 837 bp, Artificial Sequence
  derived and/or modified sequence
atggccccagccaaggccaccaacgtggtgcggctgctgctgggcagcacagccctgtggctgagccagctgggcagcggcaccgtggccgccagcaagtctgtgacagcccacctggccgccaagtggccagagacccccctgctgctggaggccagcgagttcatggccgaggagagcaatgagaagttctggcagttcctggagaccgtgcaggagctggccatctacaagcagacagaaagtgactacagctactacaacctgatcctgaagaaggccggccagttcctggacaacctgcacatcaacctgctgaagtttgccttcagcatccgggcctacagccctgccatccagatgttccagcagattgctgctgatgagcccccaccagatggctgcaatgcctttgtggtgatccacaagaagcacacctgcaagatcaatgagatcaagaagctgctgaagaaggccgccagcaggacccggccctacctgttcaagggggaccacaagttccccaccaacaaggagaacctgcctgtggtgatcctgtatgcagagatgggcaccaggaccttcagcgccttccacaaggtgctgtctgagaaggcccagaatgaggagatcctgtatgtgctgcggcactacatccagaagcccagcagcaggaagatgtacctgagcggctacggcgtggagctggccatcaagagcacagagtacaaggccctggatgacacccaggtgaagacagtgaccaacaccaccgtggaggatgaaacagagaccaatgaggtgcagggcttcctgtttgggaagctgaagagctag

SEQ ID NO: 314064 - DNA, 786 bp, Artificial Sequence
  derived and/or modified sequence
atggccccagccaaggccaccaacgtggtgcggctgctgctgggcagcacagccctgtggctgagccagctgggcagcggcaccgtggccgccagcaagtctgtgacagcccacctggccgccaagtggccagagacccccctgctgctggaggccagcgagttcatggccgaggagagcaatgagaagttctggcagttcctggagaccgtgcaggagctggccatctacaagcagacagaaagtgactacagctactacaacctgatcctgaagaaggccggccagttcctggacaacctgcacatcaacctgctgaagtttgccttcagcatccgggcctacagccctgccatccagatgttccagcagattgctgctgatgagcccccaccagatggctgcaatgcctttgtggtgatccacaagaagcacacctgcaagatcaatgagatcaagaagctgctgaagaaggccgccagcaggacccggccctacctgttcaagggggaccacaagttccccaccaacaaggagaacctgcctgtggtgatcctgtatgcagagatgggcaccaggaccttcagcgccttccacaaggtgctgtctgagaaggcccagaatgaggagatcctgtatgtgctgcggcactacatccagaagcccagcagcaggaagatgtacctgagcggctacggcgtggagctggccatcaagagcacagagtacaaggccctggatgacacccaggtgaaggtgttccaggaccctgaggccttcttctag

SEQ ID NO: 314065 - DNA, 1119 bp, Artificial Sequence
  derived and/or modified sequence
atggccccagccaaggccaccaacgtggtgcggctgctgctgggcagcacagccctgtggctgagccagctgggcagcggcaccgtggccgccagcaagtctgtgacagcccacctggccgccaagtggccagagacccccctgctgctggaggccagcgagttcatggccgaggagagcaatgagaagttctggcagttcctggagaccgtgcaggagctggccatctacaagcagacagaaagtgactacagctactacaacctgatcctgaagaaggccggccagttcctggacaacctgcacatcaacctgctgaagtttgccttcagcatccgggcctacagccctgccatccagatgttccagcagattgctgctgatgagcccccaccagatggctgcaatgcctttgtggtgatccacaagaagcacacctgcaagatcaatgagatcaagaagctgctgaagaaggccgccagcaggacccggccctacctgttcaagggggaccacaagttccccaccaacaaggagaacctgcctgtggtgatcctgtatgcagagatgggcaccaggaccttcagcgccttccacaaggtgctgtctgagaaggcccagaatgaggagatcctgtatgtgctgcggcactacatccagaagcccagcagcaggaagatgtacctgagcggctacggcgtggagctggccatcaagagcacagagtacaaggccctggatgacacccaggtgaagacagtgaccaacaccaccgtggaggatgaaacagagaccaatgaggtgcagggcttcctgtttgggaagctgaaggagatctacagcgacctgcgggacaacctgacagccttccagaagtacctgattgagagcaacaagcagatgatgcccctgaaggtgtgggagctgcaggacctgtccttccaggccgccagccagatcatgtctgcccctgtgtatgacagcatcaagctgatgaaggacatcagccagaacttccccatcaaggcccggctgaggatgaacatcctgatctgcctcttccagagcaccctgaatgtgaagaacctgcggagccgccacctgtacaacaagacctag

SEQ ID NO: 314066 - DNA, 843 bp, Artificial Sequence
  derived and/or modified sequence
atggcccccgccaaggccaccaacgtggtgcggctgctgctgggctctaccgcactgtggctgagccagctaggttctggcacagtcgctgccagcaaaagcgttaccgctcatcttgctgccaagtggcccgagaccccactgctgctggaggccagtgaattcatggctgaggaatctaatgagaaattttggcagttcctagagacagtgcaagagctcgctatttacaaacagaccgagtccgattactcatactataatttaatactgaaaaaggccggccagtttctggataacctgcatattaatctgctgaagtttgcattttccatcagagcgtattcgcctgccatacagatgttccaacagattgcagccgacgaaccccctcccgacggatgcaatgcctttgtggttattcacaaaaaacatacatgtaagatcaatgaaattaaaaagcttctcaagaaggccgctagtcgtaccaggccctacttgttcaaaggagaccataaattcccaactaataaggaaaacttgccagttgttattctttacgccgagatgggaaccaggaccttctctgcctttcataaggttttgtccgaaaaggcacagaacgaagagatcttgtacgtgctcaggcactatattcaaaagccttcctcgaggaaaatgtacctcagcggctatggggttgaactggcaatcaaaagcactgagtacaaggccttggatgatacacaggtgaagaccgtgactaacactaccgtcgaagatgagaccgaaaccaatgaggtacagggcttcctctttggcaaactgaagctagtctactag

SEQ ID NO: 314067 - DNA, 837 bp, Artificial Sequence
  derived and/or modified sequence
atggcccccgccaaggccaccaacgtggtgcggctgctgctgggctcgacggccctgtggctgtctcagctggggtccgggacagtggccgcttccaagtccgtaactgcccatcttgccgccaagtggcccgaaaccccattactgctggaggctagcgagttcatggccgaggagtcaaatgagaaattttggcagttcctggagacggttcaagagctggccatctataaacagacagaaagtgactacagctactataacctgatcctgaaaaaggccggacagtttctggacaaccttcacatcaatctgctcaaattcgccttctcgattcgggcctacagtcctgctattcagatgtttcagcagatcgctgctgacgaaccaccccccgacggatgcaacgctttcgtggttattcacaaaaagcatacctgcaaaatcaacgagataaaaaagctcttgaagaaggcagcctctcggactcggccctatttattcaagggagaccataagtttcccaccaacaaggagaacctgcctgtggtaattttgtatgcagaaatgggtacgcgcactttcagtgcatttcacaaggtactctcagaaaaggcccagaatgaggaaattctctatgtgctgagacactatattcaaaagccaagctcacggaaaatgtacctgtctgggtatggtgtggagctggccatcaagtcaacagaatataaggctttagacgacacccaggtcaagaccgtcacaaatacgaccgttgaggacgagaccgagacaaatgaagtgcagggttttctgttcgggaagttaaaatcttag

SEQ ID NO: 314068 - DNA, 786 bp, Artificial Sequence
  derived and/or modified sequence
atggcccccgccaaggccaccaacgtggtgcggctgctgctgggctctaccgccctttggctttcgcagctcgggtccggaacagtggcggcctcaaagtccgtcactgcccatctcgcggctaagtggcccgaaacacccctgttactggaagcaagcgaattcatggctgaagagagcaacgagaagttctggcagttccttgagaccgtccaagagcttgcgatttacaagcagaccgaaagcgattattcctactacaatttaattctgaaaaaggccggtcaatttcttgataacctacatataaatctgctcaagtttgcatttagtatccgggcctactcccctgccatacagatgttccaacaaattgctgccgacgagcccccccccgatggttgtaatgctttcgtggtgatccacaagaagcacacctgcaagattaacgagatcaagaaactgctgaagaaagcagcaagtcgcacccggccctatcttttcaaaggcgatcataagttccccacaaataaggagaacttgcctgtggttatcttatatgccgaaatgggtacgcgcactttttcggcatttcacaaggttttatccgaaaaggcccaaaatgaagaaattttatacgtgttgcgacattatattcagaagccctccagccgcaaaatgtacctgagtggttatggggttgaactggcgatcaagagcaccgaatataaagctcttgatgacactcaggtcaaagtgttccaagatccagaggcttttttctag

SEQ ID NO: 314069 - DNA, 1119 bp, Artificial Sequence
  derived and/or modified sequence
atggcccccgccaaggccaccaacgtggtgcggctgctgctgggctccaccgccctgtggctgtcacaactcggtagcgggaccgtagccgccagtaaaagcgttaccgcccatttggcagcgaagtggccagaaacacccttactgttggaagcgagtgaatttatggcagaggagtccaacgagaagttttggcagtttctagaaactgtccaggaactcgcaatctacaagcagactgaatctgattattcctactataatctcatcctgaagaaggcagggcagttccttgataacttacatattaatcttcttaagtttgccttcagcatccgggcgtactctcctgctatccagatgtttcaacagattgccgcagacgaacctccaccggacggctgtaatgctttcgtggtcattcataaaaaacacacgtgcaaaattaatgagatcaaaaagctgctcaaaaaagctgcaagtcggactcgtccatacctgtttaagggggaccacaagttcccaaccaataaggagaatctgcctgtggtgatcctgtacgctgaaatgggtacaaggacgttttcagcttttcacaaggtactttctgagaaggcccagaatgaagaaatcctatacgttttacgacactatatccagaagccttcatccaggaagatgtacctgtcaggatacggagtggagctggcaatcaagtccaccgagtacaaggccttagacgatacacaagtcaagaccgtaaccaacaccacggtagaggacgaaaccgaaacgaatgaggtgcagggattccttttcggtaagttgaaggaaatatactccgacctcagggacaatctcaccgcgtttcagaaatacctgattgagagtaacaaacaaatgatgccgcttaaagtgtgggagctgcaggacctcagctttcaggccgcctcccagatcatgtctgctcctgtgtacgactcgataaaactgatgaaggatatctcccagaacttccctatcaaggcccgcctgagaatgaatatcttaatatgtttgttccagtctactcttaacgtgaagaatctccgatctcggcacctctacaataagacttag

SEQ ID NO: 314070 - DNA, 843 bp, Artificial Sequence
  derived and/or modified sequence
atggctcccgcaaaggccacaaatgtggttcggttgctgcttggatccaccgccctttggttatcacagctcgggtcaggaactgtggcagctagcaagtccgtgaccgcccacctggcggcaaagtggcctgaaacaccactgttgctggaggcatcagagttcatggcagaagaatcgaacgagaagttttggcagttcttggagaccgtccaagagctggcaatctacaagcagactgagtcagattactcttattataatctgattctgaaaaaggctggacagttcttagataaccttcatattaacctgcttaagttcgccttttcaataagggcctactctccggctattcagatgtttcagcagatcgccgctgatgagccacccccagatggttgtaatgctttcgtagtcattcataagaagcatacctgtaaaatcaatgagatcaagaagttgctcaagaaggcagcatccaggacacgtccatatctttttaagggggaccataagtttcctactaacaaggagaacctgccagtggtgattctttacgccgaaatgggcacacggactttcagcgcattccataaagtgttaagcgaaaaggctcagaacgaagagattctctacgtgcttagacactacatccaaaagccaagcagccgtaagatgtacttgtccggatatggggtcgaattagccattaaatctaccgagtacaaggccttagatgatacccaagtgaaaacagtaacaaacacaactgtagaggatgaaaccgagactaacgaagtgcaaggctttttgttcggtaaacttaaactcgtctactag

SEQ ID NO: 314071 - DNA, 837 bp, Artificial Sequence
  derived and/or modified sequence
atggccccagctaaggcgacgaatgtagtgcggctcctgcttggatcgactgccctctggctcagtcagttaggatcgggaaccgttgccgcatcaaagtctgtgaccgcccatctggccgctaagtggccagagacccccttgttgctggaggcgtccgaatttatggccgaagagtccaacgaaaagttctggcaatttctggaaacagtacaggaactagccatctataagcagactgaatctgattactcctactacaatctcatcctgaagaaggccggacagtttcttgataatttacatattaacctcttgaagtttgccttctccatacgggcatattctccagccatccagatgtttcagcagatcgctgccgatgaacctccgccagacggatgcaacgcatttgtggtcattcacaagaaacacacatgcaaaattaatgagatcaagaagttgcttaaaaaggcggcatccagaacaaggccctacctcttcaagggcgaccacaaatttccaaccaacaaagagaatctgcccgtcgtgatcctgtacgctgaaatggggaccagaacctttagcgcatttcacaaggtactgtctgaaaaggcccagaacgaagaaatactgtatgtgctgaggcattacattcagaaaccctcatcccgtaagatgtacctctccggctatggcgttgagctggcaattaaatcaaccgaatacaaggccttagatgacacccaggtgaaaactgtcactaatacgaccgttgaagacgaaacggaaacaaacgaagtgcagggcttcctctttgggaagctcaaatcctag

SEQ ID NO: 314072 - DNA, 786 bp, Artificial Sequence
  derived and/or modified sequence
atggccccagccaaagcaaccaatgtagtgagactgttgctcgggtctaccgctctgtggctgtcacagcttggcagcgggactgtagcggcttctaaaagcgtcacagcccacctggctgccaagtggccagagacccctctcctgctggaggcttctgagttcatggctgaggaatccaacgagaagttctggcaattccttgaaaccgtacaagagcttgcaatatataagcaaaccgagagcgactactcatattacaatctaatcttgaagaaagctggacagtttctggacaatctgcatattaacctgctgaagttcgcattttccattcgggcatatagcccagcaatacagatgtttcaacagattgcagccgatgaacctccgcctgatgggtgtaacgcctttgttgtgatccataagaaacacacttgtaagatcaatgaaatcaaaaagctgctcaagaaggctgctagcagaaccaggccatacctcttcaagggagaccataagtttccaaccaataaggaaaacctgccagtcgtaatcttgtatgccgaaatgggcactcgcacattcagtgccttccataaggttttgtcagagaaagcccagaacgaggaaattttatacgtgctcagacattatatccaaaagccatccagtaggaaaatgtatctgtcaggctatggcgtggaattggccatcaaatccacagaatacaaggcgttagacgacacacaagttaaggtctttcaggatcccgaggcattcttttag

SEQ ID NO: 314073 - DNA, 1119 bp, Artificial Sequence
  derived and/or modified sequence
atggccccagctaaagccactaatgtggtgagactgcttctggggtcaaccgctttatggttgagtcaattgggaagtggaactgtggccgctagcaaatcagttacagcgcatttagcggcaaagtggcctgagaccccactccttcttgaagcctcagagtttatggcagaagagagtaatgaaaaattctggcagtttctagagaccgtgcaggagctggccatctacaaacagactgagtctgattatagctactacaatctgatcctgaaaaaggcaggccagttcctggacaacttacacattaatcttctaaagttcgccttctccattcgggcatacagccccgctattcagatgtttcagcagatcgctgcggacgaaccaccacccgacggctgtaacgcttttgtcgtgatccataagaaacacacctgtaagattaatgagatcaaaaaactactgaagaaagctgccagccggactagaccgtatttatttaaaggcgatcataagtttcccactaacaaggaaaacctgcctgttgtcattctgtacgcagagatgggcactcggacattttcggcctttcataaggttctcagtgagaaggcccagaacgaagaaattctatatgtgttgaggcactatattcagaaaccaagtagtaggaaaatgtatctgtcgggatacggagtagaactagccatcaagtccactgagtataaggcgcttgacgatacgcaggtcaaaaccgtcactaacaccacagtcgaagacgagactgagacgaatgaggtccagggtttcctgttcgggaagttaaaagaaatttattccgacttgagggataacctgaccgctttccagaaatacctgatcgagtctaacaagcaaatgatgccattgaaggtgtgggagctgcaggacttgagctttcaggccgctagccagatcatgtccgccccagtgtatgactccatcaaattaatgaaagatattagccagaactttcctattaaggcaaggttacgcatgaatattctgatttgcttattccagagcaccttgaatgtcaagaatctgcgctcaaggcatctctataacaagacttag

SEQ ID NO: 314074 - DNA, 2240 bp, Artificial Sequence
  derived and/or modified sequence
agcgggaagagccggccgaagcgtggcggccacagactgtgggtaccgggtccgagggactcgcgcttttctctccgtgccatggcgccagcgaaagccacgaacgtggtgcggctgctactaggctccacagcgctgtggctttcgcagctcggctccgggacggtcgccgcgtccaagtcggtgactgcccacttggccgcgaagtggcccgagaccccgctgctgctggaggcaagtgaatttatggcagaagaaagtaatgaaaaattttggcagtttttggaaactgtgcaagaattagcaatttataagcaaacagaatcagattattcttattacaacttaatcctgaagaaagctggacagtttctagacaatttacacatcaaccttttaaagtttgctttctctataagggcatactccccagctattcagatgtttcagcagattgcagctgatgagccaccaccagatggttgtaatgcatttgtggttattcataagaagcacacctgtaaaattaatgagattaaaaagctgctgaagaaagctgcttcaaggactagaccttatctatttaaaggagatcacaaatttcctacaaacaaagagaacttaccagtggtgattctctatgccgaaatgggtactagaacatttagtgcatttcacaaagtattgtctgaaaaagctcaaaatgaggaaattctgtatgttcttcgccattatattcagaaaccaagctcacggaaaatgtacttatctgggtatggtgtggagctagcaattaagagtacagaatacaaagcactggatgatacccaagttaaaactgtgactaatactactgtagaggatgagactgaaacaaatgaagttcaaggatttctctttgggaaactaaagcttgtctattgactattgaaaatacgtgttttcaatgagacaccatctcacaccagttagaatgacaatcattaaaaaggaaacgacagatgctggaggggatgtggagaaataggaaggcttttacactgttggtgtgtgtgtagatgagttcaaccgttgtggaagacagtgtggcaattcctcaaggatctagaaccagaaataccatttgacccagcaatgcccattactgggtgtatacccaaaggattataaatcattctactataaagacacatgcacacgtatgttgattgtagcactattcacaatagcaaagacttcgaaccaacccaaatgtccatcaatgatagactggataaagaaaatgtggcacatatacaccatagaatactctgcatccataaaaaaggataagttcatgtcctttgcagggacatggatgaagctggaaactatcattctcagcaaactaacacaggaacagaaaaccaaacaccacatgttcttactcaaaagtgggactcgaacagtgagaacacatggacacagggaggggaatatcacacaccgtggcttgtcgggggtggggagctaggagagggatagcattaggagaaatacctaatgtggataacgggttgatgggtgcagcagaccaccatgacacgtgtatacctgtgtaacaaacctgcacgttctacacatgtatcccagaacttaaagtataataaaatgaaaatatgtattttgtaagttgtgctgatagtaacttttttaaattgtatttctccatttaaatctgaaatggcaccatgtcttgatttcatgagtgatagaggaaagaagattacagtttagattgtgtgtatagtaaaataccattctactacatcattatttggctctctaaaagatgcctagagatgtttaacaatgggtaaaattatcttattttagttttttataagaatcaaagatggaacttttcagaaataaactctgattgtatgaggcatttttgactttccttatagtttttattttcaattataaaagcaaggcttgcaatttataaaatgttaaacaaaaagtatgtaatatgaaaacataagtctgccctcatccttgcatcgcttacagttgacactaacaattgagagtatattcctccagattttgttttgtttcatatatttaataaaagagacctgtatatcttcctcattatttttaagttccgtgaatatagctgtatcacaatttatgattatcttaatgatgaatgattcatttatgtctaattacatggaatatgtaatttc

SEQ ID NO: 314075 - DNA, 1233 bp, Artificial Sequence
  derived and/or modified sequence
cgcgccggagcgggacacgcatgcgccggtctggacccggcacccagtaacggactcgagctcctcccaccggaagtgggcagccgcgcagcgggaagagccggccgaagcgtggcggccacagactgtgggtaccgggtccgagggactcgcgcttttctctccgtgccatggcgccagcgaaagccacgaacgtggtgcggctgctactaggctccacagcgctgtggctttcgcagctcggctccgggacggtcgccgcgtccaagtcggtgactgcccacttggccgcgaagtggcccgagaccccgctgctgctggaggcaagtgaatttatggcagaagaaagtaatgaaaaattttggcagtttttggaaactgtgcaagaattagcaatttataagcaaacagaatcagattattcttattacaacttaatcctgaagaaagctggacagtttctagacaatttacacatcaaccttttaaagtttgctttctctataagggcatactccccagctattcagatgtttcagcagattgcagctgatgagccaccaccagatggttgtaatgcatttgtggttattcataagaagcacacctgtaaaattaatgagattaaaaagctgctgaagaaagctgcttcaaggactagaccttatctatttaaaggagatcacaaatttcctacaaacaaagagaacttaccagtggtgattctctatgccgaaatgggtactagaacatttagtgcatttcacaaagtattgtctgaaaaagctcaaaatgaggaaattctgtatgttcttcgccattatattcagaaaccaagctcacggaaaatgtacttatctgggtatggtgtggagctagcaattaagagtacagaatacaaagcactggatgatacccaagttaaaactgtgactaatactactgtagaggatgagactgaaacaaatgaagttcaaggatttctctttgggaaactaaaatcttagttttcaagcagcttctcaaataatgtccgctccagtttatgattccattaaattaatgaaagacatttcacagaacttccccataaaagccagatctctaaccagaattgctgtaaatcaacatatgagagaagaaataaaggaaaatcaaaagtatattccagaatttcttccgaggtagtatggttttcttcataggataaagaataaaggctgtgagttaatt

SEQ ID NO: 314076 - DNA, 1945 bp, Artificial Sequence
  derived and/or modified sequence
gggactcgcgcttttctctccgtgccatggcgccagcgaaagccacgaacgtggtgcggctgctactaggctccacagcgctgtggctttcgcagctcggctccgggacggtcgccgcgtccaagtcggtgactgcccacttggccgcgaagtggcccgagaccccgctgctgctggaggcaagtgaatttatggcagaagaaagtaatgaaaaattttggcagtttttggaaactgtgcaagaattagcaatttataagcaaacagaatcagattattcttattacaacttaatcctgaagaaagctggacagtttctagacaatttacacatcaaccttttaaagtttgctttctctataagggcatactccccagctattcagatgtttcagcagattgcagctgatgagccaccaccagatggttgtaatgcatttgtggttattcataagaagcacacctgtaaaattaatgagattaaaaagctgctgaagaaagctgcttcaaggactagaccttatctatttaaaggagatcacaaatttcctacaaacaaagagaacttaccagtggtgattctctatgccgaaatgggtactagaacatttagtgcatttcacaaagtattgtctgaaaaagctcaaaatgaggaaattctgtatgttcttcgccattatattcagaaaccaagctcacggaaaatgtacttatctgggtatggtgtggagctagcaattaagagtacagaatacaaagcactggatgatacccaagttaaagtgttccaagatccagaggcttttttttaagtcagttttctcaagtcagatgttaacaataaaagtatgggaacatttatcttccattaataagtttgttaaataatatagtgcacttatttttaatgacgttaaattatatagttttatttatacttgtgatttcatatttgttagcattttaatatttctcattaataagtatgttatagaagtagtatttagacatcttgcctattagtttataacaatttataggaagctttacctttttaatgttatttttttctctaaaacaaaactactttctcttgaacatattgtttgattttgtgtgtgtgtttttaggaagtaattcctcacatggctaaagagtatggattccgatatgaactagttcaatataggtggccccgttggcttcgtcaacagactgaaagacagaggattatttggggttacaaaattcttttccttgatgttcttttcccactagcagtggacaaaatcatttttgttgatgctgaccagattgtgagacatgatctaaaagaacttcgagatttcgatctggatggagctccttatgggtatactccattttgtgatagccgcagggaaatggatggatatcgtttctggaaaacaggatactgggcatcacatcttttaagacggaaataccatatcagtgctttatatgtagtggatctcaagaagttcaggagaattggagcaggtgacaggctcaggagccagtatcaagctctcagtcaagatccaaacagtctttcaaacctagatcaggatctccccaataatatgatttaccaagtcgccattaagtctcttcctcaagactggctgtggtgtgaaacctggtgtgatgatgaatccaaacaaagagccaaaacaattgatctgtgcaataatcccaaaacaaaagaatccaaactaaaagctgctgccagaattgtcccagaatgggtggagtatgatgctgagataagacaactattagatcatcttgaaaacaagaagcaagatacaattttgacacatgatgaactctagcactggtgtatatgagaaggaaggcgaaagcatgacaggaaacctgccgcctgctggggaagtctggagcccctgctgagacgatttgg

SEQ ID NO: 314077 - DNA, 1547 bp, Artificial Sequence
  derived and/or modified sequence
gccgcgcagcgggaagagccggccgaagcgtggcggccacagactgtgggtaccgggtccgagggactcgcgcttttctctccgtgccatggcgccagcgaaagccacgaacgtggtgcggctgctactaggctccacagcgctgtggctttcgcagctcggctccgggacggtcgccgcgtccaagtcggtgactgcccacttggccgcgaagtggcccgagaccccgctgctgctggaggcaagtgaatttatggcagaagaaagtaatgaaaaattttggcagtttttggaaactgtgcaagaattagcaatttataagcaaacagaatcagattattcttattacaacttaatcctgaagaaagctggacagtttctagacaatttacacatcaaccttttaaagtttgctttctctataagggcatactccccagctattcagatgtttcagcagattgcagctgatgagccaccaccagatggttgtaatgcatttgtggttattcataagaagcacacctgtaaaattaatgagattaaaaagctgctgaagaaagctgcttcaaggactagaccttatctatttaaaggagatcacaaatttcctacaaacaaagagaacttaccagtggtgattctctatgccgaaatgggtactagaacatttagtgcatttcacaaagtattgtctgaaaaagctcaaaatgaggaaattctgtatgttcttcgccattatattcagaaaccaagctcacggaaaatgtacttatctgggtatggtgtggagctagcaattaagagtacagaatacaaagcactggatgatacccaagttaaaactgtgactaatactactgtagaggatgagactgaaacaaatgaagttcaaggatttctctttgggaaactaaaagaaatatattcagatcttagagataatctgacagcattccaaaaatacctgattgagagtaacaaacaaatgatgcctttgaaagtctgggaactacaagatcttagttttcaagcagcttctcaaataatgtccgctccagtttatgattccattaaattaatgaaagacatttcacagaacttccccataaaagccagattaagaatgaatatattgatatgcctctttcagtcaactttaaatgtcaagaatttgagaagtcgtcatttatataataaaacatgaaatatatatgggtgtgtataaatgtcatatctgtttagccataatattttaattaatggccgttataaaaattattagatcaaatacaaataaagtaaaataactttagtcttgatcagacagttgattagctctattgatgctaagtcagtataactgttcagaggttctgatgcaaaactctgctgttaatctgtaattaagaaaaaattataaaatatgctaacattgcttaatggctaaattgtaggcttgagcatatctctaaaaccacttggtagacaatctgtaaatgtttgttgaaatgaaatatttgctaaataaatgaaaaatttgcctt

SEQ ID NO: 314078 - protein, 260 aa, Artificial Sequence
  derived and/or modified sequence
MLLDAGPQFPAIGVGSFARHHHHSAAAAAAAAAEMQDRELSLAAAQNGFVDSAAAHMGAFKLNPGAHELSPGQSSAFTSQGPGAYPGSAAAAAAAAALGPHAAHVGSYSGPPFNSTRDFLFRSRGFGDSAPGGGQHGLFGPGAGGLHHAHSDAQGHLLFPGLPEQHGPHGSQNVLNGQMRLGLPGEVFGRSEQYRQVASPRTDPYSAAQLHNQYGPMNMNMGMNMAAAAAHHHHHHHHPVPSLLTNCVHSGLLLSPPRWF

SEQ ID NO: 314079 - DNA, 489 bp, Artificial Sequence
  derived and/or modified sequence
ccccccccccccccccccccccccgccccccccccccccccccccctgaaccccaagaagagctgcaacaagaccttcagcaccatgcacgagctggtgacccacgtgagcgtggagcacgtgggcggccccgagcagagcaaccacgtgtgcttctgggaggagtgccccagagagggcaagcccttcaaggccaagtacaagctggtgaaccacatcagagtgcacaccggcgagaagcccttcccctgccccttccccggctgcggcaaggtgttcgccagaagcgagaacctgaagatccacaagagaacccacaccggcgagaagcccttccagtgcgagttcgagggctgcgacagaagattcgccaacagcagcgacagaaagaagcacatgcacgtgcacaccagcgacaagccctacctgtgcaagatgtgcgacaagagctacacccaccccagcagcctgagaaagcacatgaagtag

SEQ ID NO: 314080 - DNA, 783 bp, Artificial Sequence
  derived and/or modified sequence
atgctgctggacgccggcccccagttccccgccatcggcgtgggcagcttcgccagacaccaccaccacagcgccgccgccgccgccgccgccgccgccgagatgcaggacagagagctgagcctggccgccgcccagaacggcttcgtggacagcgccgccgcccacatgggcgccttcaagctgaaccccggcgcccacgagctgagccccggccagagcagcgccttcaccagccagggccccggcgcctaccccggcagcgccgccgccgccgccgccgccgccgccctgggcccccacgccgcccacgtgggcagctacagcggcccccccttcaacagcaccagagacttcctgttcagaagcagaggcttcggcgacagcgcccccggcggcggccagcacggcctgttcggccccggcgccggcggcctgcaccacgcccacagcgacgcccagggccacctgctgttccccggcctgcccgagcagcacggcccccacggcagccagaacgtgctgaacggccagatgagactgggcctgcccggcgaggtgttcggcagaagcgagcagtacagacaggtggccagccccagaaccgacccctacagcgccgcccagctgcacaaccagtacggccccatgaacatgaacatgggcatgaacatggccgccgccgccgcccaccaccaccaccaccaccaccaccccgtgcccagcctgctgaccaactgcgtgcacagcggcctgctgctgagcccccccagatggttctag

SEQ ID NO: 314081 - DNA, 489 bp, Artificial Sequence
  derived and/or modified sequence
ccgccccctcccccgcccccgcctgcaccacccccccctccaccactgaacccaaaaaaaagttgcaacaaaaccttcagcaccatgcatgagctggttacacacgtgtccgtggaacacgtggggggcccagagcagagcaatcacgtatgtttttgggaagagtgtccgcgtgagggcaaaccttttaaggccaaatacaagcttgttaatcacatcagagtccacaccggagagaaaccatttccttgcccattccctggatgcggcaaagtcttcgcccgctcagagaatttgaagatccacaagcggactcatacaggcgaaaaacccttccagtgtgagtttgaggggtgcgatcgcagatttgctaactctagcgacagaaaaaaacatatgcatgttcatacaagcgacaaaccgtatctgtgtaagatgtgcgataagagttatacacatcccagctcattgagaaaacatatgaaatag

SEQ ID NO: 314082 - DNA, 783 bp, Artificial Sequence
  derived and/or modified sequence
atgttactggacgccgggccacaatttccagcgatcggggtgggcagttttgctcggcatcaccaccacagcgccgctgcagctgccgctgccgctgccgagatgcaagatcgggaactctcccttgcagcagctcaaaacggcttcgtggactctgctgctgcccatatgggcgcgttcaagctgaacccaggggcacatgagctgagtccagggcagtcttctgctttcactagtcaaggaccaggggcctatcctggtagcgctgctgctgcggcagccgctgctgcactcgggccacacgccgcacatgtcggatcctactccggcccaccgttcaatagcacgcgagatttcctgttccggtcccgaggcttcggggatagcgcccccggagggggacagcacggactgttcggacctggcgcaggcggcctgcatcacgcgcatagcgatgcacaaggccacctgttgttccctggattgcccgagcaacacggtccacatgggtcacaaaacgttttgaacggtcagatgcgccttggattgcccggggaggtgtttggaaggtccgagcaatacaggcaagtcgcaagcccccgtaccgacccatattctgcagcacagctgcataaccagtatggccctatgaacatgaatatggggatgaacatggcggcagcagccgcccaccaccatcaccaccaccatcaccctgtcccctcactactcaccaattgcgtacatagcggtctcctactgtctcctccacggtggttttag

SEQ ID NO: 314083 - DNA, 489 bp, Artificial Sequence
  derived and/or modified sequence
cctcctcctcctcctcctcctccagcccctcctcctcctccacccctgaaccccaagaagagctgcaacaagaccttcagcaccatgcatgagctggtgacccacgtgtctgtggagcacgtgggcggccctgagcagagcaaccacgtgtgcttctgggaggagtgcccccgggagggcaagcccttcaaggccaagtacaagctggtgaaccacatccgggtgcacactggagagaagcccttcccctgccccttccctggctgcggcaaggtgtttgcccggtctgagaacctgaagatccacaagaggacccacactggagagaagcccttccagtgtgaatttgagggctgtgacagaagatttgccaacagcagtgacaggaagaagcacatgcacgtgcacaccagtgacaagccctacctgtgcaagatgtgtgacaagagctacacccaccccagcagcctgaggaagcacatgaagtag

SEQ ID NO: 314084 - DNA, 783 bp, Artificial Sequence
  derived and/or modified sequence
atgctgctggatgctggcccccagtttcctgccatcggcgtgggcagctttgcccggcaccaccaccacagcgctgctgctgctgctgctgctgctgctgagatgcaggaccgggagctgagcctggccgccgcccagaatggatttgtggacagcgctgctgcccacatgggcgccttcaagctgaaccctggggcccacgagctgagccctggccagagcagcgccttcaccagccagggccctggggcctacccaggcagcgctgctgctgctgctgctgctgctgccctgggcccccacgccgcccacgtgggcagctacagcggcccccccttcaacagcacccgggacttcctgttccgcagccggggctttggagacagcgcccctgggggcggccagcacggcctgtttggacctggagctgggggcctgcaccacgcccacagtgatgcccagggccacctgctcttccctggcctgcctgagcagcacggcccccacggcagccagaatgtgctgaatggccagatgaggctgggcctgcccggggaggtgtttggccgctctgagcagtaccggcaggtggccagccccaggacagacccctacagcgctgcccagctgcacaaccagtatggccccatgaacatgaacatgggcatgaacatggctgctgctgctgcccaccaccaccaccaccaccaccaccctgtgcccagcctgctgaccaactgtgtgcacagcggcctgctgctgagccccccacgctggttctag

SEQ ID NO: 314085 - DNA, 489 bp, Artificial Sequence
  derived and/or modified sequence
ccccccccccccccccccccccccgccccccccccccccccccccctaaatcccaaaaaatcctgtaacaagacattttcaacgatgcatgaactggtcacccacgttagcgtggaacacgttggcgggcctgaacagtctaaccacgtgtgcttttgggaggaatgtcctagggagggtaaacccttcaaggctaagtacaagctagtgaaccacataagagtccatacaggggagaagcccttcccgtgcccgttccccggatgtggcaaagtgttcgcgcgctccgaaaacctgaaaatccacaagcgcactcacactggagagaaacccttccaatgtgaatttgagggctgtgatcgtcgttttgctaactcttcagatcgtaagaagcacatgcacgtgcatacttcagataaaccatatttatgcaaaatgtgcgacaagtcctacacacacccatcttcactcaggaagcacatgaaatag

SEQ ID NO: 314086 - DNA, 783 bp, Artificial Sequence
  derived and/or modified sequence
atgctgctggacgccggcccccagttccccgccatcggcgtgggcagtttcgctagacaccaccatcactccgctgctgccgctgcagctgcggccgccgaaatgcaggatagagagttgtctctggcagcagcacagaatggttttgtagacagcgctgctgcacacatgggagctttcaagctcaatcccggagctcatgaactgagtcctggacagtccagcgcattcacttctcaaggccccggcgcatatccaggtagcgccgccgcggcagccgccgcagctgcattggggccgcacgctgcccatgttggaagctattccgggccaccattcaattctacgcgggacttcctcttcagatcacggggatttggggacagtgcgcctggcggaggccagcacgggctgttcgggccgggggccggtgggctgcaccatgcccatagtgacgctcaggggcatctgctcttccctgggctccccgaacaacatggtccccatggatcacaaaacgttctcaatggacagatgcgactgggtctgcccggagaggttttcggcaggagtgagcagtaccgccaggtggcctcgcctcggacagatccttactccgctgcccagttacacaaccaatacggccccatgaatatgaacatgggaatgaacatggccgccgcagctgctcatcaccaccaccatcatcaccacccagtgccctctttgctcacgaactgtgttcactcaggcctgctgctgtcccctcctaggtggttttag

SEQ ID NO: 314087 - DNA, 489 bp, Artificial Sequence
  derived and/or modified sequence
ccccctcccccaccaccccctcccgcacctcctccgccaccccctctaaaccccaagaagtcttgcaataaaacttttagtactatgcatgagttggtgacacatgtcagcgtggagcatgttgggggacccgaacagagcaaccatgtgtgcttttgggaggaatgtccaagagaggggaagcccttcaaggctaaatacaaactcgttaaccatatacgggtccataccggagagaagcccttcccgtgcccattcccaggctgcggaaaggttttcgcccgttctgaaaatctgaaaattcataaaaggacacatacgggagagaaaccgtttcaatgtgaattcgagggctgcgaccggagattcgctaactcctccgatcgaaaaaagcacatgcacgtacacacttctgacaagccctatttgtgtaaaatgtgtgacaagtcttacacacatcccagcagtctcagaaagcacatgaaatag

SEQ ID NO: 314088 - DNA, 783 bp, Artificial Sequence
  derived and/or modified sequence
atgttgctcgatgccggacctcagtttcctgcaatcggcgtgggaagtttcgccaggcatcaccatcacagtgctgcggctgcagctgccgctgctgccgagatgcaggaccgagagctgtcacttgctgccgctcagaacggatttgtggactccgctgctgcacacatgggagcattcaagctgaaccctggagcacacgaactgtctccaggccagtctagtgccttcacaagccaaggcccaggcgcttatccgggatctgccgcagcggcagccgcagccgctgcccttggtcctcatgccgctcacgtgggatcttattcaggaccgcctttcaattccacacgtgactttctgtttcggtcccgcggattcggagactcagcacctggcggaggccagcatggtctcttcggaccaggcgcaggcggactgcaccacgcccacagtgacgcacaggggcacttactgtttcctgggctgcccgaacagcatggccctcacggtagccagaatgtcttgaacgggcagatgcgcttgggacttccaggcgaggttttcgggcgatcagaacagtaccgacaggtagcatcaccaagaaccgacccctattcagcagctcaactgcacaaccagtatggtccaatgaacatgaacatgggaatgaatatggcggctgctgccgcacatcaccaccatcaccatcaccatcccgtaccaagcttgctgaccaattgtgtccatagcggactcctgctgagcccacctcgctggttctag

SEQ ID NO: 314089 - DNA, 783 bp, Artificial Sequence
  derived and/or modified sequence
atgctcctggacgcgggtccgcagttcccggccatcggggtgggcagcttcgcgcgccaccatcaccactccgccgcggcggcggcggcggctgccgccgagatgcaggaccgtgaactgagcctggcggcggcgcagaacggcttcgttgactccgccgccgcgcacatgggagccttcaagctcaacccgggcgcgcacgagctgtccccgggccagagctcggcgttcacgtcgcagggccccggcgcctaccccggctccgctgcggctgccgctgcggccgcagcgctcgggccccacgccgcgcacgttggctcctactctgggccgcccttcaactccacccgggacttcctgttccgcagccgcggcttcggggactcggcgccgggcggcgggcagcacgggctgttcgggccgggcgcgggcggcctgcaccacgcgcactcggacgcgcagggccacctcctcttcccgggcctgccagagcagcacgggccgcacggctcgcagaatgtgctcaacgggcagatgcgcctcgggctgcccggcgaggtgttcgggcgctcggagcaataccgccaggtggccagcccgcggaccgacccctactcggcggcgcaactccacaaccagtacggccccatgaatatgaacatgggtatgaacatggcagcagccgcggcccaccaccaccaccaccaccaccaccctgttcccagtcttctgacaaactgtgtacatagcggactcctcctttctcctccgaggtggttttaa

SEQ ID NO: 314090 - DNA, 2118 bp, Artificial Sequence
  derived and/or modified sequence
atgactgacaacagtaataaccaattggtggtacgcgcgaaatttaacttccagcagacgaacgaggacgaactctctttcagcaaaggcgatgtgatacatgttaccagagtggaagaaggcggctggtgggaaggaacgctgaatggccgaaccgggtggttcccctccaactacgtgcgtgaggtcaaggcatccgaaaagccggtcagtccaaagagtgggactttaaaatctccgcccaaaggctttgacactacagcgattaacaagtcttattataacgtggtcctgcaaaacatactggagacagaaaacgaatactctaaggaactgcagaccgtgttgtctacctacttgcgaccgttgcagaccagtgaaaaattgagttcggcaaatatctcctacctgatgggaaatttggaagagatttgtagtttccagcaaatgctagtacagtctctggaggaatgtactaagcttcccgaggcccagcagcgggtgggcggttgcttccttaatcttatgccccagatgaagacgctgtacctcacatactgtgccaatcatccttcagcagtgaacgttctaaccgagcactctgaggagcttggagagtttatggaaaccaagggcgcgagtagccccgggattttggtgctgacaactgggctttccaagccatttatgagactggataagtatcccaccttactgaaagagctcgaacggcatatggaagactaccatactgatagacaggacattcagaaatcaatggcagcatttaaaaacctctcagcccagtgccaggaagtccgcaagcggaaagagcttgagttacagattttaactgaagccatacgcaattgggaaggcgatgacataaaaacactcggcaacgtcacgtatatgtctcaggtgttgatccagtgtgccgggtcagaggaaaaaaacgaaagatacctgttattgttcccaaatgtgctattgatgctttccgcttctccaagaatgtccggtttcatctatcagggtaagttaccaacaactggaatgacaatcacgaagctcgaggatagcgaaaatcataggaacgcctttgaaatcagcgggtcaatgattgagcggattttagtctcttgtaacaaccagcaggatctacaggaatgggtagaacacctgcagaagcagaccaaggtcacatccgtcgggaatccaactatcaaacctcactcagtgcctagtcacacccttcctagccatcctgtcaccccatcgtccaaacacgcagacagtaagcccgctccacttactcctgcataccacaccttaccccacccttcacaccacggaacgcctcacactacaatcaactgggggccattggagcctcctaaaacccccaagccctggagtctctcctgcctgcgccctgcccctcccttacgtccgagtgcggcgctgtgttataaagaggacctgtccaaatctcctaagactatgaaaaagctactgccaaagcggaaaccagaacgcaaacccagcgatgaggagttcgcatccagaaagagcacagcagcactggaggaggacgcccaaatattaaaggtgatagaagcgtattgtacatccgccaaaacaagacagactctgaacagtacctggcaaggcaccgacctgatgcacaatcacgtgctcgcggacgatgaccagcccagtctggattccctgggcaggcgaagcagtctttcccgactcgagccatccgatctgtctgaagattcagactatgattctatctggacggctcattcatataggatggggagcaccagtcggtcaagaaaggagtctgccccacaagtcctacttcccgaagaggaaaaaatcatcgtggaagaaactaaatcaaacggccagacagtaattgaagagaagagtttggtggacaccgtttacgccctgaaagacgaggtgcaggagttgagacaggacaacaaaaagatgaaaaaatccctggaagaggagcagagagcaagaaaggaccttgagaagttagtgagaaaggtgttgaaaaacatgaacgaccctgcctgggacgaaactaatctctag

SEQ ID NO: 314091 - DNA, 2118 bp, Artificial Sequence
  derived and/or modified sequence
atgacagacaacagcaacaaccagctggtggtgcgggccaagttcaacttccagcagaccaatgaagatgagctgtccttcagcaaaggagatgtgatccacgtgaccagggtggaggagggcggctggtgggagggcaccctgaatggaagaacaggctggttccccagcaactacgtgcgggaggtgaaggccagcgagaagcctgtgagccccaagagcggcaccctgaagagcccccccaagggctttgacaccacagccatcaacaagagctactacaacgtggtgctgcagaacatcctggagacagaaaatgagtacagcaaggagctgcagacagtgctgagcacctacctgcggcccctgcagaccagcgagaagctgagcagcgccaacatctcctacctgatgggcaacctggaggagatctgcagcttccagcagatgctggtgcagagcctggaggagtgcaccaagctgcctgaggcccagcagagggtgggcggctgcttcctgaacctgatgccccagatgaagaccctgtacctgacctactgtgccaaccaccccagcgctgtgaatgtgctgacagagcacagcgaggagctgggggagttcatggagaccaagggggccagcagccctggcatcctggtgctgaccaccggcctgagcaagcccttcatgaggctggacaagtaccccaccctgctgaaggagctggagcggcacatggaggactaccacacagaccggcaggacatccagaagtccatggccgccttcaagaacctgagcgcccagtgccaggaggtgaggaagaggaaggagctggagctgcagatcctgacagaggccatccggaactgggagggagatgacatcaagaccctgggcaatgtgacctacatgagccaggtgctgatccagtgtgccggcagcgaggagaagaatgaaagatacctgctgctcttccccaacgtgctgctgatgctgagcgccagccccaggatgagcggcttcatctaccagggcaagctgcccaccaccggcatgaccatcaccaagctggaggacagcgagaaccacagaaatgcctttgagatcagcggctccatgattgagcgcatcctggtgtcctgcaacaaccagcaggacctgcaggagtgggtggagcacctgcagaagcagaccaaggtgacctctgtgggcaaccccaccatcaagccccacagcgtgcccagccacaccctgcccagccaccctgtgacccccagcagcaagcatgctgacagcaagccagcccccctgaccccagcctaccacaccctgccccaccccagccaccacggcaccccccacaccaccatcaactggggccccctggagccccccaagacccccaagccctggagcctgagctgcctgcggcctgccccacccctgcggcccagcgctgccctgtgctacaaggaggacctgagcaagagccccaagaccatgaagaagctgctgcccaagaggaagccagagaggaagcccagtgatgaggagtttgccagcaggaagagcacagctgccctggaggaggatgcccagatcctgaaggtgattgaggcctactgcaccagcgccaagacccggcagaccctgaacagcacctggcagggcacagacctgatgcacaaccacgtgctggctgatgatgaccagcccagcctggacagcctgggccgccgcagcagcctgagccggctggagcccagcgacctgtctgaggacagcgactatgacagcatctggacagcccacagctacaggatgggcagcaccagccgcagcaggaaggagagcgccccccaggtgctgctgcctgaggaggagaagatcatcgtggaggagaccaagagcaatggccagaccgtcatcgaggagaagagcctggtggacacagtgtatgccctgaaggatgaggtgcaggagctgcggcaggacaacaagaagatgaagaagagcctggaggaggagcagagggccaggaaggacctggagaagctggtgaggaaggtgctgaagaacatgaatgaccctgcctgggatgagaccaacctgtag

SEQ ID NO: 314092 - DNA, 2118 bp, Artificial Sequence
  derived and/or modified sequence
atgaccgacaacagcaacaaccagctggtggtgcgggccaagttcaactttcagcaaactaacgaggacgagctgagtttcagtaagggggacgtcattcatgttacccgggtggaagagggggggtggtgggagggaaccttgaacgggaggacagggtggttcccttccaactacgtgagagaggtgaaggcctctgagaagccagtgagtccaaaatcaggcaccctgaaaagcccaccaaaggggtttgataccacagctataaataaatcctactacaacgtggtgcttcaaaatattctcgaaactgagaacgagtatagtaaggagctccagacagtgctgtcgacctatctcaggcccctgcagacctccgaaaaacttagcagtgctaatatcagctatcttatgggaaatctggaggagatttgttcttttcagcagatgctggtgcaaagtctggaagaatgcaccaaacttcccgaggcccagcagagagtggggggttgcttcctcaatcttatgcctcagatgaaaaccctttacttgacatactgtgcaaatcacccatccgctgtgaacgttctgaccgagcatagcgaggaactcggcgagtttatggagactaagggggcgtcctcccccggcattctcgtgcttacaaccgggctgtccaagcccttcatgaggttggataagtatccaaccctactgaaggagcttgaaaggcatatggaggattaccacaccgataggcaagatattcaaaagtcgatggccgccttcaagaatctctccgcccagtgtcaggaagttagaaagcgcaaagagctggaactgcagatcttgacagaagctatcaggaattgggagggcgacgatatcaaaaccttagggaatgtgacctatatgtctcaggttctgatccagtgcgctgggagtgaggagaaaaatgagaggtatctgcttttattccctaatgtgctgttgatgctttcagcctccccacggatgtcaggcttcatttaccaaggaaagctacccacaacaggaatgaccattacaaagctcgaagactctgagaatcataggaatgccttcgaaatatcaggatccatgatagagcgcattctggtgtcctgcaataaccaacaggacctgcaggagtgggtcgagcacctgcagaagcagacaaaggtcacctctgtgggcaatccgaccattaaaccacatagcgtcccttctcacacactcccatcccatcctgttactcctagctccaaacacgctgactcaaaacccgcccctctcacccccgcgtatcatacattgccacacccgagtcatcatgggacgccccacacaactataaattggggccccctggaacctcccaagacacctaaaccttggagcctttcctgccttaggcctgctccacccctgcgtccttccgccgccctctgttacaaggaagatttgtctaaaagcccaaaaaccatgaaaaagctgttgcccaaacgcaagcccgaaagaaagcctagtgatgaggaattcgcgtctaggaaatccactgcagcccttgaagaggatgcacagattctgaaggttatcgaggcctactgtacatcagcaaaaacccggcagaccctcaatagcacttggcagggcactgatctgatgcataatcacgtactcgccgatgacgatcagccaagtttggatagtctcggccggaggtcctctctctcacgtctcgagcctagtgatctgtccgaagatagcgactacgatagtatctggactgcgcattcatatcggatggggtccacctcgagaagcagaaaagagtctgcaccgcaagtcctcctccctgaagaggagaaaatcatcgtggaggagactaaaagcaatggacagaccgtcattgaagaaaaatctctcgtcgacactgtctacgccctgaaagacgaagtgcaggagctgcggcaggataataaaaagatgaagaagtccctggaggaggaacagcgggcccgcaaagacctcgagaagctggttcggaaagtcttaaagaatatgaatgaccccgcctgggatgagacaaacctgtag

SEQ ID NO: 314093 - DNA, 2118 bp, Artificial Sequence
  derived and/or modified sequence
atgaccgataacagcaacaaccagttagtggtgagggccaagttcaacttccaacaaaccaatgaggacgaactgtcattctcaaagggtgacgtcatacatgtgacaagagttgaggagggcggatggtgggagggaacattgaacgggagaaccggttggttcccatcaaactacgttagagaggttaaagcaagtgaaaagcctgtttctccaaagtccgggaccctaaagtccccacccaaaggcttcgatacaactgcaattaacaagtcttactataatgtggtgttgcaaaacatcctcgagactgaaaacgaatactccaaagaattacagaccgttttgagcacttacctgcgaccgcttcagactagcgaaaagttatctagcgcaaatatttcctacctgatgggcaaccttgaagagatttgcagcttccagcagatgcttgtccaatcccttgaggagtgcacgaaactccccgaggctcagcaaagagtgggtgggtgcttcctgaatttgatgccacagatgaaaaccctctacctgacttactgtgccaaccacccgtccgccgtcaacgttctgaccgagcactccgaggagcttggggaattcatggaaacaaaaggtgcatcctctcccggaatccttgtgctgacgacaggactctcaaagccattcatgcgcctggataaatatcccacattgttaaaggagctggagcgacacatggaagactatcacacagacaggcaggacattcagaaatccatggcagccttcaagaacctcagcgcccagtgtcaggaggtgaggaaacggaaagagctagaattgcagatcctgaccgaagctatcaggaattgggagggcgacgacataaagacgttgggtaatgtcacctacatgagccaagtcctgatccagtgcgccggttccgaggagaaaaacgagcgatacttattactgttccccaacgtgttactcatgctaagcgcctcacccagaatgtccgggttcatataccaagggaagttgcccaccactggaatgaccataaccaaactcgaagattccgaaaaccacagaaatgcatttgagatctctggctcaatgatcgagaggatcttggttagctgcaacaaccaacaggacctgcaggagtgggtggagcatctccaaaaacagacaaaagttacttctgtggggaatcctaccatcaaaccacattcagttccatcccacactctcccttcacaccccgttactcctagtagcaagcatgcagactcaaaacccgctccgctgacccccgcatatcacaccctgcctcacccttcccaccacggcacaccccacactacaataaactggggcccactcgagcccccaaaaacgcctaaaccctggagtctcagctgtttgaggccggctccgccactgcgcccaagtgccgctttatgttacaaagaagatctgtcaaaaagtcccaagactatgaaaaaactcctgcctaaacgaaaacccgagagaaagccctcggatgaggaattcgcatctcgcaagagcaccgctgctctggaagaggatgctcagattctgaaagtgatcgaggcgtactgtacaagcgctaagacccgacagactctcaacagtacatggcaggggacagacctcatgcacaaccatgtcttagccgacgacgaccaaccttcactggatagcctcgggaggcgttccagcctatctcgtctggagccatccgacctttcagaagatagtgactatgacagcatttggacagctcatagctatcgcatgggtagcacaagccgttcaagaaaagaatctgctcctcaggttcttctgccggaggaggaaaagatcatcgttgaggagactaaaagcaacggtcagactgtgatagaggaaaaaagcctggtagatacagtgtacgccctgaaagacgaggtgcaggagcttcgacaggataataaaaagatgaaaaagtctctggaggaggagcaacgcgctcgcaaagatctggagaagctagtgaggaaggtgctcaaaaacatgaacgaccccgcttgggacgaaaccaatctgtag

SEQ ID NO: 314094 - DNA, 2118 bp, Artificial Sequence
  derived and/or modified sequence
atgaccgacaacagcaacaaccagctggtggtgagagccaagttcaacttccagcagaccaacgaggacgagctgagcttcagcaagggcgacgtgatccacgtgaccagagtggaggagggcggctggtgggagggcaccctgaacggcagaaccggctggttccccagcaactacgtgagagaggtgaaggccagcgagaagcccgtgagccccaagagcggcaccctgaagagcccccccaagggcttcgacaccaccgccatcaacaagagctactacaacgtggtgctgcagaacatcctggagaccgagaacgagtacagcaaggagctgcagaccgtgctgagcacctacctgagacccctgcagaccagcgagaagctgagcagcgccaacatcagctacctgatgggcaacctggaggagatctgcagcttccagcagatgctggtgcagagcctggaggagtgcaccaagctgcccgaggcccagcagagagtgggcggctgcttcctgaacctgatgccccagatgaagaccctgtacctgacctactgcgccaaccaccccagcgccgtgaacgtgctgaccgagcacagcgaggagctgggcgagttcatggagaccaagggcgccagcagccccggcatcctggtgctgaccaccggcctgagcaagcccttcatgagactggacaagtaccccaccctgctgaaggagctggagagacacatggaggactaccacaccgacagacaggacatccagaagagcatggccgccttcaagaacctgagcgcccagtgccaggaggtgagaaagagaaaggagctggagctgcagatcctgaccgaggccatcagaaactgggagggcgacgacatcaagaccctgggcaacgtgacctacatgagccaggtgctgatccagtgcgccggcagcgaggagaagaacgagagatacctgctgctgttccccaacgtgctgctgatgctgagcgccagccccagaatgagcggcttcatctaccagggcaagctgcccaccaccggcatgaccatcaccaagctggaggacagcgagaaccacagaaacgccttcgagatcagcggcagcatgatcgagagaatcctggtgagctgcaacaaccagcaggacctgcaggagtgggtggagcacctgcagaagcagaccaaggtgaccagcgtgggcaaccccaccatcaagccccacagcgtgcccagccacaccctgcccagccaccccgtgacccccagcagcaagcacgccgacagcaagcccgcccccctgacccccgcctaccacaccctgccccaccccagccaccacggcaccccccacaccaccatcaactggggccccctggagccccccaagacccccaagccctggagcctgagctgcctgagacccgccccccccctgagacccagcgccgccctgtgctacaaggaggacctgagcaagagccccaagaccatgaagaagctgctgcccaagagaaagcccgagagaaagcccagcgacgaggagttcgccagcagaaagagcaccgccgccctggaggaggacgcccagatcctgaaggtgatcgaggcctactgcaccagcgccaagaccagacagaccctgaacagcacctggcagggcaccgacctgatgcacaaccacgtgctggccgacgacgaccagcccagcctggacagcctgggcagaagaagcagcctgagcagactggagcccagcgacctgagcgaggacagcgactacgacagcatctggaccgcccacagctacagaatgggcagcaccagcagaagcagaaaggagagcgccccccaggtgctgctgcccgaggaggagaagatcatcgtggaggagaccaagagcaacggccagaccgtgatcgaggagaagagcctggtggacaccgtgtacgccctgaaggacgaggtgcaggagctgagacaggacaacaagaagatgaagaagagcctggaggaggagcagagagccagaaaggacctggagaagctggtgagaaaggtgctgaagaacatgaacgaccccgcctgggacgagaccaacctgtag

SEQ ID NO: 314095 - protein, 39 aa, Artificial Sequence
  derived and/or modified sequence
MTDNSNNQLVVRAKFNFQQTNEDELSFSKGDVIHVTRVE

SEQ ID NO: 314096 - protein, 181 aa, Artificial Sequence
  derived and/or modified sequence
MCFPRSSVTTDDHQLDGIKSTRAPAPGCCCCPSETLRSGEVARSSAESRRLLFKPDATDENPVPHVLCQSPFCSECPHGTQDYHTDRQDIQKSMAAFKNLSAQCQEVRKRKELELQILTEAIRNWEGDDIKTLGNVTYMSQVLIQCAGSEEKNERYLLLFPNVLLMLSASPRMSGFIYQGA

SEQ ID NO: 314097 - DNA, 201 bp, Artificial Sequence
  derived and/or modified sequence
atgaccgacaacagcaacaaccagctggtggtgagagccaagttcaacttccagcagaccaacgaggacgagctgagcttcagcaagggcgacgtgatccacgtgaccagagtggaggagggcggctggtgggagggcaccctgaacggcagaaccggctggttccccagcaactacgtgagagaggtgaaggccagctag

SEQ ID NO: 314098 - DNA, 186 bp, Artificial Sequence
  derived and/or modified sequence
atgaccgacaacagcaacaaccagctggtggtgagagccaagttcaacttccagcagaccaacgaggacgagctgagcttcagcaagggcgacgtgatccacgtgaccagagtggaggagggcggctggtgggagggcaccctgaacggcagaaccggctggttccccagcaactacgtgagatag

SEQ ID NO: 314099 - DNA, 120 bp, Artificial Sequence
  derived and/or modified sequence
atgaccgacaacagcaacaaccagctggtggtgagagccaagttcaacttccagcagaccaacgaggacgagctgagcttcagcaagggcgacgtgatccacgtgaccagagtggagtag

SEQ ID NO: 314100 - DNA, 546 bp, Artificial Sequence
  derived and/or modified sequence
atgtgcttccccagaagcagcgtgaccaccgacgaccaccagctggacggcatcaagagcaccagagcccccgcccccggctgctgctgctgccccagcgagaccctgagaagcggcgaggtggccagaagcagcgccgagagcagaagactgctgttcaagcccgacgccaccgacgagaaccccgtgccccacgtgctgtgccagagccccttctgcagcgagtgcccccacggcacccaggactaccacaccgacagacaggacatccagaagagcatggccgccttcaagaacctgagcgcccagtgccaggaggtgagaaagagaaaggagctggagctgcagatcctgaccgaggccatcagaaactgggagggcgacgacatcaagaccctgggcaacgtgacctacatgagccaggtgctgatccagtgcgccggcagcgaggagaagaacgagagatacctgctgctgttccccaacgtgctgctgatgctgagcgccagccccagaatgagcggcttcatctaccagggcgcctag

SEQ ID NO: 314101 - DNA, 201 bp, Artificial Sequence
  derived and/or modified sequence
atgacagacaattccaataaccagttggtcgtgagagccaagttcaacttccaacaaacaaacgaggacgagctctccttctccaagggcgatgtcatccacgttactcgggttgaggaggggggatggtgggagggtaccttgaatgggcggacggggtggtttccttctaactacgtgcgagaagtgaaagcatcatag

SEQ ID NO: 314102 - DNA, 186 bp, Artificial Sequence
  derived and/or modified sequence
atgacggataattccaacaatcagctggtggttagagcaaagtttaatttccagcagaccaatgaagacgagctctcctttagtaaaggagatgttattcacgtgacgcgtgtggaggaaggaggctggtgggaaggcacgctgaacggcaggaccggatggttcccgtctaactatgtccgttag

SEQ ID NO: 314103 - DNA, 120 bp, Artificial Sequence
  derived and/or modified sequence
atgacggataatagtaataaccagctggttgttcgcgcaaaattcaacttccagcaaaccaatgaggacgaactgtctttcagcaagggggatgtcatacacgtcaccagagtggaatag

SEQ ID NO: 314104 - DNA, 546 bp, Artificial Sequence
  derived and/or modified sequence
atgtgcttcccccgcagctccgtcactacggacgatcatcagctggatggtattaagtcgacacgggcacctgcccctgggtgctgctgctgcccctcggaaactctgcggtcaggtgaggtagcgcgatctagcgccgaatccaggagactcctgttcaagccagatgctactgatgaaaatccagttcctcacgttctatgtcagagccctttctgtagcgagtgtcctcacggaacccaggactaccataccgaccgtcaggatatccagaagagcatggcggcttttaaaaacctgagcgcccagtgccaggaggtacggaaacggaaggagctcgaactccagatattgacggaagctattagaaattgggagggagacgacattaaaacgctgggcaatgtgacctatatgagccaagttctgatccagtgtgccggctccgaggaaaagaacgagcggtacctcctgctatttcccaacgttcttctcatgctttctgctagtccccgtatgagtgggttcatctaccagggcgcgtag

SEQ ID NO: 314105 - DNA, 201 bp, Artificial Sequence
  derived and/or modified sequence
atgacagacaacagcaacaaccagctggtggtgcgggccaagttcaacttccagcagaccaatgaagatgagctgtccttcagcaaaggagatgtgatccacgtgaccagggtggaggagggcggctggtgggagggcaccctgaatggaagaacaggctggttccccagcaactacgtgcgggaggtgaaggccagctag

SEQ ID NO: 314106 - DNA, 186 bp, Artificial Sequence
  derived and/or modified sequence
atgacagacaacagcaacaaccagctggtggtgcgggccaagttcaacttccagcagaccaatgaagatgagctgtccttcagcaaaggagatgtgatccacgtgaccagggtggaggagggcggctggtgggagggcaccctgaatggaagaacaggctggttccccagcaactacgtgaggtag

SEQ ID NO: 314107 - DNA, 120 bp, Artificial Sequence
  derived and/or modified sequence
atgacagacaacagcaacaaccagctggtggtgcgggccaagttcaacttccagcagaccaatgaagatgagctgtccttcagcaaaggagatgtgatccacgtgaccagggtggagtag

SEQ ID NO: 314108 - DNA, 546 bp, Artificial Sequence
  derived and/or modified sequence
atgtgcttccccaggagctctgtgaccacagatgaccaccagctggatggcatcaagagcacccgggccccagcccctggctgctgctgctgccccagcgagaccctgcggagcggggaggtggcccggagcagcgctgagagccggcggctgctcttcaagccagatgccacagatgagaaccctgtgccccacgtgctgtgccagagccccttctgcagtgaatgtccccacggcacccaggactaccacacagaccggcaggacatccagaagtccatggccgccttcaagaacctgagcgcccagtgccaggaggtgaggaagaggaaggagctggagctgcagatcctgacagaggccatccggaactgggagggagatgacatcaagaccctgggcaatgtgacctacatgagccaggtgctgatccagtgtgccggcagcgaggagaagaatgaaagatacctgctgctcttccccaacgtgctgctgatgctgagcgccagccccaggatgagcggcttcatctaccagggcgcctag

SEQ ID NO: 314109 - DNA, 201 bp, Artificial Sequence
  derived and/or modified sequence
atgaccgacaacagcaacaaccagctggtggtgcgggccaagttcaactttcagcagacaaatgaggacgagttaagtttttccaaaggtgacgttattcacgtaacccgggttgaggagggaggctggtgggaaggcacactgaatgggaggacaggatggtttcccagcaactatgtgcgtgaagtgaaagctagttag

SEQ ID NO: 314110 - DNA, 186 bp, Artificial Sequence
  derived and/or modified sequence
atgaccgacaacagcaacaaccagctggtggtgcgggccaagttcaatttccagcagacgaatgaggacgagctgtcatttagtaaaggggatgtgattcacgtgacccgagttgaggaaggcggatggtgggagggtacattaaacggtaggaccgggtggtttcctagcaactacgttcggtag

SEQ ID NO: 314111 - DNA, 120 bp, Artificial Sequence
  derived and/or modified sequence
atgaccgacaacagcaacaaccagctggtggtgcgggccaagttcaactttcagcagactaacgaggacgaattgtccttttctaaaggggacgtcatacatgtcacccgggtagaatag

SEQ ID NO: 314112 - DNA, 546 bp, Artificial Sequence
  derived and/or modified sequence
atgtgcttcccccggagcagcgtgaccaccgacgaccaccagctggatggtataaaaagcactagggcaccagccccaggttgttgttgctgtccaagtgaaacactgagaagtggggaggtggcccggtcaagtgccgagagccggagactgctgtttaaaccagacgccaccgatgaaaatccagttcctcacgtgctctgtcagagtcccttttgcagcgagtgcccacatgggacacaggactatcacactgacagacaagatatccagaagtcaatggctgcctttaagaatctgtccgcccagtgccaggaggttcggaagagaaaagaactcgagctacagatcctgaccgaggcaatcagaaattgggaaggggacgatattaaaacacttggaaatgttacttatatgagccaggtcctcatacagtgtgcggggtcagaggagaagaacgagaggtatttgctgctgtttcctaacgtgctactcatgttgtcggcaagtccacgcatgtctggcttcatctatcagggcgcttag

SEQ ID NO: 314113 - DNA, 201 bp, Artificial Sequence
  derived and/or modified sequence
atgactgacaatagcaacaatcagctggtcgtgagggcgaagttcaacttccaacagactaacgaagacgagctctcattttccaaaggcgatgttattcatgtcacaagagtcgaggaagggggttggtgggaaggaacgctgaacgggaggaccgggtggtttccaagcaattatgtacgggaggtgaaggcatcatag

SEQ ID NO: 314114 - DNA, 186 bp, Artificial Sequence
  derived and/or modified sequence
atgacggacaactctaacaatcagcttgttgtgagggctaagtttaacttccagcagactaacgaggatgagctttccttctctaagggagacgtaatccacgtgacaagagtggaggaaggcggatggtgggagggtacacttaacggtaggactggttggtttccaagtaattatgtgagatag

SEQ ID NO: 314115 - DNA, 120 bp, Artificial Sequence
  derived and/or modified sequence
atgactgacaattccaacaatcagctagtggttagagctaaattcaacttccaacagactaacgaagatgaactgtccttctctaagggagatgtaattcatgtgaccagggttgaatag

SEQ ID NO: 314116 - DNA, 546 bp, Artificial Sequence
  derived and/or modified sequence
atgtgcttccctagatcgtcagttaccactgacgatcatcagctggatggtataaaaagcacaagggcaccagcccctggatgttgctgctgtccttccgagaccttgagaagcggagaagtggctcgatcttctgctgagtcccggagattactattcaaaccagatgccacggacgagaacccagtgcctcatgtactatgtcagtctcccttctgcagcgaatgcccccatggcacccaggactatcacacggataggcaagatatacagaagagcatggcagcctttaagaacctctcagcccagtgccaggaagtgagaaaaagaaaggaacttgagttgcaaatcctaaccgaggccattcgaaactgggagggcgacgatataaagactctaggaaacgtgacctatatgtcgcaagtactcatccagtgtgcgggatcagaggagaaaaatgaacggtacttgctgctctttccaaacgttctgctgatgctcagtgcatctccacgcatgagcgggttcatctatcaaggggcttag

SEQ ID NO: 314117 - DNA, 691 bp, Artificial Sequence
  derived and/or modified sequence
acacttcagatgggggatagtccaggctggtggtggagctcccaggggatttcgcttctgggtagaattgtcatttttttttttcctcagagactgttgtgtgggcctagtggtgcatcaggttccggttagaatccagtgcaggccgcaggcttctctttaattagagagggtcacttcacctccggttagaatccagtgcaggcagcagcttctttttaattagagaggggtctgggtgctgagcttcccatcaggaagaaggggctgtcgtgctgaagtcctgagacgtttgatgcaaatgatttgtatcaggggcagaattttaacaaggtcctcagttccttagtgactctaaataaagtaacagcagacatcgggctggggagtgactccgtgtgtgcccggccctcgtctcaccgcataaagtcttttgactcccttggatcacagtctttgcacactcggacttcaaaactgttccagggccagtatcggagtttggacatgaccgataatagcaacaatcaactggtagtaagagcaaagtttaacttccagcagaccaatgaggacgagctttccttctcaaaaggagacgtcatccatgtcacccgtgtggaagagggaggctggtgggagggcacactcaacggccggaccggctggttccccagcaactacgtgcgcg

SEQ ID NO: 314118 - DNA, 581 bp, Artificial Sequence
  derived and/or modified sequence
acttccggcgccggggctcacttcctggtgcgggaaggggcagagattggtgcagccccggaggaagaaaaaagggtctaccccgagccccggagcgagagcgagtgcctgagcaacatccgcgagttcctgcgcggctgcggggcttccctgcggctggagacgtttgatgcaaatgatttgtatcaggggcagaattttaacaaggtcctcagttccttagtgactctaaataaagtaacagcagtgtcttatgaagggagatccagagaacagaactaagcctcttactgtctgtttactttgattctgtcagcaacttcatgagacatcgggctggggagtgactccgtgtgtgcccggccctcgtctcaccgcataaagtcttttgactcccttggatcacagtctttgcacactcggacttcaaaactgttccagggccagtatcggagtttggacatgaccgataatagcaacaatcaactggtagtaagagcaaagtttaacttccagcagaccaatgaggacgagctttccttctcaaaaggagacgtcatccatgtcacccgtgtggaaga

SEQ ID NO: 314119 - DNA, 969 bp, Artificial Sequence
  derived and/or modified sequence
atgtgccccgtggataaggctcacaggaatcagtgccaggcctgtcgtctcaagaagtgtctgcaggctggcatgaatcaggatgctgtgcagaatgagcgtcagccccgcagcactgctcaggtccacctcgattcgatggagagcaatactgagtccaggcctgaaagcctggtcgccccccccgctcctgcaggcagaagcccgcgaggacccacccccatgagcgctgccagggcacttggccaccattttatggcctccctcatcactgcagagacatgtgccaagcttgagccggaagacgcagatgagaacatcgatgtgacaagcaatgacccagaatttccgtccagtccctactcctcgtcttcaccctgtgggctcgacagtatccatgagacatctgcccggttattatttatggcagttaagtgggctaaaaatttgccagtgtttagttcactgccttttcgagatcaagtgatcctgttagaagaggcatggagcgagctgtttctactaggcgccatccagtggtccttgccactggattcctgtccactattggcaccaccggaggcttcagcggctggaggagctcagggacggctgacgttggcgagcatggaaacccgggttctgcaggagaccatctccagattcagagccttggcggtggaccccaccgaatttgcctgcatgaaagccctggtcctgttcaaacctgagacaagggggctgaaggacccagagcatgtggaagccctccaggatcagtcccaggtaatgctgtctcagcacagcaaagcccatcatccttcccaaccggtaaggtttggaaaactgctcttactgctgccaagcctcagattcatcacagcggaacgaatcgagttgcttttctttcggaagacaatcggtaatacacccatggagaaattactgtgtgatatgtttaagaactag

SEQ ID NO: 314120 - DNA, 969 bp, Artificial Sequence
  derived and/or modified sequence
atgtgccctgtggacaaggcccacaggaaccagtgccaggcctgccgcctgaagaagtgcctgcaggccggcatgaaccaggatgctgtgcagaatgaaaggcagcccaggagcacagcccaggtgcacctggacagcatggagagcaacacagagagcaggcctgagagcctggtggcccccccagccccagctggccgcagcccccggggccccacccccatgtctgctgcccgggccctgggccaccacttcatggccagcctcatcacagctgagacctgtgccaagctggagccagaagatgctgatgaaaatattgatgtgaccagcaatgaccctgagttccccagcagcccctacagcagcagcagcccctgtggcctggacagcatccacgagaccagcgcccggctgctcttcatggctgtgaagtgggccaagaacctgcctgtgttcagcagcctgcccttccgggaccaggtgatcctgctggaggaggcctggagcgagctgttcctgctgggcgccatccagtggagcctgcccctggacagctgccccctgctggcccctcctgaggccagcgctgctgggggcgcccagggccgcctgaccctggcctccatggagaccagggtgctgcaggagaccatcagccgcttccgggccctggccgtggaccccacagaatttgcctgcatgaaggccctggtgctcttcaagccagagacccggggcctgaaggaccctgagcacgtggaggccctgcaggaccagagccaggtgatgctgagccagcacagcaaggcccaccaccccagccagcctgtgcgctttgggaagctgctgctgctgctgcccagcctgcgcttcatcacagctgagcgcatcgagctgctcttcttcaggaagaccatcggcaacacccccatggagaagctgctgtgtgacatgttcaagaactag

SEQ ID NO: 314121 - DNA, 969 bp, Artificial Sequence
  derived and/or modified sequence
atgtgccccgtggacaaggcccaccggaaccagtgccaggcctgccgccttaaaaagtgtctccaggccgggatgaaccaggacgctgtgcagaatgaacgccagccgagaagcaccgcccaggtccacctagactctatggaatctaataccgaatcccgcccagaaagtcttgtagctccacccgcgcctgcagggagaagcccaaggggcccaaccccaatgtctgccgccagagcgctagggcaccacttcatggcctctttgattacagctgaaacatgcgcaaaattggagcccgaggatgccgacgagaacattgacgtgacgagtaacgacccagagttcccatcctccccttattcctcctccagcccatgtggcttggacagcatacacgagacaagcgcgaggctgctcttcatggctgtgaagtgggccaagaatctgccagtcttttcctctctgcctttcagggatcaagtgatcctgctcgaagaggcctggtccgagctctttctgttaggggcaattcaatggagcttgcctctggacagctgcccattgttggccccacccgaagcgtccgcggcaggcggggctcagggacgtctgactctggcttccatggaaaccagggtgctgcaggagacgatttcccggtttcgtgcccttgcagtggaccccactgagttcgcttgtatgaaggcacttgtattgtttaaacccgagactcgggggctgaaagatcccgagcatgtggaagcactgcaggatcaaagccaggtgatgctgagccagcattctaaagcacatcatccatcccagcccgtgcgatttggaaaattgctgctgctcctcccctctttaaggttcatcaccgcagagcggatcgagctgctattcttccggaagaccattggcaacactccaatggagaagctgctctgtgacatgtttaagaactag

SEQ ID NO: 314122 - DNA, 969 bp, Artificial Sequence
  derived and/or modified sequence
atgtgccccgtcgataaagcccaccgcaaccaatgtcaggcctgtcggctcaaaaagtgcttacaggcagggatgaatcaggatgccgtgcagaatgagcggcagcctagatcaaccgcacaggtgcacctggactcaatggagtcaaacacggagtcccgccctgaatccctcgttgcaccccctgccccagcgggacggtcccccagaggtccaaccccaatgtccgcggctagagccctggggcatcacttcatggctagccttatcacagcagagacatgcgctaaactggaaccagaggacgctgatgaaaatattgacgtgacatcaaatgatcctgagttcccatcaagcccatactcctcgtccagcccctgcggtctggatagcatccatgaaacctctgccaggctgttgttcatggccgtcaagtgggccaaaaatcttcccgtattttctagtctcccttttagggaccaggtgatcctgctggaggaagcatggagcgaactcttccttcttggggcaattcaatggtccctaccattggatagctgcccactcctcgcaccgcctgaggcatccgccgcaggaggggctcagggccgattgacattagcctccatggaaacaagagtgctgcaggagactattagccgatttagagccctcgccgtggaccctacagaattcgcatgtatgaaggcattagtattgtttaagcccgaaacacggggtctaaaggacccagagcacgtcgaggctttgcaagatcagtcccaggtgatgctctcccagcactcaaaggcccatcacccttcgcagccggtgagattcggcaagctgctactgttattgccatcccttaggtttatcaccgcagaaagaatcgaattgctcttcttccgcaagacaattgggaatacccccatggaaaaactgctctgcgacatgttcaagaactag

SEQ ID NO: 314123 - DNA, 969 bp, Artificial Sequence
  derived and/or modified sequence
atgtgccccgtggacaaggcccacagaaaccagtgccaggcctgcagactgaagaagtgcctgcaggccggcatgaaccaggacgccgtgcagaacgagagacagcccagaagcaccgcccaggtgcacctggacagcatggagagcaacaccgagagcagacccgagagcctggtggccccccccgcccccgccggcagaagccccagaggccccacccccatgagcgccgccagagccctgggccaccacttcatggccagcctgatcaccgccgagacctgcgccaagctggagcccgaggacgccgacgagaacatcgacgtgaccagcaacgaccccgagttccccagcagcccctacagcagcagcagcccctgcggcctggacagcatccacgagaccagcgccagactgctgttcatggccgtgaagtgggccaagaacctgcccgtgttcagcagcctgcccttcagagaccaggtgatcctgctggaggaggcctggagcgagctgttcctgctgggcgccatccagtggagcctgcccctggacagctgccccctgctggccccccccgaggccagcgccgccggcggcgcccagggcagactgaccctggccagcatggagaccagagtgctgcaggagaccatcagcagattcagagccctggccgtggaccccaccgagttcgcctgcatgaaggccctggtgctgttcaagcccgagaccagaggcctgaaggaccccgagcacgtggaggccctgcaggaccagagccaggtgatgctgagccagcacagcaaggcccaccaccccagccagcccgtgagattcggcaagctgctgctgctgctgcccagcctgagattcatcaccgccgagagaatcgagctgctgttcttcagaaagaccatcggcaacacccccatggagaagctgctgtgcgacatgttcaagaactag

SEQ ID NO: 314124 - DNA, 240 bp, Artificial Sequence
  derived and/or modified sequence
atgaagctggccaagaccgccgtgctggaccccgccacctacaccagcttcagccccggcctgagcacctgcagcagcagccagccccccggcgacagaagaaagggcctgctgggctgcgtgggcagcggccactgccccctgcccacccccgcccagttccccaaggtgcagagaccccccaccctgctgggcggcaagaacaccagcacccagaccaccctgcaccccgtgatctag

SEQ ID NO: 314125 - DNA, 240 bp, Artificial Sequence
  derived and/or modified sequence
atgaagcttgctaaaacagcagttctcgacccagcaacctataccagcttttccccaggcctctccacgtgctccagctctcagcctcccggcgaccgtaggaaggggttactaggctgtgtgggcagtggtcattgccccctccctacgccggcacagttccccaaggttcagaggccacctacacttttgggaggaaagaacacctcaactcagaccaccttgcacccagttatttag

SEQ ID NO: 314126 - DNA, 240 bp, Artificial Sequence
  derived and/or modified sequence
atgaaattggctaagaccgctgtcctcgatccagcaacgtataccagttttagccctgggctcagcacctgctcgtcttcccagccaccgggcgaccgtcgtaaaggactgctcggttgtgtgggctctggccattgtcctctacccacgccggctcagttccccaaagttcaacgtccccccactcttctcgggggaaagaacacctccactcagaccacacttcaccccgtgatatag

SEQ ID NO: 314127 - DNA, 240 bp, Artificial Sequence
  derived and/or modified sequence
atgaagctggccaagaccgccgtgctggaccccgccacctacacctccttcagcccagggttgtcaacatgctctagtagtcagccaccgggcgacaggcgtaaggggttgttgggctgtgttggctcgggccattgtccccttccaacgccggcacagtttcctaaggtccagcgacctcctacactcttggggggcaagaacacatctacccagacaacccttcaccccgtgatttag

SEQ ID NO: 314128 - DNA, 240 bp, Artificial Sequence
  derived and/or modified sequence
atgaagctcgccaaaactgctgtattagatcccgctacttatacctcattcagccctgggctctcaacttgtagttcctcccaaccccctggcgaccggcgtaaagggctgctcggctgcgtgggcagcggccactgtcctctgcctacacccgctcagtttccaaaggtgcagagaccccctacattacttggcggaaagaatacgtccacacaaaccacactgcaccccgtgatctag

SEQ ID NO: 314129 - DNA, 240 bp, Artificial Sequence
  derived and/or modified sequence
atgaagctcgctaagacagccgtcctcgaccctgctacatacactagctttagccccggactatctacctgttccagttctcagccacctggagaccgcagaaaggggctcctgggctgcgtgggcagcggacattgcccactgcccacccctgcccagttcccaaaggttcaacggccacccactttactcggaggcaagaacacctctacccagacaacattgcaccccgttatctag

SEQ ID NO: 314130 - DNA, 300 bp, Artificial Sequence
  derived and/or modified sequence
atgtcctgccagcaaaatcaacagcagtgtcagccaccgccaaagtgccccatccctaagtacccacccaagtgtccgtcaaagtgtgcctccagttgccccccccccatctccagctgctgcggttccagctcgggagggtgcggctgctgtagctccgaagggggggggtgctgtctgtctcatcaccgtcatcacagatcccattgtcacaggccaaaatctagcaattgctatggctctggtagtggtcagcagtccggtgggagcggctgttgtagtggtggcggttgttgttag

SEQ ID NO: 314131 - DNA, 582 bp, Artificial Sequence
  derived and/or modified sequence
atgtccaagttgttgatccttattcttactgcatcaggagatgggacttgcgctctgtgggatgtcgaatctggccagctgctgcagagtttccacgggcatggagccgacgtgctttgtctggatcttgcgcccagcgagactgggaacaccttcgttagcgggggctgcgataaaaaagctatggtttgggatatgaggagtgggcagtgtgtgcaggcctttgagacacacgagtctgacatcaactctgttagatattacccctctggcgacgctttcgccagtggctctgatgacgcaacatgtaggctttatgatcttagagccgacagggaagtggccatatatagcaaggagtccatcatctttggggcaagcagcgtggacttttctttaagcgggcggttactgttcgctgggtataatgactataccatcaacgtctgggacgtgctgaagggttctagggtgtcgatcttatttgggcacgaaaaccgggtttcaacgctgagggtcagtcccgacggcacagcattttgcagtgggtcctgggaccacacactacgcgtttgggcctag

SEQ ID NO: 314132 - DNA, 2217 bp, Artificial Sequence
  derived and/or modified sequence
aacagaggacatttaggctggatgaaggcaggctcagggggctaccacgaccatcaggcatctgaagcccctctgtggagacccatcagactcgctctgtgttgccccggggcagggttggggatgaaagggggcaccagtagccatcagtaatcatccgcaaagggctctcttgtggacacttatgctgcaagagccacttcctccacggtcttatcacctcacccaggccctgtggagcagccagaaggcagggagagcttctcccttgcaggtcccctccattgctgtcagtacccagctggctccagggctctgtgatgccgccagctgggcctatgagggccccgaaccctgagtcctcactgcctttctcccaatcccaggaaggtatgctcagccagagcccaggcctcatacacactggcagtgacaaaaagtaaaattccagccctgtccccatgtctttccctgggcacccctgtgtgcctttactctatggctgacctttgtacttgtaagctatccagaggctctttgggcctctgccagagtttcctaaaacatacgtttgcttttctcattctcctgcccagaagcttccagagtgctctcttggcttcagactgagtccccacctgtgaacgggctcacctttcatttagtgcagacataggcccccctggagtttgtctctccccttcccttctttcacctggccagctctcactcttccttgaagaccaactcagatatcaccacactgggtttgggaccctcctgtgtgcacacctggatcccagcacttctcatgctgttgtcattgatccttgtctactggtgatgtcaactccccaagcgaacatcagaaatacttgcaaccaagcaaagctaaggttatctgacctgccacagtaagggagaacctccacttggcagaatcttagtaggttctgaaaatggaggaattagggaagggtacttagaggatttcagggtccaggcttggtgattttaaggtgggtcttgcaaggccgttttagctttggattggtgagcccagcaagcgaacagtctttgagtctggatgagcaagctgttaatcttgatcctgacagcgagcggcgatggcacatgtgccctgtgggacgtggagagcgggcagctgctgcagagcttccacggacatggggctgacgtcctctgcttggacctggccccctcagaaactggaaacaccttcgtgtctgggggatgtgacaagaaagccatggtgtgggacatgcgctccggccagtgcgtgcaggcctttgaaacacatgaatctgacatcaacagtgtccggtactaccccagtggagatgcctttgcttcagggtcagatgacgctacgtgtcgcctctatgacctgcgggcagatagggaggttgccatctattccaaagaaagcatcatatttggagcatccagcgtggacttctccctcagtggtcgcctgctgtttgctggatacaatgattacactatcaacgtctgggatgttctcaaagggtcccgggtctccatcctgtttggacatgaaaaccgcgttagcactctacgagtttcccccgatgggactgctttctgctctggatcatgggatcataccctcagagtctgggcctaatcatcttctgacagtgcactcatgtatacctgagaatttgaaatcttcacatgtaaatagatattacttctagaggagcttagagtttattgcagtgtagcttaggggagcaacccatggctcacaggtcactaagcgtctccaatatgactattaaaactgtcacctctggaaatacactagtgtgagccttcagcactgcgagaataccttcaagtacagtatttttcttttggaacactttttaaaatgtatctgtttttaaggttattctaaattatagtagcctcaactcattctgtcaccagtagaattcagcagttaatatattccatattatttctttgaatcaattcattttcagagcactttaaagtctgatatttctcgatgtgcactgtgatgcctggaaccttcctctggaagtgctgattttatggactgaggactggtgactggtctgtgatagaagcaaattccaattccaaatgtaattagacaaaaatcatttttttagaatgtgtttttattgtaaaagtatctttttc

SEQ ID NO: 314133 - DNA, 582 bp, Artificial Sequence
  derived and/or modified sequence
atgagcaagctgctgatcctgatcctgacagccagcggagatggcacctgtgccctgtgggatgtggagagcggccagctgctgcagagcttccacggccacggggctgatgtgctgtgcctggacctggcccccagcgagaccggcaacacctttgtgtctgggggctgtgacaagaaggccatggtgtgggacatgaggagcggccagtgtgtgcaggcctttgagacccatgaaagtgacatcaacagcgtgcgctactaccccagcggagatgcctttgccagcggcagtgatgatgccacctgccgcctgtatgacctgcgggctgaccgggaggtggccatctacagcaaggagagcatcatctttggagccagctctgtggacttcagcctgagcggccgcctgctgtttgctggctacaatgactacaccatcaacgtgtgggatgtgctgaagggcagccgggtgtccatcctgtttggacatgaaaatagagtgtccaccctgcgggtgtccccagatggaacagccttctgcagcggctcctgggaccacaccctgcgggtgtgggcctag

SEQ ID NO: 314134 - DNA, 582 bp, Artificial Sequence
  derived and/or modified sequence
atgagcaagctgctgatcctgatcctgaccgccagcggcgacggcacgtgcgccctatgggacgtggaatcagggcagctgctgcagtcctttcacggccatggcgcggacgtgttatgtctggaccttgcccccagcgaaaccggcaatacttttgtgagcgggggctgcgacaaaaaggccatggtgtgggacatgagaagcggtcaatgtgtccaagcattcgagacacacgagtccgatatcaatagtgtgagatactacccaagcggagatgccttcgcttcgggttcggacgacgctacttgtcgcctctacgacctgagagctgatagggaagttgccatctactcaaaggagtcaatcatcttcggtgccagttctgtagatttttctttgtctggccggctactgttcgctggatacaatgactatacgatcaatgtgtgggatgtgctgaagggaagccgcgtctccatacttttcggccacgagaacagagtcagcacattaagagtgtccccagacggcacggccttttgctctggatcctgggaccacactctccgcgtttgggcctag

SEQ ID NO: 314135 - DNA, 582 bp, Artificial Sequence
  derived and/or modified sequence
atgtcgaagctgctcatcctgatcctcacagctagtggtgacggcacctgtgcactctgggatgttgagtctggccaactgcttcagtcattccacggacacggagcggatgttctgtgtttagacctggccccatccgagaccgggaacactttcgtctctggaggttgcgataaaaaagcgatggtctgggacatgcgcagtggccaatgtgtacaggcctttgaaacccacgaatcagatatcaacagcgtgagatattatccctctggtgatgcatttgcctccggatctgatgacgccacctgtcgcctctacgacctgcgcgctgacagggaagtcgcaatttacagcaaagaatccataatttttggagcttccagtgtggacttctctctgtcgggtaggcttctgttcgctggatacaacgactacacgataaatgtgtgggacgtgctaaaggggtcccgcgtgtctatcttatttggccacgaaaatcgggtttccactctgagggtttccccagatggaacagccttctgtagtggctcgtgggatcataccctgcgagtttgggcttag

SEQ ID NO: 314136 - DNA, 582 bp, Artificial Sequence
  derived and/or modified sequence
atgagcaagctgctgatcctgatcctgaccgccagcggcgacggcacctgcgccctgtgggacgtggagagcggccagctgctgcagagcttccacggccacggcgccgacgtgctgtgcctggacctggcccccagcgagaccggcaacaccttcgtgagcggcggctgcgacaagaaggccatggtgtgggacatgagaagcggccagtgcgtgcaggccttcgagacccacgagagcgacatcaacagcgtgagatactaccccagcggcgacgccttcgccagcggcagcgacgacgccacctgcagactgtacgacctgagagccgacagagaggtggccatctacagcaaggagagcatcatcttcggcgccagcagcgtggacttcagcctgagcggcagactgctgttcgccggctacaacgactacaccatcaacgtgtgggacgtgctgaagggcagcagagtgagcatcctgttcggccacgagaacagagtgagcaccctgagagtgagccccgacggcaccgccttctgcagcggcagctgggaccacaccctgagagtgtgggcctag

SEQ ID NO: 314137 - DNA, 580 bp, Artificial Sequence
  derived and/or modified sequence
cagggttgtccggtgcaggtggtgtgtgttgtttcgcctaacgtgtcagtggcacaaatcacgcgaacttcataaacattgtgcgttcggaagcctttccaagatgcatttaatccctgcgtgagcccacgttaggcattcacgaaggcatgtgcactgttctctcggaagcggctggccggcttcccctcctcgcgcgcggctgtgggtgcaggtcctcacttcccagcctcccatgggcccaaggccttctgggctccaatttgaggcgagccaccccagatccgtaatttttctgcagtgatttatttttacctttctgattccttgacaaggatatcctagcggcgaaacaacaccgtactgggagtcagaacgtctgggttctagtcttgactgccattaactagcggtatgacattggagaagcttttttgacccttctggatttccgtttccttttctgtaaaatgaggagcttggaagatccggaaaatgaggcccataggaaacaagtgacttgctgagtccagataacactgactgtcagagagaaacatgaaccagaagctactgaagt

SEQ ID NO: 314138 - DNA, 566 bp, Artificial Sequence
  derived and/or modified sequence
aagatgcatttaatccctgcgtgagcccacgttaggcattcacgaaggcatgtgcactgttctctcggaagcggctggccggcttcccctcctcgcgcgcggctgtgggtgcaggtcctcacttcccagcctcccatgggcccaaggccttctgggctccaatttgaggcgagccaccccagatccgtaatttttctgcagtgatttatttttacctttctggtaagttccaaagcttccagctcacattcagacgttttccctaacgcaactacgtatttgcaacatacttttttcagattccttgacaaggatatcctagcggcgaaacaacaccgtactgggagtcagaacgtctgggttctagtcttgactgccattaactagcggtatgacattggagaagcttttttgacccttctggatttccgtttccttttctgtaaaatgaggagcttggaagatccggaaaatgaggcccataggaaacaagtgacttgctgagtccagataacactgactgtcagagagaaacatgaaccagaagctactgaagttggagaact

SEQ ID NO: 314139 - DNA, 534 bp, Artificial Sequence
  derived and/or modified sequence
atggtgggcttcggcgccaacagaagagccggcagactgcccagcctggtgctggtggtgctgctggtggtgatcgtggtgctggccttcaactactggagcatcagcagcagacacgtgctgctgcaggaggaggtggccgagctgcagggccaggtgcagagaaccgaggtggccagaggcagactggagaagagaaacagcgacctgctgctgctggtggacacccacaagaagcagatcgaccagaaggaggccgactacggcagactgagcagcagactgcaggccagagagggcctgggcaagagatgcgaggacgacaaggtgaagctgcagaacaacatcagctaccagatggccgacatccaccacctgaaggagcagctggccgagctgagacaggagttcctgagacaggaggaccagctgcaggactacagaaagaacaacacctacctggtgaagagactggagtacgagagcaagagacccaagagattcaaccagatgatggagagaaactggatctag

SEQ ID NO: 314140 - DNA, 534 bp, Artificial Sequence
  derived and/or modified sequence
atggtgggtttcggcgctaatagacgagccggtcgcctgcccagcttggtgctggtggtgcttctcgtcgttatcgtggtgctggccttcaactactggagtatttctagtagacatgtgcttctgcaggaagaggtggctgaactccagggccaagtccaaaggacggaggttgcccgggggagactcgagaagcgcaactccgacctgctgcttctggtggacactcacaaaaagcagatcgaccagaaggaggctgattacggcaggctgagttccaggctccaggcaagagagggtctgggcaaaaggtgcgaagacgataaggtaaagcttcagaacaatatttcgtaccagatggccgacatccatcatctcaaggagcagctggcggagttaagacaggaattcctgaggcaggaagaccagcttcaggattaccgcaagaacaatacctatctggttaagaggctcgagtacgagtctaagagacccaaaagatttaatcagatgatggagagaaactggatttag

SEQ ID NO: 314141 - DNA, 534 bp, Artificial Sequence
  derived and/or modified sequence
atggtgggctttggagccaacagaagagctggccgcctgcccagcctggtgctggtggtgctgctggtggtgattgtggtgctggccttcaactactggagcatcagcagcagacatgtgctgctgcaggaggaggtggccgagctgcagggccaggtgcagaggacagaggtggcccggggccgcctggagaagaggaacagcgacctgctgctgctggtggacacccacaagaagcagattgaccagaaggaggccgactatggccgcctgagcagccggctgcaggcccgggagggcctgggcaagagatgtgaagatgacaaggtgaagctgcagaacaacatctcctaccagatggctgacatccaccacctgaaggagcagctggccgagctgcggcaggagttcctgcggcaggaggaccagctgcaggactacaggaagaacaacacctacctggtgaagaggctggagtatgagagcaagaggcccaagcgcttcaaccagatgatggagaggaactggatctag

SEQ ID NO: 314142 - DNA, 534 bp, Artificial Sequence
  derived and/or modified sequence
atggtgggcttcggcgccaaccggcgggccggccggctgcccagcttagtgctggttgtgctgctagtcgttatagtggtgctcgctttcaattactggagtattagctccagacatgtcttactgcaagaagaggtagcggagctgcaagggcaggtgcaacggacagaggtggcaagaggccgtctggaaaaacgaaattccgatctgctgctgctagtggatacccataaaaagcagatcgaccagaaagaggccgactatggcagactctcatcccgtttacaggcaagggaaggcctggggaagcgctgcgaggacgataaagtgaagttgcagaataacatttcctaccagatggccgatatccaccacctgaaagaacaacttgcggaacttagacaggagttcctgaggcaggaggaccaactacaagactaccggaagaataatacctatctcgtgaaacgactcgagtatgagtccaagagaccaaagagatttaaccagatgatggagcgcaactggatatag

SEQ ID NO: 314143 - DNA, 534 bp, Artificial Sequence
  derived and/or modified sequence
atggttggcttcggcgctaataggcgggctggcaggctcccctcattggtgttggtggttctgttagtggtgatcgtggttctcgcgttcaactattggtccatcagcagccgccatgttctgctgcaggaggaagtcgccgagctgcagggccaagtgcagcgaacggaggtggcaagaggacggctcgaaaagcgcaatagcgacctgctgctattggttgatacacataaaaaacaaatcgaccagaaggaggctgactatggacggctatcttcaaggttgcaggcgcgagaaggactcggcaagagatgcgaagacgataaggttaagctccagaacaacatttcttatcagatggccgatattcaccacctgaaggagcagttagcagaactgcgccaagaatttctgcggcaggaagaccagttgcaagactatcggaagaacaatacttacttggtgaaacgactcgagtacgagagcaaacgaccaaagagatttaatcagatgatggaaaggaactggatttag

SEQ ID NO: 314144 - protein, 312 aa, Artificial Sequence
  derived and/or modified sequence
TKALLKYTGEVTWIPPAIFKSSCKIDVTYFPFDYQNCTMKFGSWSYDKAKIDLVLIGSSMNLKDYWESGEWAIIKAPGYKHDIKYNCCEEIYPDITYSLYIRRLPLFYTINLIIPCLLISFLTVLVFYLPSDCGEKVTLCISVLLSLTVFLLVITETIPSTSLVIPLIGEYLLFTMIFVTLSIVITVFVLNVHYRTPTTHTMPSWVKTVFLNLLPRVMFMTRPTSNEGNAQKPRPLYGASPKAARREIKEAIQSVKYIAENMKAQNEAKEIQDDWKYVAMVIDRIFLWVFTLVCILGTAGLFLQPLMAREDA

SEQ ID NO: 314145 - protein, 448 aa, Artificial Sequence
  derived and/or modified sequence
MAGPFSRLLSARPGLRLLALAGAGSLAAGFLLRPEPVRAASERRRLYPPSQTWPTGQLPGNCTRSRRLCPPSMVTGYPLPSAEYPDLRKHNNCMASHLTPAVYARLCDKTTPTGWTLDQCIQTGVDNPGHPFIKTVGMVAGDEETYEVFADLFDPVIQERHNGYDPRTMKHTTDLDASKIRSGYFDERYVLSSRVRTGRSIRGLSLPPACTRAERREVERVVVDALSGLKGDLAGRYYRLSEMTEAEQQQLIDDHFLFDKPVSPLLTAAGMARDWPDARGIWHNNEKSFLIWVNEEDHTRVISMEKGGNMKRVFERFCRGLKEVERLIQERGWEFMWNERLGYILTCPSNLGTGLRAGVHIKLPLLSKDSRFPKILENLRLQKRGTGGVDTAATGGVFDISNLDRLGKSEVELVQLVIDGVNYLIDCERRLERGQDIRIPTPVIHTKH

SEQ ID NO: 314146 - protein, 338 aa, Artificial Sequence
  derived and/or modified sequence
MAGPFSRLLSARPGLRLLALAGAGSLAAGFCSDRNLYELPVNDGGCIPREQSQTWPTGQLPGNCTRSRRLCPPSMVTGYPLPSAEYPDLRKHNNCMASHLTPAVYARLCDKTTPTGWTLDQCIQTGVDNPGHPFIKTVGMVAGDEETYEVFADLFDPVIQERHNGYDPRTMKHTTDLDASKIRSGYFDERYVLSSRVRTGRSIRGLSLPPACTRAERREVERVVVDALSGLKGDLAGRYYRLSEMTEAEQQQLIDDHFLFDKPVSPLLTAAGMARDWPDARGIWHNNEKSFLIWVNEEDHTRVISMEKGGNMKRVFERFCRGLKEVREDYVGELGGRT

SEQ ID NO: 314147 - DNA, 1347 bp, Artificial Sequence
  derived and/or modified sequence
atggctggtcctttctctcgacttctgtcggcacgcccagggctccgactattggccctggccggagcaggctcactcgccgcaggcttcctcctccgacccgaaccagtgagggccgctagcgaacggcgtcggctctatccaccaagccagacgtggccaacagggcaactcccaggcaactgcaccagatctcgtcgcctgtgccctccatcgatggtgacaggttacccattaccgtcagccgaatatcctgacctgcggaagcataacaattgcatggcttcccatctaactcccgccgtgtatgcccggctgtgtgataaaactacaccaacggggtggacgctggaccagtgtattcagacgggagtcgataatcccggacatccattcataaagactgttggcatggtcgcaggcgatgaggaaacatatgaggtgttcgccgatttgttcgaccccgttatccaggaacgccacaacggctatgacccaaggacaatgaagcatacaacagatcttgacgcctccaaaattcggtccggctacttcgacgagaggtatgtgttaagctcaagagtaaggaccggcagatcgatacgaggccttagcttgcctccggcgtgcacaagggcggagcgccgcgaagtggagcgcgtggtggttgatgctctcagcggcctgaagggggatttagcaggtagatattaccggctgtccgagatgacagaagccgagcagcaacagctgatagatgaccactttttgtttgataagcccgtgtcacctctgttaacagccgctggtatggcaagagactggccagatgcccgggggatatggcataataacgaaaagtcctttcttatatgggtgaacgaggaagaccacacaagggtgatatcaatggaaaagggaggcaatatgaagagagtttttgagaggttctgccggggccttaaggaggtggagaggttgatccaggagcgaggttgggaattcatgtggaatgagaggctagggtatatccttacatgcccaagcaacctcggaacaggactccgggctggagtacatattaaactgccactgctctctaaggattcccgctttcctaaaattcttgagaatctgaggctgcagaagcgggggactggtggcgtcgataccgccgccaccgggggcgtcttcgacatcagcaacctagacagactcggaaaatccgaggtcgagcttgtccagttagtgattgatggtgttaattaccttatcgattgtgagcgaaggctggaacgaggacaggacatccgcattccaaccccggtaatccacacaaagcactag

SEQ ID NO: 314148 - DNA, 1017 bp, Artificial Sequence
  derived and/or modified sequence
atggccgggcccttctcccggctcctgtctgcccggcccgggctgagactcctcgccctggccggggctggttccctggccgcgggcttctgttccgaccgcaatctgtatgagttacccgttaatgacggaggctgtataccacgagagcaaagccagacctggcccacaggacagctgcccggtaattgcaccaggagtcgaaggctgtgtccaccatcaatggtgactggataccctctaccaagcgccgagtaccctgatctacgtaagcacaacaattgtatggcctctcacctaacgccagcagtgtatgctcgcctctgtgataaaacgactcctacagggtggacactagaccagtgtatccagacaggtgtggataatccaggacatccattcataaaaacagtggggatggttgccggagacgaggagacttatgaagtgtttgctgacttgtttgatcctgtaatccaggaacgtcacaacgggtatgaccctcggaccatgaagcacactacagacctggacgcatctaaaatcagaagcggctactttgatgagcggtacgtgctgtctagtcgagtgcggaccggcagatcaatcaggggcctgtccttacccccggcctgcacccgggccgaaagacgggaggtcgagcgtgtagttgttgacgcactgtccggacttaaaggtgatctagctgggcgctattaccgcctctccgagatgaccgaggccgagcagcagcagttgattgacgatcatttcctgttcgacaagccggtgtccccgctgttgaccgccgcagggatggcccgcgactggcctgatgccaggggcatctggcataataacgagaaatcttttctcatttgggttaacgaggaggaccacactagggtgatctccatggaaaaaggggggaacatgaaacgcgtgtttgaacgattttgtagaggcctcaaggaggtgcgagaggactatgtgggtgagctgggcggtaggacctag

SEQ ID NO: 314149 - DNA, 1347 bp, Artificial Sequence
  derived and/or modified sequence
atggccggccccttcagccggctgctgagcgcccggcccggcctgcggctgctggccctggccggggccggcagcctggccgccggcttcctgctgcggcctgagcctgtgcgggccgccagcgagcggcggcggctgtacccacccagccagacctggcccaccggccagctgcccggcaactgcaccaggagccggcggctgtgcccccccagcatggtgacaggctaccccctgcccagcgctgagtacccagacctgaggaagcacaacaactgcatggccagccacctgaccccagctgtgtatgcccggctgtgtgacaagaccacccccaccggctggaccctggaccagtgcatccagacaggagtggacaaccctggccaccccttcatcaagacagtgggcatggtggccggagatgaggagacctatgaggtgtttgctgacctgtttgatcctgtgatccaggagcggcacaacggctatgaccccaggaccatgaagcacaccacagacctggatgccagcaagatccgcagcggctactttgatgaaagatatgtgctgagcagccgggtgaggacaggccgcagcatccggggcctgagcctgcccccagcctgcaccagggctgagcggcgggaggtggagcgggtggtggtggatgccctgagcggcctgaagggggacctggccggccgctactaccgcctgtctgagatgacagaggccgagcagcagcagctgattgatgaccacttcctgtttgacaagcctgtgagccccctgctgacagctgctggcatggcccgggactggccagatgcccggggcatctggcacaacaatgagaagagcttcctgatctgggtgaatgaggaggaccacaccagggtcatctccatggagaagggcggcaacatgaagagggtgtttgagcgcttctgccggggcctgaaggaggtggagcggctcatccaggagcggggctgggagttcatgtggaatgaaaggctgggctacatcctgacctgccccagcaacctgggcaccggcctgcgggccggcgtgcacatcaagctgcccctgctgagcaaggacagccgcttccccaagatcctggagaacctgcggctgcagaagaggggcaccggcggcgtggacacagctgccaccggcggcgtgtttgacatcagcaacctggaccggctgggcaagtctgaggtggagctggtgcagctggtgattgatggagtgaactacctgattgactgtgaaagaaggctggagcggggccaggacatccgcatccccacccctgtgatccacaccaagcactag

SEQ ID NO: 314150 - DNA, 1017 bp, Artificial Sequence
  derived and/or modified sequence
atggccggccccttcagccggctgctgagcgcccggcccggcctgcggctgctggccctggccggggccggcagcctggccgccggcttctgcagcgacaggaacctgtatgagctgcctgtgaatgatggcggctgcatcccccgggagcagagccagacctggcccaccggccagctgcccggcaactgcaccaggagccggcggctgtgcccccccagcatggtgacaggctaccccctgcccagcgctgagtacccagacctgaggaagcacaacaactgcatggccagccacctgaccccagctgtgtatgcccggctgtgtgacaagaccacccccaccggctggaccctggaccagtgcatccagacaggagtggacaaccctggccaccccttcatcaagacagtgggcatggtggccggagatgaggagacctatgaggtgtttgctgacctgtttgatcctgtgatccaggagcggcacaacggctatgaccccaggaccatgaagcacaccacagacctggatgccagcaagatccgcagcggctactttgatgaaagatatgtgctgagcagccgggtgaggacaggccgcagcatccggggcctgagcctgcccccagcctgcaccagggctgagcggcgggaggtggagcgggtggtggtggatgccctgagcggcctgaagggggacctggccggccgctactaccgcctgtctgagatgacagaggccgagcagcagcagctgattgatgaccacttcctgtttgacaagcctgtgagccccctgctgacagctgctggcatggcccgggactggccagatgcccggggcatctggcacaacaatgagaagagcttcctgatctgggtgaatgaggaggaccacaccagggtcatctccatggagaagggcggcaacatgaagagggtgtttgagcgcttctgccggggcctgaaggaggtgcgggaggactatgtgggggagctgggcggccgcacctag

SEQ ID NO: 314151 - DNA, 1347 bp, Artificial Sequence
  derived and/or modified sequence
atggccggccccttcagccggctgctgagcgcccggcccggcctgcgtctcctagccctggcaggggcggggtcccttgccgctggattcttactgcggcccgaacctgtcagggcggctagcgaacgacggcgactataccccccttcccagacctggcctacaggccagctgccaggcaattgcacccggagcaggcggctgtgccccccttctatggtgacaggctaccccttgcctagtgccgagtatcctgatttgcgtaaacacaacaattgcatggcctctcatctgaccccggcggtatatgcccgtctctgcgataagacaactccaaccgggtggacacttgaccagtgtatccagaccggtgtggataacccaggacacccgtttattaaaaccgttggtatggtcgcgggtgatgaagagacatacgaggtttttgcggatctgtttgaccctgtgattcaggagcgacacaatggctacgatcctagaaccatgaagcacactaccgacctggatgctagcaagatcaggagcgggtacttcgacgaacggtacgttctgtccagccgagtcaggaccggacgcagtatcagagggctctcactgcccccagcgtgtacacgggcagagcgtagggaggtggaacgagtcgtcgtagatgctctgagcggtcttaagggggatcttgccggacgatactaccggctgtctgagatgactgaagccgagcagcagcagctgattgatgatcacttccttttcgataagccggtgagcccacttcttacagcagccggaatggctcgcgactggcccgatgcccggggcatctggcataacaatgagaaatccttccttatttgggttaacgaggaggatcacacacgcgtgatatctatggagaaggggggcaatatgaagagagtctttgaacggttctgtagaggcctgaaggaggtcgaaagattgatacaggagaggggttgggagtttatgtggaatgagcgcctgggatacattttgacatgcccgtcaaaccttggtacagggctccgggctggcgtgcacattaagctgcctttgctctctaaagactcccggtttcccaagattctagagaatcttcgtcttcagaagcggggaactggaggcgtggacactgcagccaccgggggagtgtttgacatttccaatttagacagactgggtaagagcgaggtcgagctggttcagctcgtgatcgacggcgtgaattatcttatagattgcgagcgccggcttgagagaggccaggacatccggatacctaccccggtcattcataccaagcactag

SEQ ID NO: 314152 - DNA, 1017 bp, Artificial Sequence
  derived and/or modified sequence
atggccggccccttcagccggctgctgagcgcccggcccggcctgcggttattagccctggcaggtgccggaagccttgccgcaggtttttgctctgacaggaatctctatgagctccccgtgaatgacggcggttgcatcccaagggagcagtcccagacatggcccaccgggcaacttcctggcaattgcacccgttcgaggagactgtgtccacccagcatggttaccggctacccgcttccatctgccgagtacccggatctccgcaagcataataattgtatggcatctcacctgacccctgccgtgtatgccaggttgtgcgataagacaaccccaaccggttggacccttgatcagtgcattcagaccggggtggataatcccggtcacccctttattaaaacagtgggcatggtggctggggacgaagagacctacgaggtatttgccgatctgttcgacccagtgatccaagagagacataatggatatgatccccgcaccatgaaacacaccaccgacctggatgcttcgaagatcaggagcgggtatttcgatgagcgctatgttttgtcctcgcgtgtaaggaccgggcgatccatacgcggactgtctctgccgccagcctgtaccagggccgaacgtcgcgaagttgaaagggtggtcgtggatgccctgtcaggactgaagggggacttggctgggaggtattacaggctgtccgagatgacagaggccgagcaacagcagttaatcgatgatcatttcctgtttgacaagccggtgtctcctttactgaccgcggctgggatggctagagattggccagacgcaaggggaatctggcacaacaacgagaagagcttcctgatctgggtgaatgaggaggaccatactagggtaatctcaatggagaaaggggggaatatgaagcgggtgttcgagaggttctgccgaggattgaaagaagtgcgcgaagactatgtcggagagctcggtgggagaacatag

SEQ ID NO: 314153 - DNA, 1347 bp, Artificial Sequence
  derived and/or modified sequence
atggccggacctttcagccggcttttatctgctcggcctggcctgcgactcctagccctggccggtgccggatcacttgctgccggttttttgttacgccctgaacctgtacgcgctgccagcgagaggcgacgcctctatcctcctagccagacatggccaacaggacagcttcccggaaattgtacacgctccagacgcttgtgccctcccagcatggtgacaggctaccccctgcccagcgcggagtaccctgacctccgcaagcacaacaattgcatggcaagccacctcacacccgctgtgtatgcgaggttgtgtgacaagacaactcctactgggtggacccttgatcagtgtattcagaccggcgtagataatcccggacacccctttataaaaacggtgggaatggttgccggtgatgaagaaacgtacgaagtgttcgctgacctgttcgatcccgtgatccaggagaggcacaacggctatgatccacgaactatgaaacacactactgacctcgacgcatcaaagatcagaagcggctatttcgacgagagatatgtcctgtcatccagggtgagaacgggtcgatccattaggggcctttcccttccacctgcttgcacacgcgctgaacgcagggaggtggagagggtcgtcgtggacgccctgagcggcctgaagggggacttggctggtcgttactaccgcctctccgagatgaccgaagccgaacagcagcagcttattgacgaccacttcttatttgacaagcctgtttcccctcttctgaccgctgcgggaatggctcgcgattggccagacgctagaggcatttggcataataacgaaaaaagctttctgatctgggtcaatgaagaggaccacacccgcgtcatatcaatggagaagggtggcaacatgaaacgcgttttcgagcggttttgcagaggattgaaagaggtggagaggctgatccaggagcgcggttgggaattcatgtggaatgagcgactcggctatatactcacctgcccaagcaacttggggaccggactgcgcgctggtgtgcatattaaactgccactgctttctaaagatagtcgatttcccaaaatcctcgaaaacctccgattacagaaacggggtacaggtggggtggacaccgcagccacgggcggagtatttgacatctccaatttggacagactaggcaagagcgaggtcgagctcgtgcaactggtaattgacggagtgaactatcttatcgattgtgaacgcagacttgaacggggtcaggatatccggatccccaccccagtgatccacacaaagcattag

SEQ ID NO: 314154 - DNA, 1017 bp, Artificial Sequence
  derived and/or modified sequence
atggccggacccttttcacgactgctctctgcacgtcctggactgaggctcctcgcgcttgctggagcgggttcgctagcagcaggattttgctccgatcggaacctgtatgaattgccagtgaacgatggcggatgtattccgagggagcagtcccagacctggccaacggggcagttgcctggcaactgcactagaagtcgccgactctgccctcccagtatggtaacaggctaccctctgccatccgcagagtatcctgacctgaggaaacacaataattgtatggcatcacatctgactcccgcagtgtatgcacggctctgcgataagaccacccccactggatggacacttgatcagtgcatccagaccggcgtcgataatcctggacaccccttcataaaaaccgtcgggatggtggccggtgacgaagagacctatgaggtctttgctgacctgttcgatcctgtgattcaagaacggcataacggctacgatcctagaacgatgaagcacactaccgacctcgacgcgagtaaaattagatccggctactttgacgaaagatatgttctgagctctagagtgcgcaccgggaggtccatcaggggcctctccctgccgcctgcctgcaccagagccgagcgaagagaggtggagcgtgtcgtcgtcgacgctctgagtggacttaagggcgacctggcgggaaggtattatagactgagtgagatgacggaggccgagcagcagcagctgattgacgatcattttctgttcgacaaacccgtgtcacctctgcttactgcagccggtatggctcgagattggcctgatgccagagggatttggcataacaacgagaaaagttttcttatttgggttaacgaggaggatcacacacgcgtgatctctatggaaaaggggggaaacatgaagagggtcttcgagagattttgtcggggactcaaggaggtccgcgaggactacgtgggtgaactggggggtaggacgtag

SEQ ID NO: 314155 - DNA, 1646 bp, Artificial Sequence
  derived and/or modified sequence
attgcgcctctcctgcagtctgattggcaccggctcccattccggctccagcctccaatccgacccccatttcggctgcagcctcggacctagctccggccctccctgttccggatcttatcttgcgccagcgcctactccaggatcccgtagccagacctcaagccatggctggtcccttctcccgtctgctgtccgcccgcccgggactcaggctcctggctttggccggagcggggtctctagccgctgggtttctgctccgaccggaacctgtacgagctgccagtgaacgacggaggctgtatcccccgagccagacatggccaactggacagctcccaggtaactgcactaggtctaggcgtctgtgccctccctccatggttactgggtaccccctccccagcgctgagtacccagacctccgaaagcacaacaactgcatggccagtcacctgaccccagcagtctatgcacggctctgcgacaagaccacacccactggttggacgctagatcagtgtatccagactggcgtggacaaccctggccaccccttcatcaagactgtgggcatggtggctggagatgaggagacctatgaggtatttgctgacctgtttgaccctgtgatccaagagcgacacaatggatatgacccccggacaatgaagcacaccacggatctagatgccagtaaaatccgttctggctactttgatgagaggtatgtattgtcctctagagtcagaactggccgaagcatccgaggactcagtctgcctccagcttgcactcgagcagagcgacgagaggtggaacgtgttgtggtggatgcactgagtggcctgaagggtgacctggctggacgttactataggctcagtgagatgacagaggctgaacagcagcagcttattgatgaccactttctgtttgataagcctgtgtccccgttgctgactgcagcaggaatggctcgagactggccagatgctcgtggaatttggcacaacaatgagaagagcttcctgatctgggtgaatgaggaggatcatacacgggtgatctccatggagaagggtggtaacatgaagagagtgtttgaaagattctgccgaggcctcaaagaggtggagagacttatccaagaacgtggctgggagttcatgtggaatgagcgtttgggatacatcttgacctgtccatctaacctgggcactggacttcgggcaggagtgcacatcaaactgcccctgctaagcaaagatagccgcttcccaaagatcctggagaacctaagactccaaaagcgtggtactggaggagtggacactgctgccacaggcggtgtctttgatatttctaatttggaccgactaggcaaatcagaggtggagctggtgcaactggtcatcgatggagtaaactatttgattgattgtgaacggcgtctggagagaggccaggatatccgcatccccacacctgtcatccacaccaagcattaactccccatcgccagctgatgactcaagattccaaggagttctgctcattctaatgatggcccattctacttgctctggacctgccctcgcatcccctgcctccatcctagtaaagactccttgctatgctgc

SEQ ID NO: 314156 - DNA, 1705 bp, Artificial Sequence
  derived and/or modified sequence
agcctccaatccgacccccatttcggctgcagcctcggacctagctccggccctcggtctatccggttgcatcctccctccctgttccggatcttatcttgcgccagcgcctactccaggatcccgtagccagacctcaagccatggctggtcccttctcccgtctgctgtccgcccgcccgggactcaggctcctggctttggccggagcggggtctctagccgctgggttctgctccgaccggaacctgtacgagctgccagtgaacgacggaggctgtatcccccgagagcaaagccagacatggccaactggacagctcccaggtaactgcactaggtctaggcgtctgtgccctccctccatggttactgggtaccccctccccagcgctgagtacccagacctccgaaagcacaacaactgcatggccagtcacctgaccccagcagtctatgcacggctctgcgacaagaccacacccactggttggacgctagatcagtgtatccagactggcgtggacaaccctggccaccccttcatcaagactgtgggcatggtggctggagatgaggagacctatgaggtatttgctgacctgtttgaccctgtgatccaagagcgacacaatggatatgacccccggacaatgaagcacaccacggatctagatgccagtaaaatccgttctggctactttgatgagaggtatgtattgtcctctagagtcagaactggccgaagcatccgaggactcagtctgcctccagcttgcactcgagcagagcgacgagaggtggaacgtgttgtggtggatgcactgagtggcctgaagggtgacctggctggacgttactataggctcagtgagatgacagaggctgaacagcagcagcttattgatgaccactttctgtttgataagcctgtgtccccgttgctgactgcagcaggaatggctcgagactggccagatgctcgtggaatttggcacaacaatgagaagagcttcctgatctgggtgaatgaggaggatcatacacgggtgatctccatggagaagggtggtaacatgaagagagtgtttgaaagattctgccgaggcctcaaagaggttagagaagactatgtaggggagctaggtgggaggacataaggaaaaccaaagagtagcataaatagattatgtaatttaccaaccaacccaggacatgtcttatagtaaaaaggactatctaggactcactccaggactaaaggtgtaaaccagctgggaccatactgggaaaaccaggacatgtggtcacactaagattaggaaaagaaagagtgtcaggaatcttaggaagtgaacaaggctgttgacagagagtgcaaagaaggaataaatgagatggcacgtcagtgcctgggatgtgtgcagtgggatggtgaggtgtgcagataaggaaaacattcgagcttagattgatgttggcggggagaggttgctgtgttcatgactctaatataaccacccagttctgagacaaggtaggccttgactctggattctatcattcttgttaaagtatcgggtctaggctttaagttgagagttcggagagagactggggaaggtggaggatagaatggttcaagttctagaatatgtggctctagatgagaggttgaactgaatcatcaatcctacatggattg

SEQ ID NO: 314157 - DNA, 1340 bp, Artificial Sequence
  derived and/or modified sequence
actacggagagagaagccaagggagaggaggaggaggaaactaacgattccctgcccacccccacacccagcaccaccaacaggtgggcaagcttgccgagaaaacgcagagggcatcctgtgagcagcaaacacatctgagcctggaaaagacgcagagaagtaaaagatcaaagtctgattggcaccggctcccattccggctccagcctccaatccgacccccatttcggctgcagcctcggacctagctccggccctcggtctatccggttgcatcctccctccctgttccggatcttatcttgcgccagcgcctactccaggatcccgtagccagacctcaagccatggctggtcccttctcccgtctgctgtccgcccgcccgggactcaggctcctggctttggccggagcggggtctctagccgctgggtttctgctccgaccggaacctgtacgagctgccagtgaacgacggaggctgtatcccccgagccagacatggccaactggacagctcccaggtaactgcactaggtctaggcgtctgtgccctccctccatggttactgggtaccccctccccagcgctgagtacccagacctccgaaagcacaacaactgcatggccagtcacctgaccccagcagtctatgcacggctctgcgacaagaccacacccactggttggacgctagatcagtgtatccagactggcgtggacaaccctggccaccccttcatcaagactgtgggcatggtggctggagatgaggagacctatgaggtatttgctgacctgtttgaccctgtgatccaagagcgacacaatggatatgacccccggacaatgaagcacaccacggatctagatgccagtaaaatccgttctggctactttgatgagaggtatgtattgtcctctagagtcagaactggccgaagcatccgaggactcagtctgcctccagcttgcactcgagcagagcgacgagaggtggaacgtgttgtggtggatgcactgagtggcctgaagggtgacctggctggacgttactataggctcagtgagatgacagaggctgaacagcagcagcttattgatgaccactttctgtttgataagcctgtgtccccgttgctgactgcagcaggaatggctcgagactggccagatgctcgtggaatttggcacaacaatgagaagagcttcctgatctgggtgaatgaggaggatcatacacgggtgatctccatggagaagggtggtaacatgaagagagtgtttgaaagattctgccgaggcctcaaagaggttgttgtggggattaagtga

SEQ ID NO: 314158 - DNA, 1347 bp, Artificial Sequence
  derived and/or modified sequence
atggccggccccttcagcagactgctgagcgccagacccggcctgagactgctggccctggccggcgccggcagcctggccgccggcttcctgctgagacccgagcccgtgagagccgccagcgagagaagaagactgtacccccccagccagacctggcccaccggccagctgcccggcaactgcaccagaagcagaagactgtgcccccccagcatggtgaccggctaccccctgcccagcgccgagtaccccgacctgagaaagcacaacaactgcatggccagccacctgacccccgccgtgtacgccagactgtgcgacaagaccacccccaccggctggaccctggaccagtgcatccagaccggcgtggacaaccccggccaccccttcatcaagaccgtgggcatggtggccggcgacgaggagacctacgaggtgttcgccgacctgttcgaccccgtgatccaggagagacacaacggctacgaccccagaaccatgaagcacaccaccgacctggacgccagcaagatcagaagcggctacttcgacgagagatacgtgctgagcagcagagtgagaaccggcagaagcatcagaggcctgagcctgccccccgcctgcaccagagccgagagaagagaggtggagagagtggtggtggacgccctgagcggcctgaagggcgacctggccggcagatactacagactgagcgagatgaccgaggccgagcagcagcagctgatcgacgaccacttcctgttcgacaagcccgtgagccccctgctgaccgccgccggcatggccagagactggcccgacgccagaggcatctggcacaacaacgagaagagcttcctgatctgggtgaacgaggaggaccacaccagagtgatcagcatggagaagggcggcaacatgaagagagtgttcgagagattctgcagaggcctgaaggaggtggagagactgatccaggagagaggctgggagttcatgtggaacgagagactgggctacatcctgacctgccccagcaacctgggcaccggcctgagagccggcgtgcacatcaagctgcccctgctgagcaaggacagcagattccccaagatcctggagaacctgagactgcagaagagaggcaccggcggcgtggacaccgccgccaccggcggcgtgttcgacatcagcaacctggacagactgggcaagagcgaggtggagctggtgcagctggtgatcgacggcgtgaactacctgatcgactgcgagagaagactggagagaggccaggacatcagaatccccacccccgtgatccacaccaagcactag

SEQ ID NO: 314159 - DNA, 1017 bp, Artificial Sequence
  derived and/or modified sequence
atggccggccccttcagcagactgctgagcgccagacccggcctgagactgctggccctggccggcgccggcagcctggccgccggcttctgcagcgacagaaacctgtacgagctgcccgtgaacgacggcggctgcatccccagagagcagagccagacctggcccaccggccagctgcccggcaactgcaccagaagcagaagactgtgcccccccagcatggtgaccggctaccccctgcccagcgccgagtaccccgacctgagaaagcacaacaactgcatggccagccacctgacccccgccgtgtacgccagactgtgcgacaagaccacccccaccggctggaccctggaccagtgcatccagaccggcgtggacaaccccggccaccccttcatcaagaccgtgggcatggtggccggcgacgaggagacctacgaggtgttcgccgacctgttcgaccccgtgatccaggagagacacaacggctacgaccccagaaccatgaagcacaccaccgacctggacgccagcaagatcagaagcggctacttcgacgagagatacgtgctgagcagcagagtgagaaccggcagaagcatcagaggcctgagcctgccccccgcctgcaccagagccgagagaagagaggtggagagagtggtggtggacgccctgagcggcctgaagggcgacctggccggcagatactacagactgagcgagatgaccgaggccgagcagcagcagctgatcgacgaccacttcctgttcgacaagcccgtgagccccctgctgaccgccgccggcatggccagagactggcccgacgccagaggcatctggcacaacaacgagaagagcttcctgatctgggtgaacgaggaggaccacaccagagtgatcagcatggagaagggcggcaacatgaagagagtgttcgagagattctgcagaggcctgaaggaggtgagagaggactacgtgggcgagctgggcggcagaacctag

SEQ ID NO: 314160 - protein, 257 aa, Artificial Sequence
  derived and/or modified sequence
MVTGYPLPSAEYPDLRKHNNCMASHLTPAVYARLCDKTTPTGWTLDQCIQTGVDNPGHPFIKTVGMVAGDEETYEVFADLFDPVIQERHNGYDPRTMKHTTDLDASKIRSGYFDERYVLSSRVRTGRSIRGLSLPPACTRAERREVERVVVDALSGLKGDLAGRYYRLSEMTEAEQQQLIDDHFLFDKPVSPLLTAAGMARDWPDARGIWHNNEKSFLIWVNEEDHTRVISMEKGGNMKRVFERFCRGLKEVVVGIK

SEQ ID NO: 314161 - DNA, 507 bp, Artificial Sequence
  derived and/or modified sequence
atgaaacatacgaccgacctcgatgccagcaaaatcaggagtgggtacttcgacgaaaggtacgttttatccagcagagtgcgaaccggacggagtatcagaggactcagtcttccgccagcctgcactagagctgagagaagagaggtagaaagagtggtggtggatgcactgagcggactgaagggggacttggctggcaggtattatcgcctgtcagaaatgacagaggccgagcagcagcagctgattgatgaccattttctgttcgacaagccagttagccccttgttgacagccgctgggatggctcgcgactggcccgatgctcgcggcatttggcataacaatgaaaagagttttctgatttgggtaaacgaggaggatcacacgagagtgatctcaatggagaagggcggcaatatgaaacgcgtgttcgagagattctgtagagggcttaaggaggtgagagaggattacgtgggcgagcttgggggacgtacctag

SEQ ID NO: 314162 - DNA, 774 bp, Artificial Sequence
  derived and/or modified sequence
atggttacaggctaccccctgcctagtgcggagtacccagacctgcggaagcacaacaactgtatggcatcccatctcacacctgccgtctatgcaagattgtgcgataaaacaactcctacaggatggaccttggaccagtgtatccagaccggcgttgataacccaggccatccattcatcaagaccgtggggatggtcgccggagacgaggagacctacgaggtgtttgccgatctgttcgaccccgtcatccaggagagacataacggatacgatccaagaactatgaaacataccactgatctggacgcgtctaagatacgatctggttatttcgacgagaggtacgtgcttagctctcgcgtgcggactggaaggagtattcgcggattgagcttgccacctgcgtgcacaagagccgagcggcgtgaagtggaacgggtcgtggtggacgcattatcagggctgaagggggacctcgctggacgatactacagactttcggagatgacagaagctgagcagcaacaactgattgatgatcactttctgttcgacaagccagtctctcccttgctgaccgccgcaggcatggcccgggactggccggatgcccgaggtatctggcacaataacgagaagagtttccttatttgggtgaatgaggaagatcacactcgggtgattagcatggagaaagggggtaacatgaagcgggtgtttgaaagattttgcagaggccttaaggaagtggtcgtgggcatcaagtag

SEQ ID NO: 314163 - DNA, 507 bp, Artificial Sequence
  derived and/or modified sequence
atgaagcacaccacagacctggatgccagcaagatccgcagcggctactttgatgaaagatatgtgctgagcagccgggtgaggacaggccgcagcatccggggcctgagcctgcccccagcctgcaccagggctgagcggcgggaggtggagcgggtggtggtggatgccctgagcggcctgaagggggacctggccggccgctactaccgcctgtctgagatgacagaggccgagcagcagcagctgattgatgaccacttcctgtttgacaagcctgtgagccccctgctgacagctgctggcatggcccgggactggccagatgcccggggcatctggcacaacaatgagaagagcttcctgatctgggtgaatgaggaggaccacaccagggtcatctccatggagaagggcggcaacatgaagagggtgtttgagcgcttctgccggggcctgaaggaggtgcgggaggactatgtgggggagctgggcggccgcacctag

SEQ ID NO: 314164 - DNA, 774 bp, Artificial Sequence
  derived and/or modified sequence
atggtgacaggctaccccctgcccagcgctgagtacccagacctgaggaagcacaacaactgcatggccagccacctgaccccagctgtgtatgcccggctgtgtgacaagaccacccccaccggctggaccctggaccagtgcatccagacaggagtggacaaccctggccaccccttcatcaagacagtgggcatggtggccggagatgaggagacctatgaggtgtttgctgacctgtttgatcctgtgatccaggagcggcacaacggctatgaccccaggaccatgaagcacaccacagacctggatgccagcaagatccgcagcggctactttgatgaaagatatgtgctgagcagccgggtgaggacaggccgcagcatccggggcctgagcctgcccccagcctgcaccagggctgagcggcgggaggtggagcgggtggtggtggatgccctgagcggcctgaagggggacctggccggccgctactaccgcctgtctgagatgacagaggccgagcagcagcagctgattgatgaccacttcctgtttgacaagcctgtgagccccctgctgacagctgctggcatggcccgggactggccagatgcccggggcatctggcacaacaatgagaagagcttcctgatctgggtgaatgaggaggaccacaccagggtcatctccatggagaagggcggcaacatgaagagggtgtttgagcgcttctgccggggcctgaaggaggtggtggtgggcatcaagtag

SEQ ID NO: 314165 - DNA, 507 bp, Artificial Sequence
  derived and/or modified sequence
atgaagcacaccaccgacctggacgccagcaagatccggagcggctacttcgacgagcggtacgtgctcagttcccgggttaggaccggccgtagcatccgcgggctcagtctcccaccggcctgcacacgggccgaacgcagggaagttgagcgggttgtggtggacgcactttcaggcctcaagggtgatctggctggacggtactaccggctcagtgaaatgactgaggcagaacagcaacaacttattgatgaccattttttattcgataagccagtgagcccacttctcaccgccgctgggatggctagggactggccagacgctcgaggcatctggcacaacaatgagaagagctttttaatttgggtgaacgaggaagaccacactcgtgtgatttctatggagaaaggcggcaacatgaaacgcgtgttcgaacggttttgcagaggtctaaaagaagttagggaggactacgtcggagagctggggggccggacctag

SEQ ID NO: 314166 - DNA, 774 bp, Artificial Sequence
  derived and/or modified sequence
atggtgaccggctaccccctgcccagcgccgagtaccccgacctgaggaaacacaataattgtatggctagccatctcacgcctgccgtctatgccaggctgtgtgataagactacgccaactggttggacactcgaccagtgtatacaaacgggtgtggacaatcccgggcacccctttattaagacggtgggtatggttgctggagatgaagaaacatacgaagtgtttgccgacctctttgaccctgtcatccaggagcggcacaacggatacgatcccaggacaatgaaacacaccacagatctggatgcttccaagatcagatcaggctacttcgatgagcggtatgtgttgagcagccgagttcggacaggtcgcagcattaggggcctttcactgccgcccgcttgtactagagcagagagacgagaagtcgagagggtcgtcgtggacgccctaagtgggctcaagggggacctcgcgggaagatactatcgcctgagtgaaatgaccgaggcagaacaacagcaacttattgatgatcacttcctgtttgacaaacccgtctccccccttttgaccgctgctggcatggctagagactggcccgatgcgcggggaatatggcacaacaacgaaaaatctttcctgatctgggttaacgaggaggatcacacaagggtcatatcaatggaaaaggggggaaatatgaagcgcgtcttcgagagattctgcagaggactgaaggaagtcgttgtggggatcaaatag

SEQ ID NO: 314167 - DNA, 507 bp, Artificial Sequence
  derived and/or modified sequence
atgaaacataccacggacctggatgcctctaagattcgctccggatactttgatgagagatacgttttaagtagtagggtcaggacagggaggagcattcggggactctcattgcccccagcctgtaccagagcagaacgtagagaggtggagagggtggtggttgatgctctcagtgggcttaagggcgacttggctggaagatactacagactgagcgagatgactgaggctgagcaacagcagctgatcgacgatcactttctgttcgataagccggtcagtccactgctaaccgccgcagggatggctagggactggcccgatgcacgaggcatctggcacaataatgagaaatcattcctgatctgggtgaacgaggaagatcatacaagggtgattagtatggaaaaggggggtaatatgaagagggtcttcgagcgtttctgtaggggcttgaaggaagtgagggaagactacgtcggggaattaggcggaagaacatag

SEQ ID NO: 314168 - DNA, 774 bp, Artificial Sequence
  derived and/or modified sequence
atggtcaccgggtacccactgccgtccgctgagtaccccgacttgcgcaagcacaacaattgtatggcatcacacctcacccccgctgtttacgctcggctctgtgacaagacaactccaacgggttggaccctggaccagtgcatacaaaccggtgttgataatccaggccacccatttatcaagacagttgggatggtggccggagacgaggagacctatgaagtgttcgccgacctgttcgacccagtcattcaggaaagacacaatggctatgatccaaggacaatgaagcatacaactgatctggatgcctcaaaaatccggtctgggtattttgatgaacggtacgtgctgagctcccgggtgagaacaggacgttctattcgcggactttctttacccccagcctgtacgcgagcggagcggcgagaagttgaacgagtggtggtagatgctctctcagggctcaagggtgatctcgcaggtcgttactacagactgtcagagatgactgaagctgaacaacagcagttgattgacgatcacttcctgttcgacaagccggtgtcaccactccttaccgccgcaggaatggccagagactggcccgacgcccgaggcatttggcacaataacgaaaagtcttttctaatttgggtaaatgaagaggaccataccagggtgataagcatggagaagggtggaaacatgaagagagtctttgaacgcttctgtaggggccttaaggaagtggttgtggggatcaagtag

SEQ ID NO: 314169 - DNA, 1372 bp, Artificial Sequence
  derived and/or modified sequence
ccctctcctccgcccgcccgcctgccactagctcattgcgcctctcctgcagtctgattggcaccggctcccattccggctccagcctccaatccgacccccatttcggctgcagcctcggacctagctccggccctcggtctatccggttgcatcctccctccctgttccggatcttatcttgcgccagcgcctactccaggatcccgtagccagacctcaagccatggctggtcccttctcccgtctgctgtccgcccgcccgggactcaggctcctggctttggccggagcggggtctctagccgctgggtttctgctccgaccggaacctgtacgagctgccagtgaacgacggaggctgtatcccccgaggtatttgctgacctgtttgaccctgtgatccaagagcgacacaatggatatgacccccggacaatgaagcacaccacggatctagatgccagtaaaatccgttctggctactttgatgagaggtatgtattgtcctctagagtcagaactggccgaagcatccgaggactcagtctgcctccagcttgcactcgagcagagcgacgagaggtggaacgtgttgtggtggatgcactgagtggcctgaagggtgacctggctggacgttactataggctcagtgagatgacagaggctgaacagcagcagcttattgatgaccactttctgtttgataagcctgtgtccccgttgctgactgcagcaggaatggctcgagactggccagatgctcgtggaatttggcacaacaatgagaagagcttcctgatctgggtgaatgaggaggatcatacacgggtgatctccatggagaagggtggtaacatgaagagagtgtttgaaagattctgccgaggcctcaaagaggttagagaagactatgtaggggagctaggtgggaggacataaggaaaaccaaagagtagcataaatagattatgtaatttaccaaccaacccaggacatgtcttatagtaaaaaggactatctaggactcactccaggactaaaggtgtaaaccagctgggaccatactgggaaaaccaggacatgtggtcacactaagattaggaaaagaaagagtgtcaggaatcttaggaagtgaacaaggctgttgacagagagtgcaaagaaggaataaatgagatggcacgtcagtgcctgggatgtgtgcagtgggatggtgaggtgtgcagataaggaaaacattcgagcttagattgatgttggcggggagaggttgctgtgttcatgactctaatataaccacccagttctgagacaaggtaggccttgactctggattctatcattcttgttaaagtatcgggtctag

SEQ ID NO: 314170 - DNA, 507 bp, Artificial Sequence
  derived and/or modified sequence
atgaagcacaccaccgacctggacgccagcaagatcagaagcggctacttcgacgagagatacgtgctgagcagcagagtgagaaccggcagaagcatcagaggcctgagcctgccccccgcctgcaccagagccgagagaagagaggtggagagagtggtggtggacgccctgagcggcctgaagggcgacctggccggcagatactacagactgagcgagatgaccgaggccgagcagcagcagctgatcgacgaccacttcctgttcgacaagcccgtgagccccctgctgaccgccgccggcatggccagagactggcccgacgccagaggcatctggcacaacaacgagaagagcttcctgatctgggtgaacgaggaggaccacaccagagtgatcagcatggagaagggcggcaacatgaagagagtgttcgagagattctgcagaggcctgaaggaggtgagagaggactacgtgggcgagctgggcggcagaacctag

SEQ ID NO: 314171 - DNA, 774 bp, Artificial Sequence
  derived and/or modified sequence
atggtgaccggctaccccctgcccagcgccgagtaccccgacctgagaaagcacaacaactgcatggccagccacctgacccccgccgtgtacgccagactgtgcgacaagaccacccccaccggctggaccctggaccagtgcatccagaccggcgtggacaaccccggccaccccttcatcaagaccgtgggcatggtggccggcgacgaggagacctacgaggtgttcgccgacctgttcgaccccgtgatccaggagagacacaacggctacgaccccagaaccatgaagcacaccaccgacctggacgccagcaagatcagaagcggctacttcgacgagagatacgtgctgagcagcagagtgagaaccggcagaagcatcagaggcctgagcctgccccccgcctgcaccagagccgagagaagagaggtggagagagtggtggtggacgccctgagcggcctgaagggcgacctggccggcagatactacagactgagcgagatgaccgaggccgagcagcagcagctgatcgacgaccacttcctgttcgacaagcccgtgagccccctgctgaccgccgccggcatggccagagactggcccgacgccagaggcatctggcacaacaacgagaagagcttcctgatctgggtgaacgaggaggaccacaccagagtgatcagcatggagaagggcggcaacatgaagagagtgttcgagagattctgcagaggcctgaaggaggtggtggtgggcatcaagtag

SEQ ID NO: 314172 - DNA, 1224 bp, Artificial Sequence
  derived and/or modified sequence
attgcgcctctcctgcagtctgattggcaccggctcccattccggctccagcctccaatccgacccccatttcggctgcagcctcggacctagctccggccctcggtctatccggttgcatcctccctccctgttccggaacctgtacgagctgccagtgaacgacggaggctgtatcccccgagcgctgagtacccagacctccgaaagcacaacaactgcatggccagtcacctgaccccagcagtctatgcacggctctgcgacaagaccacacccactggttggacgctagatcagtgtatccagactggcgtggacaaccctggccaccccttcatcaagactgtgggcatggtggctggagatgaggagacctatgaggtatttgctgacctgtttgaccctgtgatccaagagcgacacaatggatatgacccccggacaatgaagcacaccacggatctagatgccagtaaaagtcagaactggccgaagcatccgaggactcagtctgcctccagcttgcactcgagcagagcgacgagaggtggaacgtgttgtggtggatgcactgagtggcctgaagggtgacctggctggacgttactataggctcagtgagatgacagaggctgaacagcagcagcttattgatgaccactttctgtttgataagcctgtgtccccgttgctgactgcagcaggaatggctcgagactggccagatgctcgtggaatttggcacaacaatgagaagagcttcctgatctgggtgaatgaggaggatcatacacgggtgatctccatggagaagggtggtaacatgaagagagtgtttgaaagattctgccgaggcctcaaagaggttagagaagattgtgtaggggagctaggtgggaggacataaggaaaaccaaagagtagcataaatagattatgtaatttatcaaccaacccaagacatgtctgatggtaaaaaggactacctaggactcactctaggactaaaggtataaaccagctgggaccatactgggaaaaccaggacatgtggtcacactaagattaggaaaagagtgtcaggaaccttagaaagtgaagaaggcaggtaatgcaaagaaggaataactgagatggcacgtcagtgcctgggatgtgtgcagtgggatggtgaggtgtgcagataaggaaaacattcgagcttagattgatgttggcggg

SEQ ID NO: 314173 - protein, 212 aa, Artificial Sequence
  derived and/or modified sequence
MDPVVLSYMDSLLRQSDVSLLDPPSWLNDHIIGFAFEYFANSQFHDCSDHVSFISPEVTQFIKCTSNPAEIAMFLEPLDLPNKRVVFLAINDNSNQAAGGTHWSLLVYLQDKNSFFHYDSHSRSNSVHAKQVAEKLEAFLGRKGDKLAFVEEKAPAQQNSYDCGMYVICNTEALCQNFFRQQTESLLQLLTPAYITKKRGEWKDLITTLAKK

SEQ ID NO: 314174 - DNA, 1556 bp, Artificial Sequence
  derived and/or modified sequence
cttcttcaccttacggcagagcagggaactcagctttagattctccctgtactggaaagggatgtcgcaaggttggggacgaaacctctgagtttgcgaccgtagctgtcgctttccggccaacacagaggtgcctgaaggctggttggggtggtgaggcccgaggcagctcttgttcagcttctggaatttctgagcagccctcgtcagtacaagatggaccccgtagtcttgagttacatggacagtctactgcggcaatcagatgtctcactattggatccgccaagctggctcaatgaccatattattgggtttgcgtttgagtactttgccaacagtcagtttcatgactgctctgatcacgtcagtttcatcagccctgaagtcacccagttcatcaagtgcactagcaacccagcagagattgccatgttccttgaaccactggacctccccaacaagagagttgtatttttagccatcaatgataactccaaccaggcagctggaggaacccactggagtttattggtctacctccaagataaaaatagcttttttcattatgattcccatagcaggagcaactcagttcacgcaaagcaggtagcagagaaactggaggctttcttaggcagaaaaggagacaaactggcctttgtggaagagaaagcccctgcccaacaaaacagctatgactgtgggatgtacgtgatatgtaacactgaggccttgtgtcagaacttctttaggcaacagacagaatcactgctgcagctactcacccctgcatacatcacaaagaagaggggagaatggaaagatctcattaccacacttgctaaaaagtagctattgaagtatatttgcgacttttgaaggctcctctttctgcccttccccatttgttggatggctgcaatctcagtgcctgagggaagatgcctagtagaggaaagcttaatactctttttcctgaaagaatatcatcctctgcattatccccatggaacgtttcactttaaccctgactggggagcaatatgttctgtgaaaatatcttgaaattgtacaccaaaaccttacaaccaacttatttgaacatttattacacacagggtttacgtaagacttttcttattggtatataattaatttcctttggtctcccttatccacattggcttattctggaggaaaagcagtgatctgtaaaacaaatcaagaatatattaaatctagaggaatgcagagaagaaaactataaaacagaaccaaaaacttgttgcacagcctacataattaagagatcaactggctggaagcagatcaaggcctaacttcattcaagacctaaatattatgagactcagttattcggttttatgtgacatctcttccattcaccatgcacaggcttttccagctatctatataatgtttgcaaatatttgataaagatgatgttaccctatcttcctccatctgattcctggaatgcttgaagaaaggggaaatcttgagtaacctcattaaaattaatgtctggtgga

SEQ ID NO: 314175 - DNA, 1680 bp, Artificial Sequence
  derived and/or modified sequence
acttactccaacagcagtcaagagaatgaacaggagggcatgacaagaggcagaagacagaaggcaagaagaccactcagcattacagaagcccaacaaacagatattttcagttaaaataagatagaggcaacaaaaagtaataaggaatgacctgaaatatcatgagggaaaatgtacaaggcagtgacagactggatgttggcagtgaagtacagagtgaagcggagggcaattcccaggttcctgaaggtttcatgaggaaagagtggtgccattaatcaagctcttgttcagcttctggaatttctgagcagccctcgtcagtacaagatggaccccgtagtcttgagttacatggacagtctactgcggcaatcagatgtctcactattggatccgccaagctggctcaatgaccatattattgggtttgcgtttgagtactttgccaacagtcagtttcatgactgctctgatcacgtcagtttcatcagccctgaagtcacccagttcatcaagtgcactagcaacccagcagagattgccatgttccttgaaccactggacctccccaacaagagagttgtatttttagccatcaatgataactccaaccaggcagctggaggaacccactggagtttattggtctacctccaagataaaaatagcttttttcattatgattcccatagcaggagcaactcagttcacgcaaagcaggtagcagagaaactggaggctttcttaggcagaaaaggagacaaactggcctttgtggaagagaaagcccctgcccaacaaaacagctatgactgtgggatgtacgtgatatgtaacactgaggccttgtgtcagaacttctttaggcaacagacagaatcactgctgcagctactcacccctgcatacatcacaaagaagaggggagaatggaaagatctcattaccacacttgctaaaaagtagctattgaagtatatttgcgacttttgaaggctcctctttctgcccttccccatttgttggatggctgcaatctcagtgcctgagggaagatgcctagtagaggaaagcttaatactctttttcctgaaagaatatcatcctctgcattatccccatggaacgtttcactttaaccctgactggggagcaatatgttctgtgaaaatatcttgaaattgtacaccaaaaccttacaaccaacttatttgaacatttattacacacagggtttacgtaagacttttcttattggtatataattaatttcctttggtctcccttatccacattggcttattctggaggaaaagcagtgatctgtaaaacaaatcaagaatatattaaatctagaggaatgcagagaagaaaactataaaacagaaccaaaaacttgttgcacagcctacataattaagagatcaactggctggaagcagatcaaggcctaacttcattcaagacctaaatattatgagactcagttattcggttttatgtgacatctcttccattcaccatgcacaggcttttccagctatctatataatgtttgcaaatatttgataaagatgatgttaccctatcttcctccatctgattcctggaatgcttgaagaaaggggaaatcttgagtaacctcattaaaattaatgtctggtggacctctca

SEQ ID NO: 314176 - DNA, 1681 bp, Artificial Sequence
  derived and/or modified sequence
caccttacggcagagcagggaactcagctttagattctccctgtactggaaagggatgtcgcaaggttggggacgaaacctctgagtttgcgaccgtagctgtcgctttccggccaacacagaggtgcctgaaggctggttggggtggtgaggcccgaggcagtggaaatggatcgtcataaaggtcttcatcctcatcatcatgttgagtaggctgaagaggaggaggaaaaggagcaattggtcttgctgtctcaggggtggcagaggcaaaagaaaatccatgtctcttgttcagcttctggaatttctgagcagccctcgtcagtacaagatggaccccgtagtcttgagttacatggacagtctactgcggcaatcagatgtctcactattggatccgccaagctggctcaatgaccatattattgggtttgcgtttgagtactttgccaacagtcagtttcatgactgctctgatcacgtcagtttcatcagccctgaagtcacccagttcatcaagtgcactagcaacccagcagagattgccatgttccttgaaccactggacctccccaacaagagagttgtatttttagccatcaatgataactccaaccaggcagctggaggaacccactggagtttattggtctacctccaagataaaaatagcttttttcattatgattcccatagcaggagcaactcagttcacgcaaagcaggtagcagagaaactggaggctttcttaggcagaaaaggagacaaactggcctttgtggaagagaaagcccctgcccaacaaaacagctatgactgtgggatgtacgtgatatgtaacactgaggccttgtgtcagaacttctttaggcaacagacagaatcactgctgcagctactcacccctgcatacatcacaaagaagaggggagaatggaaagatctcattaccacacttgctaaaaagtagctattgaagtatatttgcgacttttgaaggctcctctttctgcccttccccatttgttggatggctgcaatctcagtgcctgagggaagatgcctagtagaggaaagcttaatactctttttcctgaaagaatatcatcctctgcattatccccatggaacgtttcactttaaccctgactggggagcaatatgttctgtgaaaatatcttgaaattgtacaccaaaaccttacaaccaacttatttgaacatttattacacacagggtttacgtaagacttttcttattggtatataattaatttcctttggtctcccttatccacattggcttattctggaggaaaagcagtgatctgtaaaacaaatcaagaatatattaaatctagaggaatgcagagaagaaaactataaaacagaaccaaaaacttgttgcacagcctacataattaagagatcaactggctggaagcagatcaaggcctaacttcattcaagacctaaatattatgagactcagttattcggttttatgtgacatctcttccattcaccatgcacaggcttttccagctatctatataatgtttgcaaatatttgataaagatgatgttaccctatcttcctccatctgattcctggaatgcttgaagaaaggggaaatcttgagtaacctcattaaaattaatgtctggtggacctctca

SEQ ID NO: 314177 - DNA, 1834 bp, Artificial Sequence
  derived and/or modified sequence
ataatggcacacacacaactggcctcatgcttccataacttcactctgcctcccacttttttcagcccaacccctccaaacatgggtctcggtcggtccccttaagccacaatggagggaatacattaggctaagcaaatattccctcaggatttcatggcaaagccctttcaaccaaagaaaggatcgcgactaaggagaaagataacaaggtttgcttgaggagaggtctgttgagagaggctacagtcggtggtgggagagaagccaaagtctgtgacggtgtctagagggactgacaccacatctaccgggatggaaatggatcgtcataaaggtcttcatcctcatcatcatgttgagtaggctgaagaggaggaggaaaaggagcaattggtcttgctgtctcaggggtggcagaggcaaaagaaaatccatgtctcttgttcagcttctggaatttctgagcagccctcgtcagtacaagatggaccccgtagtcttgagttacatggacagtctactgcggcaatcagatgtctcactattggatccgccaagctggctcaatgaccatattattgggtttgcgtttgagtactttgccaacagtcagtttcatgactgctctgatcacgtcagtttcatcagccctgaagtcacccagttcatcaagtgcactagcaacccagcagagattgccatgttccttgaaccactggacctccccaacaagagagttgtatttttagccatcaatgataactccaaccaggcagctggaggaacccactggagtttattggtctacctccaagataaaaatagcttttttcattatgattcccatagcaggagcaactcagttcacgcaaagcaggtagcagagaaactggaggctttcttaggcagaaaaggagacaaactggcctttgtggaagagaaagcccctgcccaacaaaacagctatgactgtgggatgtacgtgatatgtaacactgaggccttgtgtcagaacttctttaggcaacagacagaatcactgctgcagctactcacccctgcatacatcacaaagaagaggggagaatggaaagatctcattaccacacttgctaaaaagtagctattgaagtatatttgcgacttttgaaggctcctctttctgcccttccccatttgttggatggctgcaatctcagtgcctgagggaagatgcctagtagaggaaagcttaatactctttttcctgaaagaatatcatcctctgcattatccccatggaacgtttcactttaaccctgactggggagcaatatgttctgtgaaaatatcttgaaattgtacaccaaaaccttacaaccaacttatttgaacatttattacacacagggtttacgtaagacttttcttattggtatataattaatttcctttggtctcccttatccacattggcttattctggaggaaaagcagtgatctgtaaaacaaatcaagaatatattaaatctagaggaatgcagagaagaaaactataaaacagaaccaaaaacttgttgcacagcctacataattaagagatcaactggctggaagcagatcaaggcctaacttcattcaagacctaaatattatgagactcagttattcggttttatgtgacatctcttccattcaccatgcacaggcttttccagctatctatataatgtttgcaaatatttgataaagatgatgttaccctatcttcctccatctgattcctggaatgcttgaagaaaggggaaatcttgagtaacctcattaaaattaatgtctggtggacctctca

SEQ ID NO: 314178 - protein, 973 aa, Artificial Sequence
  derived and/or modified sequence
SSSDKESILTILKVLGDLLSVGTDRRIHYMISKGGSEALLQTLVDTARTAPPDYDILLPLFRLLAKVGLRDKKIGRKALELEALDVTLILARKNLSHGQNLLHCLWALRVFASSVSMGAMLGINGAMELLFKVITPYTRKRTQAIRAATEVLAALLKSKSNGRRAVNRGYVTSLLGLHQDWHSHDTANAYVQIRRGLLLCLRHIAALRSGREAFLAAQGMEILFSTTQNCLDDKSMEPVISVVLQILRQCYPTSPLPLVTASSAYAFPVPGCITTEPPHDLPEEDFEDDGDDEVDKDSDTEDGKVEDDDLETDVNKLSSKPGLDRPEEELMQYEVMCLELSYSFEELQSKLGDDLNSEKTQYANHHHIPAAASSKQHCYSKDQSSCGQEREYAVQTSLLCRVKTGRSTVHLGSKKNPGVNLYQNVQSNSLRRDSSESEIPDIQASPKADAWDVDAIFCPRMSASFSNSTRTREVVKVIDKLLQTHLKRVPFHDPYLYMAKARRTSSVVDFKMMAFPDVWGHCPPPTTQPMLERKCGVQRIRIFEDIRRLIQPSDVINKVVFSLDEPWPLQDNASNCLRFFSKFESGNLRKAIQVREFEYDLLVNADVNSTQHQQWFYFKVSGMQAAIPYHFNIINCEKPNSQFNYGMQPTLYSVKEALLGKPTWIRTGHEICYYKNHYRQSTAVAGGASGKCYYTLTFAVTFPHSEDVCYLAYHYPYTYTALMTHLDILEKSVNLKEVYFRQDVLCQTLGGNPCPLVTITAMPESNSDEHLEQFRHRPYQVITARVHPGESNASWVMKGTLEFLVSSDPVARLLRENFIFKIIPMLNPDGVINGNHRCSLSGEDLNRQWLSPSAHLQPTIYHAKGLLYHLSSIGRSPVVSHFLLVFCDFHGHSQKKNVFLYGCSIKETLWQAACTVGTSTILEEVNYRTLPKILDKLAPAFTMSSCSFLVEKSRASTARVVVWREMGVSRSYT

SEQ ID NO: 314179 - DNA, 2922 bp, Artificial Sequence
  derived and/or modified sequence
agcagcagcgacaaggagagcatcctgaccatcctgaaggtgctgggcgacctgctgagcgtgggcaccgacagaagaatccactacatgatcagcaagggcggcagcgaggccctgctgcagaccctggtggacaccgccagaaccgccccccccgactacgacatcctgctgcccctgttcagactgctggccaaggtgggcctgagagacaagaagatcggcagaaaggccctggagctggaggccctggacgtgaccctgatcctggccagaaagaacctgagccacggccagaacctgctgcactgcctgtgggccctgagagtgttcgccagcagcgtgagcatgggcgccatgctgggcatcaacggcgccatggagctgctgttcaaggtgatcaccccctacaccagaaagagaacccaggccatcagagccgccaccgaggtgctggccgccctgctgaagagcaagagcaacggcagaagagccgtgaacagaggctacgtgaccagcctgctgggcctgcaccaggactggcacagccacgacaccgccaacgcctacgtgcagatcagaagaggcctgctgctgtgcctgagacacatcgccgccctgagaagcggcagagaggccttcctggccgcccagggcatggagatcctgttcagcaccacccagaactgcctggacgacaagagcatggagcccgtgatcagcgtggtgctgcagatcctgagacagtgctaccccaccagccccctgcccctggtgaccgccagcagcgcctacgccttccccgtgcccggctgcatcaccaccgagcccccccacgacctgcccgaggaggacttcgaggacgacggcgacgacgaggtggacaaggacagcgacaccgaggacggcaaggtggaggacgacgacctggagaccgacgtgaacaagctgagcagcaagcccggcctggacagacccgaggaggagctgatgcagtacgaggtgatgtgcctggagctgagctacagcttcgaggagctgcagagcaagctgggcgacgacctgaacagcgagaagacccagtacgccaaccaccaccacatccccgccgccgccagcagcaagcagcactgctacagcaaggaccagagcagctgcggccaggagagagagtacgccgtgcagaccagcctgctgtgcagagtgaagaccggcagaagcaccgtgcacctgggcagcaagaagaaccccggcgtgaacctgtaccagaacgtgcagagcaacagcctgagaagagacagcagcgagagcgagatccccgacatccaggccagccccaaggccgacgcctgggacgtggacgccatcttctgccccagaatgagcgccagcttcagcaacagcaccagaaccagagaggtggtgaaggtgatcgacaagctgctgcagacccacctgaagagagtgcccttccacgacccctacctgtacatggccaaggccagaagaaccagcagcgtggtggacttcaagatgatggccttccccgacgtgtggggccactgccccccccccaccacccagcccatgctggagagaaagtgcggcgtgcagagaatcagaatcttcgaggacatcagaagactgatccagcccagcgacgtgatcaacaaggtggtgttcagcctggacgagccctggcccctgcaggacaacgccagcaactgcctgagattcttcagcaagttcgagagcggcaacctgagaaaggccatccaggtgagagagttcgagtacgacctgctggtgaacgccgacgtgaacagcacccagcaccagcagtggttctacttcaaggtgagcggcatgcaggccgccatcccctaccacttcaacatcatcaactgcgagaagcccaacagccagttcaactacggcatgcagcccaccctgtacagcgtgaaggaggccctgctgggcaagcccacctggatcagaaccggccacgagatctgctactacaagaaccactacagacagagcaccgccgtggccggcggcgccagcggcaagtgctactacaccctgaccttcgccgtgaccttcccccacagcgaggacgtgtgctacctggcctaccactacccctacacctacaccgccctgatgacccacctggacatcctggagaagagcgtgaacctgaaggaggtgtacttcagacaggacgtgctgtgccagaccctgggcggcaacccctgccccctggtgaccatcaccgccatgcccgagagcaacagcgacgagcacctggagcagttcagacacagaccctaccaggtgatcaccgccagagtgcaccccggcgagagcaacgccagctgggtgatgaagggcaccctggagttcctggtgagcagcgaccccgtggccagactgctgagagagaacttcatcttcaagatcatccccatgctgaaccccgacggcgtgatcaacggcaaccacagatgcagcctgagcggcgaggacctgaacagacagtggctgagccccagcgcccacctgcagcccaccatctaccacgccaagggcctgctgtaccacctgagcagcatcggcagaagccccgtggtgagccacttcctgctggtgttctgcgacttccacggccacagccagaagaagaacgtgttcctgtacggctgcagcatcaaggagaccctgtggcaggccgcctgcaccgtgggcaccagcaccatcctggaggaggtgaactacagaaccctgcccaagatcctggacaagctggcccccgccttcaccatgagcagctgcagcttcctggtggagaagagcagagccagcaccgccagagtggtggtgtggagagagatgggcgtgagcagaagctacacctag

SEQ ID NO: 314180 - DNA, 2922 bp, Artificial Sequence
  derived and/or modified sequence
agctcatccgacaaagaatcaattctgacaatactcaaagtgctcggagatctcctctcagtcgggacggatcgccggattcattatatgatctctaaggggggcagcgaggcccttctgcagacactcgtggacacagctcgtactgcaccccccgactacgatatcctgttgccacttttccgcctactggcaaaagtcggactcagggataaaaaaattgggcggaaggccctcgagctggaggcattggacgtgacactcattttggctcggaagaatctctcacacgggcaaaacctgctacattgtttatgggctctgagagtgttcgcctctagcgtgtctatgggggccatgctgggtattaatggtgcaatggagctgctcttcaaggtaattactccttacaccagaaagcggacacaagccatacgggccgctaccgaggtgctggctgccttgcttaagtccaaatcgaatgggcgaagagcagtgaacagaggctacgtcacttctctcttaggtctgcaccaggactggcacagccacgatacagcgaatgcttacgtgcagatccggcgcggcttgctgctgtgtctcagacacatagcagctcttcgatccggacgggaggccttcctggccgcgcaaggcatggagatcctcttttccactacacagaactgcctagatgacaagtcgatggaaccagtgatttcggttgtgctgcagatcctgcgccagtgttaccctactagtccactccccctggtgaccgcgagctcagcatatgcgttccctgttccaggctgcataacgacagaacccccccacgacctgccagaagaagattttgaggatgatggagatgacgaagtcgacaaagacagcgatacagaggacggaaaagtggaggacgatgacctcgagacagacgtgaataagctgagtagtaagccaggactggatcgaccagaagaagaattaatgcaatacgaggttatgtgcctggagttgagctacagcttcgaggagcttcagagcaagctgggcgacgatctaaacagcgaaaaaacacaatacgctaaccatcaccacatcccagcagcagcctcatctaaacagcactgctactcaaaagaccagtcatcctgtggacaagaaagggaatacgccgtgcagacctctctgctgtgcagagtcaagaccgggcgttctactgtgcaccttggttccaaaaagaatccaggcgtcaatttgtaccaaaacgtgcaaagcaactctctccggagggattctagtgaatctgaaattcccgatatccaggcttcccccaaagctgatgcttgggacgtggacgccatattctgtcctcggatgtcggcatcattctctaattctaccagaaccagggaagttgttaaggtgattgataagctcctgcagacacatctaaaacgcgtcccctttcatgacccgtatctgtatatggccaaggcccgaagaaccagctcggtggtggacttcaagatgatggcctttcctgatgtgtggggccattgccctcccccaacaacccagccaatgctggaacggaagtgcggcgtgcagagaatccggatttttgaggacataagacgcctgattcagccaagcgatgtgataaataaagtcgttttctctttggatgagccctggccccttcaagataatgcgtccaactgcctcaggtttttctcaaagtttgagagtgggaatcttcgtaaggcaattcaggtgcgagagtttgaatacgacttacttgtgaacgccgacgtgaacagcacccagcatcaacagtggttctactttaaggtctccgggatgcaggcagctatcccgtaccattttaacatcattaactgtgaaaagccaaattcgcagttcaactacggaatgcagccaacactgtactccgtgaaggaagcgctccttggtaagcccacctggatcagaacaggtcacgagatctgctattacaaaaaccactatcgccaatccaccgccgttgctgggggcgcctccggaaagtgttattataccctgacttttgccgtcactttccctcattctgaggatgtatgctatctcgcctaccattatccctacacgtacaccgccctaatgactcacctagatattctggagaaatctgtgaacctcaaagaagtttacttccggcaggacgtgctgtgccagactctgggaggtaacccctgccctctggtcaccattacggctatgcctgagagcaacagtgacgagcatctggaacagttcagacacaggccttaccaggtaataacagcgcgcgtgcatcccggagagagtaatgcatcttgggtaatgaaggggacactcgagtttctggtgagtagcgaccctgtggctcggctattgcgcgaaaatttcatttttaagattattcccatgctgaatccagatggggtaatcaatgggaatcatagatgctctctcagcggagaggacctcaacagacagtggttaagtccatcagcccacctgcagcccactatataccacgccaaggggctcctgtaccacctgagttcaatcgggagaagtcctgtcgtgtcacactttctgctggtcttctgcgacttccacggccactcacagaagaaaaacgtttttctgtatggctgttccattaaagagactttatggcaggcagcgtgtacggttggcacctcgactatcctggaggaggtaaactatcggacactgcctaagatccttgacaagctggcccctgctttcacaatgtccagctgctcctttttggtagagaagtctcgtgcatctactgccagagttgtggtgtggcgcgagatgggggtgtctcgctcgtatacctag

SEQ ID NO: 314181 - DNA, 2922 bp, Artificial Sequence
  derived and/or modified sequence
agcagcagtgacaaggagagcatcctgaccatcctgaaggtgctgggggacctgctgtctgtgggcacagaccggcgcatccactacatgatcagcaaaggaggcagcgaggccctgctgcagaccctggtggacacagccaggacagcccccccagactatgacatcctgctgcccctcttccggctgctggccaaggtgggcctgcgggacaagaagattggaaggaaggccctggagctggaggccctggatgtgaccctcatcctggccaggaagaacctgagccacggccagaacctgctgcactgcctgtgggccctgcgggtgtttgccagctctgtgtccatgggcgccatgctgggcatcaacggggccatggagctgctcttcaaggtgatcaccccctacaccaggaagaggacccaggccatccgggccgccacagaggtgctggccgccctgctgaagagcaagagcaatggaagaagagctgtgaacagaggctacgtgaccagcctgctgggcctgcaccaggactggcacagccatgacacagccaatgcctacgtgcagatccggcggggcctgctgctgtgcctgcggcacatcgccgccctgcggagcggccgggaggccttcctggccgcccagggcatggagatcctcttcagcaccacccagaactgcctggatgacaagtccatggagcccgtcatctctgtggtgctgcagatcctgcggcagtgctaccccaccagccccctgcccctggtgacagccagcagcgcctatgccttccctgtgcccggctgcatcaccacagagccccctcatgacctgcctgaggaggactttgaagatgatggagatgatgaggtggacaaggacagcgacacagaagatggcaaggtggaggatgatgacctggagacagatgtgaacaagctgagcagcaagccaggcctggacaggcctgaggaggagctgatgcagtatgaggtgatgtgcctggagctgagctacagctttgaggagctgcagagcaagctgggagatgacctgaacagcgagaagacccagtatgccaaccaccaccacatcccagctgctgccagcagcaagcagcactgctacagcaaggaccagagcagctgtggccaggagcgggagtatgctgtgcagaccagcctgctgtgccgggtgaagacaggccgcagcacagtgcacctgggcagcaagaagaaccctggggtgaacctgtaccagaatgtgcagagcaacagcctgcggcgggacagcagcgagagcgagatcccagacatccaggccagccccaaggcagatgcctgggatgtggatgccatcttctgccccaggatgtctgccagcttcagcaacagcaccaggacccgggaggtggtgaaggtgattgacaagctgctgcagacccacctgaagagggtgcccttccatgacccctacctgtacatggccaaggcccggaggaccagctctgtggtggacttcaagatgatggccttcccagatgtgtggggccactgccccccacccaccacccagcccatgctggagaggaaatgtggggtgcagaggatccgcatctttgaggacatcagaagactcatccagcccagtgatgtgatcaacaaggtggtgttcagcctggatgagccctggcccctgcaggacaatgccagcaactgcctgcgcttcttcagcaagtttgaaagtggcaacctgaggaaggccatccaggtgcgggagtttgaatatgacctgctggtgaatgctgatgtgaacagcacccagcaccagcagtggttctacttcaaggtgtctggcatgcaggccgccatcccctaccacttcaacatcatcaactgtgagaagcccaacagccagttcaactacggcatgcagcccaccctgtacagcgtgaaggaggccctgctgggcaagcccacctggatcagaactggacatgagatctgctactacaagaaccactaccggcagagcacagctgtggccggcggggccagcggcaagtgctactacaccctgacctttgctgtgaccttcccccacagtgaagatgtgtgctacctggcctaccactacccctacacctacacagccctgatgacccacctggacatcctggagaagtctgtgaacctgaaggaggtgtacttccggcaggatgtgctgtgccagaccctgggcggcaacccctgccccctggtgaccatcacagccatgcctgagagcaacagtgatgagcacctggagcagttccgccaccggccctaccaggtgatcacagcccgggtgcaccctggagagagcaatgcctcctgggtgatgaagggcaccctggagttcctggtgtccagtgaccctgtggcccggctgctgcgggagaacttcatcttcaagatcatccccatgctgaacccagatggagtcatcaatggaaaccaccgctgcagcctgtctggagaggacctgaaccggcagtggctgagccccagcgcccacctgcagcccaccatctaccacgccaagggcctgctgtaccacctgagcagcatcggccgcagccctgtggtgagccacttcctgctggtgttctgtgacttccacggccacagccagaagaagaatgtgttcctgtatggctgcagcatcaaggagaccctgtggcaggccgcctgcaccgtgggcaccagcaccatcctggaggaggtgaactaccgcaccctgcccaagatcctggacaagctggccccagccttcaccatgagcagctgcagcttcctggtggagaagagccgggccagcacagcccgggtggtggtgtggagggagatgggcgtgagccgcagctacacctag

SEQ ID NO: 314182 - DNA, 2922 bp, Artificial Sequence
  derived and/or modified sequence
agcagcagcgacaaggagagcatcctgaccatcctgaaggtgctgggcgatctcctatctgtgggcaccgaccggagaatccactatatgatcagtaagggcggtagcgaagcgttgttgcagactttagttgatacagccagaacagccccaccagactatgacatcctgctcccactgttccgtttactggcaaaggttggcctccgcgataagaagatcggacgcaaggccctcgaactggaagctctggatgttaccctaattctggctcgaaaaaacctgagccatggccagaatctgctgcactgcctgtgggctttgagggtttttgccagttccgtctccatgggcgctatgctaggtattaatggagcgatggaactgttgttcaaagtaataacaccttacacgcgcaagaggacccaagctatccgcgcagccacagaggtcctagctgctctgctgaagagtaaatcaaacggcaggcgggccgtaaaccgaggctacgtgacatcccttctgggcctgcatcaggactggcactcgcacgacacggcaaatgcatatgtccagatccggcggggcctgctgctctgcctacgtcatatagctgcattaaggagcggaagagaggcctttttagcagcgcaagggatggagatactattcagcacaactcagaattgcttggacgataaatccatggaacccgtgatctcagtggtgctccagatcttgcggcagtgttaccccacatccccgctgcccctggtcacagcgtctagcgcgtacgcatttccagtacctgggtgtatcactacggagcctcctcatgatttgcctgaagaagattttgaggacgacggtgatgacgaggtggataaggacagtgatacggaagatggaaaggtagaagatgacgatctggagacagatgtgaataagctgagttcaaaacctgggctcgaccggcccgaggaggaacttatgcaatatgaagttatgtgcttggagctcagctacagctttgaggagcttcagtccaaactgggcgatgacttaaattcagagaaaacccagtatgctaatcatcaccacattcctgcggctgcttcctcgaaacagcactgttactccaaggaccagagctcttgcggccaggagcgggagtacgcagtgcagacctcattgttgtgccgtgtcaagacgggcaggtccacagtacacttgggaagcaagaaaaaccccggagtcaatctatatcaaaatgtacagtctaactccctcagaagagactctagcgagagcgaaatacctgacatccaggccagcccaaaggcggacgcttgggatgtggacgctatattctgcccacggatgtctgctagtttcagtaattccaccagaacacgcgaggtggtcaaagtgattgacaagctcctgcagacccacctgaagcgcgtgcctttccacgatccatatctttatatggccaaggcacggaggacttctagtgtcgtagatttcaagatgatggcatttccagatgtgtggggacactgcccccccccaacgacgcagcctatgctggagaggaagtgcggtgtgcagaggattaggatattcgaagacatcaggcgcttaattcaacccagcgacgtcataaataaagtggtgttctccctggatgaaccctggcctctgcaagacaatgccagtaattgcttaagattcttttctaagtttgaaagtgggaatttacgaaaagcgatccaggttagagagtttgagtatgacctgttggtgaatgccgatgtcaattctactcagcaccaacagtggttttattttaaggtgtctggcatgcaggctgccattccctaccactttaacatcattaactgtgaaaaacctaactctcagttcaattatggcatgcagccgacgctgtactcagttaaggaggccttactaggaaagcctacctggattagaactggacacgaaatttgctactacaagaatcactatcgacaatctaccgcggtcgccggcggcgcttcaggaaagtgttattacacattgacattcgccgtgactttcccacacagtgaggacgtgtgttatttagcgtaccattatccctacacatatactgcacttatgacacacctggacattcttgaaaaatccgtaaacctgaaggaagtttacttcaggcaggatgtgctgtgtcaaaccctgggcggcaatccctgtcccttggtgaccataactgctatgcctgagagcaacagcgatgagcacctggaacaattcagacatagaccttaccaggtaataacagccagagttcaccccggcgagtcaaacgcatcatgggtcatgaagggaaccttggagttcctcgtgtcctccgaccctgttgctcggctccttagggagaacttcatattcaagatcattccaatgctcaaccccgacggtgtcatcaatgggaaccaccggtgctcattgagtggggaggatctcaatcggcagtggctcagcccgtctgctcacctgcaaccgacaatataccacgccaagggattgttgtaccacctgagtagtatcggcaggtctcctgtggttagtcacttcctcctcgtcttctgtgacttccacggccattctcagaagaagaatgtgtttctttatggctgtagtatcaaggagaccctctggcaagctgcctgcactgtcgggacgagcactattttagaggaagtgaattacagaacactgcccaaaatactggataagctggcccctgctttcacaatgtcgtcttgtagcttccttgtggaaaagagccgagcaagcaccgcccgagttgtcgtgtggcgggaaatgggtgtgagcaggtcctatacctag

SEQ ID NO: 314183 - DNA, 2922 bp, Artificial Sequence
  derived and/or modified sequence
tcaagtagtgataaggagtccattctcacgattctaaaagtgcttggcgatcttttgtcagtggggactgatcgcaggatccattatatgatatctaaagggggttctgaagccctcctgcagacgctggttgacaccgcaaggacagcaccacctgactatgatattctgctgcccctgttcagactgctggccaaggtagggcttcgcgataagaagatcggtcggaaggccctcgagcttgaagctctggatgtcaccctaatcctggcaagaaaaaacctgagtcacggacaaaacctactacattgtctctgggccctccgggttttcgctagctcggtatctatgggcgctatgctaggtattaacggagctatggagctcttgtttaaggttataactccatataccagaaagagaacacaggcaatccgggcagccaccgaagtgctggcagccttgcttaagtccaagagcaacggcagacgagctgtgaaccgcggatatgtgacctcgcttctgggcctgcaccaggattggcatagtcacgataccgctaacgcttacgtccagatacgaaggggcctgttgctctgcttacgtcacatagcagcgttgcggtcggggcgagaggcttttctggccgctcagggcatggaaatcctattctctacgacccagaactgccttgacgacaagtcgatggagcctgtaatctccgtggtactgcagattcttcgccagtgttaccctaccagccccctgccactagtgacagccagttccgcgtatgcttttccagtgccaggttgcatcaccactgagccaccacacgatttgccggaggaggacttcgaggatgacggggacgacgaggttgataaggatagcgacacagaagatggcaaggtagaagacgatgacttggagaccgacgtaaataaactaagtagtaagccaggccttgataggcctgaggaagagttaatgcaatacgaggtgatgtgcctggagctgtcgtattcatttgaagagcttcagtcgaagctgggggacgacctcaactctgaaaagacccagtacgcaaaccatcatcatattcctgccgctgcctctagcaagcagcactgttactccaaagatcagtctagctgtggccaggagcgcgaatatgccgtacagacaagccttctgtgcagagtgaagacagggagatcaactgtgcatctcggatcaaagaagaacccaggcgtgaatctttaccagaacgtgcagagcaattcactgcggcgagacagctcggaaagcgaaatacctgatatccaggccagccctaaggcagatgcttgggatgtagacgccattttctgtccgcgtatgtctgcctccttctccaattccacccgaacacgtgaggtggtaaaggtcattgataaactgctacagactcacctgaagcgagtgccttttcacgacccttacctgtacatggctaaagccaggagaaccagttcggtggttgactttaagatgatggcattccctgacgtgtgggggcactgccctccgcctaccacccagcccatgctggagcgcaaatgtggtgtccagcgtatccgcatcttcgaggacatccggcgattgatccagccttctgacgttatcaataaggtggtgtttagcctcgatgagccatggcctttgcaggataatgcctctaactgtctgcgcttcttctcgaaattcgagtccgggaatctccgcaaggctattcaggtacgggagttcgaatacgatttgttagtgaacgcagatgtaaatagcacacagcaccaacagtggttctactttaaggtgagcggcatgcaggctgcgatcccctaccacttcaacattatcaattgtgagaaaccaaacagccagttcaactatggtatgcagcctactctgtatagcgtgaaggaagcgttgctcggaaagccaacgtggatccgtacggggcatgaaatctgctattataaaaatcactaccggcaatctactgccgtggcgggaggggcttccgggaagtgctattacactctgacattcgctgtgaccttcccacacagcgaggacgtgtgttatttagcctaccattacccttatacctacactgctctgatgacacacctggacatcctagagaaaagtgtgaatttgaaagaggtgtatttccgtcaggacgtcctgtgtcagaccctggggggtaacccgtgtcccctggttaccatcacggcaatgcctgagagtaactccgacgaacatttggagcagtttaggcaccgaccttatcaggtaatcacagcccgtgtgcaccctggtgagtctaacgcctcctgggtcatgaagggaaccttagagtttctggtctcatctgaccccgtggccagattactgcgcgagaattttatctttaagattattcccatgctcaaccctgacggtgtcatcaacggcaatcacaggtgttccctgtctggtgaggatctcaatcgccagtggctgagtccaagtgcacatttacagcccactatctaccacgccaaaggactgctgtaccacctgagttcaatcgggagatcccccgtcgttagtcacttcctccttgtcttctgcgattttcacggccatagtcagaaaaaaaatgtgtttctatacgggtgtagtatcaaggaaacactctggcaggcggcttgcactgtgggaaccagcaccattctggaggaggtcaactatcgcactctgccaaaaatcctcgacaaattggcaccggctttcaccatgtcttcctgcagtttcctggtagaaaagagccgtgcatccaccgccagggttgtagtgtggagggaaatgggggttagccggtcatacacatag

SEQ ID NO: 314184 - DNA, 2920 bp, Artificial Sequence
  derived and/or modified sequence
agctcctctgacaaggagtccatcctgaccatcctcaaggtcctcggagatctgctttctgttggcacagaccggagaattcactacatgatcagcaagggtggcagtgaagctcttctgcagaccctggtagacacagcgaggacagctcctccagactatgacatcctcctgcctctcttccggctgctggccaaagttggcctaagagataaaaagattggacggaaggccctagaattggaagcacttgatgtgacattgattctggccaggaagaacctatcccatggccagaatctcctccactgtctctgggctctgcgtgtgtttgcctccagtgtctccatgggagccatgctgggaattaatggagccatggaactgcttttcaaggttattactccttacacccgaaagcgcacccaagcaatcagggcagccactgaagttttggcagcattgctgaaatccaagtcgaacggccgcagagcagtgaaccgaggctacgtcaccagcctgctcgggctgcaccaggactggcacagccatgacacagccaacgcctacgtgcagatccgacggggcttgctgctctgcctcaggcacattgctgccctccggtccggcagggaggccttcctggcagcacagggcatggagatcctcttcagcaccacacagaactgcctggatgacaagagcatggagcccgtcatctctgtggtgcttcagatcctgaggcagtgctaccctacgagtccacttcccttggtcacagccagcagtgcctatgccttcccggtccccgggtgcatcaccactgaacctccacatgatctacctgaagaggattttgaagatgatggcgatgatgaagtggacaaagactctgatactgaagatgggaaagtggaagatgatgacttggaaacagacgtgaacaagctgagttccaaacctggtcttgaccgacctgaagaggaactgatgcaatatgaggtgatgtgtcttgagctctcctatagctttgaggaactgcagtccaaacttggagatgatttgaactctgaaaagactcagtatgccaatcaccaccacattccagccgctgcctcctcaaaacagcattgctacagcaaggaccaaagctcctgtgggcaagaaagagaatatgctgtccagacttcccttctgtgcagggtgaagacgggaaggtccactgtgcatctaggctccaaaaaaaatcctggagtgaacctgtaccaaaatgtgcaatccaatagtctcaggagagattcttctgaaagtgaaatccctgacattcaggcttccccgaaagcagatgcctgggacgtagatgcaattttctgcccaaggatgagtgcctccttttctaattccactaggactagagaagttgtcaaagtaatagataagcttctgcagacacatctgaagcgtgtccctttccacgatccctatctttatatggccaaagccagaagaaccagctctgtggtggacttcaagatgatggcatttcctgatgtctggggacactgtccccctcccaccacccagcctatgttggaacgaaaatgtggagtccaaaggatcaggatatttgaggatattcggaggctcatccagccaagtgatgttataaataaagttgtcttcagtttagatgagccttggcctttgcaagacaatgcttccaattgtttacggttcttctccaaatttgagtcaggaaatcttcgcaaagccatccaagtgcgtgagttcgagtatgacttgctggtcaacgcagatgtgaatagcacccagcaccagcagtggttctatttcaaagtgagcggtatgcaggcggccatcccttaccacttcaacatcatcaactgtgagaagcccaacagccagtttaattatgggatgcagcccaccctatattctgtgaaggaggctcttcttggcaaacccacctggataaggacaggccatgaaatatgttattacaaaaatcattatcgccagagtacagctgttgcaggcggagcatctgggaagtgctactataccctcacctttgctgtcaccttcccacacagtgaggatgtctgctacctggcctaccactatccctatacctacacagccctcatgactcatcttgacatcctggaaaagagtgtcaacctcaaagaggtctacttccggcaagatgttctctgccagacgctgggagggaatccgtgtcccttggtgaccatcacggccatgcctgagtccaacagtgatgagcatctagagcagttccgacatcgtccatatcaggtgatcactgctcgagttcatccaggagagagcaatgccagttgggtgatgaagggtaccttggagttcctggtcagcagtgaccctgtggctaggctcttgagggaaaacttcatcttcaagatcatacccatgctcaacccagatggtgtcatcaacggcaaccacagatgctcactgagcggggaagatttgaacagacaatggctttctcccagtgctcatctgcagccaaccatttaccatgccaaaggcctcctctaccacctgagcagcattggccgaagtcccgtggtgagtcacttccttctggttttctgtgacttccatggccactcccaaaagaagaatgtgttcctttatggctgtagcatcaaggaaaccttgtggcaagcagcatgcactgtgggcacatctactatcctagaggaggtcaactacaggactcttcccaaaatccttgataagctagcaccagcattcacaatgagcagctgcagctttctcgtggagaaatctcgagcttccacggcccgggtggtggtgtggagagagatgggggtgtccagaagctacacca

SEQ ID NO: 314185 - DNA, 519 bp, Artificial Sequence
  derived and/or modified sequence
atgagcagcggcaactaccagcagagcgaggccctgagcaagcccaccttcagcgaggagcaggccagcgccctggtggagagcgtgttcggcctgaaggtgagcaaggtgagacccctgcccagctacgacgaccagaacttccacgtgtacgtgagcaagaccaaggacggccccaccgagtacgtgctgaagatcagcaacaccaaggccagcaagaaccccgacctgatcgaggtgcagaaccacatcatcatgttcctgaaggccgccggcttccccaccgccagcgtgtgccacaccaagggcgacaacaccgccagcctggtgagcgtggacagcggcagcgagatcaagagctacctggtgagactgctgacctacctgcccggcagacccatcgccgagctgcccgtgagcccccagctgctgtacgagatcggcaagctggccgccaagctggacaagaccctgcaggagggcaagcccagagtgacccccctgctggccaagaactag

SEQ ID NO: 314186 - DNA, 632 bp, Artificial Sequence
  derived and/or modified sequence
gcgggcgctgcggcccctgctctacctcctagcgccggtgcgcggccgaggccgcactacctgtctgcgggaaagcgggatccaccccaggacgtcgggtcgctgccgacataatgtcaagtggaaactatcagcagtcagaggctcttagcaaacccactttcagtgaggaacaagcctctgcgttagtggagtcagtgtttgggttgaaagtttccaaggtccggccacttcctagctatgatgaccaaaactttcatgtctacgtttcaaaaaccaaagatggcccaactgaatatgtcctcaaaataagcaacaccaaggctagcaaaaatccagacctgattgaagtgcagaatcacatcatcatgtttctgaaagccgctggatttccaacagcctctgtgtgtcacactaaaggagacaacacagcttctctcgtgtctgtagatagtggctctgaaatcaaaagctacttggtgaggctgctgacttacctcccaggaagacccatcgctgagcttcccgtcagcccccagctattgtatgaaattggaaaactagctgccaaattggataagacactgcaggagggtaagccccgcgttacacccctattggccaaaaactga

SEQ ID NO: 314187 - DNA, 519 bp, Artificial Sequence
  derived and/or modified sequence
atgtcctcggggaattaccagcagagcgaggctttgagcaagccaacttttagcgaagaacaggcctcagccctggttgaaagtgtgtttggactgaaggtgtcgaaagtccggccactgcctagctatgacgaccaaaatttccacgtttatgtaagtaaaacaaaggacggtccaaccgagtatgtattgaagattagcaataccaaggcatctaaaaacccagacctgattgaagtacagaaccatatcataatgtttctgaaggccgcgggattcccgaccgcttccgtgtgccatacaaagggggataataccgcgtcccttgtgagcgtcgacagcggttcagaaatcaagtcatatctggtccgcctgctgacctaccttcctggtcggcccattgctgagctccctgtttcgccccagttactgtatgagatcggaaagttagccgccaagctagataagactttgcaggaaggaaagccccgggtgaccccacttctggccaaaaattag

SEQ ID NO: 314188 - DNA, 519 bp, Artificial Sequence
  derived and/or modified sequence
atgagcagcggcaactaccagcagagcgaggccctgagcaagcccaccttcagcgaggagcaggccagcgccctggtggagagcgtgtttggcctgaaggtgtccaaggtgcggcccctgcccagctatgatgaccagaacttccacgtgtatgtgtccaagaccaaggatggccccacagaatatgtgctgaagatcagcaacaccaaggccagcaagaacccagacctgattgaggtgcagaaccacatcatcatgttcctgaaggctgctggcttccccacagcctctgtgtgccacaccaagggggacaacacagccagcctggtgtctgtggacagcggcagcgagatcaagagctacctggtgcggctgctgacctacctgcccggccggcccatcgccgagctgcctgtgagcccccagctgctgtatgaaattggcaagctggccgccaagctggacaagaccctgcaggagggcaagccccgggtgacccccctgctggccaagaactag

SEQ ID NO: 314189 - DNA, 519 bp, Artificial Sequence
  derived and/or modified sequence
atgagcagcggcaactaccagcagagcgaggccctgagcaagcccaccttcagcgaagagcaggcctccgccctggttgaatctgtcttcggccttaaagtctcaaaggtaaggcccctgccctcctatgatgaccagaattttcatgtatacgtgtccaaaacgaaagacggtcccactgagtacgttctaaaaatcagtaacactaaggcgagtaaaaatccagatttgatagaagtgcagaaccatataatcatgttcctgaaggccgcagggttccccaccgcttccgtgtgtcacactaagggggataatactgccagtctggttagcgtagactcaggcagtgagatcaaaagctacttggtgcgccttttgacatacctgcccggacggcctattgctgagcttcccgtctctccacagcttttgtacgaaatcggtaagctcgctgccaagttggacaaaaccctgcaagagggtaagcctcgtgtgacccctttgctggcaaaaaactag

SEQ ID NO: 314190 - DNA, 519 bp, Artificial Sequence
  derived and/or modified sequence
atgagcagcggtaattatcagcagtctgaagccttatccaaaccaaccttttcagaggaacaagccagcgccctggttgagtccgtcttcgggctgaaagtgtcgaaggtgcggccattgccaagctacgatgaccagaactttcatgtatatgtctccaaaactaaggacggacccaccgagtatgttcttaagatttccaatacaaaagctagtaagaaccccgatctgatcgaggtgcagaaccacatcattatgttcctaaaggcggctggattccctacagctagcgtgtgtcatactaagggagacaacactgccagtcttgtttcagtcgattcaggctctgaaatcaaaagttacctagtccgtttactcacttatttacctggacgccctatcgcggagctgccagtcagccctcagctgctctacgagattggaaagctggccgctaagttggacaaaacactgcaggaagggaagccaagggtgactccattgctagctaagaattag

SEQ ID NO: 314191 - DNA, 306 bp, Artificial Sequence
  derived and/or modified sequence
atggaggaggagagcggcgaggagctgggcctggacagaagcacccccaaggacttccacttctaccacatggacctgtacgacagcgaggacagactgcacctgttccccgaggagaacaccagaatgagaaaggtggtgcaggccgagatggccaacgagagcagaggcgccggcgacggcaaggcccagagagacctgcaggaggaggtggacgagctggtgcacctgtacggcctggaggacgaccacgagctgggcgacgagttcgtggacgagaacatccccagaaccggcgtgagctag

SEQ ID NO: 314192 - DNA, 306 bp, Artificial Sequence
  derived and/or modified sequence
atggaggaggaaagtggtgaagagctggggctggatagatctacgcctaaagactttcacttttatcatatggatctgtatgactcggaagacaggctacatctgttccctgaagagaatacaaggatgcgaaaggtcgttcaagccgaaatggccaatgagtcacgaggtgcgggagacggaaaggctcaacgagacctccaggaagaagtggatgaattggtgcacctgtacggtctcgaggatgatcatgaattgggcgatgagttcgttgacgagaacataccacgtacaggggtgagttag

SEQ ID NO: 314193 - DNA, 603 bp, Artificial Sequence
  derived and/or modified sequence
catgcagaggtcactaggaaggaaagcctgctgaacacagattcaattttctagcagaactccaggtcctctgagttaaaggaagcatttatggacgcttagcagccactggggaccagctctggccaggacaattccgtttgccatgatgtgggttgaaatcacaacttctcccgggcgcagtggctcacgcctctaatcccagcactttgggaggccaagggcccagatattcactattaagtgtccaggaaggatctttcttatataaaggtgcttctgaggacttccagagttacaatggaggaggaatcgggggaggaactggggctggacaggtctactcccaaggatttccacttttaccacatggacctgtatgactctgaagacagactgcacctctttccagaagagaacactaggatgaggaaagtagtccaagctgaaatggccaatgagtcaagaggagcaggggatggtaaggctcaaagagaccttcaagaggaagtggatgaacttgtccacttatatggacttgaagatgatcatgaattaggggatgagtttgttgatgaaaacatacccagaacaggggtttca

SEQ ID NO: 314194 - DNA, 306 bp, Artificial Sequence
  derived and/or modified sequence
atggaggaggagagcggggaggagctgggcctggacaggagcacccccaaggacttccacttctaccacatggacctgtatgattctgaggaccggctgcacctgtttcctgaggagaacaccaggatgaggaaggtggtgcaggccgagatggccaatgaaagcagaggagctggagatggcaaggcccagagggacctgcaggaggaggtggatgagctggtgcacctgtatggcctggaggatgaccacgagctgggagatgaatttgtggatgagaacatccccaggactggagtgtcctag

SEQ ID NO: 314195 - DNA, 306 bp, Artificial Sequence
  derived and/or modified sequence
atggaggaggagagcggcgaggagctgggcctggaccggagcacccctaaggacttccatttctaccatatggacttgtacgattctgaagaccgattacatctgtttccagaagagaatacccggatgaggaaggtggtacaggccgagatggccaatgaaagccggggtgctggcgatgggaaggctcagcgggacctgcaggaggaggtagacgagctggtccacctatacggcctggaggacgaccatgaactcggcgatgaattcgttgacgagaacatcccccgcaccggggtatcttag

SEQ ID NO: 314196 - DNA, 306 bp, Artificial Sequence
  derived and/or modified sequence
atggaagaagagagcggagaagagctcggcctcgacagatccacccctaaggattttcacttttaccacatggacctgtacgactccgaggatcggctgcacctgttcccagaggagaacactcgtatgagaaaggtggtccaggcagaaatggccaacgagtctcgcggagctggcgatggtaaagcgcaaagggaccttcaggaagaggtggatgagctggtccatctatatggcctggaagacgaccatgaactgggagacgagtttgtggatgagaatattcccagaactggtgtctcttag

SEQ ID NO: 314197 - protein, 144 aa, Artificial Sequence
  derived and/or modified sequence
MEISRLAQSKRNIISLNMDLERDTQRIDEANQKLLLKIQEREDKIQRLESEIIQTRGLVEDEEWEKENRTTMERERALQELEEETARLERKNKTLVHSITELQQKLTRKSQKITNCEQSSPDGALEETKVKLQQLEASYACQEK

SEQ ID NO: 314198 - protein, 71 aa, Artificial Sequence
  derived and/or modified sequence
MEISRLAQSKRNIISLNMDLERDTQRIDEANQKLLLKIQEREDKIQRLESEIIQTRGLVEDEEWEKENRTT

SEQ ID NO: 314199 - protein, 228 aa, Artificial Sequence
  derived and/or modified sequence
MEISRLAQSKRNIISLNMDLERDTQRIDEANQKLLLKIQEREDKIQRLESEIIQTRGLVEDEEWEKENRTTMERERALQELEEETARLERKNKTLVHSITELQQKLTRKSQKITNCEQSSPDGALEETKVKLQQLEASYACQEKELLKVMKEYAFVTQLCEDQALYIKKYQETLKKIEEELEALFLEREVSKLVSMNPVEKEHTSQNNEGTPTQKTARLFSKNWHHSF

SEQ ID NO: 314200 - protein, 228 aa, Artificial Sequence
  derived and/or modified sequence
MEISRLAQSKRNIISLNMDLERDTQRIDEANQKLLLKIQEREDKIQRLESEIIQTRGLVEDEEWEKENRTTMERERALQELEEETARLERKNKTLVHSITELQQKLTRKSQKITNCEQSSPDGALEETKVKLQQLEASYACQEKELLKVMKEYAFVTQLCEDQALYIKKYQETLKKIEEELEALFLEREVSKLVSMNPVEKEHTSQNNEGTPTQKTARLFSKKWASSF

SEQ ID NO: 314201 - DNA, 687 bp, Artificial Sequence
  derived and/or modified sequence
atggagatcagcagactggcccagagcaagagaaacatcatcagcctgaacatggacctggagagagacacccagagaatcgacgaggccaaccagaagctgctgctgaagatccaggagagagaggacaagatccagagactggagagcgagatcatccagaccagaggcctggtggaggacgaggagtgggagaaggagaacagaaccaccatggagagagagagagccctgcaggagctggaggaggagaccgccagactggagagaaagaacaagaccctggtgcacagcatcaccgagctgcagcagaagctgaccagaaagagccagaagatcaccaactgcgagcagagcagccccgacggcgccctggaggagaccaaggtgaagctgcagcagctggaggccagctacgcctgccaggagaaggagctgctgaaggtgatgaaggagtacgccttcgtgacccagctgtgcgaggaccaggccctgtacatcaagaagtaccaggagaccctgaagaagatcgaggaggagctggaggccctgttcctggagagagaggtgagcaagctggtgagcatgaaccccgtggagaaggagcacaccagccagaacaacgagggcacccccacccagaagaccgccagactgttcagcaagaactggcaccacagcttctag

SEQ ID NO: 314202 - DNA, 687 bp, Artificial Sequence
  derived and/or modified sequence
atggagatcagcagactggcccagagcaagagaaacatcatcagcctgaacatggacctggagagagacacccagagaatcgacgaggccaaccagaagctgctgctgaagatccaggagagagaggacaagatccagagactggagagcgagatcatccagaccagaggcctggtggaggacgaggagtgggagaaggagaacagaaccaccatggagagagagagagccctgcaggagctggaggaggagaccgccagactggagagaaagaacaagaccctggtgcacagcatcaccgagctgcagcagaagctgaccagaaagagccagaagatcaccaactgcgagcagagcagccccgacggcgccctggaggagaccaaggtgaagctgcagcagctggaggccagctacgcctgccaggagaaggagctgctgaaggtgatgaaggagtacgccttcgtgacccagctgtgcgaggaccaggccctgtacatcaagaagtaccaggagaccctgaagaagatcgaggaggagctggaggccctgttcctggagagagaggtgagcaagctggtgagcatgaaccccgtggagaaggagcacaccagccagaacaacgagggcacccccacccagaagaccgccagactgttcagcaagaagtgggccagcagcttctag

SEQ ID NO: 314203 - DNA, 687 bp, Artificial Sequence
  derived and/or modified sequence
atggaaattagcaggttagcacagagcaaaagaaacatcataagtctaaatatggacctagagcgagatactcagcggattgacgaagctaatcagaagctgctccttaagatacaagagagagaagacaagatccagagattagagagcgaaattatccaaaccaggggattagtggaggacgaggaatgggaaaaagagaacaggaccacgatggagcgggaacgcgcactccaagagttagaagaggaaacggccaggctggaacggaagaataagactcttgtgcatagcataacagaactgcagcaaaagttgacaagaaagtcccagaagattaccaattgtgagcagagcagccctgatggtgccctcgaagagacgaaggtgaaattgcagcaactggaagccagttatgcgtgccaggagaaggagctgctcaaggtaatgaaggaatacgcttttgtgactcagttatgcgaagaccaggcgctatacatcaaaaaatatcaggagactctcaagaaaattgaggaggaactcgaggccctgtttctcgaacgcgaggttagcaaactggtgtccatgaatccagtggagaaggagcacacaagtcaaaacaatgagggcacccccactcagaagacagcccggctgttcagtaagaactggcaccactcgttttag

SEQ ID NO: 314204 - DNA, 687 bp, Artificial Sequence
  derived and/or modified sequence
atggagatctccagactggcccaaagcaaaagaaacattatctccctgaacatggacctggaaagggacacacaacgtatcgacgaggcaaaccagaagctgctgctgaagatacaggaacgggaagacaaaatccagcggctggagagcgagattattcagacccggggccttgtggaggacgaagagtgggaaaaggaaaacagaactactatggagcgcgagcgggctctgcaggaactggaagaggagacagcgcgactggaaagaaaaaacaagaccttggttcattccatcactgagttacaacagaagctaaccaggaagtcccagaagataaccaactgcgagcagtcaagtcccgatggggcccttgaagagactaaagtcaagctccagcagctggaggcaagctacgcctgccaggaaaaagaactcctgaaagtcatgaaggaatacgcctttgtgacccagctgtgcgaagaccaggccctgtacattaaaaagtaccaggaaaccctgaagaagatcgaggaagagttggaggctcttttcctggagagggaagtctccaagctggtctcaatgaacccagttgagaaagaacatacctcacagaacaatgagggaaccccaacacagaaaaccgcccgactgttctccaagaagtgggcttcgagtttctag

SEQ ID NO: 314205 - DNA, 687 bp, Artificial Sequence
  derived and/or modified sequence
atggagatcagccggctggcccagagcaagaggaacatcatcagcctgaacatggacctggagcgggacacccagagaattgatgaggccaaccagaagctgctgctgaagatccaggagcgggaggacaagatccagaggctggagagcgagatcatccagacccggggcctggtggaggatgaggagtgggagaaggaaaatagaaccaccatggagcgggagcgggccctgcaggagctggaggaggagacagcccggctggagaggaagaacaagaccctggtgcacagcatcacagagctgcagcagaagctgaccaggaagagccagaagatcaccaactgtgagcagagcagcccagatggagccctggaggagaccaaggtgaagctgcagcagctggaggccagctatgcctgccaggagaaggagctgctgaaggtgatgaaggagtatgcctttgtgacccagctgtgtgaggaccaggccctgtacatcaagaagtaccaggagaccctgaagaagattgaggaggagctggaggccctcttcctggagcgggaggtgtccaagctggtgtccatgaaccctgtggagaaggagcacaccagccagaacaatgaaggcacccccacccagaagacagcccggctcttcagcaagaactggcaccacagcttctag

SEQ ID NO: 314206 - DNA, 687 bp, Artificial Sequence
  derived and/or modified sequence
atggagatcagccggctggcccagagcaagaggaacatcatcagcctgaacatggacctggagcgggacacccagagaattgatgaggccaaccagaagctgctgctgaagatccaggagcgggaggacaagatccagaggctggagagcgagatcatccagacccggggcctggtggaggatgaggagtgggagaaggaaaatagaaccaccatggagcgggagcgggccctgcaggagctggaggaggagacagcccggctggagaggaagaacaagaccctggtgcacagcatcacagagctgcagcagaagctgaccaggaagagccagaagatcaccaactgtgagcagagcagcccagatggagccctggaggagaccaaggtgaagctgcagcagctggaggccagctatgcctgccaggagaaggagctgctgaaggtgatgaaggagtatgcctttgtgacccagctgtgtgaggaccaggccctgtacatcaagaagtaccaggagaccctgaagaagattgaggaggagctggaggccctcttcctggagcgggaggtgtccaagctggtgtccatgaaccctgtggagaaggagcacaccagccagaacaatgaaggcacccccacccagaagacagcccggctcttcagcaagaagtgggccagcagcttctag

SEQ ID NO: 314207 - DNA, 687 bp, Artificial Sequence
  derived and/or modified sequence
atggagatcagccggctggcccagagcaagcggaacatcatcagcctgaatatggacctggagcgtgatacacagcgaatcgacgaggccaatcagaaactgctgcttaaaatccaggaacgcgaggataagattcaaaggctcgagagcgaaatcatccagacgagaggactagtagaggacgaagagtgggagaaggagaaccgtactacgatggagagggagagagccctacaggagctggaggaggaaacagctcggcttgagaggaagaacaagaccctagtacactctataaccgagctccagcaaaagctgacgagaaagtcccagaaaatcacaaactgtgagcaatcgtcaccagacggggccctagaggagaccaaggtgaaacttcaacagttggaagcaagttatgcctgtcaggaaaaggagctcttgaaggtcatgaaggagtacgccttcgtgactcagttatgtgaggaccaggcgctatatattaaaaaataccaagaaactctgaagaagattgaagaagaactagaagccttatttctagagcgagaggtgagtaagctggtgtccatgaatccggtggagaaagagcatacttcgcagaacaacgaaggtacacccactcaaaaaacagcccggttgttctccaaaaattggcaccatagtttttag

SEQ ID NO: 314208 - DNA, 687 bp, Artificial Sequence
  derived and/or modified sequence
atggagatcagccggctggcccagagcaagcggaacatcatcagcttaaatatggatctggagcgagacacacagagaatcgatgaggcaaatcagaagctgttgcttaagatccaggagagagaggataaaatccaaaggttggagagtgaaatcattcagacccgtggattagtcgaagacgaagagtgggaaaaggaaaacaggacgacaatggagagggaacgggctctgcaggagctcgaggaggaaactgccaggctggagcgaaaaaacaagactcttgtccatagtatcaccgagctccaacagaaactcacgagaaaatcccaaaagattaccaattgcgagcaaagctcacctgacggagctcttgaggagaccaaggtgaagctgcaacaactcgaggcatcctacgcctgccaggaaaaggagctactaaaagtcatgaaagaatatgccttcgtgactcaactctgcgaggatcaggccctgtacatcaagaagtatcaggagactctgaaaaaaatcgaggaggagctggaggccctatttttggagcgtgaggtgtcgaagctggtttccatgaaccccgtggagaaagaacacacctcccagaacaatgagggaacccccacccaaaagacagctcgcctctttagcaaaaagtgggcttcatctttttag

SEQ ID NO: 314209 - DNA, 687 bp, Artificial Sequence
  derived and/or modified sequence
atggaaatttccagactcgcccagtccaaacgaaatatcatctcattaaatatggatctcgaacgggacacacagaggatagatgaagccaaccagaagctactgctcaaaattcaagaaagagaggacaagatccaaagactagagtctgaaatcattcagacacgcggtctggtggaagatgaggaatgggagaaagaaaaccggaccactatggaacgggagcgcgcacttcaggaattagaggaggagactgcccgtttggaacgtaaaaacaaaaccctggttcactcaatcacggaactgcagcaaaagctgactcggaagagccaaaagattacaaattgtgaacaaagctcccctgacggggctctggaagagacgaaagtgaagctgcaacagctggaggctagttacgcctgtcaagaaaaggagttactaaaggtgatgaaagagtacgctttcgtgactcagctgtgcgaggaccaggctttgtatatcaagaagtatcaggagactctgaaaaagatcgaagaagagcttgaggcactgtttctggagcgggaggtatccaaactggtctctatgaatcctgtcgaaaaagagcacacgtcgcagaacaatgaaggcacaccgactcagaagactgccagactgttttccaagaactggcaccattctttttag

SEQ ID NO: 314210 - DNA, 687 bp, Artificial Sequence
  derived and/or modified sequence
atggagattagtagacttgcccagtcaaagagaaatataatatcccttaacatggatcttgaacgggatacccagagaattgacgaggccaaccagaagctgctcctcaagatccaggaacgtgaagacaagattcagagacttgaatcggagatcattcagaccagaggcttggtcgaggacgaagaatgggaaaaagagaaccggaccacaatggagagagaacgcgctctgcaagaactggaggaagagactgctagactcgaaagaaaaaataagaccctagtgcattccattactgaactgcagcagaagctgactaggaagagtcagaagatcactaattgcgagcagtcatcacctgacggggctttggaagaaacaaaagtgaagctgcaacagctggaagccagttatgcctgtcaggagaaagagctcctgaaagtcatgaaggaatatgccttcgtcacccagctgtgcgaggaccaggcgctgtatattaagaaataccaggagacgctgaaaaagattgaagaagagctggaagctctgtttttagagcgtgaggttagcaaattggtaagcatgaaccctgtggagaaagagcatactagccagaataacgagggaactcccactcagaagactgctaggttattcagcaaaaaatgggcatctagcttttag

SEQ ID NO: 314211 - DNA, 790 bp, Artificial Sequence
  derived and/or modified sequence
gggaatctacaatggaaggacacaagaaagatcagctggattaagtagtcatgattatgcaaagccatatccagagaccaaggtgtaaagcaggtcggagaaaatggaaatctcaagattggctcagtcaaaaagaaacattatcagtttgaacatggaccttgaaagggatacgcagagaatagatgaagcaaatcagaaacttcttctcaaaatccaagagagggaagataagattcagaggctggaaagtgagatcattcagacgcggggcctggtggaagatgaagagtgggagaaggagaaccgcaccacgatggaaagggaaagagccttgcaggagctggaggaagaaacagccagacttgaaaggaagaataagacgttggtccacagtataacagaacttcaacaaaagcttacaaggaaatcacaaaagataaccaattgtgaacaaagcagtccagatggagccctagaagagacaaaggttaagttacaacagctggaagcttcctatgcatgccaagagaaggagctgctcaaggtaatgaaggagtatgcatttgtgacccagctctgtgaagatcaagccctctacataaagaagtaccaggaaacgttgaagaaaatagaagaagaactagaggctctgttccttgagagagaagtatcaaaactcgtgagcatgaaccctgtggaaaaagagcataccagccaaaataatgagggtactcctacccaaaagacagcaagattattcagtaaaaactggcaccattccttctga

SEQ ID NO: 314212 - DNA, 1939 bp, Artificial Sequence
  derived and/or modified sequence
agattagactcctcagaagctaattgactagggaaggatcaggaagacaagacacatcaaaaaggggagggaatctacaatggaaggacacaagaaagatcagctggattaagtagtcatgattatgcaaagccatatccagagaccaaggtgtaaagcaggtcggagaaaatggaaatctcaagattggctcagtcaaaaagaaacattatcagtttgaacatggaccttgaaagggatacgcagagaatagatgaagcaaatcagaaacttcttctcaaaatccaagagagggaagataagattcagaggctggaaagtgagatcattcagacgcggggcctggtggaagatgaagagtgggagaaggagaaccgcaccacgatggaaagggaaagagccttgcaggagctggaggaagaaacagccagacttgaaaggaagaataagacgttggtccacagtataacagaacttcaacaaaagcttacaaggaaatcacaaaagataaccaattgtgaacaaagcagtccagatggagccctagaagagacaaaggttaagttacaacagctggaagcttcctatgcatgccaagagaaggagctgctcaaggtaatgaaggagtatgcatttgtgacccagctctgtgaagatcaagccctctacataaagaagtaccaggaaacgttgaagaaaatagaagaagaactagaggctctgttccttgagagagaagtatcaaaactcgtgagcatgaaccctgtggaaaaagagcataccagccaaaataatgagggtactcctacccaaaagacagcaagattattcagtaaaaaatgggcctcctccttttagtggcaagatggctgccaacaatccagatctcgtactaccagattggcaacctttgcagaataaaagtcttttccaacaggttcagcagtaaagtccagaaaaggtcataaactggcctatctgaggtcaattgcctaccctgtcccacagtcaatgtggccagagggatggagtactctgattggtcaagcttatgtcatatgttcagccccttactaaggattaagagcagtcaaagaagaagaacaaagtaagggaatgacctaaactatatgaaatgcatttctcccactaaaaggggctcagtgcctatggaagagaaaagggatgctggacacgcaaaagcagaggtctacttcattgctaaactctgtgtcttcctataagcaaaaattataacttctaaagatagtagattaagacggtgaaagcttctacaaagagctcagtttaagaaccatgtaaataatcaggtcactagggctaaagtaagcaacaattctaaaataagtagaatatgactggtataaattgcttcaccaactcaaagtagcatatatatcacacctcttatttttccaattaattgctgaaacattcacatgccttactaataggatatactctacattattttccagtacaagagaaaattattttaaatggtaaggttttaggtctaaaagtgtctcaattttaagaaagctgatatcaagcaggtcatattttctaggcattgtgcaatgactatagaaattatgaaaatgtgtaaccaaccagtaatatctagccacaggcaaattttataaaagatccttttaattaacttctggattaaatggaaaatccaaactgagattacttttatagggtcagttacatgctaaggaggaagcatagagagtagaagaatggttaccagaggctgtaaccttcttaatttaaggtaaaaaattctacctattagcttagtattagatgaaaacagaaattcttgtcacatacaggcactattcactgcagtgaagtatatcttttcagaaagttgcataaaatcgaataaaataccatgtattaaatt

SEQ ID NO: 314213 - DNA, 246 bp, Artificial Sequence
  derived and/or modified sequence
atggagatcagcagactggcccagagcaagagaaacatcatcagcctgaacatggacctggagagagacacccagagaatcgacgaggccaaccagaagctgctgctgaagatccaggagagagaggacaagatccagagactggagagcgagatcatccagaccagaggcctggtggaggacgaggagtgggagaaggagaacagaaccaccatggagagagagagagccctgcaggagctgtag

SEQ ID NO: 314214 - DNA, 435 bp, Artificial Sequence
  derived and/or modified sequence
atggagatcagcagactggcccagagcaagagaaacatcatcagcctgaacatggacctggagagagacacccagagaatcgacgaggccaaccagaagctgctgctgaagatccaggagagagaggacaagatccagagactggagagcgagatcatccagaccagaggcctggtggaggacgaggagtgggagaaggagaacagaaccaccatggagagagagagagccctgcaggagctggaggaggagaccgccagactggagagaaagaacaagaccctggtgcacagcatcaccgagctgcagcagaagctgaccagaaagagccagaagatcaccaactgcgagcagagcagccccgacggcgccctggaggagaccaaggtgaagctgcagcagctggaggccagctacgcctgccaggagaagtag

SEQ ID NO: 314215 - DNA, 216 bp, Artificial Sequence
  derived and/or modified sequence
atggagatcagcagactggcccagagcaagagaaacatcatcagcctgaacatggacctggagagagacacccagagaatcgacgaggccaaccagaagctgctgctgaagatccaggagagagaggacaagatccagagactggagagcgagatcatccagaccagaggcctggtggaggacgaggagtgggagaaggagaacagaaccacctag

SEQ ID NO: 314216 - DNA, 246 bp, Artificial Sequence
  derived and/or modified sequence
atggaaatatcccgcctggcacagtctaagcggaacattatttccctcaatatggacctggaaagagacacccagcggatagatgaagccaaccaaaaattactcctgaagatccaggaacgggaggataaaatccagcgactggagtctgaaatcatccagacccgtgggttagttgaggatgaggaatgggaaaaagagaatcggacaaccatggagcgggagagggccctacaggagctctag

SEQ ID NO: 314217 - DNA, 435 bp, Artificial Sequence
  derived and/or modified sequence
atggaaatttcacgcttggctcaatccaaacgcaatataattagcttaaacatggatttggaacgggatacacagcggatagatgaggccaaccagaagctgctcctcaagatccaggaaagagaggacaagattcagaggttggagagtgaaatcatccagacccgcggtttggtggaggacgaggagtgggagaaggagaaccgtaccacgatggaaagagaacgcgctctgcaagagcttgaggaggagacagcccgcctggagcgtaaaaataagactcttgtgcactctataacggagctgcagcagaagcttactcgcaaaagccaaaaaattactaactgcgagcagtcgtctcccgacggggccctggaggaaacaaaagtcaaacttcagcagttggaggcctcctacgcttgccaggagaaatag

SEQ ID NO: 314218 - DNA, 216 bp, Artificial Sequence
  derived and/or modified sequence
atggagattagcaggctggcccaaagcaaaaggaacattatttcactgaacatggatctcgaacgcgacacccagcgtatcgatgaggcgaatcagaagttattacttaagatccaggagagagaagacaagatccagcggctggaaagcgaaatcattcagacccggggtttggtagaggacgaggaatgggagaaggagaaccgcactacctag

SEQ ID NO: 314219 - DNA, 246 bp, Artificial Sequence
  derived and/or modified sequence
atggagatcagccggctggcccagagcaagaggaacatcatcagcctgaacatggacctggagcgggacacccagagaattgatgaggccaaccagaagctgctgctgaagatccaggagcgggaggacaagatccagaggctggagagcgagatcatccagacccggggcctggtggaggatgaggagtgggagaaggaaaatagaaccaccatggagcgggagcgggccctgcaggagctgtag

SEQ ID NO: 314220 - DNA, 435 bp, Artificial Sequence
  derived and/or modified sequence
atggagatcagccggctggcccagagcaagaggaacatcatcagcctgaacatggacctggagcgggacacccagagaattgatgaggccaaccagaagctgctgctgaagatccaggagcgggaggacaagatccagaggctggagagcgagatcatccagacccggggcctggtggaggatgaggagtgggagaaggaaaatagaaccaccatggagcgggagcgggccctgcaggagctggaggaggagacagcccggctggagaggaagaacaagaccctggtgcacagcatcacagagctgcagcagaagctgaccaggaagagccagaagatcaccaactgtgagcagagcagcccagatggagccctggaggagaccaaggtgaagctgcagcagctggaggccagctatgcctgccaggagaagtag

SEQ ID NO: 314221 - DNA, 216 bp, Artificial Sequence
  derived and/or modified sequence
atggagatcagccggctggcccagagcaagaggaacatcatcagcctgaacatggacctggagcgggacacccagagaattgatgaggccaaccagaagctgctgctgaagatccaggagcgggaggacaagatccagaggctggagagcgagatcatccagacccggggcctggtggaggatgaggagtgggagaaggaaaatagaaccacctag

SEQ ID NO: 314222 - DNA, 246 bp, Artificial Sequence
  derived and/or modified sequence
atggagatcagccggctggcccagagcaagcggaacatcatcagcttaaacatggacctggaacgagatacccaacgcatcgatgaggccaatcaaaaactgctgctaaagatccaagaacgcgaggataagatccagagactggagagtgaaatcattcagaccagggggcttgttgaagatgaagaatgggaaaaggagaacagaacgacgatggagcgcgagagggctctgcaggagctgtag

SEQ ID NO: 314223 - DNA, 435 bp, Artificial Sequence
  derived and/or modified sequence
atggagatcagccggctggcccagagcaagcggaacatcatcagccttaacatggatctggaaagagacactcagagaatcgacgaggctaaccagaaactcctcctgaaaatacaagaacgggaggacaaaatccagaggttagagtctgagataattcagactaggggtcttgtggaggacgaggaatgggagaaggagaacaggactaccatggaaagggagagagcattgcaggagttggaggaagaaactgccagactcgaaaggaagaacaaaacgctcgtccactcaatcacagagctccagcaaaaactgactagaaagtcccaaaagatcaccaattgtgaacagagctcaccagatggtgccctggaggagactaaggtcaagctccaacagctcgaagctagctatgcgtgccaagaaaagtag

SEQ ID NO: 314224 - DNA, 216 bp, Artificial Sequence
  derived and/or modified sequence
atggagatcagccggctggcccagagcaagcggaacatcatcagcctgaatatggaccttgagcgggatacccaacggattgacgaggccaaccagaaacttttactgaaaattcaagaacgggaggataaaattcaaaggctggaatcggagatcatccagactagaggtttggttgaggatgaggaatgggagaaggaaaaccgtaccacttag

SEQ ID NO: 314225 - DNA, 246 bp, Artificial Sequence
  derived and/or modified sequence
atggagatctcccggctggcccaatccaaacgcaacattatatctttaaacatggatctcgagagagacactcagcggatagatgaagccaaccagaagttgctcctcaagatccaagagcgcgaggataagattcagcgactcgaatccgagatcatccagacaaggggactcgtggaggacgaagaatgggaaaaggagaatagaacaaccatggagagggagcgtgctctgcaggagctgtag

SEQ ID NO: 314226 - DNA, 435 bp, Artificial Sequence
  derived and/or modified sequence
atggaaatctcccgcctggcccagagcaaacgaaatattattagcctgaatatggatctggagcgagatacccagcgcattgatgaggccaatcagaaattgttgttaaaaatacaggagagagaagacaagatccagcggctcgaaagcgaaataatacagactaggggcctcgttgaggacgaagaatgggagaaggagaacaggaccactatggagcgagagcgagccctccaggaactcgaagaagagaccgccagactggaaaggaaaaataagacattagtgcacagcatcactgaattacagcagaaattaacacggaaaagccaaaagatcaccaattgcgaacaaagttcacctgacggggcactggaggagactaaagtgaagctacagcaactggaagcctcctacgcctgccaggaaaaatag

SEQ ID NO: 314227 - DNA, 216 bp, Artificial Sequence
  derived and/or modified sequence
atggagatctcgcggctcgcccagtcgaaacggaacattatctcgctgaacatggatttagaaagagatacacagagaatcgatgaggctaaccagaaactcctgctaaagatccaggagagagaggacaagattcaacgcctcgaaagcgaaattatccagactagagggctcgtagaagacgaagagtgggaaaaggaaaataggacaacatag

SEQ ID NO: 314228 - DNA, 575 bp, Artificial Sequence
  derived and/or modified sequence
agaagctaattgactagggaaggatcaggaagacaagacacatcaaaaaggggagggaatctacaatggaaggacacaagaaagatcagctggattaagtagtcatgattatgcaaagccatatccagagaccaaggtgtaaagcagcgcaaggggttatttaaggaagcaaagcttctcaagaaaccagagtgaaggtgcactgttagattgagcactttggaggagaaagcctgggaaagacccttgctgactgagctgcgaattatcgaaacagttgtagagcatgatcaagaaatgtaatttttcaagaatgaaaatggtcggagaaaatggaaatctcaagattggctcagtcaaaaagaaacattatcagtttgaacatggaccttgaaagggatacgcagagaatagatgaagcaaatcagaaacttcttctcaaaatccaagagagggaagataagattcagaggctggaaagtgagatcattcagacgcggggcctggtggaagatgaagagtgggagaaggagaaccgcaccacgatggaaagggaaagagccttgcaggagctg

SEQ ID NO: 314229 - DNA, 839 bp, Artificial Sequence
  derived and/or modified sequence
ggaagcatcacaggaaaagctttgggttttcatgccttcccttcatgctcctagatctgctggactctgtgtccatctcagcacaactggagggcttctcttgtccaccaagcttcttaccacatctacaccccacttaacgggtctgagaatgctcagtcgcttcttctgcgccaccctaattatacttgcaacaacctcctcactcttacctccttcacctgtttatgtttcctcatggcagtgttaccaagcaaaagagtgtcactgcccaatgtgctggaagccaatactatgacacaagggaatctacaatggaaggacacaagaaagatcagctggattaagtagtcatgattatgcaaagccatatccagagaccaaggtgtaaagcaggtcggagaaaatggaaatctcaagattggctcagtcaaaaagaaacattatcagtttgaacatggaccttgaaagggatacgcagagaatagatgaagcaaatcagaaacttcttctcaaaatccaagagagggaagataagattcagaggctggaaagtgagatcattcagacgcggggcctggtggaagatgaagagtgggagaaggagaaccgcaccacgatggaaagggaaagagccttgcaggagctggaggaagaaacagccagacttgaaaggaagaataagacgttggtccacagtataacagaacttcaacaaaagcttacaaggaaatcacaaaagataaccaattgtgaacaaagcagtccagatggagccctagaagagacaaaggttaagttacaacagctggaagcttcctatgcatgccaagagaagg

SEQ ID NO: 314230 - DNA, 579 bp, Artificial Sequence
  derived and/or modified sequence
atactctggagtctgcatgccagattcatgccctcccctgagttctggccaggtttcttgaccagttcaaactgttacaaaattcagctggaggttttgctctccctgtggcattttccctgcgcctctggccaccctccagaaggatccctgtagtgccaagcaggaatggcctgcttggggacctagcaagctcacagggcctttcccattgcttcctctatccctgtattgtgttcagctctctacattggctcagctccagggaatctacaatggaaggacacaagaaagatcagctggattaagtagtcatgattatgcaaagccatatccagagaccaaggtgtaaagcaggtcggagaaaatggaaatctcaagattggctcagtcaaaaagaaacattatcagtttgaacatggaccttgaaagggatacgcagagaatagatgaagcaaatcagaaacttcttctcaaaatccaagagagggaagataagattcagaggctggaaagtgagatcattcagacgcggggcctggtggaagatgaagagtgggagaaggagaaccgcaccac

SEQ ID NO: 314231 - DNA, 4950 bp, Artificial Sequence
  derived and/or modified sequence
atggagagcgtggagaaggactggggctggggcctgtggagaaacctgagatgcctgggccacgcccaccagggcaagtgctgcaccgagggcggcatcagcagcaccaccaagaccagcagcgagaacggcagctgctgcttcgagaaggccgccagaaaggaccacgtgtgcagattcatcggctgcggcagaaacgacagattcaactacgtggtgatgcagctgcagggcagaaacctggccgacctgagaagaagccagagcagaggcaccttcaccatcagcaccaccctgagactgggcagacagatcctggagagcatcgagagcatccacagcgtgggcttcctgcacagagacatcaagcccagcaacttcgccatgggcagattccccagcacctgcagaaagtgctacatgctggacttcggcctggccagacagttcaccaacagctgcggcgacgtgagaccccccagagccgtggccggcttcagaggcaccgtgagatacgccagcatcaacgcccacagaaacagagagatgggcagacacgacgacctgtggagcctgttctacatgctggtggagttcgtggtgggccagctgccctggagaaagatcaaggacaaggagcaggtgggcagcatcaaggagagatacgaccacagactgatgctgaagcacctgccccccgagttcagcatcttcctggaccacatcagcagcctggactacttcaccaagcccgactaccagatgagcatcagagtgaccagaaagagctacaaggtgagcaccagcggcccccaggccttcaacagcctgagctacaccagcggccccggcgcctgcatcagcagcagcagcttcagcagaatgggcagcagcagcttcagaggcggcctgggcgccggctacggcggcgccagcggcggcatcaccaccatcaccgtgaaccagagcctgctgagccccctgaacctggaggtggaccccaacatccaggccgtgagaacccaggaggagaagcagatcaagaccctgaacaacaagttcttcagcttcatcgacaaggtgagattcctggagcagcagaacaagatgctggagaccaagtggagcctggtgcagcagcagaagatggccagaagcaacatggacaacatgttcgagagctacatcaacaacctgaagtggcagctggagaccctgggccaggagaagctgaagctggaggccgagctgggcaacatgcacggcctggtggaggacttcagaaacaagtacgaggtggagatcagcaagtgcaccgagatggagaacgagttcgtgctgatcaaggagtacgtggacgaggcctacatgaacaagatggagctggagagcagcctgaaggagctgaccgccaagatcagcttcctgagacagctgtacgaggaggagatcggcagctgcagccccagaagcagaatccacctgtggtgctgcagctggaccaccgccgccagctggacctggaccgccagcagcctgagaagcagacccgagggcttccccggcggctgccacgccgacaccgagcagagaggcgagctggccatcaaggacgccaacgccaagctgagcgagctggaggccgccctgcagctggccagccaggacatggccagacagctgagagagtaccaggagctgatgaacgtgaagctggccctggacatcaagatcgccacctacagaaagctgctggagggcgaggagagctggctggagagcggcatgcagaacatgagcatccacatgaagaccaccagcagctacgccggcggccagagcctggcctacggcggcctgaccagccccggcctgagctacggcctgggcagcagcttcggcagcggcatgggcagcagcagcttcagccacaccagcagcagcagagccgtggtgatgaagaagatcgagaccagagacggcaagctggtgagcgagagcagcaacgtgctgcccaacctgagaatcaccgccaccctgctgaccagcgtgttcgacaacagcatcaagaccttcggcgtgatcgagagcgaccccttcgactgggagaagaccggcaacgacggcagcctgaccaccaccaccaccagcaccaccccccagctgcacaccagactgacccccgccgccatcggcatcgccaacgccacccccatccccggcgacctgctgagagagaacaccgacgaggtgttccccgacgagcagctgagcgacggcgagaacggcatccccgtgggcgtgagccccgacaagctgcccggcagcctgggccaccccagaccccaggagaaggacgtgtgggaggagatggacgccaacaagaacaagatcaagctgggcatctgcaaggccgccaccgaggaggagaacagccacggccaggccaacggcctgctgaacgcccccagcctgggcagccccatcagagtgagaagcgagatcacccagcccgacagagacatccccctggtgagaaagctgagaagcatccacagcttcgagctggagaagagactgaccctggagcccaagcccgacaccgacaagttcctggagacctgcctggagaagatgcagaaggacaccagcgccggcaaggagagcatcctgcccgccctgctgcacaagccctgcgtgcccgccgtgagcagaaccgaccacatctggcactacgacgaggagtacctgcccgacgccagcaagcccgccagcgccaacacccccgagcaggccgacggcggcggcagcaacggcttcatcgccgtgaacctgagcagctgcaagcaggagatcgacagcaaggagtgggtgatcgtggacaaggagcaggacctgcaggacttcagaaccaacgaggccgtgggccacaagaccaccggcagccccagcgacgaggagcccgaggtgctgcaggtgctggaggccagcccccaggacgagaagctgcagctgggcccctgggccgagaacgaccacctgaagaaggagaccagcggcgtggtgctggccctgagcgccgagggcccccccaccgccgccagcgagcagtacaccgacagactggagctgcagcccggcgccgccagccagttcatcgccgccacccccaccagcctgatggaggcccaggccgagggccccctgaccgccatcaccatccccagacccagcgtggccagcacccagagcaccagcggcagcttccactgcggccagcagcccgagaagaaggacctgcagcccatggagcccaccgtggagctgtacagccccagagagaacttcagcggcctggtggtgaccgagggcgagccccccagcggcggcagcagaaccgacctgggcctgcagatcgaccacatcggccacgacatgctgcccaacatcagagagagcaacaagagccaggacctgggccccaaggagctgcccgaccacaacagactggtggtgagagagttcgagaacctgcccggcgagaccgaggagaagagcatcctgctggagagcgacaacgaggacgagaagctgagcagaggccagcactgcatcgagatcagcagcctgcccggcgacctggtgatcgtggagaaggaccacagcgccaccaccgagcccctggacgtgaccaagacccagaccttcagcgtggtgcccaaccaggacaagaacaacgagatcatgaagctgctgaccgtgggcaccagcgagatcagcagcagagacatcgacccccacgtggagggccagatcggccaggtggccgagatgcagaagaacaagatcagcaaggacgacgacatcatgagcgaggacctgcccggccaccagggcgacctgagcaccttcctgcaccaggagggcaagagagagaagatcacccccagaaacggcgagctgttccactgcgtgagcgagaacgagcacggcgcccccaccagaaaggacatggtgagaagcagcttcgtgaccagacacagcagaatccccgtgctggcccaggagatcgacagcaccctggagagcagcagccccgtgagcgccaaggagaagctgctgcagaagaaggcctaccagcccgacctggtgaagctgctggtggagaagagacagttcaagagcttcctgggcgacctgagcagcgccagcgacaagctgctggaggagaagctggccaccgtgcccgcccccttctgcgaggaggaggtgctgacccccttcagcagactgaccgtggacagccacctgagcagaagcgccgaggacagcttcctgagccccatcatcagccagagcagaaagagcaagatccccagacccgtgagctgggtgaacaccgaccaggtgaacagcagcaccagcagccagttcttccccagacccccccccggcaagccccccaccagacccggcgtggaggccagactgagaagatacaaggtgctgggcagcagcaacagcgacagcgacctgttcagcagactggcccagatcctgcagaacggcagccagaagcccagaagcaccacccagtgcaagagccccggcagcccccacaaccccaagaccccccccaagagccccgtggtgcccagaagaagccccagcgccagccccagaagcagcagcctgcccagaaccagcagcagcagccccagcagagccggcagaccccaccacgaccagagaagcagcagcccccacctgggcagaagcaagagcccccccagccacagcggcagcagcagcagcagaagaagctgccagcaggagcactgcaagcccagcaagaacggcctgaagggcagcggcagcctgcaccaccacagcgccagcaccaagaccccccagggcaagagcaagcccgccagcaagctgagcagatag

SEQ ID NO: 314232 - DNA, 4950 bp, Artificial Sequence
  derived and/or modified sequence
atggagagcgtcgaaaaagattggggctggggtctgtggagaaacctgcgttgtctgggccatgcacatcaagggaagtgttgtaccgaaggcggcattagcagtaccaccaaaacatctagtgagaacggcagttgctgttttgaaaaagccgctcggaaagaccacgtttgccgctttatagggtgtggtcgaaatgatcgatttaattacgtggtcatgcagctccagggcagaaatctggccgacctgagacggagccagtctcgcggcacgtttacgatttcaaccaccttaagactgggccgccagatccttgagtcgatcgagtccattcattctgtcggatttttgcatcgggacattaagccctctaactttgccatgggcaggttcccatcgacatgtagaaagtgctacatgctcgattttggtctcgcaagacagtttaccaatagttgcggagacgtccgtccacccagggcggtagcgggctttcgagggactgtgcggtatgcctcgatcaacgcccataggaaccgcgaaatgggaagacacgatgatttgtggtcccttttctacatgctggtagaattcgtggtcggccagttgccttggcggaagatcaaagataaagagcaggttggatccatcaaggaacgatatgatcacagattgatgcttaaacacttgccccccgaattttccatcttccttgatcacatctccagtctggattacttcaccaaaccagattatcagatgtccattagagttacaagaaagagctataaggtgagtactagcggcccccaggcattcaattccctgagctacaccagtggacccggcgcgtgcattagtagtagcagcttctcacggatgggctcttcctcatttcgcggcggtttaggggctggttatggcggagcctccggggggattaccaccatcacagtcaatcagtccctgctgtcacctctgaacctcgaggtggatcctaacatacaggccgttaggacccaggaagagaagcagataaaaaccctgaataataaattctttagctttattgacaaggtgaggtttctcgagcagcagaacaagatgctggagacgaagtggtcactcgtacagcagcagaagatggcccgcagtaatatggataacatgtttgaatcctacattaacaacttaaaatggcagctggagaccctcggtcaggagaagttgaagttggaagctgagctgggcaacatgcacggattggttgaagatttcagaaacaagtacgaagtagagatctccaaatgcaccgagatggagaacgagtttgtccttattaaagaatatgttgatgaagcttacatgaataagatggaactggaaagctctctgaaagagcttactgcaaagatttcttttctgagacagctctatgaggaagagattggaagctgctcacccaggtcaagaatacacttgtggtgctgctcttggaccacagcagccagttggacctggacagcctctagtctccgcagtcgtcccgagggttttccaggagggtgccatgccgacaccgagcagcgcggggagttagccatcaaggatgcaaacgctaaactgtctgaactggaggcagcattgcagctcgcgtcacaggatatggcgcgacagttgcgggaataccaggaactgatgaatgtcaagctcgcgcttgacataaagatcgccacttacagaaagctcctggagggggaagagtcgtggttggaatcagggatgcagaatatgtcaatccacatgaaaacaacgtctagctatgcaggagggcagtctctcgcgtatggtgggctcacaagccccggtttaagttacggactgggatccagtttcggcagtggcatgggctcgtcttccttctcacacacctcttccagccgggcggtggttatgaagaaaattgaaacccgcgatggtaaattggtctctgaaagctcaaatgtactgcctaatctgcgcatcacagcaacactgctcacctccgtatttgacaattctattaagactttcggggtaatcgaaagcgaccctttcgattgggagaagacagggaatgacggatctctgacaacaaccaccaccagtaccacccctcagttgcataccagactcacccctgctgctatcgggatagcaaacgccacccctattccaggggacttacttcgcgagaacactgacgaagtcttcccggacgagcaactcagcgacggcgagaacggcatacccgtcggagtatcacccgataagctgcccggtagtttgggccacccacgacctcaggaaaaggatgtgtgggaggagatggatgccaataaaaacaaaataaagctgggcatctgtaaggccgcaacagaggaggagaactctcatggtcaggcaaatggtctcctgaatgccccttctcttggctctcccataagagtgagatccgaaattactcagcctgaccgagacatccctttagtcagaaagctaaggagcatacattcatttgagttagagaagcgcctcacactggaacctaagcccgacaccgataaatttctggaaacgtgcctcgaaaagatgcagaaagatactagcgccggtaaggaatctatcctccccgctttgctgcataagccctgtgtcccagcagtgagccggacggaccatatatggcactacgatgaagagtatctcccggacgcgtcaaaacctgctagtgccaacaccccagagcaagccgacggcggaggctccaatggctttatagccgtgaacttgagtagttgcaagcaagaaattgattccaaagagtgggttattgttgacaaagagcaagatttgcaagatttccgaacgaacgaggccgtaggtcacaaaaccaccgggtccccttccgacgaggaaccggaagtcttacaggtcctggaggcaagcccacaggacgagaagctgcagctgggcccatgggccgagaacgaccatctgaaaaaggagacatcgggagttgttctggccctgtctgcagaaggcccacctaccgccgcttccgagcagtacaccgatcgcctcgaactccagcccggcgccgcaagtcagttcatcgcggccacgccgacttcccttatggaggcccaggcagaaggtccgctcaccgccatcaccatcccccggccttcagtcgcatcgacccagtccacatcaggaagcttccattgcgggcagcagccggaaaagaaagatctgcagcctatggagcccactgtggaactatatagcccacgtgaaaatttttctgggctggtggttactgagggtgaacctccctcagggggctcgcgcacagatcttggactccagattgaccacatcggccacgatatgctgcctaatattcgggaaagcaacaagagtcaggacttggggcctaaggagctgccagatcacaatagactcgtggtccgcgagttcgagaacttgccaggggagaccgaagagaaatctattcttctggaatccgacaacgaagacgaaaaattatcacgcgggcagcactgcatagaaatctcttcattgcctggcgatcttgtaatcgttgaaaaggatcactctgcaaccaccgagcctcttgacgtgacaaagactcagacttttagcgtggttcccaaccaagacaaaaataatgagataatgaagctgctcactgttggaacaagcgaaatcagtagtagggacatagacccacacgttgaaggccaaattggacaggtggccgaaatgcagaaaaacaagatcagcaaggatgatgacataatgagcgaagacctgccagggcaccaaggggacttgtctaccttcctgcaccaggagggaaagagggagaaaatcaccccaaggaacggtgagctgttccattgtgtgtccgaaaatgaacacggagccccaacacggaaggacatggtgaggtccagcttcgttaccaggcacagccggattcctgtccttgcgcaggaaatcgattccaccctcgaatcttcatccccagtctcggccaaggagaaacttctacagaagaaggcgtatcagccagacctagtgaagctgctagtggagaaacggcaatttaaatccttcctcggcgatctttcctctgccagcgacaagctattggaagagaaactcgccaccgtcccggctcccttctgtgaagaagaagtgctgacaccctttagccgtcttacggtggattcccatttaagccgctcagccgaggatagctttctgtctcctatcatttctcagagtcgaaaaagtaagattccaaggccagtgtcctgggtcaataccgatcaggtcaatagctcgacaagctcacagttctttccaagacccccaccaggtaagccccccactagaccgggcgtagaagcacgcctccggaggtacaaagtgctcgggagttccaattcggacagcgatcttttcagtcggttggcgcagattctacaaaacggctcacaaaagccccgcagcacaacgcagtgcaagtctccgggctcacctcataaccctaagacgcctcccaaatccccagtcgtgccccggagatccccttctgcgagccctcggagtagctcccttccaaggactagttcaagctcacctagtcgggcaggacggcctcaccatgatcagcgtagcagttccccccacctgggcagatctaaatccccgccatcacattccggctcgtccagtagccgccgatcttgccagcaggagcactgcaagccctccaagaacgggctgaagggctcaggctcgctacatcatcacagcgcctctaccaagaccccacaggggaagtccaaaccagccagtaagctgtccaggtag

SEQ ID NO: 314233 - DNA, 4950 bp, Artificial Sequence
  derived and/or modified sequence
atggagagcgtggagaaggactggggctggggcctgtggaggaacctgcgctgcctgggccacgcccaccagggcaagtgctgcacagaaggaggcatcagcagcaccaccaagaccagcagtgaaaatggcagctgctgctttgagaaggccgccaggaaggaccacgtgtgccgcttcatcggctgcggcagaaatgaccgcttcaactacgtggtgatgcagctgcagggcaggaacctggccgacctgcggcgcagccagagccggggcaccttcaccatcagcaccaccctgcggctgggccggcagatcctggagagcattgagagcatccacagcgtgggcttcctgcaccgggacatcaagcccagcaactttgccatgggccgcttccccagcacctgcaggaagtgctacatgctggactttggcctggcccggcagttcaccaacagctgtggagatgtgcggccccccagggctgtggccggcttccggggcaccgtgcgctatgccagcatcaatgcccacaggaaccgggagatgggcagacatgatgacctgtggagcctcttctacatgctggtggagtttgtggtgggccagctgccctggaggaagatcaaggacaaggagcaggtgggcagcatcaaggagagatatgaccaccggctgatgctgaagcacctgcccccagagttcagcatcttcctggaccacatcagcagcctggactacttcaccaagccagactaccagatgagcatccgggtgaccaggaagagctacaaggtgtccaccagcggcccccaggccttcaacagcctgagctacaccagcggccctggggcctgcatcagcagcagcagcttcagcaggatgggcagcagcagcttccggggcggcctgggcgccggctacggcggggccagcggcggcatcaccaccatcaccgtgaaccagagcctgctgagccccctgaacctggaggtggaccccaacatccaggccgtgaggacccaggaggagaagcagatcaagaccctgaacaacaagttcttctccttcatcgacaaggtgcgcttcctggagcagcagaacaagatgctggagaccaagtggagcctggtgcagcagcagaagatggcccggagcaacatggacaacatgtttgagagctacatcaacaacctgaagtggcagctggagaccctgggccaggagaagctgaagctggaggccgagctgggcaacatgcacggcctggtggaggacttcaggaacaagtatgaggtggagatcagcaaatgtacagagatggagaatgaatttgtgctgatcaaggagtatgtggatgaggcctacatgaacaagatggagctggagagcagcctgaaggagctgacagccaagatctccttcctgcggcagctgtatgaggaggagatcggcagctgcagccccaggagccgcatccacctgtggtgctgctcctggaccacagctgcctcctggacctggacagccagcagcctgcggagcaggcctgagggcttccctgggggctgccacgccgacacagagcagagaggagagctggccatcaaggatgccaatgccaagctgtctgagctggaggccgccctgcagctggccagccaggacatggcccggcagctgcgggagtaccaggagctgatgaatgtgaagctggccctggacatcaagatcgccacctacaggaagctgctggagggggaggagagctggctggagagcggcatgcagaacatgagcatccacatgaagaccaccagcagctatgctgggggccagagcctggcctatggaggcctgaccagccctggcctgtcctatggcctgggcagcagctttggaagtggcatgggcagcagcagcttcagccacaccagcagcagcagagctgtggtgatgaagaagattgagaccagagatggcaagctggtgtctgagagcagcaatgtgctgcccaacctgcgcatcacagccaccctgctgacctctgtgtttgacaacagcatcaagaccttcggcgtgattgaaagtgacccctttgactgggagaagacaggaaatgatggcagcctgaccaccaccaccaccagcaccaccccccagctgcacacccggctgaccccagctgccatcggcatcgccaatgccacccccatccctggggacctgctgcgggagaacacagatgaggtgtttcctgatgagcagctgagtgatggagaaaatggcatccctgtgggcgtgtccccagacaagctgcccggcagcctgggccacccccggccccaggagaaggatgtgtgggaggagatggatgccaacaagaacaagatcaagctgggcatctgcaaggccgccacagaggaggagaacagccacggccaggccaacggcctgctgaatgcccccagcctgggcagccccatccgggtgcgctctgagatcacccagcctgaccgggacatccccctggtgaggaagctgcggagcatccacagctttgagctggagaagaggctgaccctggagcccaagccagacacagacaagttcctggagacctgcctggagaagatgcagaaggacaccagcgctgggaaggagagcatcctgcctgccctgctgcacaagccctgtgtgcctgctgtgtccaggacagaccacatctggcactatgatgaggagtacctgcctgatgccagcaagccagccagcgccaacaccccagagcaggctgatggcggcggcagcaatggcttcatcgctgtgaacctgagcagctgcaagcaggagattgacagcaaggagtgggtgattgtggacaaggagcaggacctgcaggacttccgcaccaatgaggccgtgggccacaagaccaccggcagccccagtgatgaggagcctgaggtgctgcaggtgctggaggccagcccccaggatgagaagctgcagctgggcccctgggccgagaatgaccacctgaagaaggagaccagcggcgtggtgctggccctgtctgctgagggccccccaacagctgccagcgagcagtacacagaccggctggagctgcagcccggggccgccagccagttcatcgccgccacccccaccagcctgatggaggcccaggccgagggccccctgacagccatcaccatcccccggcccagcgtggccagcacccagagcaccagcggcagcttccactgcggccagcagcctgagaagaaggacctgcagcccatggagcccaccgtggagctgtacagcccccgggagaacttcagcggcctggtggtgacagaaggagagccccccagcggcggcagcaggacagacctgggcctgcagattgaccacatcggccatgacatgctgcccaacatccgggagagcaacaagagccaggacctgggccccaaggagctgcctgaccacaaccggctggtggtgcgggagtttgagaacctgcctggagaaacagaggagaagagcatcctgctggagagtgacaatgaagatgagaagctgagccggggccagcactgcatcgagatcagcagcctgcccggggacctggtgattgtggagaaggaccacagcgccaccacagagcccctggatgtgaccaagacccagaccttctctgtggtgcccaaccaggacaagaacaatgagatcatgaagctgctgactgtgggcaccagcgagatcagcagccgggacatcgacccccacgtggagggccagatcggccaggtggccgagatgcagaagaacaagatcagcaaggatgatgacatcatgtctgaggacctgcccggccaccagggcgacctgagcaccttcctgcaccaggagggcaagcgggagaagatcaccccaagaaatggagagctgttccactgtgtgtctgaaaatgagcacggggcccccaccaggaaggacatggtgcgcagcagctttgtgaccaggcacagccgcatccctgtgctggcccaggagattgacagcaccctggagagcagcagccctgtgtctgccaaggagaagctgctgcagaagaaggcctaccagcctgacctggtgaagctgctggtggagaagaggcagttcaagagcttcctgggggacctgagcagcgccagtgacaagctgctggaggagaagctggccaccgtgcctgcccccttctgtgaggaggaggtgctgacccccttcagccggctgactgtggacagccacctgagccgctctgctgaggacagcttcctgagccccatcatcagccagagcaggaagagcaagatccccaggcctgtgtcctgggtgaacacagaccaggtgaacagcagcaccagcagccagttcttcccccggcccccacctgggaagccacccaccaggcctggggtggaggcccggctgcggcgctacaaggtgctgggcagcagcaacagcgacagcgacctcttcagccggctggcccagatcctgcagaatggcagccagaagcccaggagcaccacccagtgcaagagccctggcagcccccacaaccccaagaccccacccaagagccctgtggtgcccaggaggagccccagcgccagccccaggagcagcagcctgcccaggaccagcagcagcagccccagccgggccggccggccccaccacgaccagaggagcagcagcccccacctgggccgcagcaagagcccccccagccacagcggcagcagcagcagccgccgcagctgccagcaggagcactgcaagcccagcaagaatggcctgaagggcagcggcagcctgcaccaccacagcgccagcaccaagaccccccagggcaagagcaagccagccagcaagctgagcaggtag

SEQ ID NO: 314234 - DNA, 4950 bp, Artificial Sequence
  derived and/or modified sequence
atggagagcgtggagaaggactggggctggggcctgtggcggaaccttcgatgtctgggtcatgcgcaccagggtaagtgctgcacagagggtggcatctccagtacaaccaaaacatcaagtgaaaacgggtcatgttgcttcgagaaggctgcgaggaaggaccacgtttgccggttcatcggctgcgggaggaacgatcgcttcaactacgttgttatgcagttgcaaggtagaaacttggctgacctgcgaagatcacagagcaggggaacctttactattagcaccacactgagattaggcaggcagattctggagtctattgagtccattcactcagtggggtttctgcaccgtgatattaagccaagtaattttgccatgggacggtttccatctacatgcaggaagtgttacatgttggatttcggcctagcccgacagtttaccaattcctgtggtgacgtgcgaccaccccgggccgttgctggtttcaggggcacagttcgctatgcaagcatcaatgctcacaggaatagggaaatgggccggcacgacgacttatggagccttttctatatgctggtcgagtttgtagtaggacaactgccttggagaaagattaaagataaagaacaggtcggctctattaaagaacgatacgatcacaggctcatgctcaaacacctacccccggaattctcaattttcctcgatcacatctccagccttgattacttcaccaagcctgactaccagatgagcattagggttacgagaaagagttataaggtgtctacaagcggcccccaagcgttcaacagcctgagctacacaagcggtcccggagcttgtatatcctcttcgtctttcagtaggatggggtctagttcattccgcggcggcctgggagcaggctacggcggcgcctccggcggcatcactaccatcaccgtcaaccaaagcctgctgtcgccactgaacctcgaggtcgacccaaacattcaggcggtaaggacccaggaggagaagcaaatcaagacacttaataacaaattctttagcttcatcgataaagtgagatttctcgagcagcagaacaaaatgctggaaactaagtggagcctagtacagcaacagaaaatggctagatctaacatggacaatatgttcgagagctatattaataatctgaagtggcagctggaaacgctcggccaagaaaagctgaagctcgaagctgagcttggaaatatgcatggtctggtggaagattttcggaataaatacgaagtggagataagcaaatgtacagagatggagaacgagtttgtcctcatcaaagagtacgtggacgaagcatatatgaataaaatggaacttgaatcatctctgaaagagcttaccgcaaaaataagtttcctgagacagttatatgaagaagaaattggcagttgctccccccgttctcgcattcacttatggtgctgctcctggaccaccgcagcttcgtggacttggacggcttcctcgctccgatcacgacctgagggttttcccggtggatgtcatgctgatacagagcaacgaggggagttggcaatcaaagacgcaaatgccaaactgagcgaactggaggccgccctccagttagccagtcaagatatggcacggcagctgagggagtaccaggagctgatgaatgtgaaactggcactggacatcaagatcgcaacctatcggaaactcctggagggggaggaaagctggctggagtccggaatgcagaatatgtcaatacacatgaagacaactagctcttatgcgggggggcagagcctcgcatacggaggactaacttctcctggtttatcatatggcctgggttcttcttttgggagcggaatgggctcttcgtcattctcacatacctcgagctccagggcagtggtgatgaagaagatcgagaccagggatggcaaactcgtctcagaaagctccaatgtccttcccaacctgcgaattacagccaccctcctcacatcagtattcgacaactctatcaaaacttttggtgttattgagtctgaccctttcgattgggaaaaaactggaaatgatggctccctcaccaccactacaaccagtaccacccctcagctccacacacggctgactcccgccgcaatcggaatagcgaacgctacgccaatcccaggggatctgctgcgcgaaaacacagacgaagtgtttcctgatgagcagttgtccgatggcgaaaatggcatccctgtgggcgtcagtccagacaagctccccggatcccttggccaccctcggccgcaggagaaggatgtatgggaggaaatggatgcaaacaagaacaagatcaaactggggatctgtaaagccgcgacagaagaagaaaattcccacgggcaagctaatggtttgctgaacgcacccagtctcggaagtcctatacgagtcaggtcggagattacccagcccgaccgagatatccccctggtgcgcaaacttaggtctattcatagcttcgagttggaaaagcgcttgacactggaacccaagcccgatacagacaagttcctggagacctgtctcgagaaaatgcagaaagacacttctgctggtaaggagagcatcctgccagcccttctccataaaccatgcgtacctgcagtcagcaggaccgatcatatatggcattatgatgaggaatacctacctgatgcgtctaaaccggccagcgccaacacaccggagcaagctgacgggggtgggagcaacggctttatcgccgtcaacctgagttcctgtaaacaggagatagatagtaaggagtgggttatcgtggacaaggagcaggatctgcaagactttagaactaatgaggccgtcgggcataaaactaccggaagtccctccgacgaggagcctgaggtgctgcaggtgcttgaagcctccccgcaagatgagaaactgcaattaggcccgtgggcggagaacgaccacctcaagaaggagaccagcggcgttgtgctggcactgagcgctgagggacctcccaccgcagcgagcgagcaatacacagatcgcttggaattacaaccaggagccgcaagccagtttattgccgccaccccaacttccctaatggaagcccaggcggagggcccacttacagccatcactataccccggccatccgtggcaagcacccagtctacgtcaggttctttccactgcggacagcagcccgaaaagaaggaccttcagcctatggagcctacagtagagctttactccccgcgagagaatttttccggcctcgtggtgactgaaggcgagccaccctcggggggaagcagaaccgatctaggtttgcagattgatcatattggacatgatatgctcccaaacattcgtgaaagtaataagtcccaagatctcggccccaaggaactaccggatcataatcgcctggtcgtgagagagttcgaaaaccttcccggcgagacagaagaaaagagcatcctgttggagagtgacaacgaagacgagaaactgagtcgcggccagcattgcattgagatcagttcactgcccggcgaccttgttattgtcgagaaagatcactcagccactacagaacctttagatgtgacgaaaacccagacattcagcgtggtgccaaatcaggacaaaaataatgagataatgaagctactcacagtgggtacttctgagatttcctcccgagatatcgatccccatgttgaaggccagatcgggcaggtggccgaaatgcagaaaaacaagataagcaaggacgacgacattatgtcagaagacttgccgggccaccagggcgacttgtcgacgttcctgcaccaagaaggaaaacgcgagaagatcacacctagaaatggtgagttgtttcattgcgtaagcgagaatgagcacggtgctcccactaggaaagatatggttcggtctagtttcgtcaccaggcacagccgaatcccagtcctggctcaggagatcgacagtactttggaatcctcatcccccgtgagcgcgaaagaaaagctgcttcaaaaaaaagcttatcaaccagatctcgtcaagctgttagtggagaagagacaatttaaatcatttctgggcgatctcagcagcgcttctgacaaattgctcgaggagaaactcgctaccgtgcctgccccattctgcgaggaagaggtgttaacacctttctcacggctcacagtggatagtcatctctcccgcagcgccgaggattctttcctttctcctatcatctcacaaagcagaaagtccaaaataccccgccctgtgtcctgggtcaatacagatcaagtaaactcatcgacatctagtcaattctttccaagaccaccacccggcaaaccaccaacaaggcctggcgtcgaggcccgactgcgacgctacaaggttttaggctcgtctaacagtgattcggatttgttctccagacttgcacagattctccagaacggttcccagaaacccagatccaccacccagtgtaagagtccaggaagtcctcacaacccaaagactccccccaaaagtcccgtggtacccagacgatcaccttcagcctcacctcggtcaagcagcctgccacgcacctcctcatcgtcacctagtagggctggtaggccacaccacgatcagcgatcttcgtctccacatctcggcagaagtaaatcaccaccttctcattctgggtcgtccagttctagacgtagttgccagcaggagcattgtaagccgtctaaaaatggccttaaaggcagcggcagtctccatcatcatagtgcgtccaccaaaactccgcagggcaagtccaagccagccagcaaactctctcggtag

SEQ ID NO: 314235 - DNA, 4950 bp, Artificial Sequence
  derived and/or modified sequence
atggagtccgtggaaaaagactggggttgggggttgtggcgaaacctgcgctgcctaggccacgcgcaccagggaaaatgctgtactgaaggtggcatctcgtccactaccaaaacatccagcgaaaacggctcttgctgcttcgagaaggcggcacgaaaagaccatgtgtgcaggtttatcgggtgcggaaggaacgacaggttcaactacgttgtcatgcaattacagggccgtaatctggcggatttgcgaaggtcccagagccgaggtactttcaccatttccaccactcttaggctgggtcgacaaattctggagtctatcgaaagcattcatagcgtgggcttcctgcaccgagatattaaaccttctaattttgccatgggtcgcttcccaagcacatgtcggaaatgctatatgctcgacttcggactggccagacagttcactaactcctgtggagatgtgcgccctcccagagctgtagctggcttcaggggaactgtgcgatacgctagtatcaatgcccataggaatcgggagatgggcagacacgatgacctgtggtcccttttctatatgttagtggaatttgtggtcggacagctgccttggaggaagatcaaagacaaagaacaagtgggcagcatcaaggaacgttatgaccaccgcctgatgttgaaacatctgcctcctgaattcagcatctttcttgaccacattagctctttagattattttaccaaacctgactaccagatgagcatccgcgtgacccgaaagagctacaaagtgagtacatctgggccacaagccttcaacagtttgtcgtatacctctggtccgggagcatgtatatcgtcatccagcttttctcgtatggggtcctccagtttccggggaggactcggtgctggctacggcggtgcaagtggcggaattacaacaatcactgtgaaccagagcctcctgtctccactcaatttggaggtggaccccaatatacaagctgtcagaacccaggaagaaaagcaaattaaaaccctgaacaacaaattcttctccttcattgataaagtgagattcctggaacagcagaataagatgctcgaaacgaagtggtctctagtgcagcagcagaagatggctcgatctaacatggacaacatgtttgagagctacattaataacctgaaatggcagctggagactctggggcaggaaaagctgaaactcgaagccgagctggggaacatgcacggtctggtggaggactttcgtaataaatacgaggtggagatcagcaaatgcacagagatggagaatgagtttgtcctgatcaaagagtacgtggatgaagcttatatgaacaagatggaactggagtcttctttgaaggaactcacagccaagatttcctttttgcggcagctctacgaagaggagattgggtcttgctctcctcggtctagaatacatttatggtgctgttcgtggacaacagcagcctcttggacctggactgcttccagcctgcgatcacggcctgaggggtttcccggaggctgtcacgccgacactgaacagagaggagagctcgcaattaaggacgccaatgctaagttgtcggagcttgaggcggcactacaactggctagccaggacatggctcggcagctcagggagtaccaagagttgatgaacgtgaagcttgctctcgacattaaaattgcaacttatcgaaagctgctggaaggcgaagaatcttggcttgagtccggaatgcagaatatgtcaattcacatgaagacaacctcatcatacgctgggggacagagtctagcttacggaggtttgacatcgccaggcctgagttacggtctgggctcttcctttggttctgggatgggaagcagctctttcagccatactagctcaagtcgcgctgtggtgatgaaaaagattgagaccagagatggcaagctagtatcagagtctagtaacgttttaccaaatctgaggatcacagctacgctgctgacatcggtgttcgacaatagtatcaagacatttggagtcattgagtctgacccttttgattgggaaaagaccggcaacgatggctcacttaccacaacaaccacttccactacaccccaattgcatacaagattgactcccgcagcaatcggcatagctaacgcgactcctattccgggagatctcctcagggagaatacagatgaggttttcccagatgagcaactatcagatggtgaaaatgggattcccgtcggagttagtcccgacaaactacctggttccctaggacatcctcgacctcaggaaaaggacgtctgggaggagatggatgccaataaaaacaaaatcaagttgggaatctgtaaagcagccacggaggaggaaaactcgcacggacaggcgaatggactgttgaacgctccaagcttgggcagtcccatccgtgtgaggagcgagattactcagcctgaccgtgatattccgttggtgagaaaattgcgctccatccattccttcgagcttgagaagcgtttgacgctagagccaaagcccgacactgacaagttccttgaaacctgcctggaaaagatgcaaaaggacacctctgccggtaaagagagtattctgccagccctgctccataagccttgcgtgcctgcagtctcacgcaccgaccacatttggcattacgacgaggaatacctgcctgacgctagcaagcccgcaagtgctaatacacccgagcaagctgacgggggaggttcaaatggtttcatcgcagtaaacctcagttcatgcaaacaggaaattgacagcaaagaatgggtgattgtcgataaagaacaagaccttcaggactttagaacgaatgaagccgtaggccacaagaccacaggatcaccgtcagatgaggagcctgaagtacttcaggtgttagaggcatctcctcaggatgaaaaactgcaactgggaccttgggctgagaatgatcatctgaagaaggagacttctggtgtcgtgctggctctaagtgcggaaggtccacccacggcggctagtgagcagtacacagaccggttggaactgcagcccggtgcggcttcccagttcattgcagcaactcctacttcgctgatggaggcccaggctgaggggcctctgacagcgataacaatacccagaccatccgtcgctagcacacagtccacctccggcagttttcactgcgggcaacagccagagaaaaaggatctgcagcctatggagccaacagtggaactatacagtccaagggaaaacttcagcggcttggtagtcacagagggcgaacccccttctggtggatcaaggaccgacttgggactgcagatcgaccacattggacatgatatgttgcctaatatcagggagagcaacaaatctcaagatctggggccaaaagaactacccgaccacaaccgcctcgttgtgagagagtttgaaaacctccccggtgagacagaggaaaagtctattctgctcgagagcgacaacgaagacgagaagctgtcacgaggacaacactgtatcgagatctcaagtctcccgggagatctcgttatcgtagagaaggatcatagcgccacaacagaacctctggatgtcactaaaacacagactttttctgtcgtcccaaatcaagataagaataacgaaattatgaagcttctgaccgtgggaacctctgaaatatctagccgggacattgatcctcatgtcgagggccaaattggccaggttgcggaaatgcagaaaaacaagatcagcaaagatgatgacattatgtccgaggacctgcctgggcatcagggtgacctgtccaccttcttacaccaggagggcaaacgagaaaagataacacccaggaacggggaattattccattgtgttagcgaaaacgagcatggcgctcctacacgcaaggacatggtcagatctagttttgtaacccgacactcccggatccccgtattggcacaggaaatcgatagtacactggaaagcagtagtcctgttagcgccaaagaaaaactcttgcagaaaaaggcctaccaacctgacttggtcaagctgctagtggaaaagaggcaattcaagtccttccttggcgacttgagtagcgcttccgacaagttactagaagaaaagttggccactgtgccagctcccttctgtgaagaggaagtgctgactccgttcagcagactcaccgtggatagtcacttgtcaaggtccgctgaggactcctttctttccccaattatttcacaaagccggaaaagcaagattccacggcctgtaagttgggtgaacacagaccaggtgaactcgtcaacctcctcacagtttttccctaggccccctcccggtaagccacctaccaggcccggagtagaagcccgactgcgccgatacaaggttctgggtagcagcaattcagattctgacctctttagccgactcgcccagatcttacagaatgggagccagaaaccacggagtactactcaatgcaagagccctggatcaccacacaaccccaaaaccccccctaagtcacctgtggtgcctagacgctcaccgagcgcttcccctagaagctcatcacttcccagaacgagctcttcgagcccttccagagccggacgccctcaccacgaccagaggagttccagccctcatctgggaagaagtaaatctcccccttcccatagcggctcttcttcctcccgacggtcatgtcagcaggagcattgcaaaccaagcaaaaacggcctcaagggcagtgggtccttgcaccatcactccgcaagcactaagacgcctcaagggaaaagcaagcctgccagcaaactgagccggtag

SEQ ID NO: 314236 - DNA, 5613 bp, Artificial Sequence
  derived and/or modified sequence
agcaggtgctggcacaagagcagcggcttgggggagccggcagcagcagtaacagcagcagcagccgccgccgccgccgccagtaaacgcggacggtaccccaggggactacccagccggccggccctggaagccgcgctcgggtcccgccgcagtcggcggtgggggatgggcaggcagtggcggtcccgcctgccgagggttaacccccgccggtcccggtcctgagctggaccagagccctcctccagaaacccctgcgtccgccacggcccaggttaaatggaaaccacccttgggaactggatgcctgtgtagctgttctaccatatcagtgtattgcaatgagtgggggaggagagcagctggatatcctgagtgttggaatcctagtgaaagaaagatggaaagtgttgagaaagattgggggtgggggctttggagaaatttacgatgccttggacatgctcaccagggaaaatgttgcactgaaggtggaatcagctcaacaaccaaaacaagttctgaaaatggaagttgctgttttgaaaaagctgcaaggaaagaccatgtttgtagatttattggctgtgggaggaatgatcgattcaactatgtggtcatgcagttgcagggtcggaatctggcagatcttcgccgtagccagtcccgaggcacattcaccattagtaccactctccggctgggtagacagattttggagtctattgaaagcattcattctgtgggattcttgcatcgagacatcaaaccgtcgaacttcgctatgggtcgctttcctagtacatgtaggaaatgttacatgcttgattttggcttggctcgacaatttaccaattcctgtggtgacgtcagaccacctcgagctgtggcaggttttcgagggacagttcgttatgcatcaatcaacgcacatcggaacagggaaatgggaagacatgatgacctttggtccttattctacatgttggtggagtttgtggttggtcagctgccctggagaaaaataaaggacaaggagcaagtaggctctattaaggagagatatgaccacaggctcatgttgaaacatctccctccagaattcagcatctttctagaccatatctcttctttggattattttacaaaaccagactaccagatgtccatcagggtgacccggaagtcctacaaggtgtccacctctggcccccaggcctttaacagcctctcctacacgagtgggcctggtgcctgcatcagctcctcgagcttctcccgaatgggcagcagcagcttccggggtggcctgggtgcaggatatggtggggccagtggaggcatcaccaccatcactgtcaaccaaagcctgctgagccctcttaacctggaggtggaccccaacatccaggccgtgcgcacccaggaggagaagcagatcaagaccctcaacaacaagtttttctccttcatagacaaggtacggttcctggagcagcagaacaagatgcttgagaccaagtggagcctcgtgcagcagcagaagatggctcggagcaacatggacaacatgttcgagagctacatcaacaaccttaagtggcagctggagactctgggccaggagaagctgaagctggaggcggagcttggcaacatgcatgggctggtggaggacttcaggaacaagtatgaggttgagatcagtaaatgtacagagatggagaatgaatttgtgctcatcaaggagtatgtagatgaagcttacatgaacaagatggagctggagtcttccctgaaagagctgactgccaagatcagcttcctcaggcagctgtatgaagaggagatcgggagctgcagtcccagatctcggatacatctgtggtgctgttcatggacaacagccgcttcctggacatggacagcatcatccctgaggtcaaggccagagggcttccctggaggctgccacgcagataccgagcagcgtggggagctagccattaaggatgccaatgccaagctgtctgagctggaggccgccctgcagctagccagtcaagacatggcgcggcagctgcgtgagtaccaggagctgatgaacgtcaagctggccctggatatcaagatcgccacctacaggaagctgttggagggcgaggagagctggctggagtctgggatgcagaacatgagtatccatatgaagaccaccagcagctatgcaggtggtcagagcttggcctatgggggcctcacaagccctggcctcagctacggcctgggctccagctttggctctggcatgggctccagctccttcagccacaccagctcctccagggccgtggtcatgaagaagatcgaaacccgtgatgggaagctagtgtctgagtcctccaacgtcctgcccaatttgagaattactgccacacttcttacatccgtgtttgacaatagcatcaagacttttggagtaattgagagtgacccttttgactgggagaagactggaaatgatggctccctaacaaccaccactacttctaccacccctcagttgcacactcgcttgacccctgctgcaattggaattgccaatgctactcccatccctggagacttgcttcgagaaaatacagatgaggtatttccagatgaacagcttagcgatggagaaaatggcatccctgttggtgtgtcaccagataaattgcctggatctctgggacacccccgtccccaggagaaggatgtttgggaagagatggatgccaacaaaaacaagataaagcttggaatttgtaaggctgctactgaagaggagaacagccatggccaggcaaatggtcttctcaatgctccaagccttgggtcaccaattcgtgtccgctcagagattactcagccagacagagatattccactggtgcgaaagttacgttccattcacagctttgagctggaaaaacgtctgaccctggagccaaagccagacactgacaagttccttgagacctgcctggagaaaatgcagaaagataccagtgcaggaaaagaatctattctccctgctctgctgcataagccttgcgttcctgctgtgtcccgtactgaccacatctggcactatgatgaagaatatcttccagatgcctccaagcctgcttctgccaacacccctgagcaggcagatggtggtggcagcaatggatttatagctgttaacctgagctcttgcaagcaagaaattgattccaaagaatgggtgattgtggacaaggagcaggaccttcaggattttaggacaaatgaggctgtaggacataaaacaactggaagtccttctgatgaggagcctgaagtacttcaagtcctggaggcatcacctcaagatgaaaagctccagttaggtccttgggcagaaaatgatcatttaaagaaggaaacctcaggtgtggtcttagcactttctgcagagggtcctcctactgctgcttcagaacaatatacagataggctggaactccagcctggagctgctagtcagtttattgcagcgacgcccacaagtctaatggaggcgcaggcagaaggaccccttacagcgattacaattcctagaccttctgtggcatctacacagtcaacttcaggaagctttcactgtggtcagcagccagagaagaaagatcttcagcccatggagcccactgtggaactttactctccaagggaaaacttctctggcttggttgtgacagagggtgaacctcctagtggaggaagcagaacagatttggggcttcagatagatcacattggtcatgacatgttacccaacattagagaaagtaacaaatctcaagacctgggaccaaaagaacttcctgatcataatagactggttgtgagagaatttgaaaatctccctggggaaactgaagagaaaagcatccttttagagtcagataatgaagatgagaagttaagtagagggcagcattgtattgagatctcctctctcccaggagatttggtaattgtggaaaaggatcactcagctactactgaacctcttgatgtgacaaaaacacagacttttagtgtggtgccaaatcaagacaaaaataatgagataatgaagcttctgacagttggaacttcagaaatttcttccagagacattgacccacatgttgaaggtcagataggccaagtggcagaaatgcaaaaaaataagatatctaaggatgatgacatcatgagtgaagacttgccaggtcatcaaggagacctctctacttttttgcaccaagagggcaagagagagaaaatcacccctagaaatggagaactatttcattgtgtttcagagaatgaacatggtgccccaacccggaaggatatggttaggtcatcctttgtaactagacacagccgaatccctgttttagcacaagagatagactcaactttggaatcatcctctccagtttctgcaaaagaaaagctcctccaaaagaaagcctatcagccagacctagtcaagcttctggtggaaaaaagacaattcaagtccttccttggcgacctctcaagtgcctctgataaattgctagaggagaaactagctactgttcctgctcccttttgtgaggaggaagtgctcactcccttttcaagactgacagtagattctcacctgagtaggtcagctgaagatagctttctgtcacccatcatctcccagtctagaaagagcaaaattccaaggccagtttcatgggtcaacacagatcaggtcaatagctcaacttcgtctcagttctttcctcggccaccaccaggaaagccacccacgaggcctggagtagaagccaggctacgcagatataaagtcctagggagtagtaactccgactcagaccttttctcccgcctggcccaaattcttcaaaatggatctcagaaaccccggagcactactcagtgcaagagtccaggatctcctcacaatccaaaaacaccacccaagagtccagttgtccctcgcaggagtcccagtgcctctcctcgaagctcatccttgcctcgcacgtctagttcctcaccatctagggctggacggccccaccatgaccagaggagttcgtccccacatctggggagaagcaagtcacctcccagccactcaggatcttcctcctccaggaggtcctgccaacaggagcattgcaaacccagcaagaatggcctgaaaggatccggcagcctccaccaccactcagccagcactaaaaccccccaagggaagagtaagccagccagtaaactcagcagataggagccaggctgcatctctttgaaaggtgtgagatcttcctcctaaacctgatgcatgtgtgtccctgtactttctatgtaaaaaaatcagtgttgatcttctcttgcaaaagaaagtaacatgatcaattatttataagaagacataatacatgataaggaattacctaaggcaggcagcaagtagattaggaatcaatgtctttgtacaagaaggaaaaatagagcaaaaatccaagggggagaaactcattaaaatga

SEQ ID NO: 314237 - DNA, 372 bp, Artificial Sequence
  derived and/or modified sequence
atgcagtcggaaaagccccagggcctttttctacagttaaacccaaacgccagctcaactgaaactcaactcctggtgccagccttggagagcagggacacactgccgcctacacattgctttatggctggaacggaaagtccgctggggaatccatggccactgagcctccccccaccctgttggactggatgtgtgttgccagcaccgcgtggtcaacgcaagcctgggccattgggcctgtccattttcatttcgctgggcaacaaacgccacagaagtgggaaccacgtagtgcgggagtcggaacagcctctaagccagggtaacccacatcaggggtggggaccagacacgcggaaagggcgatag

SEQ ID NO: 314238 - DNA, 480 bp, Artificial Sequence
  derived and/or modified sequence
atgcaccagacccacgccatccagagactggaggtgctgcccagcttcagcaacgagagccccaccagcagagagaccagcgagagctggaccaaccaggacgacatcttctacgcctacgccagcatgagccccggcgccgagcacagaggcaccacccagctgctgagattccagctggcccccatcaagaagctggagggcagcctgcagacccacttcctgctgagcagcctgcaccccagaatgaccttccccggcagagccggcggcggcgaggccggcagcagaccccccagaagaccctgggccggcatcctgatcctgcagctgcccagcaccagaggcggcagaagaagcggccacggcgccgtgagaagctggggcccctggaaggtggtggccgagcagcccgtgggcggcaccgacccccccgcccacggcggcagaggcagacccagccccaacgagaacacctag

SEQ ID NO: 314239 - DNA, 372 bp, Artificial Sequence
  derived and/or modified sequence
atgcagtccgaaaagcctcagggtctgttcctccagttgaatcccaacgcctcatccacagaaacccaactgctggtaccggcactcgaaagtcgcgacactctgcctcctactcactgcttcatggcaggaactgagagtcctctgggcaacccctggccactgtcgttacccccaccctgctggactggctgtgttctccccgctcctcgagggcagcggaagccaggccctctgggtctgagcatcttcatatcccttgggaataagcgacatcgaagcggcaaccacgtggttcgagagagtgaacagcccctgtcacagggcaacccgcatcagggttggggccccgatacacgtaagggccgatag

SEQ ID NO: 314240 - DNA, 372 bp, Artificial Sequence
  derived and/or modified sequence
atgcaatctgaaaagccacaggggctgttcctgcaactgaaccctaacgcgtcttcaacagaaacacagctgctggtgcctgctttagagtcacgggataccttgcccccaactcactgcttcatggctggcacggagtccccactgggcaacccctggcctctgtctctcccaccaccttgctggactggctgtgttctccctgccccacggggacagcgcaagcccggaccactgggcttaagtatttttattagcctggggaataagaggcatagatctgggaaccacgtggtgcgggagtctgaacagccgttatcacagggaaatccccaccaagggtgggggcctgatacgcggaagggacggtag

SEQ ID NO: 314241 - DNA, 621 bp, Artificial Sequence
  derived and/or modified sequence
atgtgggccacactccctctgttatgcgccggcgcctggcttctgggcgtgccggtgtgtggtgcagcagagttgtgtgtgaattcccttgagaaattccacttcaaatcgtggatgagcaagcacagaaaaacctattcaactgaggagtatcaccatagacttcaaacctttgcctcaaactggcgaaagatcaatgcccataacaacgggaatcacacattcaaaatggcccttaatcaattttccgacatgtcttttgccgagatcaagcataaatacctatggtccgagccacagaactgttctgccaccaagtctaactacctgagaggcacgggaccctacccacccagtgttgactggaggaaaaagggcaactttgtcagccccgtcaagaatcaagtgtgcctcgctatctctattctgagtctacagaacggccacacacctcgccagtatactagaaaaaataattcaaagggcccacaaaaccaccacaagcatataccagcttcagtttctagtcgtcacctcagtccagggcgtccgtctttaccccagttacgcgagatttgtgagggtaaacgactaggggaggctagtgttaatctgggttag

SEQ ID NO: 314242 - DNA, 621 bp, Artificial Sequence
  derived and/or modified sequence
atgtgggccaccctgcccctgctgtgtgccggggcctggctgctgggcgtgcctgtgtgtggggctgctgagctgtgtgtgaacagcctggagaagttccacttcaagtcctggatgagcaagcacaggaagacctacagcacagaggagtaccaccaccggctgcagacctttgccagcaactggaggaagatcaatgcccacaacaacggcaaccacaccttcaagatggccctgaaccagttcagtgacatgagctttgctgagatcaagcacaagtacctgtggagcgagccccagaactgcagcgccaccaagagcaactacctgcggggcaccggcccctacccaccttctgtggactggaggaagaagggcaactttgtgtcccctgtgaagaaccaggtgtgcctggccatcagcatcctgagcctgcagaatggccacaccccccggcagtacaccaggaagaacaacagcaagggcccccagaaccaccacaagcacatcccagcctctgtgagcagccgccacctgagccctggccggcccagcctgccccagctgcgggagatctgtgagggcaagaggctgggggaggcctctgtgaacctgggctag

SEQ ID NO: 314243 - DNA, 621 bp, Artificial Sequence
  derived and/or modified sequence
atgtgggccaccctgcccctgctgtgcgccggcgcctggctgctgggggttccagtatgtggggctgcagaactgtgtgttaactcattggaaaagtttcacttcaagagttggatgtctaagcatcgcaagacctacagcactgaggagtatcaccaccggctacagaccttcgcctccaactggcggaaaatcaatgcccataacaacggaaaccacacatttaagatggcactgaatcagttctcggacatgagttttgccgagatcaagcacaaatatctctggtcagagccacagaactgttcagctaccaagtcgaactacctgcgcgggaccggaccctacccaccctcagtggactggaggaaaaaagggaatttcgtgtctccggtgaagaaccaagtatgcttagccattagtattctctcactgcagaatggccataccccacgccaatatacacggaaaaacaattccaaaggtcctcagaaccaccacaaacacatcccagcgtctgtttcctcccggcatctgagccccggcagaccctcactccctcagctcagagaaatctgcgagggcaaacgcctcggagaggcctcggtcaatttgggatag

SEQ ID NO: 314244 - DNA, 621 bp, Artificial Sequence
  derived and/or modified sequence
atgtgggcaacgctcccgctgctgtgcgctggagcgtggctgcttggagtgcctgtttgcggagctgcggagctgtgtgtcaattcccttgaaaaatttcattttaaaagctggatgtcaaagcaccgaaaaacttacagcaccgaggaataccaccacaggttgcaaacattcgctagcaattggcggaaaatcaatgctcataacaacgggaatcacacattcaaaatggctcttaaccagttttctgacatgagctttgccgagatcaaacataaatacttgtggtctgaaccccagaactgttccgccaccaaaagcaactatttacgtgggactggaccttacccaccatcggttgattggaggaagaaagggaacttcgtctccccagtcaagaatcaagtgtgccttgctatatctatcttgtccttgcagaacggccatactccccgacagtacacaagaaagaataattccaaagggccacagaatcatcacaagcatatacccgcttcagtttcttcccgtcacctgagccctgggaggccctctctgccccagctgcgtgagatctgtgaagggaaaagattgggcgaggcctccgtgaatttaggttag

SEQ ID NO: 314245 - DNA, 718 bp, Artificial Sequence
  derived and/or modified sequence
ccacgctcgtgccgctccccccccgcgctcccagttgacgctctgggccgccacctccgcggaccctgagcgcaagagccaagccgccagcgctgcgatgtgggccacgctgccgctgctctgcgccggggcctggctcctgggagtccccgtctgcggtgccgccgaactgtgcgtgaactccttagagaagtttcacttcaagtcatggatgtctaagcaccgtaagacctacagtacggaggagtaccaccacaggctgcagacgtttgccagcaactggaggaagataaacgcccacaacaatgggaaccacacatttaaaatggcactgaaccaattttcagacatgagctttgctgaaataaaacacaagtatctctggtcagagcctcagaattgctcagccaccaaaagtaactaccttcgaggtactggtccctacccaccttccgtggactggcggaaaaaaggaaattttgtctcacctgtgaaaaatcaggtatgcctggcaatctccatcctctccctgcaaaacggccacactcccagacaatacaccaggaagaacaactcaaaaggtccacaaaaccaccacaagcacatccctgcctctgtttcctctcggcatctctcaccaggccgtccctccctcccccagctgagagagatatgtgaagggaagagattgggtgaggccagtgtcaacctagggtga

SEQ ID NO: 314246 - DNA, 621 bp, Artificial Sequence
  derived and/or modified sequence
atgtgggccaccctgcccctgctgtgcgccggcgcctggctgctgggcgtgcccgtgtgcggcgccgccgagctgtgcgtgaacagcctggagaagttccacttcaagagctggatgagcaagcacagaaagacctacagcaccgaggagtaccaccacagactgcagaccttcgccagcaactggagaaagatcaacgcccacaacaacggcaaccacaccttcaagatggccctgaaccagttcagcgacatgagcttcgccgagatcaagcacaagtacctgtggagcgagccccagaactgcagcgccaccaagagcaactacctgagaggcaccggcccctacccccccagcgtggactggagaaagaagggcaacttcgtgagccccgtgaagaaccaggtgtgcctggccatcagcatcctgagcctgcagaacggccacacccccagacagtacaccagaaagaacaacagcaagggcccccagaaccaccacaagcacatccccgccagcgtgagcagcagacacctgagccccggcagacccagcctgccccagctgagagagatctgcgagggcaagagactgggcgaggccagcgtgaacctgggctag

SEQ ID NO: 314247 - protein, 351 aa, Artificial Sequence
  derived and/or modified sequence
MALSLWPLLLLLLLLLLLSFAVTLAPTGPHSLDPGLSFLKSLLSTLDQAPQGSLSRSRFFTFLANISSSFEPGRMGEGPVGEPPPLQPPALRLHDFLVTLRGSPDWEPMLGLLGDMLALLGQEQTPRDFLVHQAGVLGGLVEVLLGALVPGGPPTPTQPPCTRDGPSDCVLAADWLPSLLLLLEGTRWQALVQVQPSVDPTNATGLDGREAAPHFLQGLLGLLTPTGELGSKEALWGGLLRTVGAPLYAAFQEGLLRVTHSLQDEVFSILGQPEPDTNGQCQGGNLQQLLLWGVRHNLSWDVQALGFLSGSPPPPPALLHCLSTGVPLPRASQPSAHISPRQRRAITVEAL

SEQ ID NO: 314248 - protein, 351 aa, Artificial Sequence
  derived and/or modified sequence
MALSLWPLLLLLLLLLLLSFAVTLAPTGPHSLDPGLSFLKSLLSTLDQAPQGSLSRSRFFTFLANISSSFEPGRMGEGPVGEPPPLQPPALRLHDFLVTLRGSPDWEPMLGLLGDMLALLGQEQTPRDFLVHQAGVLGGLVEVLLGALVPGGPPTPTRPPCTRDGPSDCVLAADWLPSLLLLLEGTRWQALVQVQPSVDPTNATGLDGREAAPHFLQGLLGLLTPTGELGSKEALWGGLLRTVGAPLYAAFQEGLLRVTHSLQDEVFSILGQPEPDTNGQCQGGNLQQLLLWGVRHNLSWDVQALGFLSGSPPPPPALLHCLSTGVPLPRASQPSAHISPRQRRAITVEAL

SEQ ID NO: 314249 - DNA, 5515 bp, Artificial Sequence
  derived and/or modified sequence
gccctgccctcacctggctatcccacacaggtgagaataaccagaactcacctccggtaccagtgttcacttggaaacatggctctcagcctctggcccctgctgctgctgctgctgctgctgctgctgctgtcctttgcagtgactctggcccctactgggcctcattccctggaccctggtctctccttcctgaagtcattgctctccactctggaccaggctccccagggctccctgagccgctcacggttctttacattcctggccaacatttcttcttcctttgagcctgggagaatgggggaaggaccagtaggagagcccccacctctccagccgcctgctctgcggctccatgattttctagtgacactgagaggtagccccgactgggagccaatgctagggctgctaggggatatgctggcactgctgggacaggagcagactccccgagatttcctggtgcaccaggcaggggtgctgggtggacttgtggaggtgctgctgggagccttagttcctgggggcccccctaccccaactcggcccccatgcacccgtgatgggccgtctgactgtgtcctggctgctgactggttgccttctctgctgctgttgttagagggcacacgctggcaagctctggtgcaggtgcagcccagtgtggaccccaccaatgccacaggcctcgatgggagggaggcagctcctcactttttgcagggtctgttgggtttgcttaccccaacaggggagctaggctccaaggaggctctttggggcggtctgctacgcacagtgggggcccccctctatgctgcctttcaggaggggctgctccgtgtcactcactccctgcaggatgaggtcttctccattttggggcagccagagcctgataccaatgggcagtgccagggaggtaaccttcaacagctgctcttatggggcgtccggcacaacctttcctgggatgtccaggcgctgggctttctgtctggatcaccacccccaccccctgccctccttcactgcctgagcacgggcgtgcctctgcccagagcttctcagccgtcagcccacatcagcccacgccaacggcgagccatcactgtggaggccctctgtgagaaccacttaggcccagcaccaccctacagcatttccaacttctccatccacttgctctgccagcacaccaagcctgccactccacagccccatcccagcaccactgccatctgccagacagctgtgtggtatgcagtgtcctgggcaccaggtgcccaaggctggctacaggcctgccacgaccagtttcctgatgagtttttggatgcgatctgcagtaacctctccttttcagccctgtctggctccaaccgccgcctggtgaagcggctctgtgctggcctgctcccaccccctaccagctgccctgaaggcctgccccctgttcccctcaccccagacatcttttggggctgcttcttggagaatgagactctgtgggctgagcgactgtgtggggaggcaagtctacaggctgtgccccccagcaaccaggcttgggtccagcatgtgtgccagggccccaccccagatgtcactgcctccccaccatgccacattggaccctgtggggaacgctgcccggatgggggcagcttcctggtgatggtctgtgccaatgacaccatgtatgaggtcctggtgcccttctggccttggctagcaggccaatgcaggataagtcgtgggggcaatgacacttgcttcctagaagggctgctgggcccccttctgccctctctgccaccactgggaccatccccactctgtctgacccctggccccttcctccttggcatgctatcccagttgccacgctgtcagtcctctgtcccagctcttgctcaccccacacgcctacactatctcctccgcctgctgaccttcctcttgggtccaggggctgggggcgctgaggcccaggggatgctgggtcgggccctactgctctccagtctcccagacaactgctccttctgggatgcctttcgcccagagggccggcgcagtgtgctacggacgattggggaatacctggaacaagatgaggagcagccaaccccatcaggctttgaacccactgtcaaccccagctctggtataagcaagatggagctgctggcctgctttagtcctgtgctgtgggatctgctccagagggaaaagagtgtttgggccctgcagattctagtgcaggcgtacctgcatatgcccccagaaaacctccagcagctggtgctttcagcagagagggaggctgcacagggcttcctgacactcatgctgcaggggaagctgcaggggaagctgcaggtaccaccatccgaggagcaggccctgggtcgcctgacagccctgctgctccagcggtacccacgcctcacctcccagctcttcattgacctgtcaccactcatccctttcttggctgtctctgacctgatgcgcttcccaccatccctgttagccaacgacagtgtcctggctgccatccgggattacagcccaggaatgaggcctgaacagaaggaggctctggcaaagcgactgctggcccctgaactgtttggggaagtgcctgcctggccccaggagctgctgtgggcagtgctgcccctgctcccccacctccctctggagaactttttgcagctcagccctcaccagatccaggccctggaggatagctggccagcagcaggtctggggccagggcatgcccgccatgtgctgcgcagcctggtaaaccagagtgtccaggatggtgaggagcaggtacgcaggcttgggcccctcgcctgtttcctgagccctgaggagctgcagagcctagtgcccctgagtgatccaacggggccagtagaacgggggctgctggaatgtgcagccaatgggaccctcagcccagaaggacgggtggcatatgaacttctgggtgtgttgcgctcatctggaggagcggtgctgagcccccgggagctgcgggtctgggcccctctcttctctcagctgggcctccgcttccttcaggagctgtcagagccccagcttagagccatgcttcctgtcctgcagggaactagtgttacacctgctcaggctgtcctgctgcttggacggctccttcctaggcacgatctatccctggaggaactctgctccttgcaccttctgctaccaggcctcagcccccagacactccaggccatccctaggcgagtcctggtcggggcttgttcctgcctggcccctgaactgtcacgcctctcagcctgccagaccgcagcactgctgcagacctttcgggttaaagatggtgttaaaaatatgggtacaacaggtgctggtccagctgtgtgtatccctggtcagcctattcccaccacctggccagactgcctgcttcccctgctcccattaaagctgctacaactggattccttggctcttctggcaaatcgaagacgctactgggagctgccctggtctgagcagcaggcacagtttctctggaagaagatgcaagtacccaccaaccttaccctcaggaatctgcaggctctgggcaccctggcaggaggcatgtcctgtgagtttctgcagcagatcaactccatggtagacttccttgaagtggtgcacatgatctatcagctgcccactagagttcgagggagcctgagggcctgtatctgggcagagctacagcggaggatggcaatgccagaaccagaatggacaactgtagggccagaactgaacgggctggatagcaagctactcctggacttaccgatccagttgatggacagactatccaatgaatccattatgttggtggtggagctggtgcaaagagctccagagcagctgctggcactgacccccctccaccaggcagccctggcagagagggcactacaaaacctggctccaaaggagactccagtctcaggggaagtgctggagaccttaggccctttggttggattcctggggacagagagcacacgacagatccccctacagatcctgctgtcccatctcagtcagctgcaaggcttctgcctaggagagacatttgccacagagctgggatggctgctattgcaggagtctgttcttgggaaaccagagttgtggagccaggatgaagtagagcaagctggacgcctagtattcactctgtctactgaggcaatttccttgatccccagggaggccttgggtccagagaccctggagcggcttctagaaaagcagcagagctgggagcagagcagagttggacagctgtgtagggagccacagcttgctgccaagaaagcagccctggtagcaggggtggtgcgaccagctgctgaggatcttccagaacctgtgccaaattgtgcagatgtacgagggacattcccagcagcctggtctgcaacccagattgcagagatggagctctcagactttgaggactgcctgacattatttgcaggagacccaggacttgggcctgaggaactgcgggcagccatgggcaaagcaaaacagttgtggggtcccccccggggatttcgtcctgagcagatcctgcagcttggtaggctcttaataggtctaggagatcgggaactacaggagctgatcctagtggactggggagtgctgagcaccctggggcagatagatggctggagcaccactcagctccgcattgtggtctccagtttcctacggcagagtggtcggcatgtgagccacctggacttcgttcatctgacagcgctgggttatactctctgtggactgcggccagaggagctccagcacatcagcagttgggagttcagccaagcagctctcttcctcggcaccctgcatctccagtgctctgaggaacaactggaggttctggcccacctacttgtactgcctggtgggtttggcccaatcagtaactgggggcctgagatcttcactgaaattggcaccatagcagctgggatcccagacctggctctttcagcactgctgcggggacagatccagggcgttactcctcttgccatttctgtcatccctcctcctaaatttgctgtggtgtttagtcccatccaactatctagtctcaccagtgctcaggctgtggctgtcactcctgagcaaatggcctttctgagtcctgagcagcgacgagcagttgcatgggcccaacatgagggaaaggagagcccagaacagcaaggtcgaagtacagcctggggcctccaggactggtcacgaccttcctggtccctggtattgactatcagcttccttggccacctgctatgagcctgtctctacagtagaaggagattgtggggagagaaatcttaagtcataatgaataaagtgcaaacagaagtgcatcctgattattttcagaagctgatgaggaata

SEQ ID NO: 314250 - DNA, 1711 bp, Artificial Sequence
  derived and/or modified sequence
agagactcactcttccgatattttgagttgctagaaaagcttcagtgtaacctagaggagcataagaagttacaagagtttgcagaaccccagattacacccctggtctccagttctccatctccatgtctgcctgttcctttctgcatcactggctcctaactcaagcaatctccttgggtttctctgaggggcccctgggatcccctatcattagtccctctcacagaagcatacccttctccagagctaaaggatcagatattcagcggctcaggtgagaataaccagaactcacctccggtaccagtgttcacttggaaacatggctctcagcctctggcccctgctgctgctgctgctgctgctgctgctgctgtcctttgcagtgactctggcccctactgggcctcattccctggaccctggtctctccttcctgaagtcattgctctccactctggaccaggctccccagggctccctgagccgctcacggttctttacattcctggccaacatttcttcttcctttgagcctgggagaatgggggaaggaccagtaggagagcccccacctctccagccgcctgctctgcggctccatgattttctagtgacactgagaggtagccccgactgggagccaatgctagggctgctaggggatatgctggcactgctgggacaggagcagactccccgagatttcctggtgcaccaggcaggggtgctgggtggacttgtggaggtgctgctgggagccttagttcctgggggcccccctaccccaactcagcccccatgcacccgtgatgggccgtctgactgtgtcctggctgctgactggttgccttctctgctgctgttgttagagggcacacgctggcaagctctggtgcaggtgcagcccagtgtggaccccaccaatgccacaggcctcgatgggagggaggcagctcctcactttttgcagggtctgttgggtttgcttaccccaacaggggagctaggctccaaggaggctctttggggcggtctgctacgcacagtgggggcccccctctatgctgcctttcaggaggggctgctccgtgtcactcactccctgcaggatgaggtcttctccattttggggcagccagagcctgataccaatgggcagtgccagggaggtaaccttcaacagctgctcttatggggcgtccggcacaacctttcctgggatgtccaggcgctgggctttctgtctggatcaccacccccaccccctgccctccttcactgcctgagcacgggcgtgcctctgcccagagcttctcagccgtcagcccacatcagcccacgccaacggcgagccatcactgtggaggccctctagggccggcgcagtgtgctacggacgattggggaatacctggaacaagatgaggagcagccaaccccatcaggctttgaacccactgtcaaccccagctctggtataagcaagatggagctgctggcctgctttagtcctgtgctgtgggatctgctccagagggaaaagagtgtttgggccctgcagattctagtgcaggcgtacctgcatatgcccccagaaaacctccagcagctggtgctttcagcagagagggaggctgcacagggcttcctgacactcatgctgcaggggaagctgcaggtaccaccatccgaggagcaggccctg

SEQ ID NO: 314251 - DNA, 5680 bp, Artificial Sequence
  derived and/or modified sequence
gccctgccctcacctggctatcccacacaggtgagaataaccagaactcacctccggtaccagtgttcacttggaaacatggctctcagcctctggcccctgctgctgctgctgctgctgctgctgctgctgtcctttgcagtgactctggcccctactgggcctcattccctggaccctggtctctccttcctgaagtcattgctctccactctggaccaggctccccagggctccctgagccgctcacggttctttacattcctggccaacatttcttcttcctttgagcctgggagaatgggggaaggaccagtaggagagcccccacctctccagccgcctgctctgcggctccatgattttctagtgacactgagaggtagccccgactgggagccaatgctagggctgctaggggatatgctggcactgctgggacaggagcagactccccgagatttcctggtgcaccaggcaggggtgctgggtggacttgtggaggtgctgctgggagccttagttcctgggggcccccctaccccaactcggcccccatgcacccgtgatgggccgtctgactgtgtcctggctgctgactggttgccttctctgctgctgttgttagagggcacacgctggcaagctctggtgcaggtgcagcccagtgtggaccccaccaatgccacaggcctcgatgggagggaggcagctcctcactttttgcagggtctgttgggtttgcttaccccaacaggggagctaggctccaaggaggctctttggggcggtctgctacgcacagtgggggcccccctctatgctgcctttcaggaggggctgctccgtgtcactcactccctgcaggatgaggtcttctccattttggggcagccagagcctgataccaatgggcagtgccagggaggtaaccttcaacagctgctcttatggggcgtccggcacaacctttcctgggatgtccaggcgctgggctttctgtctggatcaccacccccaccccctgccctccttcactgcctgagcacgggcgtgcctctgcccagagcttctcagccgtcagcccacatcagcccacgccaacggcgagccatcactgtggaggccctctgtgagaaccacttaggcccagcaccaccctacagcatttccaacttctccatccacttgctctgccagcacaccaagcctgccactccacagccccatcccagcaccactgccatctgccagacagctgtgtggtatgcagtgtcctgggcaccaggtgcccaaggctggctacaggcctgccacgaccagtttcctgatgagtttttggatgcgatctgcagtaacctctccttttcagccctgtctggctccaaccgccgcctggtgaagcggctctgtgctggcctgctcccaccccctaccagctgccctgaaggcctgccccctgttcccctcaccccagacatcttttggggctgcttcttggagaatgagactctgtgggctgagcgactgtgtggggaggcaagtctacaggctgtgccccccagcaaccaggcttgggtccagcatgtgtgccagggccccaccccagatgtcactgcctccccaccatgccacattggaccctgtggggaacgctgcccggatgggggcagcttcctggtgatggtctgtgccaatgacaccatgtatgaggtcctggtgcccttctggccttggctagcaggccaatgcaggataagtcgtgggggcaatgacacttgcttcctagaagggctgctgggcccccttctgccctctctgccaccactgggaccatccccactctgtctgacccctggccccttcctccttggcatgctatcccagttgccacgctgtcagtcctctgtcccagctcttgctcaccccacacgcctacactatctcctccgcctgctgaccttcctcttgggtccaggggctgggggcgctgaggcccaggggatgctgggtcgggccctactgctctccagtctcccagacaactgctccttctgggatgcctttcgcccagagggccggcgcagtgtgctacggacgattggggaatacctggaacaagatgaggagcagccaaccccatcaggctttgaacccactgtcaaccccagctctggtataagcaagatggagctgctggcctgctttagtcctgtgctgtgggatctgctccagagggaaaagagtgtttgggccctgcagattctagtgcaggcgtacctgcatatgcccccagaaaacctccagcagctggtgctttcagcagagagggaggctgcacagggcttcctgacactcatgctgcaggggaagctgcaggggaagctgcaggtaccaccatccgaggagcaggccctgggtcgcctgacagccctgctgctccagcggtacccacgcctcacctcccagctcttcattgacctgtcaccactcatccctttcttggctgtctctgacctgatgcgcttcccaccatccctgttagccaacgacagtgtcctggctgccatccgggattacagcccaggaatgaggcctgaacagaaggaggctctggcaaagcgactgctggcccctgaactgtttggggaagtgcctgcctggccccaggagctgctgtgggcagtgctgcccctgctcccccacctccctctggagaactttttgcagctcagccctcaccagatccaggccctggaggatagctggccagcagcaggtctggggccagggcatgcccgccatgtgctgcgcagcctggtaaaccagagtgtccaggatggtgaggagcaggtacgcaggcttgggcccctcgcctgtttcctgagccctgaggagctgcagagcctagtgcccctgagtgatccaacggggccagtagaacgggggctgctggaatgtgcagccaatgggaccctcagcccagaaggacgggtggcatatgaacttctgggtgtgttgcgctcatctggaggagcggtgctgagcccccgggagctgcgggtctgggcccctctcttctctcagctgggcctccgcttccttcaggagctgtcagagccccagcttagagccatgcttcctgtcctgcagggaactagtgttacacctgctcaggctgtcctgctgcttggacggctccttcctaggcacgatctatccctggaggaactctgctccttgcaccttctgctaccaggcctcagcccccagacactccaggccatccctaggcgagtcctggtcggggcttgttcctgcctggcccctgaactgtcacgcctctcagcctgccagaccgcagcactgctgcagacctttcgggttaaagatggtgttaaaaatatgggtacaacaggtgctggtccagctgtgtgtatccctggtcagcctattcccaccacctggccagactgcctgcttcccctgctcccattaaagctgctacaactggattccttggctcttctggcaaatcgaagacgctactgggagctgccctggtctgagcagcaggcacagtttctctggaagaagatgcaagtacccaccaaccttaccctcaggaatctgcaggctctgggcaccctggcaggaggcatgtcctgtgagtttctgcagcagatcaactccatggtagacttccttgaagtggtgcacatgatctatcagctgcccactagagttcgagggagcctgagggcctgtatctgggcagagctacagcggaggatggcaatgccagaaccagaatggacaactgtagggccagaactgaacgggctggatagcaagctactcctggacttaccgatccagttgatggacagactatccaatgaatccattatgttggtggtggagctggtgcaaagagctccagagcagctgctggcactgacccccctccaccaggcagccctggcagagagggcactacaaaacctggctccaaaggagactccagtctcaggggaagtgctggagaccttaggccctttggttggattcctggggacagagagcacacgacagatccccctacagatcctgctgtcccatctcagtcagctgcaaggcttctgcctaggagagacatttgccacagagctgggatggctgctattgcaggagtctgttcttgggaaaccagagttgtggagccaggatgaagtagagcaagctggacgcctagtattcactctgtctactgaggcaatttccttgatccccagggaggccttgggtccagagaccctggagcggcttctagaaaagcagcagagctgggagcagagcagagttggacagctgtgtagggagccacagcttgctgccaagaaagcagccctggtagcaggggtggtgcgaccagctgctgaggatcttccagaacctgtgccaaattgtgcagatgtacgagggacattcccagcagcctggtctgcaacccagattgcagagatggagctctcagactttgaggactgcctgacattatttgcaggagacccaggacttgggcctgaggaactgcgggcagccatgggcaaagcaaaacagttgtggggtcccccccggggatttcgtcctgagcagatcctgcagcttggtaggctcttaataggtctaggagatcgggaactacaggagctgatcctagtggactggggagtgctgagcaccctggggcagatagatggctggagcaccactcagctccgcattgtggtctccagtttcctacggcagagtggtcggcatgtgagccacctggacttcgttcatctgacagcgctgggttatactctctgtggactgcggccagaggagctccagcacatcagcagttgggagttcagccaagcagctctcttcctcggcaccctgcatctccagtgctctgaggaacaactggaggttctggcccacctacttgtactgcctggtgggtttggcccaatcagtaactgggggcctgagatcttcactgaaattggcaccatagcagctgggatcccagacctggctctttcagcactgctgcggggacagatccagggcgttactcctcttgccatttctgtcatccctcctcctaaatttgctgtggtgtttagtcccatccaactatctagtctcaccagtgctcaggctgtggctgtcactcctgagcaaatggcctttctgagtcctgagcagcgacgagcagttgcatgggcccaacatgagggaaaggagagcccagaacagcaaggtcgaagtacagcctggggcctccaggactggtcacgaccttcctggtccctggtattgactatcagcttccttggccacctgctatgagcctgtctctacagtagaaggagattgtggggagagaaatcttaagtcataatgaataaagtgcaaacagaagtgcatcctgattattttcagaagctgatgaggaatatgggtaaaatgttaatgctttccacccacctgagaatcagtgttcctgggttgccatatctggagtctctttccatcataaataatcccactgcctcttttcatttcctgaaggctgctccctcctcaccccaccattagaagtaacacagacagctgcagcata

SEQ ID NO: 314252 - DNA, 1711 bp, Artificial Sequence
  derived and/or modified sequence
agagactcactcttccgatattttgagttgctagaaaagcttcagtataacctagaggaacgtaagaagttacaagagtttgcagaaccccagattacacccctggtctccagttctccatctccatgtctgcctgttcctttctgcatcactggctcctaactcaagcaatctccttgggtttctctgaggggcccctgggatcccctatcattagtccctctcacagaagcatacccttctccagagctaaaggatcagatattcagcggctcaggtgagaataaccagaactcacctccggtaccagtgttcacttggaaacatggctctcagcctctggcccctgctgctgctgctgctgctgctgctgctgctgtcctttgcagtgactctggcccctactgggcctcattccctggaccctggtctctccttcctgaagtcattgctctccactctggaccaggctccccagggctccctgagccgctcacggttctttacattcctggccaacatttcttcttcctttgagcctgggagaatgggggaaggaccagtaggagagcccccacctctccagccgcctgctctgcggctccatgattttctagtgacactgagaggtagccccgactgggagccaatgctagggctgctaggggatatgctggcactgctgggacaggagcagactccccgagatttcctggtgcaccaggcaggggtgctgggtggacttgtggaggtgctgctgggagccttagttcctgggggcccccctaccccaactcggcccccatgcacccgtgatgggccgtctgactgtgtcctggctgctgactggttgccttctctgctgctgttgttagagggcacacgctggcaagctctggtgcaggtgcagcccagtgtggaccccaccaatgccacaggcctcgatgggagggaggcagctcctcactttttgcagggtctgttgggtttgcttaccccaacaggggagctaggctccaaggaggctctttggggcggtctgctacgcacagtgggggcccccctctatgctgcctttcaggaggggctgctccgtgtcactcactccctgcaggatgaggtcttctccattttggggcagccagagcctgataccaatgggcagtgccagggaggtaaccttcaacagctgctcttatggggcgtccggcacaacctttcctgggatgtccaggcgctgggctttctgtctggatcaccacccccaccccctgccctccttcactgcctgagcacgggcgtgcctctgcccagagcttctcagccgtcagcccacatcagcccacgccaacggcgagccatcactgtggaggccctctagggccggcgcagtgtgctacggacgattggggaatacctggaacaagatgaggagcagccaaccccatcaggctttgaacccactgtcaaccccagctctggtataagcaagatggagctgctggcctgctttagtcctgtgctgtgggatctgctccagagggaaaagagtgtttgggccctgcagattctagtgcaggcgtacctgcatatgcccccagaaaacctccagcagctggtgctttcagcagagagggaggctgcacagggcttcctgacactcatgctgcaggggaagctgcaggtaccaccatccgaggagcaggccctg

SEQ ID NO: 314253 - DNA, 2178 bp, Artificial Sequence
  derived and/or modified sequence
gccctgccctcacctggctatcccacacaggtgagaataaccagaactcacctccggtaccagtgttcacttggaaacatggctctcagcctctggcccctgctgctgctgctgctgctgctgctgctgctgtcctttgcagtgactctggcccctactgggcctcattccctggaccctggtctctccttcctgaagtcattgctctccactctggaccaggctccccagggctccctgagccgctcacggttctttacattcctggccaacatttcttcttcctttgagcctgggagaatgggggaaggaccagtaggagagcccccacctctccagccgcctgctctgcggctccatgattttctagtgacactgagaggtagccccgactgggagccaatgctagggctgctaggggatatgctggcactgctgggacaggagcagactccccgagatttcctggtgcaccaggcaggggtgctgggtggacttgtggaggtgctgctgggagccttagttcctgggggcccccctaccccaactcagcccccatgcacccgtgatgggccgtctgactgtgtcctggctgctgactggttgccttctctgctgctgttgttagagggcacacgctggcaagctctggtgcaggtgcagcccagtgtggaccccaccaatgccacaggcctcgatgggagggaggcagctcctcactttttgcagggtctgttgggtttgcttaccccaacaggggagctaggctccaaggaggctctttggggcggtctgctacgcacagtgggggcccccctctatgctgcctttcaggaggggctgctccgtgtcactcactccctgcaggatgaggtcttctccattttggggcagccagagcctgataccaatgggcagtgccagggaggtaaccttcaacagctgctcttatggggcgtccggcacaacctttcctgggatgtccaggcgctgggctttctgtctggatcaccacccccaccccctgccctccttcactgcctgagcacgggcgtgcctctgcccagagcttctcagccgtcagcccacatcagcccacgccaacggcgagccatcactgtggaggccctctgtgagaaccacttaggcccagcaccaccctacagcatttccaacttctccatccacttgctctgccagcacaccaagcctgccactccacagccccatcccagcaccactgccatctgccagacagctgtgtggtatgcagtgtcctgggcaccaggtgcccaaggctggctacaggcctgccacgaccagtttcctgatgagtttttggatgcgatctgcagtaacctctccttttcagccctgtctggctccaaccgccgcctggtgaagcggctctgtgctggcctgctcccaccccctaccagctgccctgaaggcctgccccctgttcccctcaccccagacatcttttggggctgcttcttggagaatgagactctgtgggctgagcgactgtgtggggaggcaagtctacaggctgtgccccccagcaaccaggcttgggtccagcatgtgtgccagggccccaccccagatgtcactgcctccccaccatgccacattggaccctgtggggaacgctgcccggatgggggcagcttcctggtgatggtctgtgccaatgacaccatgtatgaggtcctggtgcccttctggccttggctagcaggccaatgcaggataagtcgtgggggcaatgacacttgcttcctagaagggctgctgggcccccttctgccctctctgccaccactgggaccatccccactctgtctgacccctggccccttcctccttggcatgctatcccagttgccacgctgtcagtcctctgtcccagctcttgctcaccccacacgcctacactatctcctccgcctgctgaccttcctcttgggtccaggggctgggggcgctgaggcccaggggatgctgggtcgggccctactgctctccagtctcccagacaactgctccttctgggatgcctttcgcccagagggccggcgcagtgtgctacggacgattggggaatacaacaagatgaggagcagccaaccccatcaggctttgaacccactgtcaaccccagctctggtataa

SEQ ID NO: 314254 - protein, 1002 aa, Artificial Sequence
  derived and/or modified sequence
MELLACFSPVLWDLLQREKSVWALQILVQAYLHMPPENLQQLVLSAEREAAQGFLTLMLQGKLQGKLQVPPSEEQALGRLTALLLQRYPRLTSQLFIDLSPLIPFLAVSDLMRFPPSLLANDSVQQGYRGSEENSLEEDKGLRPMTPRSLAAIRDYSPGMRPEQKEALAKRLLAPELFGEVPAWPQELLWAVLPLLPHLPLENFLQLSPHQIQALEDSWPAAGLGPGHARHVLRSLVNQSVQDGEEQVRRLGPLACFLSPEELQSLVPLSDPTGPVERGLLECAANGTLSPEGRVAYELLGVLRSSGGAVLSPRELRVWAPLFSQLGLRFLQELSEPQLRAMLPVLQGTSVTPAQAVLLLGRLLPRHDLLQLDSLALLANRRRYWELPWSEQQAQFLWKKMQVPTNLTLRNLQALGTLAGGMSCEFLQQINSMVDFLEVVHMIYQLPTRVRGSLRACIWAELQRRMAMPEPEWTTVGPELNGLDSKLLLDLPIQLMDRLSNESIMLVVELVQRAPEQLLALTPLHQAALAERALQNLAPKETPVSGEVLETLGPLVGFLGTESTRQIPLQILLSHLSQLQGFCLGETFATELGWLLLQESVLGKPELWSQDEVEQAGRLVFTLSTEAISLIPREALGPETLERLLEKQQSWEQSRVGQLCREPQLAAKKAALVAGVVRPAAEDLPEPVPNCADVRGTFPAAWSATQIAEMELSDFEDCLTLFAGDPGLGPEELRAAMGKAKQLWGPPRGFRPEQILQLGRLLIGLGDRELQELILVDWGVLSTLGQIDGWSTTQLRIVVSSFLRQSGRHVSHLDFVHLTALGYTLCGLRPEELQHISSWEFSQAALFLGTLHLQCSEEQLEVLAHLLVLPGGFGPISNWGPEIFTEIGTIAAGIPDLALSALLRGQIQGVTPLAISVIPPPKFAVVFSPIQLSSLTSAQAVAVTPEQMAFLSPEQRRAVAWAQHEGKESPEQQGRSTAWGLQDWSRPSWSLVLTISFLGHLL

SEQ ID NO: 314255 - protein, 933 aa, Artificial Sequence
  derived and/or modified sequence
MVSSVLPNPTSAECWAALLHDPMTLDMDAVLSDFVRSTGAEPGLARDLLEGKNWDLTAALSDYEQLRQVHTANLPHVFNEGRGPKQPEREPQPGHKVERPCLQRQDDIAQEKRLSRGISHASSAIVSLARSHVASECNNEQFPLEMPIYTFQLPDLSVYSEDFRSFIERDLIEQATMVALEQAGRLNWWSTVCTSCKRLLPLATTGDGNCLLHAASLGMWGFHDRDLVLRKALYTMMRTGAEREALKRRWRWQQTQQNKESGLVYTEEEWEREWTELLKLASSEPRTHFSKNGGTGGGVDNSEDPVYESLEEFHVFVLAHILRRPIVVVADTMLRDSGGEAFAPIPFGGIYLPLEVPPNRCHCSPLVLAYDQAHFSALVSMEQRDQQREQAVIPLTDSEHKLLPLHFAVDPGKDWEWGKDDNDNARLAHLILSLEAKLNLLHSYMNVTWIRIPSETRAPLAQPESPTASAGEDVQSLADSLDSDRDSVCSNSNSNNGKNGKDKEKEKQRKEKDKTRADSVANKLGSFSKTLGIKLKKNMGGLGGLVHGKMGRANSANGKNGDSAERGKEKKAKSRKGSKEESGASASTSPSEKTTPSPTDKAAGASPAEKGGGPRGDAWKYSTDVKLSLNILRAAMQGERKFIFAGLLLTSHRHQFHEEMIGYYLTSAQERFSAEQEQRRRDAATAAAAAAAAAAATAKRPPRRPETEGVPVPERASPGPPTQLVLKLKERPSPGPAAGRAARAAAGGTASPGGGARRASASGPVPGRSPPAPARQSVIHVQASGARDEACAPAVGALRPCATYPQQNRSLSSQSYSPARAAALRTVNTVESLARAVPGALPGAAGTAGAAEHKSQTYTNGFGALRDGLEFADADAPTARSNGECGRGGPGPVQRRCQRENCAFYGRAETEHYCSYCYREELRRRREARGARP

SEQ ID NO: 314256 - DNA, 2802 bp, Artificial Sequence
  derived and/or modified sequence
atggtctctagcgtgcttcccaaccctacctcggcagagtgctgggcggcacttctccacgacccaatgacacttgatatggatgcagttttaagtgattttgtcaggtccaccggcgccgaacctggtctggctagagatctgctggagggcaagaattgggacctgaccgcagctctgtctgattacgagcagctgagacaggtccacactgctaacctccctcacgtgttcaacgaaggcagaggtccaaagcaacccgaacgtgagccacagcctggccacaaggtcgagcgcccttgcctccagcggcaggatgatatcgcccaggagaagaggctgtctagaggaatttcccatgcctcctcagcgattgtaagtctggcccgctcacacgtcgcttctgaatgcaacaatgagcagttcccattggagatgccgatctacacctttcagcttccggacctgtctgtatattcggaggacttcaggtccttcattgagcgagacctgatagaacaggcaactatggtcgctctggagcaggctggtcgactgaactggtggtccaccgtgtgtacgtcttgtaaaaggctacttcctcttgccacaacaggggacggcaactgcttgttacatgcagcctccttgggcatgtggggatttcatgatcgcgacctagtcctaagaaaagccctgtatacgatgatgaggaccggcgccgagagagaggctctcaagcgacgctggagatggcaacagacccagcagaacaaagagagtgggctcgtttataccgaggaagagtgggagcgagaatggacagagttgctgaaattggcatcttcagaaccacgcacacacttcagcaagaatggagggactggcggtggagtggacaactctgaggatcctgtgtacgagtcacttgaggaattccacgtgttcgtgctggcccacatcttgcgacggccaatagtcgtcgttgccgataccatgctccgagactccggcggcgaggcatttgctcctattcctttcggcggaatttacttgccactggaagtgcctcctaatagatgccattgctcaccactcgtgctggcatatgaccaggctcacttttcagcactggtgtccatggaacagagggaccaacagagagaacaagccgtgattccactgacagacagcgaacacaagcttctgcctcttcacttcgccgtggaccccggcaaagattgggagtgggggaaagacgataacgacaatgccaggctggcgcatcttattttgtccttggaggctaaattgaatctgctccacagctacatgaacgtgacttggatcagaattccctccgaaactagggcccccctggcccagcccgagtccccgacagcatccgcaggtgaggacgtgcagtcactcgcggatagcttagattcagatagggactcagtttgttctaacagcaattccaacaacggaaaaaacggcaaagataaagagaaggagaaacagaggaaggagaaagacaaaaccagggccgattccgtagctaacaagctgggttccttttctaagacgttgggaatcaaactaaaaaaaaatatgggtggcctgggtggacttgtgcatgggaaaatgggcagagccaattcagcaaatgggaagaacggggactctgctgagaggggaaaagagaaaaaagcgaagagccgcaaggggagtaaggaagagagcggagcttcagcttctacctcgccttcagaaaaaaccacacccagtcccaccgataaggcggctggagcttccccagctgaaaagggcgggggccctaggggggatgcttggaaatatagcactgacgtgaaactgagcctcaatatactgagagctgctatgcaaggcgaaagaaaattcatcttcgccgggttgctgttgacatcgcaccggcaccagttccatgaagaaatgatcggctattacctcaccagtgctcaggagaggttctcggccgaacaggagcagcgtcggcgggatgccgctaccgcagctgccgccgcagccgccgctgctgccgctaccgctaagcgcccaccgagacggcccgagacggagggcgttccagtccccgagagggcttccccgggaccgcccacacagttagtgctgaagctgaaggagcggccctcgcccggccccgcggccggacgagccgcaagggctgctgctggcgggaccgcgagccccggtgggggtgccaggcgcgcttccgcatccgggcccgtgcccggtcgaagcccacctgcccctgcccgacagtccgtgatccacgtgcaagcaagtggcgcacgagatgaagcctgcgcacctgccgttggcgccctccgtccctgtgcgacctacccccagcagaacagatcgttgtcatcccagtcttactcccccgctcgggcagccgccctgagaaccgttaatactgtggagtctctagcacgtgctgtgcccggtgctcttcccggggctgctggcacagctggggcggctgaacacaagtctcagacttacaccaacggcttcggagcgttacgcgacgggctggagttcgccgacgccgacgctccaaccgctcgcagtaacggcgaatgtggccgcggcggtcctgggccagtccaaagaagatgccagcgagaaaactgcgccttctacggccgagccgagactgaacactactgttcttattgttatagggaagagctccgacgacgcagagaggcccgtggggcccggccctag

SEQ ID NO: 314257 - DNA, 2802 bp, Artificial Sequence
  derived and/or modified sequence
atggtgtcctctgtgctgcccaaccccaccagcgctgagtgctgggccgccctgctgcatgaccccatgaccctggacatggatgctgtgctgagtgactttgtgcgcagcactggagctgagcccggcctggcccgggacctgctggagggcaagaactgggacctgacagctgccctgagtgactatgagcagctgcggcaggtgcacacagccaacctgccccacgtgttcaatgaaggccggggccccaagcagcctgagcgggagccccagcccggccacaaggtggagcggccctgcctgcagaggcaggatgacatcgcccaggagaagaggctgagccggggcatcagccacgccagcagcgccatcgtgtccctggcccggagccacgtggccagcgagtgcaacaatgagcagttccccctggagatgcccatctacaccttccagctgcctgacctgtctgtgtacagcgaggacttccgctccttcatcgagcgggacctgattgagcaggccaccatggtggccctggagcaggccggccgcctgaactggtggagcacagtgtgcaccagctgcaagaggctgctgcccctggccaccactggagatggcaactgcctgctgcacgccgccagcctgggcatgtggggcttccatgaccgggacctggtgctgaggaaggccctgtacaccatgatgaggactggagctgagcgggaggccctgaagaggcgctggcgctggcagcagacccagcagaacaaggagagcggcctggtgtacacagaggaggagtgggagcgggagtggacagagctgctgaagctggccagcagcgagcccaggacccacttcagcaagaatggaggcactggaggcggcgtggacaacagtgaagatcctgtgtatgagagcctggaggagttccacgtgtttgtgctggcccacatcctgcggcggcccatcgtggtggtggccgacaccatgctgcgggacagcggcggggaggcctttgcccccatcccctttggaggcatctacctgcccctggaggtgccccccaaccgctgccactgcagccccctggtgctggcctatgaccaggcccacttcagcgccctggtgtccatggagcagagggaccagcagcgggagcaggccgtcatccccctgacagacagcgagcacaagctgctgcccctgcactttgctgtggaccccgggaaggactgggagtggggcaaggatgacaatgacaatgcccggctggcccacctgatcctgagcctggaggccaagctgaacctgctgcacagctacatgaatgtgacctggatccgcatccccagcgagacccgggcccccctggcccagcctgagagccccacagccagcgctggggaggatgtgcagagcctggccgacagcctggacagcgaccgggacagcgtgtgcagcaacagcaacagcaacaacgggaagaatggcaaggacaaggagaaggagaagcagaggaaggagaaggacaagaccagggctgacagcgtggccaacaagctgggcagcttcagcaagaccctgggcatcaagctgaagaagaacatgggcggcctgggcggcctggtgcacggcaagatgggccgggccaacagcgccaacgggaagaatggagacagcgctgagcggggcaaggagaagaaggccaagagcaggaagggcagcaaggaggagagcggggccagcgccagcaccagccccagcgagaagaccacccccagccccacagacaaggctgctggggccagccctgctgagaagggcggcggccccagaggagatgcctggaagtacagcacagatgtgaagctgagcctgaacatcctgcgggccgccatgcagggcgagaggaagttcatctttgctggcctgctgctgaccagccaccgccaccagttccacgaggagatgattggctactacctgaccagcgcccaggagcgcttctctgctgagcaggagcagaggagaagagatgctgccacagctgctgctgctgctgctgctgctgctgctgccacagccaagaggcccccaagaagacctgagacagaaggagtgcctgtgcctgagcgggccagccctggcccccccacccagctggtgctgaagctgaaggagcggcccagccctggccctgctgctggccgggccgcccgggctgctgctgggggcacagccagccctgggggcggggcccggcgggccagcgccagcggccctgtgcccggccgcagccccccagccccagcccggcagagcgtcatccacgtgcaggccagcggggccagagatgaggcctgtgccccagctgtgggcgccctgcggccctgtgccacctacccccagcagaacagaagcctgagcagccagagctacagccctgcccgggccgccgccctgaggacagtgaacacagtggagagcctggcccgggctgtgcctggggccctgcccggggctgctggaacagctggagctgctgagcacaagagccagacctacaccaacggctttggagccctgagagatggcctggagtttgctgatgctgatgcccccacagcccggagcaatggagaatgtggccggggcggccctggccctgtgcagaggcgctgccagcgggagaactgtgccttctacggccgggcagagacagagcactactgcagctactgctaccgggaggagctgcggaggagaagagaggcccggggggcccggccctag

SEQ ID NO: 314258 - DNA, 2802 bp, Artificial Sequence
  derived and/or modified sequence
atggtgagcagcgtgctgcccaaccccaccagcgccgagtgctgggctgccctgttacacgacccaatgaccctcgacatggatgctgttttatccgacttcgtgagatcaaccggggccgagcctggtcttgcccgcgacttactcgaagggaagaattgggatctgacagctgcactgtccgattacgagcagttgcgccaggtgcacacagcgaacctgccgcatgtttttaatgaggggcgagggcctaaacaacccgaaagggagccccagcctgggcacaaggtggaacggccctgtctgcaacggcaagatgatatcgcgcaggagaagcgcctctcccgcggaatcagccacgcctcttctgccattgtgagcttggcccggagccacgtggcctctgaatgtaacaacgagcagttcccgctggagatgcccatctatacctttcagctgcctgatctctccgtctacagcgaggatttccggtccttcatcgagcgcgatctaatcgagcaggccaccatggttgcactcgagcaagcggggcggctgaactggtggtcaacggtctgcaccagttgtaaacgacttctccccctggcaaccacaggggacggcaattgcttgttacacgcggctagtctgggcatgtggggcttccacgatagggatctagttttgcggaaagcattgtataccatgatgagaaccggcgccgaacgggaagctctgaaacgccgctggcgatggcagcaaacccagcagaacaaggagtccgggttggtttataccgaggaagaatgggaaagagaatggacagagctgctgaagctcgcctcctctgagccccgcactcacttttctaagaatggaggaacggggggaggagtggataacagcgaggaccccgtctatgagagtctggaggagttccacgttttcgttctggctcacatactcaggaggccaatcgtggtcgtcgccgataccatgttgagggatagcggaggtgaggcctttgcgccaatccctttcggaggaatctacttgcctctcgaagtgcctcccaatcgctgtcactgtagtcccctggtcctggcttatgatcaggcgcacttttctgctctggtttcaatggagcagcgggatcaacagcgtgagcaggccgtcatcccactgacagactcagagcacaaattgcttcctctgcatttcgctgtcgatcctggtaaagactgggagtggggcaaggatgacaacgataatgcccgtctggcacatttgatcctttctctggaagccaagttgaacctgctgcatagctacatgaacgtcacttggatcaggatccctagcgaaactagggcgcccctggcacagccagagagccccacggcaagcgctggcgaagatgttcagtcccttgcagattccttagattccgatcgggactccgtctgctcgaactccaattccaataatggcaaaaacggaaaagataaggagaaagaaaagcagcggaaagagaaggataaaaccagagccgatagcgtcgccaataagctggggagcttcagtaaaacgctgggcattaaattgaagaaaaacatgggaggcctgggaggcctggttcacggcaagatgggtagagccaattcagccaatggcaagaatggagatagtgcagaacgcggaaaggagaagaaggccaagagcagaaagggctcaaaagaggagtccggggctagtgcttcaacctctccttccgagaaaactaccccctcaccaacggacaaggccgccggcgcttctcctgcagaaaagggaggaggccccagaggagatgcatggaaatatagtacggacgtcaaactttcattgaatatcctgcgcgccgctatgcagggcgagcgcaagttcatctttgcgggattgttgttgaccagccatcgacatcagttccacgaagaaatgataggatactacctcacctcagcacaggaaagatttagcgccgagcaagagcaacgtcgtcgcgacgccgccactgccgccgctgcggcggccgctgccgcagctgccacggcaaagaggcctcctaggagacccgagacagagggagtgcctgtccccgaacgggccagtcctggaccccctactcaactggtgttaaagctcaaggagagaccctccccaggccctgctgctggacgagcagcgcgagccgcggccggcggtaccgctagtcctggcggtggcgcgcgccgcgcttccgcttcgggtccagtccccgggagaagtccacccgctcccgcaaggcagtcagtgattcacgtgcaggcctcaggcgctcgggacgaggcctgtgcaccagcagtgggcgcactgcggccctgtgccacatacccacagcagaatcgttccctcagtagccagtcatattcgccggcacgtgcagccgccctgcggacggtcaatactgtggagagtcttgctcgggctgtgcccggcgctctacccggagccgctgggacagccggcgcagccgaacacaaaagccagacatataccaacggcttcggtgccttgagagatggcttagaattcgctgatgctgatgcccccaccgcaagatccaacggggaatgcggacgaggggggcccggtcccgtccagcgccgctgtcaaagggagaattgtgccttttacggtcgagccgaaacggagcactactgctcctattgctatcgtgaggagctaagacgccgtcgggaagcccgcggcgcgagaccatag

SEQ ID NO: 314259 - DNA, 3063 bp, Artificial Sequence
  derived and/or modified sequence
gttctctcgctcaggtctctgcatgtagttgtcacttgcagctccatttccatcacgtggtaaaatgccctttctcttctttcctgcagatggatggtttctagtgtgcttccaaaccccacctcggctgagtgttgggcagcacttctacatgatcctatgactcttgatatggacgcagtcctgtcagactttgttcggtccacgggggcagaacctggtctggccagagacctgctggaaggcaaaaactgggacctgacagccgctctgagcgactatgagcagctccgccaggtgcacacagccaatctgccacatgtgttcaatgaagggcggggtcccaagcagccagagcgagagccacagcccgggcacaaggtggagcgaccctgcctgcagaggcaggacgacattgcccaagaaaagcggctttcccgggggatttcccacgccagctcagccatcgtctccctggcccggtcccacgtggcaagtgaatgcaacaacgagcagttccccctggagatgccaatctacacattccagttgccagacctgagcgtgtacagcgaggatttcaggagcttcatcgagcgggacttgatcgagcaggcaacaatggtggctttggagcaggcaggtcgcctgaactggtggtccactgtgtgcacgagctgtaaacggcttcttcctctggccacaacaggggatgggaactgccttttacatgctgcttcactgggaatgtgggggtttcacgaccgggacctggtgttacggaaagctctctataccatgatgaggacgggagctgagagggaagccctgaagcggaggtggaggtggcagcagacgcagcagaataaggagtcagggctggtgtacacagaggaggagtgggagcgggagtggacggagctgctgaagctggcctccagcgagccgcgcacacacttcagcaagaatggcggcacgggcgggggtgtggacaactctgaggaccccgtgtacgagagcctggaagagttccacgtttttgtcctagcccatatattaagaaggcccatcgttgttgtggcagatacaatgttaagagactcaggtggagaagcgttcgcacccatcccattcggagggatctacctgcccttggaggtccctcccaacagatgccactgctcgcctctggttctggcctatgatcaagcccatttctctgcccttgtgtccatggaacagagagaccagcaaagagaacaagccgtgatccccctgacggattctgagcacaagctgctgcctctgcactttgcagtggaccctggcaaggactgggagtgggggaaagacgacaacgataacgcccggctggcccaccttatcctgtcgctagaagccaagctgaaccttctgcacagctacatgaacgtgacgtggatccggatcccctccgagacacgggcgcccctggcacagccggagtctcccacggcctcggcaggggaggacgtgcagtccctggccgactcgctggactcggaccgcgattcggtgtgcagcaattctaacagcaataacggcaagaacggcaaggacaaggagaaggagaagcagcgcaaggagaaggacaagacgcgcgccgactccgtggccaacaagctgggcagcttcagcaagacgctgggcatcaagctgaagaaaaacatgggcggcctcggcggcctggtgcacggcaagatgggccgcgccaactccgccaatggcaagaacggggactcggccgagcggggcaaggagaagaaggccaagtcgcgcaagggcagcaaggaggagtctggtgcgtcggccagcacgtcgccgtcggaaaagaccacgccgtcgcccacagacaaggcagcgggcgcgtcgccggcggagaagggcggtgggccgcggggcgacgcctggaagtacagcacggatgtgaagctgagcctcaacatcctgcgcgccgccatgcagggggagcgcaagttcatcttcgccggcctgctgctcaccagccaccggcaccagttccacgaggagatgatcggctactacctgacgagcgcgcaggagcgcttcagcgccgagcaggagcagcggcgccgcgacgccgctactgcggccgccgctgccgccgccgccgccgccgccacggccaagcggccgccgcgcagaccggagacggagggcgtgccggtcccggagcgcgcctctccgggcccacccacgcagctggtgctcaagctcaaggagcggccgagccccgggcccgcggcagggcgtgcggcgcgggcggcggcgggcggcacggcctccccggggggaggcgcgcggcgtgcgagcgccagcggaccagtgcctggccgcagccccccggcgccagcgcgccagagcgtcatccacgtgcaggcgtcgggcgcgcgggacgaggcgtgcgcgccggccgtgggggcgctgcggccgtgcgccacgtacccgcagcagaaccgctcgctgtcgtcgcagagctacagcccggcgcgcgccgccgccctgcgcaccgtcaacacggtcgagtcgctggcgcgcgcggtgcccggggccctaccgggcgcggcggggacggcgggggcggccgagcacaagtcgcagacctacaccaacggcttcggcgccctgcgcgacggcctggagttcgccgacgccgacgcgccgaccgcgcgctcgaacggtgagtgcggccgtggcggcccggggccggtgcagcggcgctgccagcgcgagaactgtgcgttctacgggcgcgccgagaccgagcactactgctcctactgctaccgcgaggagctgcggcggcggcgcgaggcgcgcggggcccggccctgagcggcgcggcgcggcgcgggcggcgaggttctaccttcgaggatttcttttccattgtgtcggtgtcttttttacatgccctggtccaccggaaggccggcgcctcctctgtcagtgccgtgtacgtgtttggtcaaacgttcctaatggtgcctgaacctacactga

SEQ ID NO: 314260 - DNA, 724 bp, Artificial Sequence
  derived and/or modified sequence
ggggaggagaggccaccgggaccgcgagcggcagctggggagggggccgcggagcccgagcgggagcaaaacagctgatctggttttcctttaaagcgagagaaaatggaagtcgggtagcggcgactgcggcgctgcgggctggcggagcggagcggcgcggcgcggcagagttctcaggcgctgtggtctcaccttccactggggcaacaatgggccatttccagcagggacggcgcagtgttggcctgcatgcctgactgccacacacctccagaatcaggtgtctgaaaagtggcagtgacgaaagaagagactctcccggccgaggccccagtgcatggagagaaggaagaaatcaatttcctaattggtaccatatacatcagatggatggtttctagtgtgcttccaaaccccacctcggctgagtgttgggcagcacttctacatgatcctatgactcttgatatggacgcagtcctgtcagactttgttcggtccacgggggcagaacctggtctggccagagacctgctggaaggcaaaaactgggacctgacagccgctctgagcgactatgagcagctccgccaggtgcacacagccaatctgccacatgtgttcaatgaagggcggggtcccaagcagccagagcgagagccacagcccgggcacaaggtggagcgaccctgcctgcagaggcaggacgacattgcccaag

SEQ ID NO: 314261 - DNA, 2802 bp, Artificial Sequence
  derived and/or modified sequence
atggtgtcttcagttctgcccaacccgacatctgcggagtgttgggcagccctcctccatgacccgatgacactcgatatggacgctgtactatccgactttgtcagaagtaccggagccgaaccgggtttagcccgagatctgctagagggtaaaaattgggacctgacagccgcactttccgactacgagcagctgcgccaggtgcacaccgcgaacttgcctcacgtcttcaacgaagggagaggccctaagcaaccggaacgtgaacctcagccaggacacaaggtggaacggccttgtttacagagacaagacgatattgcacaggaaaaaaggctgtctcgaggaattagtcatgccagctccgctatcgtcagtcttgcccgttcccacgtggccagtgaatgcaacaatgaacagtttcccctggaaatgcctatctacacattccaactgccggatttgagcgtgtactcagaggacttcaggtcttttatcgaaagagacttgattgagcaagccacaatggtagccttagagcaggccggaaggctgaactggtggtctacagtgtgcaccagctgcaaacggctgctgccgctggctaccaccggggacgggaattgcctactccatgcagcgtcactggggatgtggggttttcacgacagagatttagtgctgaggaaagccctgtataccatgatgcgaaccggtgcagagcgcgaggctctgaaaaggcgctggcggtggcagcaaacccaacagaacaaagagagcggtctggtatatactgaagaggagtgggaacgcgagtggaccgagttactaaaactggcatcttccgagcccaggacgcacttcagcaagaacgggggaaccggagggggagttgacaactccgaggatccagtttatgagtcactggaggagtttcatgtattcgtgctggctcacatcctgcgcaggccaattgtcgtggtggccgacaccatgctgagagactcaggcggtgaggctttcgcgccaatcccctttgggggtatctatctgcctttggaagtgccccctaatcggtgccactgctctcctctggtgttggcctatgatcaggctcatttctccgcactcgtctcaatggagcagagagatcagcaacgggaacaggccgtcattcccctgaccgactccgagcataagctgttgcccctccattttgcggttgatcccggaaaagactgggagtggggcaaggatgataatgacaatgcacggttggcacatctgatcctttccctcgaagccaaattaaacctcctgcacagctacatgaatgtaacctggatcagaatcccttctgaaacccgagcaccgcttgcccagccagaatcccccaccgcatctgcgggtgaagatgttcagtcactggccgactccctggactcagaccgggactctgtgtgttcaaacagtaattccaataatggcaaaaatgggaaggataaggaaaaagagaagcagagaaaagagaaggacaagactcgcgcagattctgtggcaaacaagctgggatcctttagcaagaccctgggcataaagctgaaaaaaaacatgggcggtctgggcggacttgtgcacggcaaaatgggaagagccaactcggcaaacggaaaaaacggcgattccgcggagagaggcaaggagaaaaaagctaagtcaaggaagggatcgaaggaagagtcaggagcaagcgcatcgaccagcccaagtgagaaaactaccccttcacctaccgataaggctgccggtgcctcaccagcggaaaaagggggaggcccacgcggagacgcttggaagtattccacagacgttaaactgtccctgaacatccttcgcgcagccatgcaaggcgagagaaagtttatctttgctggcttactcctcacctcacaccgacatcaatttcacgaagagatgatcgggtattacttaaccagcgcacaggagcgcttcagtgcggagcaagaacagcgcagacgggatgctgccactgcggctgcggctgccgcagctgcagcggctgcaacagctaaacgccctcctcgtcggccagagacggagggcgttccagtaccagagcgggctagcccgggacctcctacgcagctcgttctgaagctgaaggaacgccctagtcccggaccagcagcaggcagagccgcacgagccgcagctggcggaaccgcatcaccaggcggaggtgcgcgacgtgcctcagcaagtggacccgttccaggccgttctcctccagcccctgctcggcagagtgtgatccatgtccaagcaagcggagccagggacgaggcctgtgcaccagccgtcggggcattgcggccttgcgcaacatatccccagcagaatcggagcctctcttcccagagctacagccctgccagagcagcagccttgagaacggtcaacacagttgagagccttgctcgcgctgtgcctggggctctgcctggcgctgccggaacagccggagctgcggaacacaagtcacagacgtacactaatgggttcggtgctctgcgggatggtctggaatttgcagacgccgacgcgccaacggcacgctctaacggagagtgcggcaggggcggacccggtcctgtgcaaagacgctgccaaagagagaactgcgctttttatggtagggcagagaccgagcactattgtagttactgctacagagaggagctccggcgtagaagggaagccagaggtgctcggccatag

SEQ ID NO: 314262 - DNA, 2802 bp, Artificial Sequence
  derived and/or modified sequence
atggtgagcagcgtgctgcccaaccccaccagcgccgagtgctgggccgccctgctgcacgaccccatgaccctggacatggacgccgtgctgagcgacttcgtgagaagcaccggcgccgagcccggcctggccagagacctgctggagggcaagaactgggacctgaccgccgccctgagcgactacgagcagctgagacaggtgcacaccgccaacctgccccacgtgttcaacgagggcagaggccccaagcagcccgagagagagccccagcccggccacaaggtggagagaccctgcctgcagagacaggacgacatcgcccaggagaagagactgagcagaggcatcagccacgccagcagcgccatcgtgagcctggccagaagccacgtggccagcgagtgcaacaacgagcagttccccctggagatgcccatctacaccttccagctgcccgacctgagcgtgtacagcgaggacttcagaagcttcatcgagagagacctgatcgagcaggccaccatggtggccctggagcaggccggcagactgaactggtggagcaccgtgtgcaccagctgcaagagactgctgcccctggccaccaccggcgacggcaactgcctgctgcacgccgccagcctgggcatgtggggcttccacgacagagacctggtgctgagaaaggccctgtacaccatgatgagaaccggcgccgagagagaggccctgaagagaagatggagatggcagcagacccagcagaacaaggagagcggcctggtgtacaccgaggaggagtgggagagagagtggaccgagctgctgaagctggccagcagcgagcccagaacccacttcagcaagaacggcggcaccggcggcggcgtggacaacagcgaggaccccgtgtacgagagcctggaggagttccacgtgttcgtgctggcccacatcctgagaagacccatcgtggtggtggccgacaccatgctgagagacagcggcggcgaggccttcgcccccatccccttcggcggcatctacctgcccctggaggtgccccccaacagatgccactgcagccccctggtgctggcctacgaccaggcccacttcagcgccctggtgagcatggagcagagagaccagcagagagagcaggccgtgatccccctgaccgacagcgagcacaagctgctgcccctgcacttcgccgtggaccccggcaaggactgggagtggggcaaggacgacaacgacaacgccagactggcccacctgatcctgagcctggaggccaagctgaacctgctgcacagctacatgaacgtgacctggatcagaatccccagcgagaccagagcccccctggcccagcccgagagccccaccgccagcgccggcgaggacgtgcagagcctggccgacagcctggacagcgacagagacagcgtgtgcagcaacagcaacagcaacaacggcaagaacggcaaggacaaggagaaggagaagcagagaaaggagaaggacaagaccagagccgacagcgtggccaacaagctgggcagcttcagcaagaccctgggcatcaagctgaagaagaacatgggcggcctgggcggcctggtgcacggcaagatgggcagagccaacagcgccaacggcaagaacggcgacagcgccgagagaggcaaggagaagaaggccaagagcagaaagggcagcaaggaggagagcggcgccagcgccagcaccagccccagcgagaagaccacccccagccccaccgacaaggccgccggcgccagccccgccgagaagggcggcggccccagaggcgacgcctggaagtacagcaccgacgtgaagctgagcctgaacatcctgagagccgccatgcagggcgagagaaagttcatcttcgccggcctgctgctgaccagccacagacaccagttccacgaggagatgatcggctactacctgaccagcgcccaggagagattcagcgccgagcaggagcagagaagaagagacgccgccaccgccgccgccgccgccgccgccgccgccgccgccaccgccaagagaccccccagaagacccgagaccgagggcgtgcccgtgcccgagagagccagccccggcccccccacccagctggtgctgaagctgaaggagagacccagccccggccccgccgccggcagagccgccagagccgccgccggcggcaccgccagccccggcggcggcgccagaagagccagcgccagcggccccgtgcccggcagaagcccccccgcccccgccagacagagcgtgatccacgtgcaggccagcggcgccagagacgaggcctgcgcccccgccgtgggcgccctgagaccctgcgccacctacccccagcagaacagaagcctgagcagccagagctacagccccgccagagccgccgccctgagaaccgtgaacaccgtggagagcctggccagagccgtgcccggcgccctgcccggcgccgccggcaccgccggcgccgccgagcacaagagccagacctacaccaacggcttcggcgccctgagagacggcctggagttcgccgacgccgacgcccccaccgccagaagcaacggcgagtgcggcagaggcggccccggccccgtgcagagaagatgccagagagagaactgcgccttctacggcagagccgagaccgagcactactgcagctactgctacagagaggagctgagaagaagaagagaggccagaggcgccagaccctag

SEQ ID NO: 314263 - protein, 581 aa, Artificial Sequence
  derived and/or modified sequence
MDIIKGNLDGISKPASNSRIRPGSRSSNASLEVLSTEPGSFKVDTASNLNSGKEDHSESSNTENRRTSNDDKQESCSEKIKLAEEGSDEDLDLVQHQIISECSDEPKLKELDSQLQDAIQKMKKLDKILAKKQRREKEIKKQGLEMRIKLWEEIKSAKYSEAWQSKEEMENTKKFLSLTAVSEETVGPSHEEEDTFSSVFHTQIPPEEYEMQMQKLNKDFTCDVERNESLIKSGKKPFSNTEKIELRGKHNQDFIKRNIELAKESRNPVVMVDREKKRLVELLKDLDEKDSGLSSSEGDQSGWVVPVKGYELAVTQHQQLAEIDIKLQELSAASPTISSFSPRLENRNNQKPDRDGERNMEVTPGEKILRNTKEQRDLHNRLREIDEKLKMMKENVLESTSCLSEEQLKCLLDECILKQKSIIKLSSERKKEDIEDVTPVFPQLSRSIISKLLNESETKVQKTEVEDADMLESEECEASKGYYLTKALTGHNMSEALVTEAENMKCLQFSKDVIISDTKDYFMSKTLGIGRLKRPSFLDDPLYGISVSLSSEDQHLKLSSPENTIADEQETKDAAEECKEP

SEQ ID NO: 314264 - DNA, 1746 bp, Artificial Sequence
  derived and/or modified sequence
atggacatcatcaagggcaacctggacggcatcagcaagcccgccagcaacagcagaatcagacccggcagcagaagcagcaacgccagcctggaggtgctgagcaccgagcccggcagcttcaaggtggacaccgccagcaacctgaacagcggcaaggaggaccacagcgagagcagcaacaccgagaacagaagaaccagcaacgacgacaagcaggagagctgcagcgagaagatcaagctggccgaggagggcagcgacgaggacctggacctggtgcagcaccagatcatcagcgagtgcagcgacgagcccaagctgaaggagctggacagccagctgcaggacgccatccagaagatgaagaagctggacaagatcctggccaagaagcagagaagagagaaggagatcaagaagcagggcctggagatgagaatcaagctgtgggaggagatcaagagcgccaagtacagcgaggcctggcagagcaaggaggagatggagaacaccaagaagttcctgagcctgaccgccgtgagcgaggagaccgtgggccccagccacgaggaggaggacaccttcagcagcgtgttccacacccagatcccccccgaggagtacgagatgcagatgcagaagctgaacaaggacttcacctgcgacgtggagagaaacgagagcctgatcaagagcggcaagaagcccttcagcaacaccgagaagatcgagctgagaggcaagcacaaccaggacttcatcaagagaaacatcgagctggccaaggagagcagaaaccccgtggtgatggtggacagagagaagaagagactggtggagctgctgaaggacctggacgagaaggacagcggcctgagcagcagcgagggcgaccagagcggctgggtggtgcccgtgaagggctacgagctggccgtgacccagcaccagcagctggccgagatcgacatcaagctgcaggagctgagcgccgccagccccaccatcagcagcttcagccccagactggagaacagaaacaaccagaagcccgacagagacggcgagagaaacatggaggtgacccccggcgagaagatcctgagaaacaccaaggagcagagagacctgcacaacagactgagagagatcgacgagaagctgaagatgatgaaggagaacgtgctggagagcaccagctgcctgagcgaggagcagctgaagtgcctgctggacgagtgcatcctgaagcagaagagcatcatcaagctgagcagcgagagaaagaaggaggacatcgaggacgtgacccccgtgttcccccagctgagcagaagcatcatcagcaagctgctgaacgagagcgagaccaaggtgcagaagaccgaggtggaggacgccgacatgctggagagcgaggagtgcgaggccagcaagggctactacctgaccaaggccctgaccggccacaacatgagcgaggccctggtgaccgaggccgagaacatgaagtgcctgcagttcagcaaggacgtgatcatcagcgacaccaaggactacttcatgagcaagaccctgggcatcggcagactgaagagacccagcttcctggacgaccccctgtacggcatcagcgtgagcctgagcagcgaggaccagcacctgaagctgagcagccccgagaacaccatcgccgacgagcaggagaccaaggacgccgccgaggagtgcaaggagccctag

SEQ ID NO: 314265 - DNA, 48 bp, Artificial Sequence
  derived and/or modified sequence
tgagagcaggagaccaaggacgccgccgaggagtgcaaggagccctag

SEQ ID NO: 314266 - DNA, 1746 bp, Artificial Sequence
  derived and/or modified sequence
atggatatcatcaaaggaaacctcgatggcatctctaagccagcatcgaacagtaggatcagacccggatccagaagctccaatgcgagtcttgaagtgctcagtactgaacctggcagtttcaaagtagataccgccagtaatctcaattcaggtaaggaggaccactcagagtctagcaacaccgagaaccgacgaacaagtaacgatgacaagcaggaaagttgttccgagaagatcaaactggcagaggagggatccgacgaagatctggatcttgtgcagcaccagatcatatcagaatgctcggatgaaccaaaattaaaagagctcgacagccagctccaggatgccatacagaaaatgaagaagctggacaaaatacttgccaagaaacagcgtagggaaaaagagattaaaaagcagggcctggagatgcggatcaaactgtgggaggaaattaagtcagccaagtactctgaggcctggcagagtaaagaggaaatggaaaatactaagaaatttctgagtctgacagccgtaagcgaagagacagtaggcccaagccatgaggaagaagataccttctcctcggtgtttcacactcaaatccccccggaagaatatgaaatgcagatgcagaaactcaataaagatttcacatgtgatgtcgagcggaacgaatcactgattaagagtggcaaaaagcccttctctaacacagaaaaaattgaattgcggggtaagcacaaccaggactttataaaaagaaacatcgaactcgctaaagagtctcggaaccccgtggtgatggtggaccgagagaaaaaaagactggtggagcttctgaaggatctggacgagaaggattccggattgagttcttcagagggcgatcagtcaggctgggttgtgccggtgaaagggtatgagttagcagtgactcaacaccagcagctcgctgagatcgatattaagctgcaggaactgtctgcggccagccccaccatatcctcgttttcacctcggcttgaaaatagaaacaaccagaagcctgacagggacggcgagaggaatatggaggtcacaccgggagaaaagatcctacgtaacaccaaagagcagagggacttgcacaatcggttaagagaaatcgatgaaaagctgaagatgatgaaggagaacgtgctggagtccaccagctgcctatctgaggaacagctcaagtgcctcctggacgagtgtattctgaaacaaaaaagcatcatcaaactgagcagcgaaagaaagaaagaagatatagaggatgttacgcccgtttttcctcagctttctagatccattatttcaaaactgctcaatgagagcgagactaaagtccaaaaaacagaagtggaagacgccgacatgcttgagtcggaggagtgtgaagccagcaaggggtactatctgacaaaagccttgaccgggcataacatgtccgaggccctggtgaccgaagccgagaacatgaagtgtctccagttctcgaaggatgttatcattagcgatactaaggactacttcatgagcaagaccctgggaattgggagactcaagcgaccatcattcctagacgatcccctgtacggaatttctgtcagcctgtcttcagaggaccagcacctcaagctgtcctcacccgagaataccatcgctgatgagcaggagaccaaggacgcagctgaggagtgcaaagaaccctag

SEQ ID NO: 314267 - DNA, 48 bp, Artificial Sequence
  derived and/or modified sequence
tgagagcaggagacgaaggatgctgcggaagagtgcaaagagccgtag

SEQ ID NO: 314268 - DNA, 2805 bp, Artificial Sequence
  derived and/or modified sequence
ggttgccagggaaacagcggtcccacaggcaggagggatctggaccggcggcttcttccactaccagagaggctgaggtggcgggagagacccctctcctctgggggtaagtggctggcgcggcgagtgtctgcggcgcgcttctgcggccatctgcgccctgactgacggcggccagttcctcgaggaggcccggcgggaaggatttcaatggatattataaagggaaacctagatggaatttcaaaaccagcttcaaattcaagaatacgccctgggagcagaagttcaaatgcttctttggaggtgctctcaacagaaccaggatccttcaaggtcgatactgcaagcaacttgaactctggtaaagaggaccactccgaaagcagtaatacagagaacagaagaactagtaatgatgataagcaggaaagctgctctgagaaaataaaattggctgaagagggatcagatgaagatctggatttggttcaacatcagataatctctgagtgttcagatgaacccaaattaaaagaattagattctcaacttcaagatgctattcagaagatgaaaaaacttgataaaatattggcaaagaaacaacgcagagaaaaagaaattaagaagcaaggtctagaaatgagaataaagctgtgggaagaaattaagtctgcaaaatatagtgaagcttggcaaagtaaagaggagatggaaaatacaaaaaaatttttatctttgactgctgtttctgaagaaactgttggtccttctcatgaggaggaagacaccttttcctcagtgtttcatactcaaatccctccagaagaatatgaaatgcagatgcagaaactcaataaagattttacctgtgatgtggaaagaaatgagtcattgatcaaatcaggaaagaaacctttctcgaatacagaaaagattgagctcaggggtaaacacaaccaggattttattaagagaaacattgagttggccaaggaatcaagaaacccagtggttatggttgacagagagaagaaaaggctggttgagcttttgaaggacttggatgagaaagattccgggctctccagttctgagggtgatcagtctggctgggtggtcccagtaaaaggatatgaacttgcagtcacccagcatcagcagcttgctgaaattgatataaaactccaagaactctctgcagcctcccctacaatttccagtttttctccaagacttgaaaatcggaataatcagaaacctgaccgtgatggtgaaagaaatatggaagtaactccaggagaaaagatacttaggaacaccaaagagcaacgcgatctgcataatcggctgagagagattgatgaaaagctgaaaatgatgaaggaaaatgtgttagagtccacatcatgtctctctgaagaacagttaaagtgtcttctggatgaatgcatacttaaacaaaaatccatcattaaactttcttcagaaagaaaaaaggaagacattgaggacgtaacacctgtgttcccccagctttccaggtccatcatctctaaattgctaaatgaatcagaaacaaaggtccagaaaactgaggtagaagatgcagatatgcttgagagtgaagaatgtgaagcttctaaaggctactatctcactaaagccttgactggacataacatgtcagaagctcttgtcactgaagcagagaatatgaaatgccttcaattttccaaggacgttattattagtgacacaaaagactattttatgtcgaagactcttggcattgggagactgaaaaggccctccttcttagatgatccactgtatggtatcagtgtgagcctttcatcagaagaccaacatctgaaactcagttctccagagaatacaatagcagatgagcaggagactaaagatgcagcagaagaatgtaaagaaccctaatcaaggacttgctgggtgtgcttttcagaaagttggtaatgaagttaaattaaatttcttattgaattatttgaattcaatgaatgcactgcagagactattctttattgattttgacatttggagtcgctctttgtggattatatttccttgatatttttgagacttggggtgtaattgttcagtggtttttgctcattaaaatttctgggaccattgtttataaatttattgctaatcttacagtattaggattcattataaaaaccaacattttaatgtatacgtgttagggtaaaactcgttgaagtgctgtgattgtcctgtattcaattttgtatgtttcacctctactgtgattcagacagatcatggtggtcactgggaatttttgctgtggccctgcttttccttcttcccacttgtctcatgtctgtgaaactggtacaacctgccataagatgaaatgaattgtctcaacaaagcaatattagaagagcctttactatcttattggtgatgacacgtttcttaagtaggagtttgagtgaattatttgatatattactttgttaataatagttaacaatagtttcttattttctttcagagtttgggccttttagattgcatcaaataaagatgagctactttaaaagacagtctgcggtactatttgaagagagatggtttagttacaagtcagtaacttagattcatgagaaaattttgtgttgacattccataagatgagttggcattagaattggaagtccagtttatttctgaatcaaaaaatgagcgggctattgtgctgcctttaataaaatttgagtgatgtatacataa

SEQ ID NO: 314269 - DNA, 103 bp, Artificial Sequence
  derived and/or modified sequence
atgagcaggagactaaagatgcagcagaagaatgtaaagaaccctaatcaaggacttgctgggtgtgcttttcagaaagttgagtttgggccttttagattgc

SEQ ID NO: 314270 - DNA, 1746 bp, Artificial Sequence
  derived and/or modified sequence
atggacatcatcaagggcaacctggatggcatcagcaagccagccagcaacagccgcatccggcccggcagccgcagcagcaatgccagcctggaggtgctgagcacagagcccggcagcttcaaggtggacacagccagcaacctgaacagcggcaaggaggaccacagcgagagcagcaacacagaaaatagaaggaccagcaatgatgacaagcaggagagctgcagcgagaagatcaagctggccgaggagggcagtgatgaggacctggacctggtgcagcaccagatcatcagtgaatgttctgatgagcccaagctgaaggagctggacagccagctgcaggatgccatccagaagatgaagaagctggacaagatcctggccaagaagcagaggcgggagaaggagatcaagaagcagggcctggagatgaggatcaagctgtgggaggagatcaagagcgccaagtacagcgaggcctggcagagcaaggaggagatggagaacaccaagaagttcctgagcctgacagctgtgtctgaggagaccgtgggccccagccatgaggaggaggacaccttcagcagcgtcttccacacccagatccccccagaggagtatgagatgcagatgcagaagctgaacaaggacttcacctgtgatgtggagagaaatgaaagcctcatcaagagcggcaagaagcccttcagcaacacagagaagattgagctgcggggcaagcacaaccaggacttcatcaagagaaatattgagctggccaaggagagcaggaaccctgtggtgatggtggaccgggagaagaagaggctggtggagctgctgaaggacctggatgagaaggacagcggcctgagcagcagcgagggggaccagagcggctgggtggtgcctgtgaagggctatgagctggccgtgacccagcaccagcagctggccgagattgacatcaagctgcaggagctgtctgctgccagccccaccatcagcagcttcagcccccggctggagaacagaaacaaccagaagccagacagagatggagagaggaacatggaggtgaccccaggagagaagatcctgaggaacaccaaggagcagagggacctgcacaaccggctgcgggagattgatgagaagctgaagatgatgaaggaaaatgtgctggagagcaccagctgcctgtctgaggagcagctgaagtgcctgctggatgagtgcatcctgaagcagaagagcatcatcaagctgagcagcgagaggaagaaggaggacattgaagatgtgacccctgtgttcccccagctgagccgcagcatcatcagcaagctgctgaatgaaagtgagaccaaggtgcagaagacagaggtggaggatgctgacatgctggagagtgaagaatgtgaggccagcaagggctactacctgaccaaggccctgaccggccacaacatgtctgaggccctggtgacagaagctgagaacatgaagtgcctgcagttcagcaaggatgtgatcatcagtgacaccaaggactacttcatgagcaagaccctgggcatcggccgcctgaagaggcccagcttcctggatgaccccctgtatggcatctctgtgtccctgagcagcgaggaccagcacctgaagctgagcagccctgagaacaccatcgcagatgagcaggagaccaaggatgctgctgaggagtgcaaggagccctag

SEQ ID NO: 314271 - DNA, 48 bp, Artificial Sequence
  derived and/or modified sequence
tgagagcaggagaccaaggatgctgctgaggagtgcaaggagccctag

SEQ ID NO: 314272 - DNA, 1746 bp, Artificial Sequence
  derived and/or modified sequence
atggacatcatcaagggcaacctggacggcatcagcaagcccgcctccaactccaggattaggccagggagccgctcctccaatgcatcacttgaagtgttgtcaactgaaccaggtagtttcaaggtggacaccgcctccaatcttaacagcggaaaggaggaccattccgagtcttccaacacagagaaccggaggaccagcaatgatgataagcaagaatcctgtagcgagaagattaagctcgcggaggaaggctcagacgaggatcttgacctggtacagcaccagatcatcagtgaatgtagcgacgagccaaagctgaaggaactggacagccaactccaggacgccatccaaaagatgaagaagctggacaagatcctggctaaaaaacagaggagggaaaaggaaatcaaaaaacagggtctagagatgaggattaaactttgggaggaaatcaagtcagccaagtattctgaagcctggcaaagtaaagaagaaatggaaaacaccaaaaaattcttgtccctaacggctgtttctgaggagacagtcgggccgtcccacgaggaagaagacactttttctagtgtattccacacccagattcctcccgaggagtacgagatgcagatgcagaagctcaacaaggacttcacatgtgacgtagagcggaatgagagcttgatcaagtctggtaaaaaacctttcagcaataccgagaagatagagttacgcgggaagcataatcaggattttattaaacgcaatatcgagttggctaaagagtcccggaatcctgttgtcatggtcgatcgggagaagaagcgcctcgttgagctgctgaaagatctggatgagaaggactctggcctgagttcttccgagggggaccagtctgggtgggtcgtgccagtcaaaggctacgagctggccgtaactcagcaccagcagctagccgagatcgacatcaagctgcaggagttgagcgcggcctccccgactatctcatcctttagtcccaggctggaaaataggaataatcagaaaccagaccgtgacggcgagcgcaatatggaagtgacacctggggagaagatactccggaatacgaaagaacaaagggacctgcacaatcgcctccgcgaaatcgacgagaagttgaagatgatgaaagagaatgtccttgaatctactagttgcttgagcgaggagcagctgaagtgtttactggatgagtgcattctgaaacaaaagtccatcatcaagttatcctcggagcgcaagaaagaggacatcgaggatgtcacacccgtgttcccacagctctctaggagcattatctcaaaactgctaaatgagagtgagaccaaggtgcagaaaacagaggttgaggatgcagacatgcttgagagcgaggagtgtgaggcttctaaggggtactacttgacaaaggccctgaccggccacaatatgtcagaagcactcgtgacagaagctgaaaacatgaaatgcttgcagttctccaaagatgtgattatttccgacaccaaggactacttcatgagcaagacattaggcattggtcgccttaaaagacccagttttcttgatgacccgttgtacggcatctccgtaagcctgtccagtgaggaccagcatctgaaactctcatcgccagaaaatactattgcagacgagcaagaaaccaaggacgctgccgaggagtgcaaggaaccatag

SEQ ID NO: 314273 - DNA, 1746 bp, Artificial Sequence
  derived and/or modified sequence
atggatattataaagggcaaccttgacggtatctctaaacctgcgagtaactcgcggatcaggccaggcagccggagttccaacgcgtcactggaggtgctgtccacagaaccgggaagtttcaaggtggataccgctagtaatctgaacagcggcaaggaggatcatagtgaaagcagtaacactgaaaacaggcgcacaagcaatgacgataaacaggaatcctgttccgagaaaattaaattggctgaagaaggaagcgatgaagatttggatttggtgcagcatcagatcatttcagagtgctcggatgaacctaagctcaaggaattggacagccagctccaggatgccatacaaaaaatgaagaagctcgataagattctagccaagaagcaacggagggagaaagaaataaagaaacagggcctagagatgcgcattaagctctgggaggaaatcaagtccgccaagtattcagaggcatggcagtccaaggaagagatggagaatacaaagaagtttttaagcctcacagcagtctccgaagaaaccgttggcccttcccatgaagaagaagatactttctctagtgtgttccacacccaaatccctccagaggaatacgagatgcagatgcagaagctgaacaaagactttacctgtgacgtggagcggaacgaaagccttatcaagagtgggaaaaagccctttagtaacaccgagaagatcgagttgagaggcaaacacaaccaggatttcatcaagcggaatatcgagctggccaaagaatcccgcaatccggtcgttatggtggacagggaaaagaagcggctggtggagctgctgaaagatctggatgagaaagactccggactcagctcctctgaaggcgatcagagcggatgggtagtaccagtgaagggatacgagttggccgttacccagcatcagcaacttgcagaaattgatattaagttacaagagctgagtgccgcttcccctacaatttcatcattttccccacgccttgaaaatcggaacaatcaaaagccggaccgggacggagagcggaacatggaggtgactccaggggaaaagatcctcaggaacacaaaagaacagcgggacctccataatcgcctccgggaaatcgatgagaaactgaagatgatgaaggaaaacgtattagagtccacaagctgtctcagcgaggagcagctcaagtgtctgctcgacgaatgtattctgaaacagaaaagtataataaaactgtcatctgagaggaagaaagaagatatcgaagacgtcacccctgtctttcctcaactgtcacgttctatcatatccaaattacttaacgaaagtgagactaaggtacagaaaacagaggtggaggacgctgatatgttggagtctgaggagtgcgaggcctccaagggatattatctgaccaaagcattgaccggacataacatgtcggaggctctggttacagaggccgaaaatatgaaatgcctgcagttttccaaggacgtgatcatttctgacaccaaggattatttcatgagcaagaccctcgggatagggagactgaaaagaccctcgttcctggacgatcccttatacggaattagtgtctccctgtcatctgaggatcagcacctgaagttgtcttctccagagaataccatcgctgatgaacaggaaactaaagatgccgctgaagagtgtaaggagccttag

SEQ ID NO: 314274 - DNA, 48 bp, Artificial Sequence
  derived and/or modified sequence
taagaacaggagactaaagatgccgcagaggagtgcaaggagccatag

SEQ ID NO: 314275 - protein, 15 aa, Artificial Sequence
  derived and/or modified sequence
  misc_feature (1)..(1): Xaa can be any naturally occurring amino acid
XEQETKDAAEECKEP

SEQ ID NO: 314276 - protein, 2492 aa, Artificial Sequence
  derived and/or modified sequence
MTTLLWVFVTLRVITAAVTVETSDHDNSLSVSIPQPSPLRVLLGTSLTIPCYFIDPMHPVTTAPSTAPLAPRIKWSRVSKEKEVVLLVATEGRVRVNSAYQDKVSLPNYPAIPSDATLEVQSLRSNDSGVYRCEVMHGIEDSEATLEVVVKGIVFHYRAISTRYTLDFDRAQRACLQNSAIIATPEQLQAAYEDGFHQCDAGWLADQTVRYPIHTPREGCYGDKDEFPGVRTYGIRDTNETYDVYCFAEEMEGEVFYATSPEKFTFQEAANECRRLGARLATTGQLYLAWQAGMDMCSAGWLADRSVRYPISKARPNCGGNLLGVRTVYVHANQTGYPDPSSRYDAICYTGEDFVDIPENFFGVGGEEDITVQTVTWPDMELPLPRNITEGEARGSVILTVKPIFEVSPSPLEPEEPFTFAPEIGATAFAEVENETGEATRPWGFPTPGLGPATAFTSEDLVVQVTAVPGQPHLPGGVVFHYRPGPTRYSLTFEEAQQACLRTGAVIASPEQLQAAYEAGYEQCDAGWLRDQTVRYPIVSPRTPCVGDKDSSPGVRTYGVRPSTETYDVYCFVDRLEGEVFFATRLEQFTFQEALEFCESHNATLATTGQLYAAWSRGLDKCYAGWLADGSLRYPIVTPRPACGGDKPGVRTVYLYPNQTGLPDPLSRHHAFCFRGISAVPSPGEEEGGTPTSPSGVEEWIVTQVVPGVAAVPVEEETTAVPSGETTAILEFTTEPENQTEWEPAYTPVGTSPLPGILPTWPPTGAATEESTEGPSATEVPSASEEPSPSEVPFPSEEPSPSEEPFPSVRPFPSVELFPSEEPFPSKEPSPSEEPSASEEPYTPSPPVPSWTELPSSGEESGAPDVSGDFTGSGDVSGHLDFSGQLSGDRASGLPSGDLDSSGLTSTVGSGLPVESGLPSGDEERIEWPSTPTVGELPSGAEILEGSASGVGDLSGLPSGEVLETSASGVGDLSGLPSGEVLETTAPGVEDISGLPSGEVLETTAPGVEDISGLPSGEVLETTAPGVEDISGLPSGEVLETTAPGVEDISGLPSGEVLETTAPGVEDISGLPSGEVLETTAPGVEDISGLPSGEVLETAAPGVEDISGLPSGEVLETAAPGVEDISGLPSGEVLETAAPGVEDISGLPSGEVLETAAPGVEDISGLPSGEVLETAAPGVEDISGLPSGEVLETAAPGVEDISGLPSGEVLETAAPGVEDISGLPSGEVLETAAPGVEDISGLPSGEVLETAAPGVEDISGLPSGEVLETAAPGVEDISGLPSGEVLETAAPGVEDISGLPSGEVLETAAPGVEDISGLPSGEVLETAAPGVEDISGLPSGEVLETAAPGVEDISGLPSGEVLETAAPGVEDISGLPSGEVLETAAPGVEDISGLPSGEVLETTAPGVEEISGLPSGEVLETTAPGVDEISGLPSGEVLETTAPGVEEISGLPSGEVLETSTSAVGDLSGLPSGGEVLEISVSGVEDISGLPSGEVVETSASGIEDVSELPSGEGLETSASGVEDLSRLPSGEEVLEISASGFGDLSGLPSGGEGLETSASEVGTDLSGLPSGREGLETSASGAEDLSGLPSGKEDLVGSASGDLDLGKLPSGTLGSGQAPETSGLPSGFSGEYSGVDLGSGPPSGLPDFSGLPSGFPTVSLVDSTLVEVVTASTASELEGRGTIGISGAGEISGLPSSELDISGRASGLPSGTELSGQASGSPDVSGEIPGLFGVSGQPSGFPDTSGETSGVTELSGLSSGQPGISGEASGVLYGTSQPFGITDLSGETSGVPDLSGQPSGLPGFSGATSGVPDLVSGTTSGSGESSGITFVDTSLVEVAPTTFKEEEGLGSVELSGLPSGEADLSGKSGMVDVSGQFSGTVDSSGFTSQTPEFSGLPSGIAEVSGESSRAEIGSSLPSGAYYGSGTPSSFPTVSLVDRTLVESVTQAPTAQEAGEGPSGILELSGAHSGAPDMSGEHSGFLDLSGLQSGLIEPSGEPPGTPYFSGDFASTTNVSGESSVAMGTSGEASGLPEVTLITSEFVEGVTEPTISQELGQRPPVTHTPQLFESSGKVSTAGDISGATPVLPGSGVEVSSVPESSSETSAYPEAGFGASAAPEASREDSGSPDLSETTSAFHEANLERSSGLGVSGSTLTFQEGEASAAPEVSGESTTTSDVGTEAPGLPSATPTASGDRTEISGDLSGHTSQLGVVISTSIPESEWTQQTQRPAETHLEIESSSLLYSGEETHTVETATSPTDASIPASPEWKRESESTAADQEVCEEGWNKYQGHCYRHFPDRETWVDAERRCREQQSHLSSIVTPEEQEFVNNNAQDYQWIGLNDRTIEGDFRWSDGHPMQFENWRPNQPDNFFAAGEDCVVMIWHEKGEWNDVPCNYHLPFTCKKGTVACGEPPVVEHARTFGQKKDRYEINSLVRYQCTEGFVQRHMPTIRCQPSGHWEEPQITCTDPTTYKRRLQKRSSRHPRRSRPSTAH

SEQ ID NO: 314277 - DNA, 7479 bp, Artificial Sequence
  derived and/or modified sequence
atgaccacgctactttgggtgttcgtgaccctgagggtcattacagccgcggtgacagtggagacctctgaccacgacaactccttatcagtctcgattccgcagcctagccctttacgcgtgcttcttggcacctcattaactataccctgctattttattgatccaatgcaccctgtaactacggcgccgtctaccgctcccctggcccctaggatcaagtggagcagggtaagcaaagagaaagaggtggttttgctggtggccaccgagggccgggtccgcgtgaattctgcctatcaggacaaggtgtcacttccaaactacccagccatcccaagtgacgccacactggaggtccaaagcctacggtccaatgattccggcgtgtacaggtgtgaagtgatgcatgggattgaagattctgaggctacattggaggtcgtcgtgaaagggatcgtgtttcactatcgggcgatctccacccgctacaccctggacttcgaccgggcacaaagagcctgcctccagaactctgcaattatagcaacccctgaacagctgcaagcagcctatgaagacggattccaccagtgcgacgcgggctggttggcagatcaaaccgtaaggtatccaattcatacaccgcgtgagggatgctacggagacaaagacgagtttccaggcgtgagaacttatggcatacgggacacaaatgagacctacgacgtgtattgtttcgccgaggaaatggaaggtgaagtgttctatgctactagtcctgagaagttcactttccaggaggccgccaacgaatgtcgcagactcggagcacgcctcgccaccaccggtcagctgtacctagcctggcaggccggaatggacatgtgctccgctgggtggctggctgatcggtccgtgagatatccaattagcaaggctcggccaaactgcggtggtaacctgcttggagtaaggaccgtttacgtgcacgcaaatcaaactgggtacccagatccaagctcccgctacgacgcaatttgctacacaggggaggatttcgtggatattcccgagaatttcttcggcgtcgggggagaagaggacattacagtgcagaccgtcacctggcccgacatggaacttcctttaccaagaaacatcactgagggagaggctcgcgggtctgtgattctgactgtaaagcccattttcgaggttagcccatctcctcttgagcctgaggagcccttcaccttcgctccggaaatcggagccaccgctttcgcggaggtggaaaatgaaactggagaggccacccgcccgtgggggtttcccacacccggcctgggcccagccacagccttcacctccgaagacctagtggtgcaagttaccgctgttcccgggcagccacacttaccagggggagtggtttttcactaccggcccggccctactcggtacagcttgacttttgaagaggcgcagcaggcatgtttgaggaccggcgccgttatagcctccccggagcagctgcaagcagcctacgaagcaggctatgagcagtgtgacgctggctggcttcgagaccagaccgttcggtaccctatcgtttcacctagaaccccttgcgtcggtgacaaggatagtagtcctggagttcgcacatatggcgtgagacccagcactgagacttacgacgtgtattgcttcgttgacaggctggagggcgaagtgttcttcgcaactcgactggaacagttcaccttccaagaagccctggagttctgtgagtcccacaatgcaactctggcaacaactggtcagctctacgctgcatggtctcgcgggcttgataagtgctatgctggttggttagcagacggcagtttgaggtatccaatcgtgactcccaggcccgcttgcggaggcgataaaccgggcgtgaggacagtgtacctgtatcctaatcagacaggactcccggacccactgagtagacaccacgcattctgctttcggggcatcagcgctgtgccctcacctggagaagaggagggcggaactcccacgtcccctagtggagtggaagaatggatcgtcacccaagtggttcctggagttgccgctgtcccggtggaggaggagacaaccgcggttccatccggggaaaccacagcaattctggaattcactactgagccggaaaaccagaccgaatgggaacctgcctacacgcctgtgggaactagtcccttaccagggatcctcccaacctggccaccaactggagccgcaaccgaagagtcaacggaggggccttctgccaccgaggtgccttccgcttcagaggagcccagcccatccgaagtccctttccccagcgaggagccctccccctctgaagagcctttccctagcgtccgaccctttccttccgttgaattgttccccagcgaggaaccttttcctagtaaggaaccttctccatcggaagaaccaagtgcgtctgaggaaccctatacgccctctcccccagtaccaagctggacagagctgccttctagtggagaggagtccggcgcacccgacgttagtggcgacttcacaggtagcggagatgtatccggccacctggacttcagcggccaattatctggggacagagccagtggcctgccctccggcgaccttgactcaagcgggctgacttcaactgtcggcagtggcctccccgttgaaagtgggttgccctccggcgatgaagagcgtatcgaatggccaagcacgcctacagtcggggaactgccttccggggcagaaattctggaagggagcgcaagcggcgttggagacctgagtggacttccttccggggaagtcctggaaacctctgcctcgggagtgggcgacctctctgggctgccttcaggagaagtcctggagaccacagccccaggagtggaggacatttccggtttgccttccggggaggtactggagacaacagctccaggcgtggaggatatctctggtctcccttcaggggaggtgcttgaaactaccgctccaggcgtggaagatatctcaggccttccaagcggtgaggtcctggagaccaccgcaccaggcgtagaagatattagcgggctgcccagcggagaggtgctggagaccactgcaccaggtgtggaagacatttcaggactgccctccggagaagtgctggagactactgcccccggggttgaagacattagcggactacctagcggcgaagtgttagagaccgctgccccaggtgttgaggacatatccgggctaccctccggggaggtgcttgagaccgccgcgcccggtgtcgaggatattagcggcctgccaagcggggaggtgctggaaaccgcggcaccaggcgtcgaggatatctctgggctgcccagcggcgaggtgttggaaacagctgctcccggagtggaggacatcagcggactaccttctggcgaagtgctggaaacagccgcccctggtgttgaagacatctcgggactgcctagcggtgaggtcctggaaacggcagctccgggagtggaagacatttcaggcctaccgtctggagaggtgctcgaaacagctgctcctggggtggaagatatcagcgggttgccaagcggcgaagttctggaaaccgctgcgcctggagtcgaggatatcagtggtctgccgtctggcgaggttctggagacagccgccccaggggtcgaagatatatccggcctgcccagtggtgaagttttggagaccgccgcacccggcgttgaggatatcagcgggcttccaagtggagaagtgctggaaacggctgccccaggcgtggaagacatttctggactgccaagcggggaggtcctggagacagccgctcccggggttgaagacatttcgggccttccaagcggggaggtcctggagaccgccgcccccggcgttgaggacatctcaggattaccctctggagaagtgctcgagactgcagccccgggggtcgaagatatcagcgggctgccctctggagaagttctagaaacagcggcacctggtgtggaggacatctctggcttgcctagcggcgaagtcttagagactgctgcaccaggggtagaggacatcagcggcctgccgtccggagaggtactggagacaacggcccccggtgtggaggaaatctcgggtttgccgagcggggaggttctcgagacgactgcacctggagtcgacgaaatctccggtctcccctccggggaggtgctggaaacgactgcccctggagtggaagaaattagcggactgcccagcggagaagttttggagacttccacttccgccgttggcgacctgagcggtttgccctcaggaggggaggttttagaaattagcgtaagcggcgtggaagatattagtggcctgcctagtggagaggtcgtggaaacatcagcatcaggaattgaggacgtgagcgagttgccttccggcgaagggctcgagacatccgcgagcggcgtggaggatcttagccgacttcctagtggcgaggaagtcttggaaatcagtgcctctggatttggggacctatctggcctccctagcggcggcgagggcctcgagacatctgcctctgaggttggtaccgatctgagtggattaccaagcggaagggagggacttgaaacctccgcctccggcgcagaggacctgtcaggccttcctagcggcaaagaggatctggtcggctcagcttcaggtgatctcgacttggggaaactcccgagtgggacactggggtccgggcaggctccagagacttcgggcctaccctccggatttagtggagagtactcaggggtcgacctgggctcaggaccgccaagtggcctcccagatttcagtgggctcccttcggggtttcccactgtttcgctggtggattctactctggtggaggtggtcacagcatctacagcatcggagctggagggacgtggcaccatcgggatcagcggcgcgggggagatcagtggcttgccgtcaagtgaactcgacatttcaggacgggctagtggcctgccgtcagggaccgaactctctggccaggcaagcggatcacctgacgtgtcaggcgaaatcccaggtctgtttggagtgtcagggcagccatccggttttcccgacacatctggtgagaccagtggcgtgactgagctgtccggactgtcttctggtcaaccgggcattagtggcgaagcgagtggagtgctatatggaacgagccagccttttggtatcaccgacctgtccggcgaaacaagcggggtgcctgacttgagcgggcagccctccggcctaccaggtttcagcggtgccaccagtggtgtacctgatctagtcagtggcacaacaagtggcagcggcgaaagctctgggatcacattcgtggacacctcacttgtggaggtggctcccacaacctttaaggaggaagaaggtctcggttctgttgagctgtcaggcctccccagcggtgaggcggacctctctggcaagagtggcatggttgatgtatccggtcagttctccggcaccgtagattcttcaggctttacaagtcagacgccggagttttcagggctgccaagtggcattgccgaagtcagtggcgagtcgagcagagctgaaatcggatcttcactgcccagtggagcctactacggcagcgggacccctagttcttttcccacagtctccctagtcgatcggacattagtcgagtctgtaacacaagcgcccactgcccaggaagccggagagggaccgtcaggcatccttgagctgtcaggagcgcactccggagcccccgacatgtctggggagcactccggctttctcgatttgtccgggctgcagagcggactaatcgagccatccggcgaaccaccagggacgccctattttagcggggacttcgcttcgactaccaacgtgtccggtgagtctagtgtggcaatgggaaccagtggcgaggccagtgggctgccggaggtgacccttataacaagcgaattcgtcgagggcgtgactgaaccaactatctctcaggagttgggacagaggcctccggtgacacacacgcctcagctctttgaatcaagcggcaaggtgtcaactgcaggagacatttctggcgcgacaccagttctccccggctctggggtagaggtctcctctgttcctgagtcttcatctgaaaccagcgcctatccggaagctggattcggagcaagtgctgcccctgaagcctcaagagaggatagcggtagtcctgacctgagtgagacaacgtccgcattccacgaggctaatctcgaacgatcctccggactaggcgtgtctggctctacactgaccttccaggagggcgaggctagtgcagccccggaagtctctggggaatccacaacgaccagcgatgtgggtactgaggccccaggactcccatccgcaacccctaccgcaagtggtgacagaacagaaatctccggagacctcagtggccacacaagtcagttgggggtcgttatctccacgtccatacctgaatccgagtggacacagcaaacccagcgccctgctgaaacacatctagaaatcgaatcttcgagtctcctgtattctggcgaggaaactcacaccgtggagacagcaacatcccccaccgatgcttctatccccgcatcacccgagtggaaacgagaatcagaaagtactgcagcggatcaagaagtgtgcgaagagggctggaataagtaccagggacactgctacagacactttccagacagggaaacatgggtggatgcagaacggagatgtagggagcagcaaagtcacctgagcagtattgttacacccgaagaacaggaatttgtgaataataacgcccaagactaccagtggatcggtctgaacgatagaaccattgaaggtgatttccgatggtccgatggacatcctatgcagttcgagaattggcggcctaaccagcccgacaatttctttgcagccggggaggattgcgtggttatgatctggcatgagaaaggggaatggaacgacgtgccatgcaattaccacttgccattcacttgcaagaagggaactgtggcctgcggcgagcctccagtggtggaacacgctcgaacattcgggcagaagaaagatagatacgagatcaattccctggtgcggtatcaatgcactgaaggctttgttcagcgacatatgcctactattcggtgtcagccaagcggtcactgggaggagccacaaattacctgcacagacccaactacctataagagacggttacagaaacgatcctcgcgtcatccaagaaggtcccggccatccactgcgcactag

SEQ ID NO: 314278 - DNA, 7479 bp, Artificial Sequence
  derived and/or modified sequence
atgaccaccctgctgtgggtgtttgtgaccctgcgggtcatcacagctgctgtgacagtggagaccagtgaccatgacaacagcctgtctgtgtccatcccccagcccagccccctgcgggtgctgctgggcaccagcctgaccatcccctgctacttcatcgaccccatgcaccctgtgaccacagcccccagcacagcccccctggccccccgcatcaagtggagccgggtgtccaaggagaaggaggtggtgctgctggtggccacagagggccgggtgcgggtgaacagcgcctaccaggacaaggtgtccctgcccaactacccagccatccccagtgatgccaccctggaggtgcagagcctgcggagcaatgacagcggcgtgtaccgctgtgaggtgatgcatggaattgaggacagcgaggccaccctggaggtggtggtgaagggcatcgtgttccactaccgggccatcagcacccgctacaccctggactttgaccgggcccagagggcctgcctgcagaacagcgccatcatcgccaccccagagcagctgcaggccgcctatgaagatggcttccaccagtgtgatgctggctggctggccgaccagacagtgcgctaccccatccacaccccccgggagggctgctatggagacaaggatgagttccctggggtgaggacctacggcatccgggacaccaatgagacctatgatgtgtactgctttgctgaggagatggagggggaggtgttctacgccaccagccctgagaagttcaccttccaggaggccgccaatgaatgtcggcggctgggcgcccggctggccaccaccggccagctgtacctggcctggcaggccggcatggacatgtgcagcgctggctggctggccgacagatctgtgcgctaccccatcagcaaggcccggcccaactgtggcggcaacctgctgggcgtgaggacagtgtatgtgcacgccaaccagacaggctacccagaccccagcagccgctatgatgccatctgctacaccggggaggactttgtggacatccctgagaacttcttcggcgtgggcggggaggaggacatcaccgtgcagacagtgacctggccagacatggagctgcccctgcccaggaacatcacagaaggagaggcccggggcagcgtcatcctgactgtgaagcccatctttgaggtgagccccagccccctggagcctgaggagcccttcacctttgcccctgagatcggggccacagcctttgctgaggtggagaatgagaccggggaggccacccggccctggggcttccccaccccaggcctgggccctgccacagccttcaccagcgaggacctggtggtgcaggtgacagctgtgcccggccagccccacctgcctggaggagtggtgttccactaccggcccggccccacccgctacagcctgacctttgaggaggcccagcaggcctgcctgaggactggagctgtgattgccagccctgagcagctgcaggccgcctatgaagctggctatgagcagtgtgatgctggctggctgcgggaccagacagtgcgctaccccatcgtgagccccaggaccccctgtgtgggggacaaggacagcagccctggggtgaggacctacggcgtgcggcccagcacagagacctatgatgtgtactgctttgtggaccggctggagggggaggtgttctttgccacccggctggagcagttcaccttccaggaggccctggagttctgtgagagccacaatgccaccctggccaccaccggccagctgtatgctgcctggagccggggcctggacaagtgctacgccggctggctggctgatggcagcctgcgctaccccatcgtgacccccaggcctgcctgtggcggggacaagccaggagtgaggacagtgtacctgtaccccaaccagacaggcctgcctgaccccctgagccgccaccacgccttctgcttccggggcatctctgctgtgcccagccctggagaggaggagggcggcacccccaccagccccagcggcgtggaggagtggatcgtgacccaggtggtgcctggggtggccgctgtgcctgtggaggaggagaccacagctgtgcccagcggggagaccacagccatcctggagttcaccacagagcctgagaaccagacagagtgggagcccgcctacacccctgtgggcaccagccccctgcccggcatcctgcccacctggccacccaccggggccgccacagaggagagcacagagggccccagcgccacagaggtgcccagcgccagcgaggagcccagccccagcgaggtgcccttccccagcgaggagcccagccccagcgaggagcccttccccagcgtgcggcccttccccagcgtggagctgttccccagcgaggagcccttccccagcaaggagcccagccccagcgaggagcccagcgccagcgaggagccctacacccccagcccccctgtgcccagctggacagagctgcccagcagtggagaggagagcggggccccagatgtgtctggggacttcaccggcagcggagatgtgtctggccacctggacttcagcggccagctgagcggggaccgggccagcggcctgcccagcggggacctggacagcagcggcctgaccagcacagtgggcagcggcctgcctgtggagagcggcctgcccagcggagatgaggagcgcatcgagtggcccagcacccccaccgtgggggagctgcccagcggggctgagatcctggagggcagcgccagcggcgtgggggacctgagcggcctgcccagcggggaggtgctggagaccagcgccagcggcgtgggggacctgagcggcctgcccagcggggaggtgctggagaccacagcccctggggtggaggacatcagcggcctgcccagcggggaggtgctggagaccacagcccctggggtggaggacatcagcggcctgcccagcggggaggtgctggagaccacagcccctggggtggaggacatcagcggcctgcccagcggggaggtgctggagaccacagcccctggggtggaggacatcagcggcctgcccagcggggaggtgctggagaccacagcccctggggtggaggacatcagcggcctgcccagcggggaggtgctggagaccacagcccctggggtggaggacatcagcggcctgcccagcggggaggtgctggagacagctgcccctggggtggaggacatcagcggcctgcccagcggggaggtgctggagacagctgcccctggggtggaggacatcagcggcctgcccagcggggaggtgctggagacagctgcccctggggtggaggacatcagcggcctgcccagcggggaggtgctggagacagctgcccctggggtggaggacatcagcggcctgcccagcggggaggtgctggagacagctgcccctggggtggaggacatcagcggcctgcccagcggggaggtgctggagacagctgcccctggggtggaggacatcagcggcctgcccagcggggaggtgctggagacagctgcccctggggtggaggacatcagcggcctgcccagcggggaggtgctggagacagctgcccctggggtggaggacatcagcggcctgcccagcggggaggtgctggagacagctgcccctggggtggaggacatcagcggcctgcccagcggggaggtgctggagacagctgcccctggggtggaggacatcagcggcctgcccagcggggaggtgctggagacagctgcccctggggtggaggacatcagcggcctgcccagcggggaggtgctggagacagctgcccctggggtggaggacatcagcggcctgcccagcggggaggtgctggagacagctgcccctggggtggaggacatcagcggcctgcccagcggggaggtgctggagacagctgcccctggggtggaggacatcagcggcctgcccagcggggaggtgctggagacagctgcccctggggtggaggacatcagcggcctgcccagcggggaggtgctggagacagctgcccctggggtggaggacatcagcggcctgcccagcggggaggtgctggagaccacagcccctggggtggaggagatcagcggcctgcccagcggggaggtgctggagaccacagcccctggggtggatgagatcagcggcctgcccagcggggaggtgctggagaccacagcccctggggtggaggagatcagcggcctgcccagcggggaggtgctggagaccagcaccagcgctgtgggggacctgagcggcctgcccagcggcggggaggtgctggagatctctgtgtctggagtggaggacatcagcggcctgcccagcggggaggtggtggagaccagcgccagcggcattgaagatgtgtctgagctgcccagcggggagggcctggagaccagcgccagcggcgtggaggacctgagccggctgcccagcggggaggaggtgctggagatcagcgccagcggctttggagacctgagcggcctgcccagcggcggggagggcctggagaccagcgccagcgaggtgggcacagacctgagcggcctgcccagcggccgggagggcctggagaccagcgccagcggggctgaggacctgagcggcctgcccagcggcaaggaggacctggtgggcagcgccagcggggacctggacctgggcaagctgcccagcggcaccctgggcagcggccaggcccctgagaccagcggcctgcccagcggcttcagcggggagtacagcggcgtggacctgggcagcggcccccccagcggcctgcctgacttcagcggcctgcccagcggcttccccaccgtgtccctggtggacagcaccctggtggaggtggtgacagccagcacagccagcgagctggagggccggggcaccatcggcatctctggagctggggagatcagcggcctgcccagcagcgagctggacatcagcggccgggccagcggcctgcccagcggcacagagctgagcggccaggccagcggcagcccagatgtgtctggagagatccctggcctgtttggagtgtctggccagcccagcggcttcccagacaccagcggggagaccagcggcgtgacagagctgagcggcctgagcagcggccagcccggcatcagcggggaggccagcggcgtgctgtatggcaccagccagcccttcggcatcacagacctgagcggggagaccagcggcgtgcctgacctgagcggccagcccagcggcctgcccggcttcagcggggccaccagcggcgtgcctgacctggtgtctggcaccaccagcggcagcggggagagcagcggcatcacctttgtggacaccagcctggtggaggtggcccccaccaccttcaaggaggaggagggcctgggctctgtggagctgagcggcctgcccagcggggaggccgacctgagcggcaagagcggcatggtggatgtgtctggccagttctctggaacagtggacagcagcggcttcaccagccagaccccagagttcagcggcctgcccagcggcattgctgaggtgtctggagagagcagcagagctgagatcggcagcagcctgcccagcggggcctactacggcagcggcacccccagcagcttccccaccgtgtccctggtggacaggaccctggtggagagcgtgacccaggcccccacagcccaggaggccggggagggccccagcggcatcctggagctgagcggggcccacagcggggccccagacatgtctggagagcacagcggcttcctggacctgagcggcctgcagagcggcctcatcgagcccagcggggagcccccaggcaccccctacttcagcggggactttgccagcaccaccaacgtgtctggagagagctctgtggccatgggcaccagcggggaggccagcggcctgcctgaggtgaccctcatcaccagcgagtttgtggagggcgtgacagagcccaccatcagccaggagctgggccagaggcctcctgtgacccacaccccccagctgtttgagagcagcggcaaggtgtccacagctggggacatcagcggggccacccctgtgctgcccggcagcggcgtggaggtgtcctctgtgcctgagagcagcagcgagaccagcgcctacccagaggccggctttggagccagcgctgcccctgaggccagccgggaggacagcggcagcccagacctgtctgagaccaccagcgccttccacgaggccaacctggagaggagcagcggcctgggcgtgtctggcagcaccctgaccttccaggagggggaggccagcgctgcccctgaggtgtctggagagagcaccaccaccagtgatgtgggcacagaggcccctggcctgcccagcgccacccccacagccagcggggacagaacagagatcagcggggacctgagcggccacaccagccagctgggcgtggtgatcagcaccagcatccctgagagcgagtggacccagcagacccagaggcctgctgagacccacctggagattgagagcagcagcctgctgtacagcggggaggagacccacacagtggagacagccaccagccccacagatgccagcatcccagccagccctgagtggaagcgggagagcgagagcacagctgctgaccaggaggtgtgtgaggagggctggaacaagtaccagggccactgctaccgccacttcccagaccgggagacctgggtggatgctgagcggcgctgccgggagcagcagagccacctgagcagcatcgtgaccccagaggagcaggagtttgtgaacaacaatgcccaggactaccagtggattggcctgaatgacaggaccatcgagggggacttccgctggagcgatggccaccccatgcagtttgagaactggaggcccaaccagcctgacaacttctttgctgctggggaggactgtgtggtgatgatctggcatgagaagggggagtggaatgatgtgccctgcaactaccacctgcccttcacctgcaagaagggcaccgtggcctgtggggagccccctgtggtggagcacgcccggaccttcggccagaagaaggacagatatgagatcaacagcctggtgcgctaccagtgcacagagggctttgtgcagaggcacatgcccaccatccgctgccagcccagcggccactgggaggagccccagatcacctgcacagaccccaccacctacaagaggcggctgcagaagaggagcagccgccacccccggcgcagccggcccagcacagcccactag

SEQ ID NO: 314279 - DNA, 7628 bp, Artificial Sequence
  derived and/or modified sequence
gccaggtgtgtgggactgaagttcttggagaagggagtccaactcttcaaggtgaactatgaccactttactctgggttttcgtgactctgagggtcatcactgcagctgtcactgtagaaacttcagaccatgacaactcgctgagtgtcagcatcccccaaccgtccccgctgagggtcctcctggggacctccctcaccatcccctgctatttcatcgaccccatgcaccctgtgaccaccgccccttctaccgccccactggccccaagaatcaagtggagccgtgtgtccaaggagaaggaggtagtgctgctggtggccactgaagggcgcgtgcgggtcaacagtgcctatcaggacaaggtctcactgcccaactacccggccatccccagtgacgccaccttggaagtccagagcctgcgctccaatgactctggggtctaccgctgcgaggtgatgcatggcatcgaggacagcgaggccaccctggaagtcgtggtgaaaggcatcgtgttccattacagagccatctctacacgctacaccctcgactttgacagggcgcagcgggcctgcctgcagaacagtgccatcattgccacgcctgagcagctgcaggccgcctacgaagacggcttccaccagtgtgacgccggctggctggctgaccagactgtcagataccccatccacactccccgggaaggctgctatggagacaaggatgagtttcctggtgtgaggacgtatggcatccgagacaccaacgagacctatgatgtgtactgcttcgccgaggagatggagggtgaggtcttttatgcaacatctccagagaagttcaccttccaggaagcagccaatgagtgccggcggctgggtgcccggctggccaccacgggccagctctacctggcctggcaggctggcatggacatgtgcagcgccggctggctggccgaccgcagcgtgcgctaccccatctccaaggcccggcccaactgcggtggcaacctcctgggcgtgaggaccgtctacgtgcatgccaaccagacgggctaccccgacccctcatcccgctacgacgccatctgctacacaggtgaagactttgtggacatcccagaaaacttctttggagtggggggtgaggaggacatcaccgtccagacagtgacctggcctgacatggagctgccactgcctcgaaacatcactgagggtgaagcccgaggcagcgtgatccttaccgtaaagcccatcttcgaggtctcccccagtcccctggaacccgaggagcccttcacgtttgcccctgaaataggggccactgccttcgctgaggttgagaatgagactggagaggccaccaggccctggggctttcccacacctggcctgggccctgccacggcattcaccagtgaggacctcgtcgtgcaggtgaccgctgtccctgggcagccgcatttgccagggggggtcgtcttccactaccgcccgggacccacccgctactcgctgacctttgaggaggcacagcaggcctgcctgcgcacgggggcggtcattgcctcgccggagcagctccaggccgcctacgaagcaggctatgagcagtgtgacgccggctggctgcgggaccagaccgtcagataccccattgtgagcccccggaccccatgcgtgggtgacaaggacagcagcccaggggtcaggacctatggcgtgcgcccatcaacagagacctacgatgtctactgctttgtagacagacttgagggggaggtgttcttcgccacacgccttgagcagttcaccttccaggaagcactggagttctgtgaatctcacaatgctacgctggccaccacgggccagctctacgccgcctggagccgcggcctggacaagtgctatgccggctggctggccgacggcagcctccgctaccccatcgtcaccccaaggcctgcctgcggtggggacaagccaggcgtgagaacggtctacctctaccctaaccagacgggcctcccagacccactgtcccggcaccatgccttctgcttccgaggcatttcagcggttccttctccaggagaagaagagggtggcacacccacatcaccctctggtgtggaggagtggatcgtgacccaagtggttcctggtgtggctgctgtccccgtagaagaggagacaactgctgtaccctcaggggagactactgccatcctagagttcaccaccgagccagaaaaccagacagaatgggaaccagcctataccccagtgggcacatccccgctgccagggatccttcctacttggcctcccactggcgcagcaacagaggaaagtacagaaggcccttctgcaactgaagtgccctctgcctcagaggaaccatccccctcagaggtgccattcccctcagaggagccatccccctcagaggaaccattcccctcagtgaggccattcccctcagtggagctgttcccctcagaggagccattcccctccaaggagccatccccctcagaggaaccatcagcctcggaagagccgtatacaccttcaccccccgtgcccagctggactgagctgcccagctctggggaggaatctggggcccctgatgtcagtggtgacttcacaggcagtggagatgtttcaggacaccttgacttcagtgggcagctgtcaggggacagggcaagtggactgccctctggagacctggactccagtggtcttacttccacagtgggctcaggcctgcctgtggaaagtggactaccctcaggggatgaagagagaattgagtggcccagcactcctacggttggtgaactgccctctggagctgagatcctagagggctctgcctctggagttggggatctcagtggacttccttctggagaagttctagagacctctgcctctggagtaggagacctcagtgggcttccttctggagaagttctagagaccactgcccctggagtagaggacatcagcgggcttccttctggagaagttctagagaccactgcccctggagtagaggacatcagcgggcttccttctggagaagttctagagaccactgcccctggagtagaggacatcagcgggcttccttctggagaagttctagagaccactgcccctggagtagaggacatcagcgggcttccttctggagaagttctagagaccactgcccctggagtagaggacatcagcgggcttccttctggagaagttctagagaccactgcccctggagtagaggacatcagcgggcttccttctggagaagttctagagaccgctgcccctggagtagaggacatcagcgggcttccttctggagaagttctagagaccgctgcccctggagtagaggacatcagcgggcttccttctggagaagttctagagaccgctgcccctggagtagaggacatcagcgggcttccttctggagaagttctagagaccgctgcccctggagtagaggacatcagcgggcttccttctggagaagttctagagaccgctgcccctggagtagaggacatcagcgggcttccttctggagaagttctagagaccgctgcccctggagtagaggacatcagcgggcttccttctggagaagttctagagaccgctgcccctggagtagaggacatcagcgggcttccttctggagaagttctagagactgctgcccctggagtagaggacatcagcgggcttccttctggagaagttctagagactgctgcccctggagtagaggacatcagcgggcttccttctggagaagttctagagactgctgcccctggagtagaggacatcagcgggcttccttctggagaagttctagagactgctgcccctggagtagaggacatcagcgggcttccttctggagaagttctagagactgctgcccctggagtagaggacatcagcgggcttccttctggagaagttctagagactgctgcccctggagtagaggacatcagcgggcttccttctggagaagttctagagactgctgcccctggagtagaggacatcagcgggcttccttctggagaagttctagagactgctgcccctggagtagaggacatcagcgggcttccttctggagaagttctagagactgctgcccctggagtagaggacatcagcgggcttccttctggagaagttctagagactactgcccctggagtagaggagatcagcgggcttccttctggagaagttctagagactactgcccctggagtagatgagatcagtgggcttccttctggagaagttctagagactactgcccctggagtagaggagatcagcgggcttccttctggagaagttctagagacttctacctctgcggtaggggacctcagtggacttccttctggaggagaagttctagagatttctgtctctggagtagaggacatcagtgggcttccttctggagaggttgtagagacttctgcctctggaatagaggatgtcagtgaacttccttcaggagaaggtctagagacctctgcttctggagtagaggacctcagcaggctcccttctggagaagaagttctagagatttctgcctctggatttggggacctcagtggacttccttctggaggagaaggtctagagacctctgcttctgaagtagggactgacctcagtgggcttccttctggaagggagggtctagagacttcagcttctggagctgaggacctcagtgggttgccttctggaaaagaagacttggtggggtcagcttctggagacttggacttgggcaaactgccttctggaactctaggaagtgggcaagctccagaaacaagtggtcttccctctggatttagtggtgagtattctggggtggaccttggaagtggcccaccctctggcctgcctgactttagtggacttccatctggattcccaactgtttccctagtggattctacattggtggaagtggtcacagcctccactgcaagtgaactggaagggaggggaaccattggcatcagtggtgcaggagaaatatctggactgccctccagtgagctggacattagtgggagagctagtggactcccttcaggaactgaactcagtggccaagcatctgggtctcctgatgtcagtggggaaatacctggactctttggtgtcagtggacagccatcagggtttcctgacactagtggggaaacatctggagtgactgagcttagcgggctgtcctctggacaaccaggtattagtggagaagcatctggagttctttatggcactagtcaaccctttggcataactgatctgagtggagaaacatctggggtccctgatctcagtgggcagccttcagggttaccagggttcagtggggcaacatcaggagtccctgacctggtttctggtaccacgagtggcagcggtgaatcttctgggattacatttgtggacaccagtttggttgaagtggcccctactacatttaaagaagaagaaggcttagggtctgtggaactcagtggcctcccttccggagaggcagatctgtcaggcaaatctgggatggtggatgtcagtggacagttttctggaacagtcgattccagtgggtttacatcccagactccggaattcagtggcctaccaagtggcatagctgaggtcagtggagaatcctccagagctgagattgggagcagcctgccctcgggagcatattatggcagtggaactccatctagtttccccactgtctctcttgtagacagaactttggtggaatctgtaacccaggctccaacagcccaagaggcaggagaagggccttctggcattttagaactcagtggtgctcattctggagcaccagacatgtctggggagcattctggatttctggacctaagtgggctgcagtccgggctgatagagcccagcggagagccaccaggtactccatattttagtggggattttgccagcaccaccaatgtaagtggagaatcctctgtagccatgggcaccagtggagaggcctcaggacttccagaagttactttaatcacttctgagttcgtggagggtgttactgaaccaactatttctcaggaactaggccaaaggccccctgtgacacacacaccccagctttttgagtccagtggaaaagtctccacagctggggacattagtggagctaccccagtgctccctgggtctggagtagaagtatcatcagtcccagaatctagcagtgagacgtccgcctatcctgaagctgggttcggggcatctgccgcccctgaggccagcagagaagattctgggtcccctgatctgagtgaaaccacctctgcattccacgaagctaaccttgagagatcctctggcctaggagtgagcggcagcactttgacatttcaagaaggcgaggcgtccgctgccccagaagtgagtggagaatccaccaccaccagtgatgtggggacagaggcaccaggcttgccttcagccactcccacggcttctggagacaggactgaaatcagcggagacctgtctggtcacacctcgcagctgggcgttgtcatcagcaccagcatcccagagtctgagtggacccagcagacccagcgccctgcagagacgcatctagaaattgagtcctcaagcctcctgtactcaggagaagagactcacacagtcgaaacagccacctccccaacagatgcttccatcccagcttctccggaatggaaacgtgaatcagaatcaactgctgcagaccaggaggtatgtgaggagggctggaacaagtaccagggccactgttaccgccacttcccggaccgcgagacctgggtggatgctgagcgccggtgtcgggagcagcagtcacacctgagcagcatcgtcacccccgaggagcaggagtttgtcaacaacaatgcccaagactaccagtggatcggcctgaacgacaggaccatcgaaggggacttccgctggtcagatggacaccccatgcaatttgagaactggcgccccaaccagcctgacaacttttttgccgctggagaggactgtgtggtgatgatctggcacgagaagggcgagtggaatgatgttccctgcaattaccacctccccttcacgtgtaaaaagggcacagtggcctgcggagagccccctgtggtggagcatgccaggaccttcgggcagaagaaggaccggtatgagatcaattccctggtgcggtaccagtgcacagaggggtttgtccagcgccacatgcccaccatccggtgccagcccagcgggcactgggaggagcctcagatcacctgcacagaccccaccacctacaaacgcagactacagaagcggagctcacggcaccctcggaggagccgccccagcacagcccactgagaagagcttccaggacgcacccaggacgctgagcccaggagcctgccaggctgacgtgcatcccacccagacggtgtcctcttcttgtcgc

SEQ ID NO: 314280 - DNA, 7479 bp, Artificial Sequence
  derived and/or modified sequence
atgaccaccctgctgtgggtgttcgtgaccctgcgggtgatcaccgccgccgttactgtcgaaacctctgaccatgacaactcccttagtgtttcaattccccaacccagcccactgagggttctgctcggaacctctctcactattccttgctacttcatcgaccccatgcaccctgttacaacagccccctcgacagcgcccctcgctcctcgtatcaagtggagccgggtttcaaaagaaaaggaagtcgtgcttctggtggctacagagggtcgagttagagtcaacagcgcctatcaggacaaggttagcctacctaactacccggcgatccccagtgacgctacactggaggtccaaagcttgagatctaacgacagtggagtgtaccgatgcgaggtaatgcacggcattgaggatagcgaggcaacgctcgaggtcgtcgtgaagggtatcgtttttcattacagggccatttctactcgttacacactggatttcgacagagctcagcgggcttgtctacagaactccgcgattatcgctacacctgagcagctccaggccgcttacgaggacggatttcaccagtgtgatgccgggtggttagcagaccagactgtgcgctacccgatacatacccccagagaagggtgctatggtgataaggacgagtttcctggcgtgcgtacatacggcataagagataccaacgaaacatatgacgtatactgttttgcagaggaaatggagggtgaggtcttttatgctacttcacctgaaaaatttaccttccaagaagcggccaatgagtgcaggcggttgggtgccaggctcgcgactacagggcagctgtatctggcctggcaggctggtatggatatgtgcagcgcaggctggctggctgatcgaagcgtccgttatcccatttcgaaagctaggccaaattgcggcgggaaccttctcggtgtacggactgtgtacgtgcatgccaatcaaaccggatacccagacccatcctcccgttacgacgctatctgctataccggggaagacttcgtggatatccctgagaacttcttcggagtgggaggtgaagaagacatcaccgtccagacagtcacatggcccgacatggaactgccgctgccacggaatatcaccgaaggcgaggccaggggctctgtcatactgaccgtcaagcccatttttgaagtgtctccatcccccctggagcctgaggagccatttacattcgctcccgaaatcggcgcaactgcttttgcagaggtcgagaacgagactggggaggcaactcgaccatggggcttccctacacctggtttagggccagctaccgccttcaccagcgaagacctagtcgtgcaagtgaccgccgtgcctgggcagccccaccttccgggcggcgtagtgtttcactacagacctggcccgacacgctacagcctgaccttcgaagaagcgcagcaggcctgccttcgcaccggtgctgtgatagcaagtcctgagcagctgcaggccgcttatgaggccggctacgagcaatgcgatgcaggttggctgcgagatcagactgttcggtaccccatagtttcaccgagaactccctgcgtaggcgacaaagactctagccctggagtgcggacctacggagtcaggcctagcaccgagacatacgacgtgtattgttttgtggacagactggagggggaggtgttttttgccacacgacttgagcagtttacatttcaggaggcacttgagttttgcgagtcccataacgcaactcttgccaccactgggcagctgtatgctgcgtggtcccgtggattggacaaatgctatgctgggtggctggctgacggctcgcttcggtacccaattgtcacccctcgtcccgcgtgtggcggggacaagcccggggtgcggaccgtgtacctctacccaaatcagactgggctccctgatcccctgtcaagacaccatgctttctgctttcggggtatctccgctgttccaagcccgggcgaagaggagggtgggacccctacatccccctctggcgtcgaggagtggatcgttactcaggtcgtccccggggttgctgccgtgcctgtggaagaagaaacaacagcagtgccgagcggcgagactactgctatcttggagtttaccaccgaaccagagaatcagactgaatgggagcctgcttatactcctgtcgggactagcccactcccaggaatcctgcccacctggccgccgactggggctgctactgaagagtccaccgagggcccgtcagcaactgaagtgcccagtgcttccgaagagccctcaccatcggaggtgccgttcccaagcgaagagccctcaccatcggaagaacctttcccaagtgtccgaccatttcctagtgtggaattgtttccctccgaggaaccttttccctcaaaggagccttctccttctgaagagccatcagcctctgaagaaccctacactccctcaccccctgtcccaagctggacagaactgccctctagtggagaagaaagcggggctcccgatgtctcgggtgattttactggctctggggacgtttccggacatctcgatttctccggtcaattgagcggagacagggcttctggtctcccctctggtgaccttgattcaagcgggctgaccagcacagtcggatctgggctgcccgtggaatcaggacttccttctggcgacgaggaacggatcgaatggccatccacaccaaccgtcggcgaactcccgagcggagcggaaatcctcgagggaagcgcctcaggtgtgggcgatctctccggcctgcctagcggggaagtgctggagactagcgccagcggagttggtgatttgagtgggctgccctcaggagaagtcttagaaacgactgcgcctggcgtcgaagacatttcaggacttccctccggggaggttctcgagaccaccgcgcccggagtcgaagacatttcaggattgccatctggcgaggtgctggaaaccaccgctcccggggttgaggatatatccggcctcccgtccggagaagtactggaaaccaccgcacccggagtcgaagacatcagcggcttacctagcggggaagtccttgaaactactgcgcccggagttgaggatattagtggcttgccttctggcgaggttctggagaccaccgctcccggtgtggaagacatcagcggattgccttccggcgaggtgctggagacagccgccccgggggtggaagatattagtggtctcccttccggggaagtgctcgagaccgccgcgcccggcgtagaggacatctctggcttgcctagcggggaggtcctcgagaccgctgcccccggagtagaagacataagcggactgccttcaggggaggtactagagaccgcagcacctggagtggaggatatttctggtctgcctagcggggaggttctggaaaccgcagccccaggcgttgaggacatctctggcctgccaagtggtgaggtgttagagacagctgctcccggagtggaagacatctccggattgcctagcggagaagtgttggagaccgcagcgccaggtgtggaagacataagcggtctgccttctggagaagtcctggagaccgccgcaccaggcgtagaagatatatctggccttccatccggcgaggtgctcgagaccgccgcacctggagtcgaggacataagcggtctcccctccggcgaagtgctggaaacggctgctcctggcgtcgaggatatctcgggactaccaagcggcgaggtgctagagaccgccgcccccggagtggaggatatcagcgggttgccttcaggcgaagtcctagagaccgccgcacctggcgtggaggacataagtggcctgcccagtggggaagttctggagacagccgcaccgggagtcgaagatatctccgggctgcccagcggcgaagtactggagaccgctgcaccaggcgtggaggatatcagcggactgccttcaggcgaggtgctggaaaccgccgcgcccggagtagaggacatcagcggattgccatccggtgaggtcctcgagactgcagcaccaggagtggaagatataagtggactccctagcggggaggtactggaaaccacagccccaggtgtggaagagattagtggtctgccttctggtgaagtgctcgaaaccaccgctcctggagtggacgagatcagcgggcttcctagtggtgaagttcttgagactaccgcgcccggtgtggaagaaatatcaggcctgccctctggcgaggttctagaaactagcaccagcgcagtgggggatttgtcaggcctgccttccgggggcgaggtgctggagataagcgtgagtggggtggaagacatctcgggccttccctctggcgaagtggtggaaactagcgcaagtggtatagaggacgtgtcagagctgccaagcggggaaggcctggaaaccagtgcctccggcgttgaggatctaagtcgcctcccgtccggggaagaagtacttgaaatttccgcatccggttttggagatctatccggtcttccctctggtggcgagggcctggaaacctcggctagcgaggtaggtaccgacctttctggactccctagcggccgtgaaggactggaaacatctgcctcgggggctgaggatctgagtggattgccatctggaaaagaggacctggtaggcagcgccagcggggacctcgatcttgggaagctcccaagtggaacgctgggctctggtcaggctcctgagacctcaggcctcccttcaggattttctggagagtactccggagtggaccttgggagcgggccaccctcagggctgccggactttagcggcctcccgtccgggtttcctaccgtaagcttagtcgactccactctcgtggaggtggtgactgcatctacagcttctgagcttgagggcaggggcacgattggcatatctggggcaggggagattagcggcttaccgtcatctgagctagatatttctggccgcgcaagtggccttccctctggcacagagttatcaggacaggcaagcggatcccctgatgtgagtggagaaataccgggcctctttggtgttagcggtcagccctcggggttcccagacacttcaggagaaacctccggcgtgactgaactctctggactttcatctggtcagcccgggatctccggtgaagcttccggcgtgctgtacggtacctctcagccatttggtattacagatctcagcggcgagaccagcggcgttcctgacttgagcggtcagccctccggcttgccagggtttagtggggccaccagtggcgttccagatcttgtgtcaggaacgacctcaggctcgggcgagtcttctgggatcacatttgttgacacttccttagtagaggtagcgcctactactttcaaggaggaggagggccttgggagcgtggaactcagtggtctcccttccggagaggccgacctgagcggtaagagcgggatggtggacgtgagcgggcagttctccgggacggtggacagttctggctttacatctcaaactcccgaattttctgggctgccaagcggcattgcggaggtctcaggcgaatcctcgagagccgagatcggcagctcactgccttccggagcatactatggttctggcacaccaagttcctttcctactgtcagtctggtggatagaactctagtcgagagcgttacccaggcaccgacagcgcaggaagcaggggagggtccatctggaattctcgagttaagcggggctcattccggggccccagacatgtctggcgaacatagcggctttctggatctgtctggtctccaaagtggcctcattgaaccctcgggcgagccgcctggcaccccttatttctccggcgactttgcctctacgaccaacgtgagcggagagtcatctgtcgctatgggaaccagcggggaggcttcaggcctgcctgaggtgacacttattacttccgagttcgtggagggcgtcacagagccaactattagccaggagctgggccagaggccccctgtgacgcacactccccagctctttgagagctctgggaaggtgagcacagcgggcgacattagcggtgccaccccagtacttccaggatcaggggttgaggttagcagtgtgcctgaaagtagctccgaaactagcgcctacccagaggctgggttcggcgccagcgcggcccctgaggcctccagagaggatagcgggagccccgacctgagcgagacaacctctgcattccatgaagcgaaccttgaacggtccagtggcctgggggtgtcaggatccacacttactttccaggaaggtgaggcttctgctgcacccgaggtcagcggtgagagcactactactagtgacgttgggactgaagctccaggattaccaagcgcaacacctaccgctagtggtgaccggaccgagatttcaggggacctgtcaggccatacgagtcagctgggggtcgttatctcgacatccatccccgaaagtgaatggacgcaacagactcagagacccgccgagacacacctggagatagaatccagtagcctgctgtattccggtgaagaaacccacactgtggagaccgccactagccccacagacgcttcgattcctgcttcgccagaatggaagcgagagtccgagtcgaccgcagccgaccaggaggtctgcgaagagggttggaacaagtaccaggggcactgctataggcatttccccgatagggaaacttgggtagacgcagagaggagatgccgggaacaacagtcccacctgagctcaatcgtcacacccgaagagcaggagtttgttaataataatgcccaagactaccagtggattgggttaaacgatagaacaatagagggggattttcgatggtcagatggccaccccatgcagtttgaaaactggcgccccaatcaaccggataatttttttgctgcaggcgaagactgtgttgtcatgatctggcatgagaagggcgaatggaatgacgtgccttgcaattaccacttgccttttacttgcaagaaaggaaccgtagcttgcggtgaacctcctgtcgtagaacacgctagaaccttcggtcaaaaaaaggatcgatatgagattaactctctcgtaaggtaccaatgtaccgaagggtttgttcagaggcacatgccaactataagatgccaaccatccggccactgggaggagccacagatcacatgcacggacccgacaacttacaagcggagactgcagaagcgaagcagtcggcatcctcgcagaagccgcccctccaccgcccattag

SEQ ID NO: 314281 - DNA, 7479 bp, Artificial Sequence
  derived and/or modified sequence
atgaccacgctgctttgggtgtttgtgacgctgagagtgatcacagccgctgtgactgtagaaacttccgatcacgacaacagcctgagcgtgagtatcccacagccatcccccttaagagtgctccttggcacttcactgactattccatgctactttattgatcctatgcatcccgtgaccactgcaccttccacagctccgctcgcacccaggattaaatggagccgcgtctccaaagagaaggaggtagtcctgttggttgccacagaaggccgtgtaagagtaaactctgcttaccaggataaggtttcactgcctaattatcctgctattccttcagatgcaacactcgaggttcagtctcttcgtagcaatgatagcggtgtgtatcgctgcgaagtcatgcatgggatagaagattcagaggcgaccctcgaggtggtggtgaaaggaatcgtcttccattaccgtgctatctctacgcgatacacacttgattttgaccgcgcacagagggcctgtctacagaactcagctattattgcgacccccgagcagctgcaggcagcgtatgaagacgggttccaccagtgtgatgcgggttggctagccgatcaaacggtcaggtacccaatccataccccaagggaaggctgttacggtgataaagatgagttcccaggcgtgcgcacctatggtatcagagacacaaatgaaacatacgacgtttactgctttgctgaggaaatggagggagaagtgttttacgcgacgtcgcctgaaaagttcactttccaagaagcggcaaacgaatgtagaaggctcggcgcacggctggcgacaactggccagctttatctggcttggcaggccggaatggatatgtgctctgcagggtggctggcggaccgctccgtccggtaccctatctccaaggcaagacccaactgtggcggaaatttgcttggcgtccgcacggtgtatgtgcacgccaatcagaccggttatccagaccccagctctagatacgacgccatttgttataccggggaagattttgtcgatattcccgagaatttctttggtgtcggcggagaggaggatatcactgtccagaccgtgacctggcccgacatggaattgcctctgccgagaaacatcacagagggtgaggcaaggggctcagtgatactgaccgtgaagcccatattcgaggtgagccccagcccactggaacccgaggagccatttacctttgcgcctgagattggagccaccgccttcgctgaagtcgaaaatgagactggtgaggctaccagaccgtggggcttcccaactcctggcctaggtcccgcaaccgctttcacctctgaggatctcgtagtgcaggtaacggcagtgcccggacagccacatctacctggcggagttgtcttccactataggcccggaccgacgcggtacagtcttaccttcgaggaagcccagcaggcctgcctgcggaccggcgctgtcatcgcctccccggaacaactgcaggctgcatacgaggccggttatgagcaatgcgacgcagggtggctgcgcgaccaaacggtaagatacccgatcgtctccccacgaactccctgtgtgggtgataaagattcaagtcccggagtgcggacttatggtgtgagaccctctactgaaacctatgatgtatactgcttcgttgatcgcctggagggcgaggtctttttcgccaccagattagagcagtttaccttccaggaagctctagaattttgcgagtcgcacaacgcgactctcgccaccacaggtcagctctatgccgcttggagtcgcggacttgacaagtgctacgccggttggctcgccgacggctccttacgctatcctatagttaccccacggcctgcttgtggtggggataaaccaggtgtgcggacagtctatctctatcctaaccaaactggtctccccgatcccctcagcaggcaccatgctttctgcttccgtggtatcagcgcggtgccgtctcccggagaagaggaaggcggaactccgaccagtcctagcggtgttgaggagtggattgtaactcaggtagtgccaggagtcgccgctgtccccgtcgaggaagagactaccgctgtgccaagtggcgaaactactgctattttggaattcaccaccgaaccagaaaatcagacagaatgggaacctgcctatacaccagtgggtacatctcccttgccgggtatcctcccaacttggcctcccacaggcgcagccactgaagagtcaactgagggcccatctgcaactgaggttccctctgccagcgaggagccatccccctctgaagtgcctttcccctcggaggaaccatcaccctcggaggagccgttcccatcagtacgtccattcccctcagtggagctcttccctagcgaagaaccttttccaagcaaggagccctcccctagcgaagagccttccgcatccgaagagccttacaccccctccccccctgtgccctcttggactgagctgccttcttcaggagaagaaagtggtgcacccgatgtatccggcgactttaccggcagcggcgacgtctcaggccacttggactttagtggtcagttgagcggcgaccgagcctccggcctgccaagcggcgatttggacagcagcggtctgacttcaactgtaggctccgggttgccggtggaaagtggactgccttcaggcgatgaagagcgcatcgagtggcctagcacccccacagtgggtgaattgccctccggggctgaaatccttgaaggttccgcatcaggtgttggtgatctgtctggcttgccctccggagaggtgttagaaacaagtgccagtggcgttggcgatttgtcggggctcccctctggtgaggtgctcgagacaacagcaccaggcgtggaggatatttccggcttgcccagcggagaagttctggaaactacagcccctggagtcgaagacatctccggcctacccagtggcgaagtgctggaaaccacggccccaggggtggaggacattagcggtctgcccagtggagaggttctggaaaccaccgcaccaggcgtagaggatatcagtggtcttcctagcggcgaggtgctcgaaactaccgcaccgggtgttgaggacatttcagggctcccttctggggaagtactggaaacgacagcccctggagtggaggacatttccggcctgccatctggggaggttctggagacagctgcccctggcgtggaggacatatcaggccttccgagcggtgaggtcctagagaccgcggcacccggagtagaagacatctcaggactacccagtggtgaagtgctggaaactgctgcaccaggagtggaggatatatcaggcttgcccagcggtgaggtgctggaaaccgccgcacccggtgtcgaggacatctcagggttgccctccggtgaggtgctcgagacagctgctcccggtgtggaagacatcagcgggctcccctctggggaggtactcgaaacagctgccccaggagtggaggacatcagtgggctgcctagcggagaagtgctggaaaccgctgctcctggcgtggaggacatatcaggcctaccctctggggaagtgttagagaccgccgcaccgggagtggaagatatctctggcctgcctagcggtgaggtgctcgagaccgctgccccaggtgtcgaggacatctcggggcttcccagtggggaggtgctcgaaacggctgcgccaggggttgaagacataagtgggttgccgtctggcgaggtcctggagactgccgctccaggcgtggaggacataagcggcctcccctccggggaggtgctggagacggcagcacccggtgtagaggacatcagcggcctgccgagcggagaggtgctcgaaaccgccgctcccggtgtggaagacatttccggactacctagcggggaagtcttagaaaccgcagctcccggagtggaagacatatctggattgccctctggcgaggtcctggaaacggcagcaccgggagttgaggacatttccggcctgccttccggagaagttctggagacggcagctccaggagtggaagacatcagtggtctgccttccggggaagttctggaaacaactgctcctggagttgaagaaatcagtggactacccagtggagaagtgctggagaccacagcgccaggagtggatgaaatatcaggcctgccaagtggcgaggtgctggagactaccgctcccggtgtagaggagattagtggactgccctccggagaagtgctggaaacatctacatctgccgtgggggatctgtccggtctcccgtccggaggagaggttctggagattagcgtcagtggggtggaagacatcagcggcctgccaagcggggaagttgtcgaaacatccgcaagtgggattgaggacgtctctgagctgccttcaggtgagggcctcgagacgtcggcatcaggggtggaagacctttcccggttgcctagtggagaggaggtgctggagatatccgcatccggctttggtgacctcagtggactgccttctgggggagaggggctggagacctcagcctctgaagtcggaactgacctatccggactgccatccggcagagaagggctggaaacgagcgcgtctggtgccgaggatttgtccggactaccatccggtaaagaagacctggtgggcagcgcgagcggggacttagatctcggcaagctgccatccggtacgcttgggtctgggcaggccccagaaacctcagggctgccatccggcttctcaggagaatactccggcgttgatttaggttctgggcctccttcaggtttaccagatttcagcggacttcccagcggattccccaccgtatcattggtggattcaaccctagtggaagtggtcacagcaagtaccgcttcagagctggaaggcaggggaaccattggcatctccggtgcgggtgaaatttccgggctaccctcaagcgaacttgatatttcggggcgagccagcggactgccgagcggcacagagctcagtgggcaagcgagcggctccccggatgtgtcaggggagatcccgggtctcttcggcgtcagcggtcaacctagcggttttccggacacttccggggagactagtggggtcactgaactctctggactttcctcagggcagcccggaatcagcggggaggcgtcaggcgtgctatacggcaccagccagccattcggaattaccgatctctcaggtgagacgagtggggtaccagatttatccgggcagccctcaggactaccgggtttttcaggggcaacaagtggagtgcctgatttggtctctgggaccactagcggatccggcgagtcaagcggaattacatttgttgacacatcccttgtggaggtggcccctacgacgtttaaggaagaagaagggctgggttcggtagaacttagcggcctcccttctggagaggctgatttatcagggaaatcaggcatggtggacgtttccgggcagttctcgggcactgtggattcctccgggttcaccagccagaccccagaattcagcggattaccttccggtatcgcggaagtgagcggtgaaagctctcgagccgagattggctctagcttaccaagtggggcttactacggctctgggacaccatcatccttccccactgtaagcctcgtggaccgcaccctggtcgaatctgtgacacaggctccaaccgcccaagaggcaggtgaaggaccttctggcattctagagctcagcggcgcacactccggcgcacccgacatgtcaggtgaacactccggctttctcgacctgagcggtctacaaagtggattaatcgagccatctggggaaccacccggtactccatatttttcaggcgacttcgcttccacaaccaacgtgtctggtgagtctagcgtggcaatggggacctcgggagaagcgagtggcctcccagaagtcaccttgataacctcagagttcgtggagggagtcaccgaacctacaatctcgcaagaacttggccagcgacccccagttacacatacgcctcagcttttcgagagctcaggcaaggtgtctaccgccggtgatattagtggggcaactcccgtgctgccaggctcgggtgtcgaagtgtctagcgtgcccgaatcttctagtgaaacatccgcctatccagaagccggattcggtgcttcagctgcaccagaggctagtagagaagacagcggttcccctgacctgagcgagacaacctccgccttccatgaagctaaccttgaacgcagttctggtctcggggtgagtgggtctaccttaacctttcaggaaggagaagcgtccgccgctccggaagtgtcaggcgagagcactactacctctgatgtgggcactgaggcccctggactccccagcgctactccaacggctagcggagaccggactgaaatcagcggcgacctctctggccacaccagtcagctgggcgtggtgattagtacatcaatccccgagtccgaatggactcagcagacccagcgcccagccgagacccacttggaaatagagagctcttcactgctctattccggggaggagactcatacagttgagaccgcaacatctcccaccgatgcttccatccccgcttcccccgaatggaagagagaaagcgaatctaccgcggcagatcaggaggtctgcgaagagggctggaataaataccagggccattgttataggcatttccccgaccgggaaacatgggtggatgcagaaaggcggtgtcgagaacaacagagccacctctcttccattgttacgcctgaggagcaggagtttgttaacaacaacgctcaggattaccagtggattggactgaatgatagaacaattgagggcgatttcagatggagcgatgggcatccaatgcagttcgaaaattggaggcccaaccagcccgacaattttttcgctgctggtgaggactgcgtcgttatgatatggcatgagaaaggggaatggaacgatgtcccttgcaattaccaccttcctttcacatgcaagaagggcaccgtcgcctgcggtgaacctcctgtcgtggaacacgccaggacctttggtcagaaaaaagataggtatgaaatcaattccctggttcggtatcaatgcactgaagggtttgtgcaaagacatatgcccactatccgatgccagccttccggccactgggaagagccccaaatcacttgcacagatccgaccacctataaaaggcgcctgcaaaaacgcagctcaaggcaccctcgccgttcaagaccctcaacagctcattag

SEQ ID NO: 314282 - DNA, 7479 bp, Artificial Sequence
  derived and/or modified sequence
atgacgacattgctttgggtgttcgttaccctccgcgtcattaccgccgcggtcaccgtggaaacttctgaccacgataattcattgtcagtgtcaattcctcaaccttctccccttcgcgtgctcctcgggacttctttgactataccctgctacttcatagatccaatgcatccagtcaccacagcgccgtccactgcgccactggcacccagaattaagtggtcacgcgtgagcaaggagaaggaagtagtccttctggtagcaaccgagggacgcgtgcgagttaactccgcctaccaggataaggtgtccctgcctaactatccagctatccctagcgatgcaacacttgaggtccaatctctccggtctaacgactccggcgtttataggtgtgaagtgatgcatggaattgaggactccgaagccaccctggaggtggtggtcaaaggcatcgtgttccactaccgcgcaattagcacccgatatactctggattttgatagagcacagagggcctgcttgcaaaattctgctataatcgcaaccccagaacagctccaggccgcatacgaggatgggtttcatcaatgcgacgcgggttggttggccgaccagactgttaggtatccaatacacaccccccgcgagggctgctacggagacaaagatgaatttcctggcgtacgtacctatgggatccgggatactaacgagacatatgacgtttactgctttgccgaagagatggaaggagaggtcttttatgcaacttcccccgaaaaattcacgttccaggaagctgctaatgagtgccgaaggctgggggctcgactcgcaactaccgggcaactgtacctggcctggcaagcagggatggatatgtgttctgccggctggctggcggacagatctgtgcggtatccaatcagtaaggcccgccccaactgcgggggcaacctactgggagtaaggactgtttacgtacacgccaatcagactggttacccagatccatcctcaagatacgatgcaatttgctacaccggcgaggacttcgtggacataccggagaacttttttggagttgggggggaggaggatatcacagtccagaccgtcacctggcccgacatggagctgcctctgcccaggaacatcaccgagggggaggctcgagggagcgtgattttgaccgtcaagcctatttttgaggtgagtccctctcctctggaacccgaggagcctttcacatttgcccctgaaattggggccacagcgtttgctgaggtggagaacgaaaccggcgaagccacaagaccatggggcttccccaccccagggcttggcccagccactgcattcacgagtgaggacttagtagttcaggttaccgctgttccagggcagccgcacctgccaggaggggtggtgtttcattatcgccctggccccaccaggtattcactgacctttgaggaggcccaacaggcatgcttgcgcaccggggccgtaatcgcatctcctgagcaactacaagctgcatatgaagcagggtatgagcagtgtgacgctgggtggctccgcgaccagaccgtccggtatccaattgtctcaccccgcacaccatgtgttggtgataaagattcatctccaggagtcagaacatatggtgtgcggcctagtacagagacctatgatgtctactgcttcgtggaccgtctggaaggggaggttttcttcgctacaagactggaacagttcacattccaggaagccctagagttctgtgagtcacataatgcaacattggccaccacaggccagctgtatgccgcttggagcagggggctggataagtgttatgccgggtggctggctgatgggagtcttagatacccaatagttacacctcggcctgcatgtgggggagataagcctggcgtgcgcacagtgtacttataccccaatcaaaccggcctccctgatcccctgtcaagacaccacgctttctgcttccgcggcatctcagcagtcccttctcccggagaggaagagggtggtactccgacatcaccaagtggcgtggaagagtggattgtcacacaggtcgtgcctggagtggcagccgttcctgtcgaggaagagacaactgctgtgccctcgggcgaaaccactgccatactggagtttaccaccgaacccgagaaccaaacagagtgggagcccgcttatacccctgtcggtacttctccacttccgggtatccttcccacctggcctcccaccggtgcagccacagaggaatctactgaaggccccagcgcaaccgaggttccatccgctagtgaggaacctagtcccagtgaagtaccttttccctctgaggagccatctcccagcgaagagcctttcccttctgtgagaccattcccgtctgttgaactgttcccctccgaggaaccatttccctccaaagagcctagtcctagtgaggaaccgtctgcatccgaggagccgtataccccaagtcctccagtccccagttggactgaactgccctcttctggcgaagagtctggagcccctgacgtcagcggggatttcactgggtccggcgacgttagcgggcacttggatttctctggacagttgtccggcgatagggctagtggacttcccagtggcgaccttgacagcagcggactgacatctaccgtggggtcaggactgcccgtagaatcaggcctcccctcaggagatgaggagagaattgaatggcctagcactccaacagtcggagaacttcctagcggcgctgagatattggagggctcggcatcaggggtaggtgatctcagcggcctgccctctggggaagtgcttgagacgagtgcgagcggcgtcggcgatttgtcagggctgcctagcggcgaagtgctggagactactgcgccaggcgttgaggacatctccgggttgccttcaggagaagttctagagaccactgctccaggcgtggaagatatttccgggcttccaagtggtgaagtcttggagactacagccccaggagtcgaagatattagcgggctcccatccggggaggttctggaaacaacagcacctggcgtggaagatataagtggcctgccctccggcgaggtgctcgagacaacggcacctggagttgaagatatctcaggcttgccaagcggggaggtgcttgagaccactgcccctggagtggaggacatttccggattgccgagcggcgaggttctggagaccgcggcgccaggggttgaggacatttccggactacccagtggggaggtgctggaaacagctgctcccggagtagaagatatctccggcctgccatccggagaggttttagagacagccgcacccggagtcgaggatatctcaggactaccctccggggaggtcttggaaaccgctgctccaggagtcgaggatataagcgggctgcccagcggggaagttttagagaccgccgctcccggtgtggaagatatcagtggcctgccctcaggcgaggtgctggagactgcagcacccggcgtggaagacatctccggtttgccatcgggggaggttctcgagaccgcagcccccggggtggaggatatctctgggctgccctctggcgaagtgctggaaaccgccgcacctggagttgaagatatatctggcctgccttccggcgaagtactcgagaccgcagccccaggtgtggaggacatctccgggctgccatcgggtgaggtattggagactgcagctcccggggttgaagatatctctggtctcccttcaggggaagttctcgagactgctgcgcctggagtcgaagacatttcaggtctgccctcaggagaagtgcttgagacggctgccccgggcgttgaggatataagcggattgccttctggggaagtgctcgagacagccgccccaggtgttgaggacatcagtggtttgccatctggcgaggtcctcgagacggcagctccgggcgttgaggacatttccggactgccgtctggtgaagtgctggagaccgctgcccctggagtggaagacatctccggtcttccaagcggagaagtacttgagacagcagcacccggcgtagaggatatctctggcctgccctccggggaagtgctagagaccacagcccccggagtggaagagatttctggtcttcctagtggcgaggtcctagaaactacagccccgggggtagatgaaattagcggactgccctcaggggaagtactcgaaacaacggcacctggcgtggaagagatctccggactgccctccggagaggtgctcgaaacctcgacctcagccgtgggagatctctcgggtctgcccagtggaggggaggtactagagatttctgtatccggagtagaggacatcagtggactcccatctggagaagtggtggaaacaagcgctagcgggattgaggatgtcagtgagctgccctccggcgagggactggagacttcggcctcaggagtggaggatctctctcgcctgccctctggagaggaagttctggaaatctccgcgagtggatttggcgacttatctgggctgcccagtgggggcgaaggccttgaaacatctgcctctgaagtagggacagatctgagtggactaccatccggacgtgaaggcctcgaaacaagcgcttcaggtgctgaggacctttccggcctccccagcggaaaggaggacctggtgggcagcgcatctggggatctcgacctggggaagctcccttccggcactctcggcagtggtcaggcccccgagacatctggcctaccgtcggggttttcaggggagtatagtggtgtcgatcttggatcaggaccgcctagcggactcccagatttcagcgggcttccaagcgggtttcctaccgtcagcctggtcgattctacactagtggaggtggtaaccgcttccactgcctctgaactggaggggcgagggacaatcgggatatcaggcgctggtgagatttctggcctcccgtcctcggagctggacatttctggtagggcatcgggtcttccctctggtaccgagctgtccggccaggccagcggtagtcctgacgtctccggagagataccgggactctttggcgtgtccggccagccgagtggctttcccgacacctcgggcgagacatccggggtgaccgaactcagcggcctgagctctggccagcccgggatctccggcgaagccagtggagtgctgtatggcacaagtcagccatttgggataaccgatctcagtggggagacctctggagtgcctgacttaagcggccagcctagcggcctgcccggtttctccggggctacgtctggggtgcctgatcttgtttctggaaccacatcgggatctggtgagtccagtggtattaccttcgtggacacctccctggttgaggttgcacctactacctttaaggaagaggagggactgggctcagtcgagctctccggtctaccttcaggtgaggccgacctttcagggaaaagtggtatggtcgatgtgtccggtcaattcagcgggactgtagactccagcggcttcactagccagacccccgagttttccggcctgccatccggaatcgcggaagtaagcggcgaatcatcacgagctgagatcgggtcatcactaccctcaggcgcgtactatggcagcgggacacccagttcattccctactgtaagccttgtagacaggactctggttgaaagtgtgacacaggccccaacagcgcaggaggctggcgagggcccttctggcattctagagctctcaggcgcccattctggggctccagacatgtccggggagcactccgggtttctggacctctccggtctgcaaagtgggttgatcgagccatccggggaaccacccgggacaccttacttcagcggagactttgcaagtaccaccaacgtctccggagagagctctgtcgccatgggaacatctggcgaggccagtggcctccctgaggtcaccctcatcacatcagaattcgtggagggtgtaacagagccaacaatcagccaggagcttggtcagagacctcctgtcacccatacgccccaactcttcgagagcagcggaaaggtgtcgacagcgggcgacattagtggggcaacaccggtcctaccaggcagtggcgtcgaagtgagttcagtcccggagtcctccagtgaaactagtgcataccccgaggcaggattcggtgcaagtgctgcccctgaagcgagtcgagaggattctggttctcctgacctgtccgagaccacatccgcctttcatgaagcgaacctggagcggtcctcaggcctcggagtatcagggagcacattaacatttcaagagggagaagcatcggccgctcccgaggtttccggagagagcacaaccacctccgacgtgggtactgaggcacccgggctgccatctgctactcccactgccagcggtgataggactgaaattagcggagatctctcagggcacacctcacaactcggcgtggtaatcagcacttctatcccagagtcagagtggacccagcagacgcagaggccagctgagacccacttagaaatagaatcctcatcattactgtattccggagaggaaacgcacactgtggagaccgccacgtcacccacagatgccagtatcccagcctcgcccgaatggaagcgggagagcgagtctaccgccgctgatcaggaagtgtgtgaagagggatggaataagtatcagggacattgttatcgccacttccctgaccgggaaacctgggtcgatgccgagcgccgctgcagagaacagcagtcacacttgtcttcgatcgtcaccccagaagagcaggagttcgttaataacaacgcacaggattaccagtggatcggcttaaacgaccgaacgatagaaggcgactttagatggtcagacgggcaccccatgcagttcgagaattggcgtcccaatcagccagataatttctttgccgcaggggaggattgtgtagtgatgatatggcacgaaaagggagaatggaatgacgtcccttgcaattatcatctcccctttacctgcaagaaagggacagtcgcctgcggtgagccccccgtggtcgaacatgcacggacttttgggcagaaaaaggaccgctacgagattaacagtctcgtccggtaccaatgtaccgaggggtttgttcagcgccacatgcccaccatcagatgtcaaccctctggccattgggaagagcctcagatcacctgtactgatccaactacttacaagcgtcggttgcagaagagatctagcaggcatcccaggagatctagaccgtcgacagctcactag

SEQ ID NO: 314283 - DNA, 7479 bp, Artificial Sequence
  derived and/or modified sequence
atgacaaccctgctgtgggtgtttgtgaccctacgtgtcatcactgcagccgtgaccgtagaaacaagcgaccatgacaactccctaagcgtctctatcccccaacctagtccacttcgagtcctgctcggtacctcactcaccattccttgttatttcatcgaccctatgcatcccgttactaccgcgccgtctacagctcccctcgcacctcggatcaagtggagccgggtgtccaaagaaaaagaagtggttctgctggtggccaccgaaggcagagtcagggttaactcagcgtatcaggataaagtgtccttacctaactacccagccatacccagcgatgcaacgctcgaggtgcagagtttgcgatccaacgactctggcgtttatcggtgtgaggtgatgcacggcatagaggactcagaagccacattggaagtggtcgtgaaaggcatcgtattccattatagggcaatttctaccaggtatacacttgacttcgatcgagcccagagagcgtgcttacagaactccgcaatcatcgccacacctgaacaactccaagctgcctatgaagacggattccatcaatgtgatgcagggtggcttgcagatcagaccgtaaggtacccaattcacaccccaagagaaggttgttacggcgataaagacgaattcccaggcgtcaggacgtacggtatcagggacacgaatgagacctatgatgtgtactgtttcgctgaggagatggagggcgaggtgttttatgctacaagtcccgaaaaattcacgtttcaagaggctgctaatgaatgcaggaggctgggggcccgtctggccactacaggtcagctctacttggcctggcaagccggaatggacatgtgttccgcaggttggttggcagatagaagtgtcaggtatcccatctctaaggctaggcccaattgtgggggaaacttgttgggggtgcgaactgtgtacgtgcatgccaatcaaaccggataccccgatccaagctctaggtatgatgcaatctgttacacaggcgaggattttgtggatatccctgaaaatttctttggcgtggggggcgaggaagacatcactgtgcaaactgttacttggcccgacatggagctccctctacccaggaacatcaccgaaggggaagcgcgtgggtccgttattttgactgtgaaacccatttttgaggtgtcacccagtccactcgagccagaggagccatttactttcgcccctgagatcggagccaccgcatttgctgaagtggaaaacgagacaggtgaggccacacggccctgggggttcccaacaccgggtctgggaccggcaaccgcctttactagcgaagacctagtcgtccaagtgacagccgtacctggccaacctcatcttcccggcggcgtagtgttccattataggccagggcccactagatattccctgactttcgaagaagcccagcaggcctgcctgcggacgggagccgtgattgccagccccgaacagctgcaggcggcgtacgaagcaggttacgagcagtgtgacgccgggtggttacgagatcagacggtccggtacccaatcgtgagtccccgaaccccttgcgtgggagataaggatagctcccccggagtcagaacatacggcgtacggccctctacagaaacatacgatgtgtactgcttcgtggatcggcttgaaggcgaagtattttttgctacacgtttagaacagtttacatttcaggaggcgctcgagttttgcgaatcccacaatgctaccctggctacaactggacagctttacgcagcctggagtcggggcctggataaatgctacgccggttggctggcagatggcagcctccgatatcctatcgtgacccctcggccggcatgcggaggcgacaaaccaggagtccgaactgtttatctctatcctaaccagacagggctacctgaccctctctcacgccaccacgccttctgcttcagaggtatttctgccgtaccctcccccggtgaagaagaaggaggaacgcccacttccccatctggcgtcgaggaatggatagtcactcaggtcgtccccggcgtcgccgcggtgcccgtagaagaggagaccactgccgtaccatcaggcgaaactactgctatcctggagtttactacagagcccgaaaatcaaacggagtgggaaccagcttatacgcccgttggaacatctccactacctggaattctgcctacttggccaccaactggagctgcaactgaagaatcgaccgaaggtcctagtgctaccgaagtgccctccgccagtgaagagccctccccttctgaggttccatttcctagcgaggagccctctccgagcgaagaaccgttcccatccgtgcgtccgtttccctccgtagaactgtttccatccgaagagccttttccttccaaagaaccctctccgtccgaggaacctagcgccagcgaagagccctatacacccagtccccccgttccatcatggacagagcttccatcttcaggcgaggagagcggcgcacccgacgtgagtggagattttacagggtcaggcgacgtctctgggcacctagatttttccgggcagcttagtggcgatcgagccagcggactgccatccggcgatttagatagtagcggtctcactagtactgtgggttctggcctgccagttgaaagtggactccctagtggtgatgaggaaaggatcgaatggccatcgacacccacggtgggcgaactcccaagtggtgccgagattctggagggatccgcgagcggagtcggtgatctgtctgggctgccgagtggagaggtgctggaaacaagcgcatcaggagtgggcgatctgtctggtttgcccagtggagaggttctcgagacaactgcacctggagtggaagatatctctggacttccctcaggcgaagtcctcgaaactacagcacctggcgtggaagacatcagcggactgccatcgggagaagtgcttgagaccactgctcccggcgtcgaggatatttcagggctcccctccggcgaggtcttggagaccacagctcctggcgtcgaggacatatcaggactacccagcggcgaagtgctggaaacgactgctcctggcgtggaagatatcagcgggctaccctcgggcgaagtcctggaaacaacggcccctggtgtggaggacatctctggactcccctccggcgaagtattagagactgcagcccccggagttgaagatatttcaggcctccctagtggggaagtgctcgagactgccgcacctggcgtggaagatatctctggcctgcctagcggagaagtcctcgagacagcagctccgggcgtcgaggatatttctggtcttccgagtggcgaagtgctcgagaccgcagctcccggggttgaggacattagcggactaccctcaggtgaggttctcgaaacagctgcccccggcgtggaagatatatctgggctcccatcaggagaggtgctcgagaccgccgccccaggtgttgaggatattagtgggctccccagcggtgaggtgttggagaccgcagcgcctggtgtagaggatataagtgggctcccaagcggcgaggtgctagagacagctgctcctggagtggaggacatttcgggattgccatctggtgaggttttggaaaccgccgcccccggtgtcgaagacatcagcggactaccatcaggtgaggtgctggaaactgccgcccccggagtagaggacatcagcggactgcctagtggcgaagtgctagaaactgccgcacctggcgtggaagacatttctggccttccctctggcgaggtccttgagactgctgcacccggagtggaggatattagcggactgccctccggagaagtcctcgagaccgcagcccccggagtggaggatatctcaggcttgcccagcggagaagtgctggagactgctgccccaggtgtagaggacatctctggcctgccatctggcgaggtcttagaaacggccgctcccggcgtagaggacatttcgggcctgccgtccggggaagtgctcgagaccgccgcaccaggcgttgaagacataagcggcctacccagcggtgaggtactggagacaacagctcctggggtggaggagatatccggtctgcccagcggagaagtattagagaccacggcccctggcgttgacgaaataagcggcctgccctctggagaagttcttgagactactgccccaggcgtggaggaaattagcggcttacctagcggagaagttctggagactagtacttctgccgtgggagatttatcaggcctgccctccggtggtgaagttctcgaaattagcgtttctggcgttgaagatatcagtggtttgccctccggtgaggtcgtcgagactagcgcctccggcatcgaggatgttagcgagttaccatccggcgaagggcttgaaacaagtgctagcggcgtagaagacctgtcgagactgcccagtggcgaagaagtactcgagattagcgcatccggcttcggggatttatcaggactacccagtggcggagaaggactggagacatcagccagcgaagtggggacagatctgagcggacttccctccggtagggagggtctggagacatctgcctctggggccgaggatttaagcggcctgccttctggtaaagaagaccttgtcggaagcgcttctggagaccttgatctaggaaaactaccatcgggcacacttggcagtggtcaagccccagagaccagcggactaccctccggcttttctggcgaatatagcggcgtggaccttggctcaggaccccccagcggcctcccagacttttccggcttgccctccggcttccccacagtgagtctcgtagactccacccttgtggaagttgtgactgcttcaaccgcgagcgaactggaggggagaggaactatcggaataagcggagctggtgaaatctcaggcctgcccagtagcgagttagatattagtggacgtgcaagtggcttacctagcggcacagaactcagtggccaggcctcaggatccccagacgttagtggcgagatccccggactatttggggtaagcggtcaacccagcggcttccccgatacaagtggagaaacctccggtgtgaccgaattgtcgggactgagcagtggacagcccggaataagcggggaagccagcggagtgctgtatggaacttcccaaccattcgggatcaccgacctttcgggagaaacatccggagtgcccgacctcagcgggcagcccagtgggcttccagggtttagtggcgcaacctccggggtacctgatctggtgagcggtacgacttcaggatctggcgagtctagtggaataacgttcgtcgacacctctctggtcgaagttgcaccaaccacatttaaagaagaggaggggttggggtctgttgagcttagcgggctcccaagtggagaggccgacctgagtggaaagagtggaatggttgatgtaagtggacaatttagtgggacagttgattcttccgggttcacctctcagacaccagaattctccggcctgccttctgggatcgccgaagtctctggtgaatcctcacgcgctgaaatcggttcctctttgccttctggggcgtactacggttcaggcacaccatcgtcctttcccacagtcagccttgtagaccggacgctggtcgaatccgtgacccaagcacccacggcacaggaagcaggcgagggtccctcaggtatcctggaattgtctggagctcacagtggggcccccgatatgagtggagaacattctggatttcttgacttgtcgggactgcagagcggccttatcgagccaagcggtgagcctcccggaacaccatactttagtggagatttcgcaagcacaactaacgtctctggagaatcctccgtggcaatggggacttctggcgaagctagcggactcccagaagtcacgctcattacaagcgagttcgttgaaggagttaccgagcctactatatcccaggaactgggccaaagaccccccgtcactcacaccccacaacttttcgagtcctcaggtaaggtgtccacggcaggagacatttctggggctacacccgtactccccgggtctggagttgaggtctcttccgtgcctgagtcgtcttctgagacatccgcataccccgaagcaggattcggggcctcagcagccccagaggcaagtcgagaagactccggcagtccagacctgagcgaaaccacaagcgcatttcacgaggcaaatctggaaaggagcagcggtttaggtgtgtctggaagcactctcacctttcaagagggagaggctagcgccgccccagaagtgagtggtgaatcaactacaacaagtgacgtgggtacagaggcccccggattaccaagcgcaacccccaccgcaagcggcgacagaactgagatctccggggacctgagcgggcacactagccaattaggggtggttataagtacgagcattcccgaatcggagtggacccagcagacacagcgcccagcggagactcatttagagatcgaatcatcaagcttgctgtattccggggaagaaacgcacacggtggaaacagcaacaagccctacagacgcttcaatccctgccagtcccgaatggaagagagagtcagaatctactgctgccgatcaagaagtctgcgaggagggatggaacaaataccagggacactgttaccggcatttcccagatcgcgaaacatgggtggatgctgaaaggagatgtagggagcagcaatctcatttgtcctctatagtaacacccgaagaacaagagtttgtcaacaacaatgctcaggattaccaatggattggcctgaacgaccgcacaatcgaaggagatttcaggtggagcgatgggcatcctatgcagtttgagaactggcgacccaatcaacctgataatttttttgcagcaggggaagactgcgtggtaatgatttggcatgagaagggtgagtggaacgacgtgccctgcaactatcacctgccttttacttgtaaaaagggtaccgtcgcctgcggagagccccctgtcgtggaacacgctcgaacgttcggacagaaaaaggataggtacgagattaatagccttgttagataccagtgcacagaaggattcgtacagcgccacatgccgacaatccggtgccaaccttcagggcattgggaagagcctcagattacgtgtacagatcccactacatataaacgccgcctccagaaaagatcttctcgtcaccctcgccggagccgcccctccaccgcgcattag

SEQ ID NO: 314284 - DNA, 7479 bp, Artificial Sequence
  derived and/or modified sequence
atgaccaccctgctgtgggtgttcgtgaccctgagagtgatcaccgccgccgtgaccgtggagaccagcgaccacgacaacagcctgagcgtgagcatcccccagcccagccccctgagagtgctgctgggcaccagcctgaccatcccctgctacttcatcgaccccatgcaccccgtgaccaccgcccccagcaccgcccccctggcccccagaatcaagtggagcagagtgagcaaggagaaggaggtggtgctgctggtggccaccgagggcagagtgagagtgaacagcgcctaccaggacaaggtgagcctgcccaactaccccgccatccccagcgacgccaccctggaggtgcagagcctgagaagcaacgacagcggcgtgtacagatgcgaggtgatgcacggcatcgaggacagcgaggccaccctggaggtggtggtgaagggcatcgtgttccactacagagccatcagcaccagatacaccctggacttcgacagagcccagagagcctgcctgcagaacagcgccatcatcgccacccccgagcagctgcaggccgcctacgaggacggcttccaccagtgcgacgccggctggctggccgaccagaccgtgagataccccatccacacccccagagagggctgctacggcgacaaggacgagttccccggcgtgagaacctacggcatcagagacaccaacgagacctacgacgtgtactgcttcgccgaggagatggagggcgaggtgttctacgccaccagccccgagaagttcaccttccaggaggccgccaacgagtgcagaagactgggcgccagactggccaccaccggccagctgtacctggcctggcaggccggcatggacatgtgcagcgccggctggctggccgacagaagcgtgagataccccatcagcaaggccagacccaactgcggcggcaacctgctgggcgtgagaaccgtgtacgtgcacgccaaccagaccggctaccccgaccccagcagcagatacgacgccatctgctacaccggcgaggacttcgtggacatccccgagaacttcttcggcgtgggcggcgaggaggacatcaccgtgcagaccgtgacctggcccgacatggagctgcccctgcccagaaacatcaccgagggcgaggccagaggcagcgtgatcctgaccgtgaagcccatcttcgaggtgagccccagccccctggagcccgaggagcccttcaccttcgcccccgagatcggcgccaccgccttcgccgaggtggagaacgagaccggcgaggccaccagaccctggggcttccccacccccggcctgggccccgccaccgccttcaccagcgaggacctggtggtgcaggtgaccgccgtgcccggccagccccacctgcccggcggcgtggtgttccactacagacccggccccaccagatacagcctgaccttcgaggaggcccagcaggcctgcctgagaaccggcgccgtgatcgccagccccgagcagctgcaggccgcctacgaggccggctacgagcagtgcgacgccggctggctgagagaccagaccgtgagataccccatcgtgagccccagaaccccctgcgtgggcgacaaggacagcagccccggcgtgagaacctacggcgtgagacccagcaccgagacctacgacgtgtactgcttcgtggacagactggagggcgaggtgttcttcgccaccagactggagcagttcaccttccaggaggccctggagttctgcgagagccacaacgccaccctggccaccaccggccagctgtacgccgcctggagcagaggcctggacaagtgctacgccggctggctggccgacggcagcctgagataccccatcgtgacccccagacccgcctgcggcggcgacaagcccggcgtgagaaccgtgtacctgtaccccaaccagaccggcctgcccgaccccctgagcagacaccacgccttctgcttcagaggcatcagcgccgtgcccagccccggcgaggaggagggcggcacccccaccagccccagcggcgtggaggagtggatcgtgacccaggtggtgcccggcgtggccgccgtgcccgtggaggaggagaccaccgccgtgcccagcggcgagaccaccgccatcctggagttcaccaccgagcccgagaaccagaccgagtgggagcccgcctacacccccgtgggcaccagccccctgcccggcatcctgcccacctggccccccaccggcgccgccaccgaggagagcaccgagggccccagcgccaccgaggtgcccagcgccagcgaggagcccagccccagcgaggtgcccttccccagcgaggagcccagccccagcgaggagcccttccccagcgtgagacccttccccagcgtggagctgttccccagcgaggagcccttccccagcaaggagcccagccccagcgaggagcccagcgccagcgaggagccctacacccccagcccccccgtgcccagctggaccgagctgcccagcagcggcgaggagagcggcgcccccgacgtgagcggcgacttcaccggcagcggcgacgtgagcggccacctggacttcagcggccagctgagcggcgacagagccagcggcctgcccagcggcgacctggacagcagcggcctgaccagcaccgtgggcagcggcctgcccgtggagagcggcctgcccagcggcgacgaggagagaatcgagtggcccagcacccccaccgtgggcgagctgcccagcggcgccgagatcctggagggcagcgccagcggcgtgggcgacctgagcggcctgcccagcggcgaggtgctggagaccagcgccagcggcgtgggcgacctgagcggcctgcccagcggcgaggtgctggagaccaccgcccccggcgtggaggacatcagcggcctgcccagcggcgaggtgctggagaccaccgcccccggcgtggaggacatcagcggcctgcccagcggcgaggtgctggagaccaccgcccccggcgtggaggacatcagcggcctgcccagcggcgaggtgctggagaccaccgcccccggcgtggaggacatcagcggcctgcccagcggcgaggtgctggagaccaccgcccccggcgtggaggacatcagcggcctgcccagcggcgaggtgctggagaccaccgcccccggcgtggaggacatcagcggcctgcccagcggcgaggtgctggagaccgccgcccccggcgtggaggacatcagcggcctgcccagcggcgaggtgctggagaccgccgcccccggcgtggaggacatcagcggcctgcccagcggcgaggtgctggagaccgccgcccccggcgtggaggacatcagcggcctgcccagcggcgaggtgctggagaccgccgcccccggcgtggaggacatcagcggcctgcccagcggcgaggtgctggagaccgccgcccccggcgtggaggacatcagcggcctgcccagcggcgaggtgctggagaccgccgcccccggcgtggaggacatcagcggcctgcccagcggcgaggtgctggagaccgccgcccccggcgtggaggacatcagcggcctgcccagcggcgaggtgctggagaccgccgcccccggcgtggaggacatcagcggcctgcccagcggcgaggtgctggagaccgccgcccccggcgtggaggacatcagcggcctgcccagcggcgaggtgctggagaccgccgcccccggcgtggaggacatcagcggcctgcccagcggcgaggtgctggagaccgccgcccccggcgtggaggacatcagcggcctgcccagcggcgaggtgctggagaccgccgcccccggcgtggaggacatcagcggcctgcccagcggcgaggtgctggagaccgccgcccccggcgtggaggacatcagcggcctgcccagcggcgaggtgctggagaccgccgcccccggcgtggaggacatcagcggcctgcccagcggcgaggtgctggagaccgccgcccccggcgtggaggacatcagcggcctgcccagcggcgaggtgctggagaccgccgcccccggcgtggaggacatcagcggcctgcccagcggcgaggtgctggagaccaccgcccccggcgtggaggagatcagcggcctgcccagcggcgaggtgctggagaccaccgcccccggcgtggacgagatcagcggcctgcccagcggcgaggtgctggagaccaccgcccccggcgtggaggagatcagcggcctgcccagcggcgaggtgctggagaccagcaccagcgccgtgggcgacctgagcggcctgcccagcggcggcgaggtgctggagatcagcgtgagcggcgtggaggacatcagcggcctgcccagcggcgaggtggtggagaccagcgccagcggcatcgaggacgtgagcgagctgcccagcggcgagggcctggagaccagcgccagcggcgtggaggacctgagcagactgcccagcggcgaggaggtgctggagatcagcgccagcggcttcggcgacctgagcggcctgcccagcggcggcgagggcctggagaccagcgccagcgaggtgggcaccgacctgagcggcctgcccagcggcagagagggcctggagaccagcgccagcggcgccgaggacctgagcggcctgcccagcggcaaggaggacctggtgggcagcgccagcggcgacctggacctgggcaagctgcccagcggcaccctgggcagcggccaggcccccgagaccagcggcctgcccagcggcttcagcggcgagtacagcggcgtggacctgggcagcggcccccccagcggcctgcccgacttcagcggcctgcccagcggcttccccaccgtgagcctggtggacagcaccctggtggaggtggtgaccgccagcaccgccagcgagctggagggcagaggcaccatcggcatcagcggcgccggcgagatcagcggcctgcccagcagcgagctggacatcagcggcagagccagcggcctgcccagcggcaccgagctgagcggccaggccagcggcagccccgacgtgagcggcgagatccccggcctgttcggcgtgagcggccagcccagcggcttccccgacaccagcggcgagaccagcggcgtgaccgagctgagcggcctgagcagcggccagcccggcatcagcggcgaggccagcggcgtgctgtacggcaccagccagcccttcggcatcaccgacctgagcggcgagaccagcggcgtgcccgacctgagcggccagcccagcggcctgcccggcttcagcggcgccaccagcggcgtgcccgacctggtgagcggcaccaccagcggcagcggcgagagcagcggcatcaccttcgtggacaccagcctggtggaggtggcccccaccaccttcaaggaggaggagggcctgggcagcgtggagctgagcggcctgcccagcggcgaggccgacctgagcggcaagagcggcatggtggacgtgagcggccagttcagcggcaccgtggacagcagcggcttcaccagccagacccccgagttcagcggcctgcccagcggcatcgccgaggtgagcggcgagagcagcagagccgagatcggcagcagcctgcccagcggcgcctactacggcagcggcacccccagcagcttccccaccgtgagcctggtggacagaaccctggtggagagcgtgacccaggcccccaccgcccaggaggccggcgagggccccagcggcatcctggagctgagcggcgcccacagcggcgcccccgacatgagcggcgagcacagcggcttcctggacctgagcggcctgcagagcggcctgatcgagcccagcggcgagccccccggcaccccctacttcagcggcgacttcgccagcaccaccaacgtgagcggcgagagcagcgtggccatgggcaccagcggcgaggccagcggcctgcccgaggtgaccctgatcaccagcgagttcgtggagggcgtgaccgagcccaccatcagccaggagctgggccagagaccccccgtgacccacaccccccagctgttcgagagcagcggcaaggtgagcaccgccggcgacatcagcggcgccacccccgtgctgcccggcagcggcgtggaggtgagcagcgtgcccgagagcagcagcgagaccagcgcctaccccgaggccggcttcggcgccagcgccgcccccgaggccagcagagaggacagcggcagccccgacctgagcgagaccaccagcgccttccacgaggccaacctggagagaagcagcggcctgggcgtgagcggcagcaccctgaccttccaggagggcgaggccagcgccgcccccgaggtgagcggcgagagcaccaccaccagcgacgtgggcaccgaggcccccggcctgcccagcgccacccccaccgccagcggcgacagaaccgagatcagcggcgacctgagcggccacaccagccagctgggcgtggtgatcagcaccagcatccccgagagcgagtggacccagcagacccagagacccgccgagacccacctggagatcgagagcagcagcctgctgtacagcggcgaggagacccacaccgtggagaccgccaccagccccaccgacgccagcatccccgccagccccgagtggaagagagagagcgagagcaccgccgccgaccaggaggtgtgcgaggagggctggaacaagtaccagggccactgctacagacacttccccgacagagagacctgggtggacgccgagagaagatgcagagagcagcagagccacctgagcagcatcgtgacccccgaggagcaggagttcgtgaacaacaacgcccaggactaccagtggatcggcctgaacgacagaaccatcgagggcgacttcagatggagcgacggccaccccatgcagttcgagaactggagacccaaccagcccgacaacttcttcgccgccggcgaggactgcgtggtgatgatctggcacgagaagggcgagtggaacgacgtgccctgcaactaccacctgcccttcacctgcaagaagggcaccgtggcctgcggcgagccccccgtggtggagcacgccagaaccttcggccagaagaaggacagatacgagatcaacagcctggtgagataccagtgcaccgagggcttcgtgcagagacacatgcccaccatcagatgccagcccagcggccactgggaggagccccagatcacctgcaccgaccccaccacctacaagagaagactgcagaagagaagcagcagacaccccagaagaagcagacccagcaccgcccactag

SEQ ID NO: 314285 - DNA, 708 bp, Artificial Sequence
  derived and/or modified sequence
atggcagagaaagtcaataatttcccacccctcccaaaatttatcccactgaaaccctgcttctatcaggatttcgaagcagacattccaccacagcatgtgagtatgaccaaacgcctatactacttgtggatgttgaattctgttaccttggccgtgaatctggttggttgccttgcttggctgatcggtggcggaggagcgacaaacttcggccttgctttcctctggcttatcctgttcaccccatgctcctatgtctgttggtttagaccaatttataaagcattcaaaaccgactccagtttctcctttatggcgtttttttttactttcatggctcagctcgtgatctccattattcaggccgtgggtattcccgggtggggagtgtgtggctggatcgcaaccatcagctttttcggcactaacattggatcggctgttgtcatgctgatccccacagtaatgtttactgtcatggcggtgttcagttttatcgcattgtcaatggttcacaagttttatcgggggtcgggtgggtccttctccaaggcccaagaggagtggaccaccggggcttggaaaaatccccacgtgcagcaagccgcacagaacgccgctatgggggcagctcagggtgctatgaaccaaccccagacccagtacagcgctacccctaactacacctattcaaacgagatgtag

SEQ ID NO: 314286 - DNA, 708 bp, Artificial Sequence
  derived and/or modified sequence
atggctgagaaagttaacaattttccacccctacctaagtttattcctctgaagccatgtttctaccaggatttcgaagccgatatccctccccagcacgtcagcatgacgaagcgactgtactatctatggatgctcaattctgttacattagccgtaaacctggtgggttgtctggcttggctgatcggaggaggaggcgcgaccaatttcggcctcgcattcctttggttgattctgtttacaccatgtagctacgtgtgctggttccgccccatctataaagcatttaaaaccgactctagtttttcctttatggcctttttctttacatttatggctcagctcgtgatctccattatacaggccgtaggcattccaggctggggtgtgtgtgggtggatcgcaaccatttctttctttggaactaacattggaagcgcagtggtgatgctgataccaacagtgatgtttaccgtaatggctgtctttagttttattgcactctcaatggtccacaagttctataggggtagtggggggagcttttcaaaggcgcaggaagagtggactacaggggcctggaagaacccccacgtgcagcaagccgcacagaatgcagcaatgggagctgcccagggggcaatgaatcaaccgcaaacacagtatagtgccacgccaaactacacgtacagcaacgaaatgtag

SEQ ID NO: 314287 - DNA, 708 bp, Artificial Sequence
  derived and/or modified sequence
atggccgagaaggtgaacaacttcccccccctgcccaagttcatccccctgaagccctgcttctaccaggactttgaagctgacatccccccccagcacgtgtccatgaccaagaggctgtactacctgtggatgctgaacagcgtgaccctggccgtgaacctggtgggctgcctggcctggctgattggaggcggcggggccaccaactttggcctggccttcctgtggctgatcctcttcaccccctgcagctatgtgtgctggttccggcccatctacaaggccttcaagacagacagcagcttctccttcatggccttcttcttcaccttcatggcccagctggtgatcagcatcatccaggccgtgggcatccctggctggggcgtgtgtggctggatcgccaccatctccttcttcggcaccaacatcggcagcgctgtggtgatgctgatccccaccgtgatgttcaccgtgatggctgtgttctccttcatcgccctgtccatggtgcacaagttctaccggggcagcggcggcagcttcagcaaggcccaggaggagtggaccaccggggcctggaagaacccccacgtgcagcaggccgcccagaatgctgccatgggcgccgcccagggcgccatgaaccagccccagacccagtacagcgccacccccaactacacctacagcaatgagatgtag

SEQ ID NO: 314288 - DNA, 708 bp, Artificial Sequence
  derived and/or modified sequence
atggccgagaaggtgaacaacttcccccccctgcccaagttcatccctctcaagccttgtttttatcaggacttcgaagcagatatcccccctcagcacgtgagcatgaccaaacgcctgtactacctgtggatgttgaacagtgtcactctcgccgtgaacttggtgggctgcttagcctggcttataggtgggggaggggcaactaatttcggcctggcatttctctggctgatcttgttcactccctgctcctatgtgtgttggttcaggcccatttataaagctttcaagacggatagcagttttagcttcatggccttcttctttaccttcatggcccagctggttatttctatcattcaggctgtgggcattccaggatggggagtttgtgggtggatcgcaaccatcagctttttcggcacaaacatcggttccgctgtggtgatgcttatccccaccgttatgtttactgtgatggcggtgttcagcttcatcgcactttccatggtgcataagttctataggggaagcggcgggtccttctccaaggctcaggaggaatggactacgggtgcttggaaaaaccctcacgttcagcaggccgctcagaatgccgcaatgggggccgcccagggcgccatgaaccaaccccaaacgcagtactccgctacacctaattacacttactccaatgagatgtag

SEQ ID NO: 314289 - DNA, 708 bp, Artificial Sequence
  derived and/or modified sequence
atggccgagaaggtgaacaacttcccccccctgcccaagttcatccctttgaagccatgcttctatcaggacttcgaggctgatatccccccgcagcatgtgagcatgacaaagcgtttgtattatctgtggatgttgaacagcgtgacactggctgttaacctagtcggatgcctggcttggctcatcgggggcgggggagctacaaactttggcctagcattcctatggctgatcctctttaccccctgctcttatgtttgctggttccggcccatttacaaggcgttcaagacagacagctccttcagcttcatggcgtttttcttcacatttatggctcagctagtgatctctatcatccaggccgtgggcatccccggttggggcgtctgcggctggattgcgactatctcgttttttgggacgaacatcgggtccgctgtggtgatgctgatacccacagtgatgttcacagttatggcagttttctctttcatcgccctctcaatggttcataagttctatagaggctctggcggctccttctcaaaagcgcaggaagagtggacaaccggcgcctggaagaacccgcatgtccaacaggcggcgcagaatgccgctatgggtgccgcccagggtgctatgaatcagccacagacacaatactcagcgactccaaattatacctattccaacgaaatgtag

SEQ ID NO: 314290 - DNA, 708 bp, Artificial Sequence
  derived and/or modified sequence
atggctgaaaaggtcaacaacttcccacccctcccaaaattcattccattaaaaccttgtttctatcaggactttgaagccgatatacctcctcagcacgtgagcatgaccaaacgcctttattatttatggatgctcaactcggtgacactggcagtaaacctggttggatgccttgcctggctgattggaggcggtggagccacaaatttcgggctggcgttcttgtggttgatcctgttcaccccctgctcctatgtgtgctggtttcggcctatttataaggcattcaagacagattcgtcctttagcttcatggcattcttttttaccttcatggcccagctcgtcattagtatcatacaagccgtggggattcctggctggggcgtttgtggatggatcgccacaatctccttcttcggcactaatatcggtagtgccgtggtgatgctaattccgactgttatgttcaccgtgatggcggtgtttagctttatcgccctgtcaatggtacacaaattctaccgagggagcgggggtagttttagcaaggctcaggaggaatggaccacaggagcttggaaaaaccctcacgtgcagcaagcggctcagaacgccgctatgggtgccgctcagggagccatgaatcaacctcagacacagtactcggcaacccccaattacacatattccaacgaaatgtag

SEQ ID NO: 314291 - DNA, 708 bp, Artificial Sequence
  derived and/or modified sequence
atggctgaaaaagtgaataactttcccccattacccaaattcatcccgctgaagccctgcttctaccaagacttcgaggctgacattccacctcagcatgtatcgatgacaaagagactttattacctgtggatgctgaactctgtcacactcgcagtgaatctcgttggttgtctcgcttggctcatcggaggtggcggagccactaacttcggcctggcatttctctggctgattctgtttactccttgcagctacgtgtgctggtttcggccaatctataaggcgttcaagaccgactcatcctttagttttatggcctttttttttaccttcatggcccagcttgtgataagtattatccaagccgtgggcattccgggatggggagtgtgtggatggattgcaactatcagttttttcggcaccaatattggttccgctgtggtcatgctcattcccaccgtcatgttcaccgtgatggctgtcttttccttcatcgccctgtcaatggtgcataaattttaccgcggaagtggcggatccttttctaaggcccaggaagagtggaccaccggggcatggaagaaccctcatgtgcagcaggcagcccagaatgcggctatgggggcagcacagggcgctatgaaccagccacagacccaatattccgctaccccaaattacacatattcgaacgaaatgtag

SEQ ID NO: 314292 - DNA, 708 bp, Artificial Sequence
  derived and/or modified sequence
atggccgagaaggtgaacaacttcccccccctgcccaagttcatccccctgaagccctgcttctaccaggacttcgaggccgacatccccccccagcacgtgagcatgaccaagagactgtactacctgtggatgctgaacagcgtgaccctggccgtgaacctggtgggctgcctggcctggctgatcggcggcggcggcgccaccaacttcggcctggccttcctgtggctgatcctgttcaccccctgcagctacgtgtgctggttcagacccatctacaaggccttcaagaccgacagcagcttcagcttcatggccttcttcttcaccttcatggcccagctggtgatcagcatcatccaggccgtgggcatccccggctggggcgtgtgcggctggatcgccaccatcagcttcttcggcaccaacatcggcagcgccgtggtgatgctgatccccaccgtgatgttcaccgtgatggccgtgttcagcttcatcgccctgagcatggtgcacaagttctacagaggcagcggcggcagcttcagcaaggcccaggaggagtggaccaccggcgcctggaagaacccccacgtgcagcaggccgcccagaacgccgccatgggcgccgcccagggcgccatgaaccagccccagacccagtacagcgccacccccaactacacctacagcaacgagatgtag

SEQ ID NO: 314293 - protein, 164 aa, Artificial Sequence
  derived and/or modified sequence
MFLPRLRGRYSSPACQHDQAPLLPLDVTDSSFSFMAFFFTFMAQLVISIIQAVGIPGWGVCGWIATISFFGTNIGSAVVMLIPTVMFTVMAVFSFIALSMVHKFYRGSGGSFSKAQEEWTTGAWKNPHVQQAAQNAAMGAAQGAMNQPQTQYSATPNYTYSNEM

SEQ ID NO: 314294 - DNA, 495 bp, Artificial Sequence
  derived and/or modified sequence
atgtttctacctcgcctcagaggcaggtactcctccccagcctgccagcacgaccaggccccgctgctgcctctggacgtcactgactcatccttctccttcatggccttttttttcacatttatggctcagcttgtgatcagcatcattcaggctgttggcatcccagggtggggcgtctgtggctggattgccactatcagtttttttgggacaaacattggatctgcagttgtcatgctgattccaacagtcatgtttaccgtcatggccgtgttctccttcattgcactttccatggtccacaagttttatcggggcagcggtgggagtttctcaaaggcccaagaggagtggaccaccggcgcctggaaaaatccgcacgtacagcaagcggcccagaacgccgccatgggagcagcccagggcgctatgaatcaacctcaaacgcagtattcggccacacctaactacacctactccaatgagatgtag

SEQ ID NO: 314295 - DNA, 495 bp, Artificial Sequence
  derived and/or modified sequence
atgttcctgccccggctgcggggccgctacagcagccctgcctgccagcacgaccaggcccccctgctgcccctggatgtgacagacagcagcttctccttcatggccttcttcttcaccttcatggcccagctggtgatcagcatcatccaggccgtgggcatccctggctggggcgtgtgtggctggatcgccaccatctccttcttcggcaccaacatcggcagcgctgtggtgatgctgatccccaccgtgatgttcaccgtgatggctgtgttctccttcatcgccctgtccatggtgcacaagttctaccggggcagcggcggcagcttcagcaaggcccaggaggagtggaccactggagcctggaagaacccccacgtgcagcaggccgcccagaatgctgccatgggcgccgcccagggcgccatgaaccagccccagacccagtacagcgccacccccaactacacctacagcaatgagatgtag

SEQ ID NO: 314296 - DNA, 495 bp, Artificial Sequence
  derived and/or modified sequence
atgttcctgccccggctgcggggccggtacagcagccccgcctgccagcatgatcaggcacctctccttcctctggacgtcaccgatagcagcttctcctttatggcctttttctttacttttatggctcagctcgtgatatccataatccaagccgttggaattccaggctggggtgtgtgcgggtggatagcaaccattagcttcttcgggaccaatattggctccgccgttgtcatgctaatcccaacagtgatgttcaccgttatggccgtattcagtttcatcgccttgtcgatggtacacaaattttatcgaggcagtggaggttccttcagtaaggcccaggaggagtggacgacaggggcttggaagaacccgcatgtgcagcaggccgcccaaaacgccgccatgggagctgcccagggagcgatgaaccagcctcagactcaatattccgcaacacctaactacacgtacagtaatgagatgtag

SEQ ID NO: 314297 - DNA, 495 bp, Artificial Sequence
  derived and/or modified sequence
atgttcctgcctcgcctacgagggcgttatagttctcccgcttgtcagcacgatcaggcccctctgctgcctttagatgtgaccgattcatccttttcttttatggccttttttttcactttcatggctcaactcgtgatctccatcattcaggccgtgggaatccctggatggggtgtctgtggctggattgctacaatcagcttttttgggacaaatatcgggagcgctgtggtgatgctgattccaacagtgatgtttaccgtaatggctgtgttttcattcattgccctttcaatggtgcacaagttttacagaggatcaggtggatccttcagcaaagcccaagaagaatggactactggggcttggaagaacccccatgtccagcaggccgctcaaaatgctgccatgggcgctgcccaaggggctatgaatcagccccagacccagtactctgcgacccctaattatacttattctaatgaaatgtag

SEQ ID NO: 314298 - DNA, 3270 bp, Artificial Sequence
  derived and/or modified sequence
tccgcgccgcatcgctcgggtgcagcgcagctcagcgcagcgctgcggcctttcggcagccgaacggccgcggcagcatttcctttacaggctgcacttccttccctgctgccagccaggagtttcggaaggtttcctggaggaagtgtgatacagcagttcaggacaaagaggtgtgggcaggccactgggccagctggtaacatcatggcagagaaagtgaacaacttcccaccattgcccaaattcatcccgctgaagccatgtttctaccaagacttcgaggcagatattcctccccagcatgtcagcatgaccaagcgcctctactacctctggatgtgactgacagctccttcagtttcatggcattcttctttaccttcatggctcagttggtcatcagcatcatccaggccgtgggcatcccaggctggggcgtctgcggctggattgctaccatctccttcttcggaacgaacattggctcggcggtggtgatgctaattcccactgtcatgttcacagtgatggccgtcttttccttcatcgccctcagcatggttcataaattttaccggggaagtggggggagtttcagcaaagctcaggaggagtggaccacaggggcctggaagaatccacatgtgcagcaggcagcccagaacgcagccatgggggcagcccagggtgccatgaatcagcctcagactcagtattccgccacccccaattacacgtactccaatgagatgtgaaccagccacgcctaccaggtggcagagctggggccattgggacagggggctcaagccacatcgtcatttgtggttaccaagcagggttcccccttcccttttctccttccctactttgtacaaaggaccagagttatatatatatatatatgtatatgtctgtaccccagcccccacctttcagattctgctcttggcactcagctgtgggctgcacgtggagctgtcccgtgcggtagtagctgtgtctgtgtcccctcgtgaaatagtgtgcagtggaggtctcttgtggtgctagatgtgtgtttagagctaaaccagcccccacccccaccctccacctgcccctcttgcctctggcccctctgaccctggcccagggacccctcacggggccaggggaggcatagcagaaagactggccccttcctagggttatgagctggaactgtttctactttcagtcttcctgggaagtaacagtacttagcactcttggtggtgggtgggagggtgggtacaggccagggatattcccttgctcttttgatccctccaggcctcgcctccttcagcctcctcctccctcatctgttccctgatgtcacattccctgtgcaatcttcccttgcccatggtctgtctatctctttcctatgtggcttttctttgtcttccccaaggctgagtgtcccagttttatctgctcctgagactgagcccagatccccaaatctaatctgatttacagttcaaggaagctgatggggagctgggccttacccctgatgtaggaggggcacacagctgggggtgcagagcccacctgggtacctgacccccaggggatgaaaatgcaaggatgagtctgcttgggcctgagagtttgatctgcaggggcaggctcatcttttctctcccctgccttctcctccttctctccccagagcccccttgagcccctctgcctatgtccctctgcctcctccccatgcccccagttgctgtggcttgattctgctaccctgaccccaccatgtgccaggtggcatctgccttactgccttccctgaggagctgggacatgctgggcagttgtcagatgtaaaggcacagctggagcagagggcatgtcagtaatgattggtccctggggaaggtctggctggctccagcacagtgaggcatttaggtatctctcggtgaccgttggattcctggaagcagtagctgttctgtttggatctggtaggacagggctcagagggctaggcacggagggaaggtcagaggagaaggcaggcagggcccagtgagaggggagcatgccttcccccaccctggcttgctcttggtcacagggcggttctgggcacttgaactcagggcccaagcagaagcacaggcccagtcctggctgcaagcacaatagcctgaatgggatttcaggttaggcagggtgggaggggaggctctctggctttagttttgttttgttttccaaatcaaggtaacttgctcccttctgcctacaggccttggtcttggcttgtcctcacccagtcggaactccctaccactttcaggagagtggttttaggcccgtggggctgttctgttccaagcagtgtgagaacatggctggtagaggctctagctgtgtgcggggcctgaaggggagtgggttctcgcccaaagagcatctgcccatttcccaccttcccttctcccaccagaagcttgcctgagctgtttggacaaaaatccaaaccccacttggctactctggcctggcttcagcttggaacccaatacctaggcttacaggccatcctgagccaggggcctctggaaattctcttcctgatggtcctttaggtttgggcacaaaatataattgcctctcccctctcccattttctctcttgggagcaatggtcacagtccctggtacctgaaaaggtacctaggtctaggcccttcttccctttcccttcctctcccctaccccagaactttggctccctttcccttctctctctggtagctccaggaggcctgtgatccagctccctgcctagcatccatgacctgttggatgttacctccaatcagtttcctgtcctacctgcctctttggcttggacctatatggccatgctctggctctacccttgggaagcctgatcccggtgtgtggcccagcttgttcaggccctgggatgctgcatctccaggcaactatgcactttcccggggagagaaccagtatgagaagtgggggcagggcacacattcatctttgtaggaaggtctggcctggggtcgggtgaaggagggcccaggtcagttctggggtcccagtgacctgctttgccattctcctggtgccgctgctgctccctgtttctggagctggatgttccccagctggcagttgagctgcctgagccaatgtgtctgtctttggtaactgagtgaaccataataaaggggaacatttggccctgtg

SEQ ID NO: 314299 - DNA, 495 bp, Artificial Sequence
  derived and/or modified sequence
atgttcctgcccagactgagaggcagatacagcagccccgcctgccagcacgaccaggcccccctgctgcccctggacgtgaccgacagcagcttcagcttcatggccttcttcttcaccttcatggcccagctggtgatcagcatcatccaggccgtgggcatccccggctggggcgtgtgcggctggatcgccaccatcagcttcttcggcaccaacatcggcagcgccgtggtgatgctgatccccaccgtgatgttcaccgtgatggccgtgttcagcttcatcgccctgagcatggtgcacaagttctacagaggcagcggcggcagcttcagcaaggcccaggaggagtggaccaccggcgcctggaagaacccccacgtgcagcaggccgcccagaacgccgccatgggcgccgcccagggcgccatgaaccagccccagacccagtacagcgccacccccaactacacctacagcaacgagatgtag

SEQ ID NO: 314300 - DNA, 2339 bp, Artificial Sequence
  derived and/or modified sequence
gggaggtggggcatgggaggaccagagacgaagggcttggaaggagacccccacatgcatcatttcctcctcttcacagtgtgctgggagtccagccgtgcactgtgccagatgcctcaggaggagaaccctccccagtgtactgtgaaggatgacacagcacttcttcctaatgacacgcgaccgtcctggtgcctctacatggttgatgcgggcagtgtgggaccctcagttctaggactggtccgcagagaaagcacccaggagcagagcgcttcggagcggtcctcagtggcgccacctgctggtgctaatagggacagccacaggcctcttgcagactggcccaccctgcctacttccctactgacaagttctttggtatttcaaaagggagaaaccactataaaagacaagaggaagggcaggtactaggtgtttcatttccagaattaaaaaaaaaatccatttaagacgtaccactgttttaccggactgaatgggactgtagtgccaagcacagccaggaaatagagaaactgttattatggaagggaatttgttcacatgggaaagcctcattaaatagattctatgtgtgatgtttgagtgaccaatgaaaatagctggcctcagttctgcatggcacactcccaagagcaacagttactattatcacaagcctggtataaataagatagaagcagccctggacccacagccagcaacctgggttattggcccagctctgtctttgtgtgcacatgtcatttggacatcttgtcacctttctaggtcctctgtaaagtgggaaaacagagtggagttggattgaatggtctccaagatcatttccagctctgacctttggtgttctcaggatttgtaaagcagagataggtaaaacacaaaagcagacccacggaccgacctttgtataactttggagtgtggttgctcatgcacatgtgaagtgcaggcagatcaaggttctgtggctttgtctgccctgtccattagagcacaatctggatagaatgccagccaccaagatgcatgaggggcagggtcaccatctcagaaggggaagcacaggaatgtgattgggatggttaaacctctcttctcctccctttgtgctggaacagcagttgaagtttggtcctggagtaattgctgtgatgacttggaaatgcccttggttgctgaggacagctctgtcctgtagtgacagagtgactgcctggctgtggctcttgggttcacagaatccctaatcctccaagcccctaagaggcagggcagggatgctacccacaatatatgcagaaccccagatggagcctgtgggagagagaggaaattaccgtcttcactgtaggcaaaggagaatggctgtgattagccatatatgcctataagaaggagcagagccatactgtccttgtgggttgggagaggggacacagaatccagggcaattgtctgaggtctcaaagtaagttaagccagagtcaaagccaaactccaagtcttggccaaggggatgagaaaagcaaggagctagtcttataggtcaaggaagatgaggtatagttaagagtcatcagtatcacagaacaggccagcagggctttattaggtatgtagaactattataaaccaaggatcttgggagatattaatatctgctggccagacctaaaaaaaactgaaggcccaaggaaagtgactggactcactggaaagtatctaacaaatactttggattccaaagtatttccaataccttgaagattcctttgaaaacatcaaagcacaaactcaaatctgcacaagattacaaaagcacaattttggtgttatttttagaatgcaatacacaaagctatgttcatttctctcagcaagcattttcctgggtagtagtaatagcttaggaatcaaatgccacttttgtttttccttttttcactagtttgaaataccacaaatcacaggtgagtcagtcctcccagaggaaaagacagtcctagggagaatcacaggcctggcagacaagaccacactgagagcagtagaaggaacctgcatgcttaagggacagaggactgtgttgtgttctcataatagaccgctggatgaagaagtggttaaaaaccaaccctcgaaaaacaaaaatccctggctaatcctgaaatatatttaacttgaagtctttggatgatttttttaaggttaaaaaaaagtttaggattattataaatcaatatttataaataagcaacaatgtatttggaatttttgtttacctgattaaatatgtttttggtatgtgt

SEQ ID NO: 314301 - DNA, 792 bp, Artificial Sequence
  derived and/or modified sequence
caaaattgggaagcggttctcgaaacatactgtcaaggcgtagttgcagtgagttgtgaagaaatgttgatcccagagaaaagtttgcattttgcccacctcaaagatattttgattgaatttcaagaaagctgagaatggagtggtcaataaaggcttctttttcggacttggtttggtcgcccaactcacattgaagcctaagacccagctgatttctcttcatttctgcaaagttactgtaccatggcaggccaacgaacatgtcaaaggaggagcagcagagctggccccgggaaaatgcaagaacctccaaagagcattgaagaattcttaaagtttcaaaattgggattattggccaagggaaatccattttagagatgatgataaatggtcatgcactctgaaaaaaataaaagaagatagttcatttgtttcaatttatacacacctatgggaaaatgttcctcgaatatttgaagcacttttgatcatggaatcaaaattaaaggaatattcacttattttgcaaaaccacacctctgaaatatttaagtggaaaagcatgatttctgagacaagttcttatagaaaattggaacgatatggggaatttctaaagaagtaccataagaaaaaaaagataatgctttcagatgaaatggagacagagaagaatatagagggttgcagcttcacaggattcaaagcaaatgaacttactcagctacccagacatttggatgctgaacaaatttatctttttattttaaaagcccataattttgat

SEQ ID NO: 314302 - DNA, 1596 bp, Artificial Sequence
  derived and/or modified sequence
aacaggctgggacgacagcggggggggggttagacgggaagttccgcctcagcctctcaatcagcggcggtgtcgcacttctcccgagaggctccggcgaggggcagggccgcgttcgtccgggacccgcctcaagcctcgcagcctttcacccagtttcctcccgattcttgctgggacaacaaaattgggaagcggttctcgaaacatactgtcaaggcgtagttgcagtgagttgtgaagaaatgttgatcccagagaaaagtttgcattttgcccacctcaaagatattttgatttttggtcgcccaactcacattgaagcctaagacccagctgatttctcttcatttctgcaaagttactgtaccatggcaggccaacgaacatgtcaaaggaggagcagcagagctggccccgggaaaatgcaagaacctccaaagagcattgaagaattcttaaagtttcaaaattgggattattggccaagggaaatccattttagagatgatgataaatggtcatgcactctgaaaaaaataaaagaagatagttcatttgtttcaatttatacacacctatgggaaaatgttcctcgaatatttgaagcacttttgatcatggaatcaaaattaaaggaatattcacttattttgcaaaaccacacctctgaaatatttaagtggaaaagcatgatttctgagacaagttcttatagaaaattggaacgatatggggaatttctaaagaagtaccataagaaaaaaaagataatgctttcagatgaaatggagacagagaagaatatagagggttgcagcttcacaggattcaaagcaaatgaacttactcagctacccagacatttggatgctgaacaaatttatctttttattttaaaagcccataattttgatgaaagagtttttaaaatctggaagactcattttctctcagaagcctccattgctcttttgcatgactccttttggtggtggtttctccataaatttaggatatatcctgattgtttggcacaagccatatatgcaacgttccatgaagcatttccagaatcgagttacctctttaatgatgaatttaaagaagatctagggaataacatttttctttggtgttcaggtttaaaacctcaaaaaggcttttggatccactggaaactgaaagaactctccacaaccaccattcatggtagcaaaaaagcacctgcaaaatcagtaaaggaaagaattgcagacagtcaagaacatatatcaactagctgaaagtgagaagatctagattcttatttgtgttggaccactaatgaccagtatgacttcgggcaagttacctgctgttccagagtctcagctgctacatttgtaaaattggtgtattggtctaatgcctctatggtgctttacaattctgtgatctgtgacttatactcactactaatataaggaacagggcacctacttttaaaagctgttattctttaaaaaggaggaaatggtttcacattgattatcagtgtttgatttttgcctcaataagaatattggaacaataaatgttaatttagagatggaa

SEQ ID NO: 314303 - DNA, 912 bp, Artificial Sequence
  derived and/or modified sequence
atggccggccagagaacctgccagagaagaagcagcagagccggccccggcaagatgcaggagccccccaagagcatcgaggagttcctgaagttccagaactgggactactggcccagagagatccacttcagagacgacgacaagtggagctgcaccctgaagaagatcaaggaggacagcagcttcgtgagcatctacacccacctgtgggagaacgtgcccagaatcttcgaggccctgctgatcatggagagcaagctgaaggagtacagcctgatcctgcagaaccacaccagcgagatcttcaagtggaagagcatgatcagcgagaccagcagctacagaaagctggagagatacggcgagttcctgaagaagtaccacaagaagaagaagatcatgctgagcgacgagatggagaccgagaagaacatcgagggctgcagcttcaccggcttcaaggccaacgagctgacccagctgcccagacacctggacgccgagcagatctacctgttcatcctgaaggcccacaacttcgacgagagagtgttcaagatctggaagacccacttcctgagcgaggccagcatcgccctgctgcacgacagcttctggtggtggttcctgcacaagttcagaatctaccccgactgcctggcccaggccatctacgccaccttccacgaggccttccccgagagcagctacctgttcaacgacgagttcaaggaggacctgggcaacaacatcttcctgtggtgcagcggcctgaagccccagaagggcttctggatccactggaagctgaaggagctgagcaccaccaccatccacggcagcaagaaggcccccgccaagagcgtgaaggagagaatcgccgacagccaggagcacatcagcacctag

SEQ ID NO: 314304 - DNA, 549 bp, Artificial Sequence
  derived and/or modified sequence
atggccggccagagaacctgccagagaagaagcagcagagccggccccggcaagatgcaggagccccccaagagcatcgaggagttcctgaagttccagaactgggactactggcccagagagatccacttcagagacgacgacaagtggagctgcaccctgaagaagatcaaggaggacagcagcttcgtgagcatctacacccacctgtgggagaacgtgcccagaatcttcgaggccctgctgatcatggagagcaagctgaaggagtacagcctgatcctgcagaaccacaccagcgagatcttcaagtggaagagcatgatcagcgagaccagcagctacagaaagctggagagatacggcgagttcctgaagaagtaccacaagaagaagaagatcatgctgagcgacgagatggagaccgagaagaacatcgagggctgcagcttcaccggcttcaaggccaacgagctgacccagctgcccagacacctggacgccgagcagatctacctgttcatcctgaaggcccacaacttcgactag

SEQ ID NO: 314305 - DNA, 915 bp, Artificial Sequence
  derived and/or modified sequence
atggccggccagagaacctgccagagaagaagcagcagagccggccccggcaagatgcaggagccccccaagagcatcgaggagttcctgaagttccagaactgggactactggcccagagagatccacttcagagacgacgacaagtggagctgcaccctgaagaagatcaaggaggacagcagcttcgtgagcatctacacccacctgtgggagaacgtgcccagaatcttcgaggccctgctgatcatggagagcaagctgaaggagtacagcctgatcctgcagaaccacaccagcgagatcttcaagtggaagagcatgatcagcgagaccagcagctacagaaagctggagagatacggcgagttcctgaagaagtaccacaagaagaagaagatcatgctgagcgacgagatggagaccgagaagaacatcgagggctgcagcttcaccggcttcaaggccaacgagctgacccagctgcccagacacctggacgccgagcagatctacctgttcatcctgaaggcccacaacttcgacgagagagtgttcaagatctggaagacccacttcctgagcgaggccagcatcgccctgctgcacgacagcttctggtggtggttcctgcacaagttcagaatctaccccgactgcctggcccaggccatctacgccaccttccacgaggccttccccgagagcagctacctgttcaacgacgagttcaaggaggacctgggcaacaacatcttcctgtggtgcagcggcctgaagccccagaagggcttctggatccactggaagctgaaggagctgagcaccaccaccatccacggcagcaagaaggcccccgccaagagcgtgaaggagagaatcgccgacagccaggagcacatcagcaccagctag

SEQ ID NO: 314306 - DNA, 912 bp, Artificial Sequence
  derived and/or modified sequence
atggcaggccagaggacgtgccagaggagaagctcccgcgccggacctggcaagatgcaggaaccacccaagtctatcgaagagttcctgaagtttcaaaactgggactactggccccgggaaatccactttagggacgacgataaatggtcctgtacccttaagaaaatcaaggaggactcaagcttcgtgtctatttatacccatctgtgggaaaacgttccaagaatcttcgaggctttgctaatcatggagagtaaactgaaagagtatagtctcatcttgcagaatcatacctctgaaatatttaagtggaaaagcatgatctccgagacttcatcctacagaaagcttgaacgttatggggagttcttaaagaagtaccataaaaaaaaaaagattatgttgtcagatgagatggaaaccgaaaagaacatcgagggttgctctttcacaggcttcaaagctaacgagctcacacagctgccgcgccacctggatgctgagcagatctacttgtttattcttaaagcccacaattttgacgaaagggtattcaagatttggaagactcatttcctgagtgaggcttccatcgccctcctacatgatagtttctggtggtggtttctccacaaatttcggatttatcccgattgcctcgcccaggctatttatgccactttccatgaagccttccccgagtcctcatatttgttcaatgacgaattcaaggaagacctggggaacaacatattcctttggtgtagcggtctgaagccacagaaagggttctggatccactggaagttgaaagagttgtccacgaccacaatccatggctctaagaaagcccctgccaagtcagtgaaggagagaatcgcagattcccaggaacacatatcgacgtag

SEQ ID NO: 314307 - DNA, 549 bp, Artificial Sequence
  derived and/or modified sequence
atggccggccagcggacatgccagagaagatcctctagggccggaccggggaaaatgcaggaacctcccaaatccatcgaggagttccttaagtttcagaactgggattactggccgcgggagatccatttccgagacgatgacaaatggtcatgcacactaaaaaagatcaaagaggactctagcttcgtcagcatttatacacacctttgggagaacgtgcctaggatttttgaggctctcttaattatggaaagcaagttgaaggaatacagtctgattctccagaaccatacttcagaaatattcaaatggaagtcaatgatttccgagacttcatcttaccgtaagcttgaacggtacggagagttcctgaaaaagtaccataaaaagaaaaaaattatgctttcagacgagatggagaccgaaaagaacattgagggttgtagttttaccgggtttaaggcaaatgaactgacacagctgcccagacacttggatgccgaacagatttacctttttattctgaaggcccataacttcgattag

SEQ ID NO: 314308 - DNA, 915 bp, Artificial Sequence
  derived and/or modified sequence
atggcaggacagcgaacgtgtcaacgccggagttccagagccggaccaggaaaaatgcaggaaccccccaaatctattgaagaattcttgaagttccagaattgggactactggccccgcgagattcacttccgggacgacgacaagtggtcctgtaccttgaaaaagattaaggaagactcctcatttgtcagcatctacacacacctgtgggagaatgtgccgcgaatcttcgaggctctgctaattatggagtctaagctgaaagagtacagtctgattcttcagaatcataccagcgaaatcttcaagtggaagagtatgatcagcgaaacctcttcctaccgaaagctggaacggtatggcgaatttctgaaaaagtaccacaagaagaagaagattatgctgtcagacgagatggaaactgagaagaacatcgaaggttgcagcttcaccgggttcaaggccaacgagctaacgcagttgccaaggcatctcgacgcagaacagatttatctcttcattctgaaggctcacaattttgatgagcgagttttcaaaatctggaagactcactttctttccgaggcgtccattgcactccttcatgacagtttttggtggtggtttcttcacaaatttcggatctatccagactgcttggcgcaagcaatttacgccacctttcatgaagcctttccagagtcaagctatctgttcaacgacgagtttaaggaggacctgggcaacaacatattcctatggtgttccggcctcaagcctcagaagggattctggattcactggaagttaaaggagctctccacaacgactattcatgggtccaaaaaggcgcccgctaagtccgtcaaggaaaggatagccgacagtcaagagcatatctcaaccagctag

SEQ ID NO: 314309 - DNA, 912 bp, Artificial Sequence
  derived and/or modified sequence
atggccggccagaggacctgccagaggaggagcagccgggccggccctgggaagatgcaggagccccccaagagcattgaggagttcctgaagttccagaactgggactactggccccgggagatccacttcagagatgatgacaagtggagctgcaccctgaagaagatcaaggaggacagcagctttgtgtccatctacacccacctgtgggagaatgtgccccgcatctttgaggccctgctgatcatggagagcaagctgaaggagtacagcctcatcctgcagaaccacaccagcgagatcttcaagtggaagtccatgatcagcgagaccagcagctacaggaagctggagagatatggagagttcctgaagaagtaccacaagaagaagaagatcatgctgagtgatgagatggagacagagaagaacatcgagggctgcagcttcaccggcttcaaggccaatgagctgacccagctgcccaggcacctggatgctgagcagatctacctgttcatcctgaaggcccacaactttgatgagagggtcttcaagatctggaagacccacttcctgtctgaggccagcatcgccctgctgcatgacagcttctggtggtggttcctgcacaagttccgcatctacccagactgcctggcccaggccatctatgccaccttccacgaggccttccctgagagcagctacctgttcaatgatgagttcaaggaggacctgggcaacaacatcttcctgtggtgcagcggcctgaagccccagaagggcttctggatccactggaagctgaaggagctgagcaccaccaccatccacggcagcaagaaggccccagccaagtctgtgaaggagagaattgctgacagccaggagcacatcagcacctag

SEQ ID NO: 314310 - DNA, 549 bp, Artificial Sequence
  derived and/or modified sequence
atggccggccagaggacctgccagaggaggagcagccgggccggccctgggaagatgcaggagccccccaagagcattgaggagttcctgaagttccagaactgggactactggccccgggagatccacttcagagatgatgacaagtggagctgcaccctgaagaagatcaaggaggacagcagctttgtgtccatctacacccacctgtgggagaatgtgccccgcatctttgaggccctgctgatcatggagagcaagctgaaggagtacagcctcatcctgcagaaccacaccagcgagatcttcaagtggaagtccatgatcagcgagaccagcagctacaggaagctggagagatatggagagttcctgaagaagtaccacaagaagaagaagatcatgctgagtgatgagatggagacagagaagaacatcgagggctgcagcttcaccggcttcaaggccaatgagctgacccagctgcccaggcacctggatgctgagcagatctacctgttcatcctgaaggcccacaactttgattag

SEQ ID NO: 314311 - DNA, 915 bp, Artificial Sequence
  derived and/or modified sequence
atggccggccagaggacctgccagaggaggagcagccgggccggccctgggaagatgcaggagccccccaagagcattgaggagttcctgaagttccagaactgggactactggccccgggagatccacttcagagatgatgacaagtggagctgcaccctgaagaagatcaaggaggacagcagctttgtgtccatctacacccacctgtgggagaatgtgccccgcatctttgaggccctgctgatcatggagagcaagctgaaggagtacagcctcatcctgcagaaccacaccagcgagatcttcaagtggaagtccatgatcagcgagaccagcagctacaggaagctggagagatatggagagttcctgaagaagtaccacaagaagaagaagatcatgctgagtgatgagatggagacagagaagaacatcgagggctgcagcttcaccggcttcaaggccaatgagctgacccagctgcccaggcacctggatgctgagcagatctacctgttcatcctgaaggcccacaactttgatgagagggtcttcaagatctggaagacccacttcctgtctgaggccagcatcgccctgctgcatgacagcttctggtggtggttcctgcacaagttccgcatctacccagactgcctggcccaggccatctatgccaccttccacgaggccttccctgagagcagctacctgttcaatgatgagttcaaggaggacctgggcaacaacatcttcctgtggtgcagcggcctgaagccccagaagggcttctggatccactggaagctgaaggagctgagcaccaccaccatccacggcagcaagaaggccccagccaagtctgtgaaggagagaattgctgacagccaggagcacatcagcaccagctag

SEQ ID NO: 314312 - DNA, 912 bp, Artificial Sequence
  derived and/or modified sequence
atggccggccagcggacctgccagcggcggagcagccgggccggccctggtaagatgcaggagccacctaagtcaattgaggaatttttgaaattccagaactgggattactggccacgcgagattcacttccgagacgatgataagtggtcttgtacattaaagaagatcaaagaggacagctcctttgtgtcgatttatacacacctttgggaaaacgttcccaggatctttgaggccctgctgataatggagagcaaattgaaggagtatagcctgattctgcaaaaccacaccagcgagatctttaagtggaaatccatgatttccgaaacaagctcttaccggaagctcgagcggtatggcgagtttctgaagaagtatcataagaaaaagaaaattatgctgtcagacgaaatggagaccgaaaagaatattgaggggtgtagctttacaggttttaaggcaaacgaactcacacagctgccccgtcacctggacgctgaacaaatttacctgttcatcttaaaagcccataacttcgatgaacgcgtgttcaagatctggaaaacacacttcctgagcgaagcgagtatcgctctcctgcatgactccttctggtggtggtttctgcataaattcaggatctaccctgactgccttgctcaagccatatacgccacgtttcacgaagctttccctgagtccagttacctttttaatgatgagttcaaggaagacttgggcaataatatttttctgtggtgttccgggctgaaaccccagaagggtttttggattcattggaaactaaaggagcttagcaccaccacgattcacggctctaagaaagcgcctgcaaagtcagtgaaagagagaatcgccgattcccaggaacacattagtacttag

SEQ ID NO: 314313 - DNA, 549 bp, Artificial Sequence
  derived and/or modified sequence
atggccggccagcggacctgccagcggcggagcagccgggccggcccaggaaagatgcaagaacctccgaagagcattgaggaatttctgaaattccaaaactgggactattggcctagagagattcactttcgggacgacgacaaatggagctgcactctgaagaaaatcaaggaagactcatcctttgtttccatctacacacacttatgggagaatgtgccacgaattttcgaagcgctgttgatcatggagtccaaattgaaggagtacagcctcattttacaaaaccacactagtgagatctttaagtggaagtcaatgatttcagagacctcaagctaccgcaaactggagagatacggcgaattcctgaagaagtaccacaagaaaaagaagattatgctttctgacgaaatggagacggagaaaaacatcgaagggtgttccttcaccggattcaaagccaacgaactgactcaactgccacggcacctcgacgctgaacagatttaccttttcattcttaaagcccacaacttcgattag

SEQ ID NO: 314314 - DNA, 915 bp, Artificial Sequence
  derived and/or modified sequence
atggccggccagcggacctgccagcggcggagcagccgggccggcccagggaagatgcaggagcctccaaagagtattgaggagttcctgaagttccagaattgggactattggccccgcgagatacatttccgcgacgatgacaaatggagctgcacactcaagaagatcaaggaggatagctcctttgtctcaatttatacacatctctgggaaaacgtcccccgaatattcgaagctctccttattatggagtccaagctgaaggaatatagcctgatcctccagaatcacacctctgagatctttaagtggaaatcgatgatttctgaaacctcatcctatcgtaagctcgagcggtatggcgaattcctgaaaaagtatcacaagaaaaagaagatcatgctgagcgacgagatggaaacggagaagaacattgagggttgcagttttacaggcttcaaggctaacgagctaacacagttgccccggcacctggacgcagaacagatctaccttttcattcttaaagctcacaacttcgacgaacgcgtgttcaagatctggaaaacccacttcctctcagaggccagcatcgcacttctccatgactccttttggtggtggttccttcacaagtttaggatctaccctgattgcctggcccaggccatatacgccaccttccacgaggcctttcccgagagtagctatctgttcaacgacgaattcaaagaggatctcggaaacaacattttcctgtggtgcagcggacttaaacctcaaaaaggattctggatacactggaagttaaaagaactctccaccactactatccatggatctaagaaggcacccgcaaagtctgttaaagaacggattgccgactcgcaggagcatatttcaacgtcatag

SEQ ID NO: 314315 - DNA, 912 bp, Artificial Sequence
  derived and/or modified sequence
atggctgggcagagaacttgccagagacgttcatccagagcagggccagggaagatgcaggaaccaccaaagtcgatagaggaatttctcaagttccagaactgggactactggccaagggagatccacttccgcgatgatgacaagtggtcctgcacgctcaagaagataaaggaagactcaagtttcgtgagtatctacacccacttgtgggagaatgtgccccgtatattcgaggccctcctcattatggagagcaaactgaaagagtactctctcatcctgcagaaccatacgtccgaaatctttaaatggaagagcatgatcagtgaaacgagcagctaccggaagttagagaggtacggagaatttctgaagaaataccataaaaaaaagaagataatgctgagtgacgagatggaaactgagaaaaatatagaagggtgctccttcaccggattcaaagcaaacgaactgacacaactgccacggcatttggatgcggagcagatctacctgttcattctgaaagcccacaatttcgacgaacgcgtcttcaagatttggaagacgcactttctgagtgaggccagcatcgccctcctgcacgactcattctggtggtggttcctgcacaaatttaggatttatcccgactgcctcgctcaagccatctatgccaccttccacgaggcgtttcctgaatcatcatatctgttcaacgatgaatttaaggaagatctcggtaacaacattttcctctggtgttcaggcctgaaacctcagaaaggtttctggattcattggaaactcaaggagctcagtactaccacaattcacgggtccaaaaaagctcctgccaagagtgtaaaagaacgcatcgccgattcccaggaacacatcagcacctag

SEQ ID NO: 314316 - DNA, 549 bp, Artificial Sequence
  derived and/or modified sequence
atggctggacagcggacctgtcagaggcgatcttccagagctgggccaggtaaaatgcaggagccccctaaaagtatagaagaattcttaaagttccagaattgggactattggccgagagaaatccactttagggacgatgacaagtggtcatgtaccctgaagaagatcaaagaggactcttcattcgtgtctatttatacccatttgtgggaaaacgtaccacggattttcgaggccctactgatcatggaatctaaactgaaagagtatagtctgattctccagaaccacacctctgagatttttaagtggaaaagcatgatcagcgaaacgagctcttataggaaacttgaaagatatggagagttcctgaagaaatatcataaaaaaaaaaaaattatgctctcagacgagatggaaaccgagaaaaatatcgaaggctgctcctttacgggcttcaaggcaaacgagttaacccagctgcctcggcatttagacgcagagcaaatttacttgttcattcttaaagctcataacttcgactag

SEQ ID NO: 314317 - DNA, 915 bp, Artificial Sequence
  derived and/or modified sequence
atggcaggccagcgtacttgtcagaggagatcttctcgagctggcccaggaaagatgcaggagcctccaaaaagcattgaggagtttttgaagttccagaactgggattattggcctcgcgaaattcatttcagagatgatgacaaatggtcctgtactcttaagaaaataaaggaagactcaagcttcgtcagtatttatacacatctatgggaaaacgtgcccaggattttcgaggcactgctgattatggagtccaagcttaaagaatactcactgatcttgcagaatcatacgtctgagatcttcaaatggaagtcaatgatcagcgagaccagctcctaccgtaagctagagcgatatggggaattcctgaaaaagtaccacaagaagaagaagatcatgctgagtgacgaaatggaaaccgagaaaaacattgagggctgctccttcacgggctttaaggcgaacgagttaactcagctacctaggcatctggacgctgagcagatatacctgttcatcctcaaggctcataattttgatgaaagggtgtttaaaatttggaagacacactttctgagcgaggcgtcgattgctctgctgcatgattcattttggtggtggtttctccacaagtttcgaatctatccagattgcttggctcaagctatctacgctacttttcatgaggcattccccgagtcatcctacctatttaatgatgaatttaaggaggacctggggaataacattttcctgtggtgttcagggttgaagccccagaagggcttctggattcattggaaactgaaggaactatcgactacaactattcacggctcgaagaaggctccagccaagtctgttaaagagagaattgctgattctcaggagcacattagcacatcgtag

SEQ ID NO: 314318 - protein, 721 aa, Artificial Sequence
  derived and/or modified sequence
MGQGEPSQRSTGLAGLYAAPAASPVFIKGSGMDALGIKSCDFQAARNNEEHHTKALSSRRLFVRRGQPFTIILYFRAPVRAFLPALKKVALTAQTGEQPSKINRTQATFPISSLGDRKWWSAVVEERDAQSWTISVTTPADAVIGHYSLLLQVSGRKQLLLGQFTLLFNPWNREDAVFLKNEAQRMEYLLNQNGLIYLGTADCIQAESWDFGQFEGDVIDLSLRLLSKDKQVEKWSQPVHVARVLGALLHFLKEQRVLPTPQTQATQEGALLNKRRGSVPILRQWLTGRGRPVYDGQAWVLAAVACTVLRCLGIPARVVTTFASAQGTGGRLLIDEYYNEEGLQNGEGQRGRIWIFQTSTECWMTRPALPQGYDGWQILHPSAPNGGGVLGSCDLVPVRAVKEGTLGLTPAVSDLFAAINASCVVWKCCEDGTLELTDSNTKYVGNNISTKGVGSDRCEDITQNYKYPEGSLQEKEVLERVEKEKMEREKDNGIRPPSLETASPLYLLLKAPSSLPLRGDAQISVTLVNHSEQEKAVQLAIGVQAVHYNGVLAAKLWRKKLHLTLSANLEKIITIGLFFSNFERNPPENTFLRLTAMATHSESNLSCFAQEDIAICRPHLAIKMPEKAEQYQPLTASVSLQNSLDAPMEDCVISILGRGLIHRERSYRFRSVWPENTMCAKFQFTPTHVGLQRLTVEVDCNMFQNLTNYKSVTVVAPELSA

SEQ ID NO: 314319 - DNA, 2166 bp, Artificial Sequence
  derived and/or modified sequence
atgggccagggcgagccctcccagagatcgactgggttagctggcctttatgctgcacccgcggcatcacccgtatttattaaaggcagcgggatggatgctctgggtattaaaagttgcgacttccaggcagctcggaataacgaggaacaccacaccaaagccttatcatcccgcagattgtttgtgagaaggggccagcctttcactattattctgtactttagagcccctgtgagggcttttttacctgccctaaagaaagtggctcttaccgcacagacaggtgagcagccctccaagatcaatcgcacacaggctacattccctatcagcagtctgggtgatcgcaagtggtggtctgcagttgttgaggagagagatgcccagtcatggacaatctccgttactacccctgcagacgcagtgataggccactactctttgttactgcaggtgtctggaagaaagcaacttttgttgggccagttcactctgctgttcaatccatggaacagggaggatgcggtgtttctcaagaacgaggcccagcggatggagtacctcctgaaccaaaacgggctgatttatctggggaccgcagactgcattcaggccgaatcgtgggacttcgggcagttcgagggcgacgtgatcgacctgtctctgcgtcttttgtctaaagataaacaggtggagaagtggtcacagcctgttcatgttgcccgtgtcctgggcgcgttattgcactttctaaaggaacagagagtgctgccgaccccgcagacacaggcgacccaggaaggcgccttgctgaacaaaagaaggggcagtgtcccaattcttagacagtggctgaccggtcgcggcaggcccgtctatgacgggcaagcctgggtgctggcggctgtggcttgcacggtgctgaggtgtcttggaattcctgcacgcgtggtcaccacatttgcctccgcacaagggaccggaggccgcctgctgatcgacgagtactacaacgaggaagggctgcagaatggagagggtcagcgcggacggatttggatttttcagacatcaacagagtgctggatgacccggcctgctctgccacaggggtacgatggatggcagattctgcatcccagtgctccgaacggtggaggcgttctgggctcttgtgacctcgttccggtacgggcggtcaaggagggtacgttaggactgactccagccgtctcagatctgttcgccgcgattaacgcctcctgtgtggtctggaagtgctgtgaggatgggactttggaactgacagactccaacacaaagtacgttggcaacaacatcagcaccaaaggggttgggtctgatagatgcgaagacatcacgcagaattataagtaccctgaagggtcccttcaagaaaaagaagtcctggaaagggtagagaaggaaaagatggaacgggaaaaggacaacggaatccgtcctccaagcctggagaccgcatcgccactgtatctgctgctgaaagcccccagctctttgccactccgcggcgacgctcaaatctcagttaccctggtcaaccacagtgagcaagagaaagctgtccagctcgcgatcggcgtgcaggcagtgcactacaacggcgtgttagctgcgaaactctggaggaagaaactgcatctaactctgtccgctaacctcgagaaaattatcaccatcggcctgttctttagcaattttgagcgcaatcccccagaaaatacatttttgcggctgactgcaatggccactcacagcgagtccaacctgagctgttttgcacaggaggatattgctatatgtcgcccgcatctggccatcaaaatgccagagaaagcggagcagtaccagcctctgacagcctcagtttcccttcagaactcactggacgctcccatggaggattgcgtcatctctattctggggcggggcttaatccatagagagaggagttaccgttttaggagcgtttggccagagaacacaatgtgtgccaaattccagtttacacccactcacgtgggcctgcagaggctcacagtcgaagtcgactgtaacatgttccagaatttaaccaactacaagagcgtgactgtggtagctccggaattgtctgcctag

SEQ ID NO: 314320 - DNA, 2166 bp, Artificial Sequence
  derived and/or modified sequence
atgggccagggcgagcccagccagaggagcacaggcctggccggcctgtatgctgccccagctgccagccctgtgttcatcaagggcagcggcatggatgccctgggcatcaagagctgtgacttccaggccgccaggaacaatgaggagcaccacaccaaggccctgagcagcagaagactctttgtgcggcggggccagcccttcaccatcatcctgtacttccgggcccctgtgcgggccttcctgcctgccctgaagaaggtggccctgacagcccagacaggagagcagcccagcaagatcaacagaacccaggccaccttccccatcagcagcctgggggacaggaagtggtggagcgctgtggtggaggagagagatgcccagagctggaccatctctgtgaccaccccagcagatgctgtgattggccactacagcctgctgctgcaggtgtctggcaggaagcagctgctgctgggccagttcaccctgctcttcaacccctggaaccgggaggatgctgtgttcctgaagaatgaggcccagaggatggagtacctgctgaaccagaatggcctcatctacctgggcacagctgactgcatccaggccgagagctgggactttggccagtttgaaggagatgtgattgacctgagcctgcggctgctgagcaaggacaagcaggtggagaagtggagccagcctgtgcacgtggcccgggtgctgggcgccctgctgcacttcctgaaggagcagagggtgctgcccaccccccagacccaggccacccaggagggcgccctgctgaacaagagaagaggctctgtgcccatcctgcggcagtggctgaccggccggggccggcctgtgtatgatggccaggcctgggtgctggccgctgtggcctgcaccgtgctgcgctgcctgggcatcccagcccgggtggtgaccacctttgccagcgcccagggcaccggcggccgcctgctgattgatgagtactacaatgaggagggcctgcagaatggagagggccagaggggccgcatctggatcttccagaccagcacagagtgctggatgaccaggcctgccctgccccagggctatgatggctggcagatcctgcaccccagcgccccaaatggaggcggcgtgctgggcagctgtgacctggtgcctgtgcgggctgtgaaggagggcaccctgggcctgaccccagctgtgtctgacctgtttgctgccatcaatgccagctgtgtggtgtggaagtgctgtgaagatggcaccctggagctgacagacagcaacaccaagtatgtgggcaacaacatcagcaccaagggcgtgggcagtgacagatgtgaggacatcacccagaactacaagtacccagagggcagcctgcaggagaaggaggtgctggagcgggtggagaaggagaagatggagcgggagaaggacaatggcatccggccccccagcctggagacagccagccccctgtacctgctgctgaaggcccccagcagcctgcccctgcggggagatgcccagatctctgtgaccctggtgaaccacagcgagcaggagaaggctgtgcagctggccatcggcgtgcaggccgtgcactacaatggagtgctggccgccaagctgtggaggaagaagctgcacctgaccctgagcgccaacctggagaagatcatcaccatcggcctcttcttcagcaactttgagaggaaccccccagagaacaccttcctgcggctgacagccatggccacccacagcgagagcaacctgagctgctttgcccaggaggacatcgccatctgccggccccacctggccatcaagatgcctgagaaggccgagcagtaccagcccctgacagcctctgtgtccctgcagaacagcctggatgcccccatggaggactgtgtgatcagcatcctgggccggggcctcatccaccgggagaggagctaccgcttccgctctgtgtggccagagaacaccatgtgtgccaagttccagttcacccccacccacgtgggcctgcagaggctgactgtggaggtggactgcaacatgttccagaacctgaccaactacaagtctgtgacagtggtggcccctgagctgagcgcctag

SEQ ID NO: 314321 - DNA, 2166 bp, Artificial Sequence
  derived and/or modified sequence
atgggccagggcgagcccagccagcggagcaccggcctggccggcctctatgccgctcctgctgcctcgccggttttcatcaaaggaagtgggatggacgccctgggaatcaaatcctgcgatttccaggctgcccgcaacaacgaggagcaccatactaaagctctgtcctctcggaggctgtttgtgcgcaggggccagccatttaccatcatcctttactttcgcgccccagttcgcgcattcctgcctgctctaaaaaaggtggcactgacagctcaaacaggcgagcagcctagtaaaataaatcgtacacaagcgactttcccaatttcatccctgggcgatagaaaatggtggtcagcagtggtcgaggaacgagatgcgcaatcttggactatctctgtgactacccctgccgatgccgtgattgggcattattccctgttgctgcaggtctccgggcggaagcaattgctgttggggcaatttaccttgctgtttaatccatggaaccgcgaggacgcagtgttcctcaagaacgaggcccagcgtatggagtacctcctgaaccagaatggccttatatatcttggcaccgccgactgcatccaggctgaatcttgggatttcggtcagttcgaaggagatgtgatcgatctttctctgagactgctgagtaaagacaaacaggtggagaagtggagccagcctgtgcacgtggctcgagtactcggggctctgctccactttctgaaggaacaacgggtacttcccacccctcagactcaagcaactcaggagggtgcacttctgaacaagaggagggggtccgtgcccatcctgcgccaatggctcacaggaagggggagaccagtctacgacgggcaagcttgggtcctggcggcggtggcttgcaccgtcctaagatgcctgggcattccagcgcgggtcgtaacaacatttgcttctgcccaaggtaccggcgggaggctcttaattgacgaatattataatgaggagggcctgcagaacggagaaggccaacgaggaaggatatggatctttcagacaagtacagagtgctggatgacgcgccccgctctgcctcagggctatgatggttggcagatactgcatccctctgcccctaatggaggcggggtgctcgggtcctgcgatctggtacctgttcgtgccgtcaaagaagggactcttgggctcactcctgcagtttccgatcttttcgctgccattaatgcctcttgcgtagtgtggaaatgttgcgaagacgggactctggaactgacggactccaatacaaaatacgttggtaacaatatcagtacgaagggggtgggctctgatagatgcgaggatataactcagaattacaagtatcccgagggctcccttcaagaaaaagaggtactggagagggtggaaaaggagaagatggagagggaaaaggacaatggaatccggccgcctagtctggagaccgcatctccattatacttgttattaaaggcgccaagcagtctccccttgcgcggggatgctcagatttcagtgaccctggtcaaccacagcgaacaggagaaagcagtgcaacttgccatcggagtccaggcagtacattacaatggagtgctggccgccaagctgtggcgcaaaaaacttcaccttacactctcagccaatctagaaaagatcattacaattggcctgttcttctccaattttgagagaaacccgcccgaaaatacattcctgaggctcacagccatggcaacccactctgaaagtaatttaagctgcttcgctcaagaggatatcgccatatgcagaccccacctcgcaatcaagatgcccgaaaaagccgaacagtaccagcccctgaccgccagtgttagcctccagaattccttggacgcacctatggaggactgcgtgatctccatcttaggtagaggtcttatccatcgagaacggtcctaccggtttcgcagtgtatggcccgaaaacaccatgtgcgcaaaattccagttcaccccaacacacgtcgggctgcaacgcctgaccgtagaggtggactgcaacatgtttcaaaacctgactaactataaaagtgtcacagtcgttgctcctgaactgagcgcatag

SEQ ID NO: 314322 - DNA, 2166 bp, Artificial Sequence
  derived and/or modified sequence
atgggtcagggcgaaccttcccagcgaagcactggtttagccggactttacgcagctcctgcagcctcacccgtttttatcaaaggctctggcatggatgcgctcggaataaaatcttgcgatttccaagccgctcggaataatgaggagcatcacaccaaggctctctcctcacggcgtctctttgtcaggcggggtcagccctttacaatcattctctactttcgggcacctgttcgcgcatttcttcccgctctaaaaaaggtggcactaacagcacagaccggcgaacagcccagcaagattaaccgtacccaagctacattccctatatcctcactgggggaccgaaaatggtggtcagcggttgtcgaagagcgggacgcacagtcctggacaatatcagtcactacacccgctgatgccgtaattggccactacagcctcctgcttcaagtttccgggagaaagcagctcctattaggccaattcaccctgctgttcaacccttggaatagggaggacgccgtgttccttaagaatgaggcgcagcgtatggaatacctgttgaaccagaacggactaatctatttgggaactgccgactgtattcaagctgaatcttgggatttcggtcagtttgagggtgacgtaattgacctttcactccggctgctgagcaaggacaagcaggtggaaaaatggagtcaacccgtacatgtggctagggttctgggtgccttgctgcactttttgaaggagcagcgagttctgcccaccccccagactcaggccacccaggagggagccctgctgaataaaagacgaggcagcgtaccaattctgcgacagtggctgactggccgaggcagacccgtgtacgacggacaggcttgggtgctggcagccgtcgcttgcacagtattgcggtgtctggggataccggcacgggttgtcaccactttcgcttccgcacagggtaccggcggacggctgctcatcgatgagtactataacgaggaaggactgcagaacggtgagggacagaggggcaggatttggattttccaaacctcaaccgagtgctggatgacacggccagcactgccgcaagggtatgatggctggcaaattctgcatccatccgctcccaatggcggtggcgtgctgggcagctgcgatctggtaccagtgagagccgtgaaggaggggacgctgggcttaacacccgcagtatcagatctgttcgcagcaatcaatgctagctgcgtggtctggaaatgctgcgaagatggcacactggagctcactgattccaacacgaaatatgtcggaaataacatttcaacaaaaggagtaggaagcgaccggtgtgaagacattacccagaactacaaatatcctgagggatcgctgcaggaaaaagaggtactggaacgggtggagaaagagaaaatggagagagaaaaggacaacggaattcggcctcccagtttagagaccgcttctccactctacctactgctgaaggcccctagttcactcccattaagaggagatgctcagatctccgtgaccttggtgaaccacagcgaacaggaaaaggccgtgcagctggctatcggcgtccaagccgtccactataatggcgttctcgctgcaaaactgtggcgtaaaaaactgcacttgacactctctgcaaatctcgagaagatcatcaccatcgggctgttcttcagtaacttcgagcgcaatccaccagaaaacacttttctacgcctcacagccatggctactcactctgagagcaacctcagctgtttcgcccaagaggatatcgcgatatgccggcctcacctggcgataaagatgccagaaaaggccgaacaatatcaaccattgactgcctctgtgagcctgcaaaatagcctggacgcacctatggaggattgtgtgatcagcatcctgggccgaggtttgattcacagggagcgcagttatagatttcggtccgtctggccggagaatacaatgtgtgctaagtttcagtttacccctactcacgtggggctgcagcgcttgacagttgaggttgattgcaacatgtttcagaacctgaccaattacaaaagcgttacagtcgtggccccagagctttcagcttag

SEQ ID NO: 314323 - DNA, 2166 bp, Artificial Sequence
  derived and/or modified sequence
atgggccagggcgagcccagccagagaagcaccggcctggccggcctgtacgccgcccccgccgccagccccgtgttcatcaagggcagcggcatggacgccctgggcatcaagagctgcgacttccaggccgccagaaacaacgaggagcaccacaccaaggccctgagcagcagaagactgttcgtgagaagaggccagcccttcaccatcatcctgtacttcagagcccccgtgagagccttcctgcccgccctgaagaaggtggccctgaccgcccagaccggcgagcagcccagcaagatcaacagaacccaggccaccttccccatcagcagcctgggcgacagaaagtggtggagcgccgtggtggaggagagagacgcccagagctggaccatcagcgtgaccacccccgccgacgccgtgatcggccactacagcctgctgctgcaggtgagcggcagaaagcagctgctgctgggccagttcaccctgctgttcaacccctggaacagagaggacgccgtgttcctgaagaacgaggcccagagaatggagtacctgctgaaccagaacggcctgatctacctgggcaccgccgactgcatccaggccgagagctgggacttcggccagttcgagggcgacgtgatcgacctgagcctgagactgctgagcaaggacaagcaggtggagaagtggagccagcccgtgcacgtggccagagtgctgggcgccctgctgcacttcctgaaggagcagagagtgctgcccaccccccagacccaggccacccaggagggcgccctgctgaacaagagaagaggcagcgtgcccatcctgagacagtggctgaccggcagaggcagacccgtgtacgacggccaggcctgggtgctggccgccgtggcctgcaccgtgctgagatgcctgggcatccccgccagagtggtgaccaccttcgccagcgcccagggcaccggcggcagactgctgatcgacgagtactacaacgaggagggcctgcagaacggcgagggccagagaggcagaatctggatcttccagaccagcaccgagtgctggatgaccagacccgccctgccccagggctacgacggctggcagatcctgcaccccagcgcccccaacggcggcggcgtgctgggcagctgcgacctggtgcccgtgagagccgtgaaggagggcaccctgggcctgacccccgccgtgagcgacctgttcgccgccatcaacgccagctgcgtggtgtggaagtgctgcgaggacggcaccctggagctgaccgacagcaacaccaagtacgtgggcaacaacatcagcaccaagggcgtgggcagcgacagatgcgaggacatcacccagaactacaagtaccccgagggcagcctgcaggagaaggaggtgctggagagagtggagaaggagaagatggagagagagaaggacaacggcatcagaccccccagcctggagaccgccagccccctgtacctgctgctgaaggcccccagcagcctgcccctgagaggcgacgcccagatcagcgtgaccctggtgaaccacagcgagcaggagaaggccgtgcagctggccatcggcgtgcaggccgtgcactacaacggcgtgctggccgccaagctgtggagaaagaagctgcacctgaccctgagcgccaacctggagaagatcatcaccatcggcctgttcttcagcaacttcgagagaaacccccccgagaacaccttcctgagactgaccgccatggccacccacagcgagagcaacctgagctgcttcgcccaggaggacatcgccatctgcagaccccacctggccatcaagatgcccgagaaggccgagcagtaccagcccctgaccgccagcgtgagcctgcagaacagcctggacgcccccatggaggactgcgtgatcagcatcctgggcagaggcctgatccacagagagagaagctacagattcagaagcgtgtggcccgagaacaccatgtgcgccaagttccagttcacccccacccacgtgggcctgcagagactgaccgtggaggtggactgcaacatgttccagaacctgaccaactacaagagcgtgaccgtggtggcccccgagctgagcgcctag

SEQ ID NO: 314324 - DNA, 4553 bp, Artificial Sequence
  derived and/or modified sequence
tggatatgggactcctgtttgtggcctcctctcttccagagtcttccagtgcagtccagataacatctctgagagtctcttgagaccactgaagcaagaggcttcaaggtttgttctaggcttctctagttggcaggtcttccccatcccaccccctcccccagggctgccaggcgtattcctgcctgggcctcctggcacaagagataaaatgaacagggttactcccagtaactggtccaggagataccagcagagagggagtaggagagaagaaacatgtcagggtgctcacaggagtagtggggggaggttttgctatttccagattcttaagccaacaaaagtgccttcatattttctgtctggaagacagaaagcccagaaggagcccagaagcaacagtttgagagaggcgctttctgcggccaagtggataagaggagcggcctgcaaccatgggacagggtgagccaagccagcgctcgacagggcttgctggactgtatgcagcccccgcagcatcacctgttttcattaaaggaagtgggatggatgccctgggtatcaagagctgtgactttcaggcagcaagaaacaatgaggagcaccacaccaaggccctcagctcccggcgcctctttgtgaggagggggcagcccttcaccatcatcctgtacttccgcgctccagtccgtgcatttctgcctgccctgaagaaggtggccctcactgcacaaactggagagcagccttccaagatcaacaggacccaagccacattcccaatttccagtctgggggaccgaaagtggtggagtgcagtggtggaggagagagatgcccagtcctggaccatctctgtgaccacacctgcggacgctgtcattggccactactcgcttctgctgcaggtctcaggcaggaagcaactcctcttgggtcagttcacactgctttttaacccctggaatagagaggatgctgtgttcctgaagaatgaggctcagcgcatggagtacttgttgaaccagaatggtctcatctacctgggtacagctgactgcatccaggcagagtcctgggactttggccagttcgagggggatgtcattgacctcagcctgcgcttgctgagcaaggacaagcaggtagagaagtggagccagccggtgcacgtggcccgtgtgttgggtgccttgctgcattttctcaaggagcagagggtcctgcccaccccgcagacccaggccacccaggaaggggccttgctgaacaagcgccggggcagcgtgcccatcctgcggcagtggctcaccggccgaggccgacctgtgtatgatggccaggcctgggtgttggctgctgttgcttgcacagtgctgcgatgcctgggaatccctgcccgcgtggtgaccacgtttgcctcagcacagggcaccggtgggcgtcttctcatagatgaatactataatgaggagggacttcagaacggagaaggccagagaggcagaatctggatcttccagacttccacagagtgctggatgacgcggcctgccttgccccagggttatgatggatggcagattctgcacccaagtgctcctaatggaggtggagtcctggggtcctgtgatctggtgccggtcagagcagtcaaggaggggacgctggggctgaccccagcagtgtcagacctttttgctgccataaatgcctcatgtgtggtctggaagtgctgtgaggatgggacactggagttgactgactccaacacaaagtatgttggcaacaacatcagcaccaagggtgtgggcagtgaccgctgcgaggacatcactcagaactacaagtatcctgaagggtctcttcaggaaaaagaggtgctggagagagtcgagaaagagaaaatggaacgtgagaaagacaacggcatccgtcctcccagtctcgagactgccagtcctctgtacctgctcttgaaagcacccagctccctacccctgagaggggatgcccagatctcagtgacgctggttaatcacagtgagcaggagaaggcagtgcagctggcaattggggtccaggctgtacactacaacggtgtccttgctgccaagctctggaggaagaagctgcacctcacgctcagtgccaacctggaaaagataataaccatcggcctgttcttctccaattttgagcgaaacccacccgagaacaccttccttagactcaccgccatggcaacacactctgaatccaaccttagctgctttgctcaggaagacattgccatttgtagaccacaccttgccatcaagatgccagagaaagcagagcagtatcaacccctcacagcctcagtcagcctccagaactccctagatgcccccatggaggactgtgtgatctccatcctgggaagggggctcattcacagagagaggagctacagattccgttcagtgtggcctgaaaacaccatgtgtgccaagttccagttcacgccaacacatgtggggctccagagactcactgtggaagtggactgcaacatgttccagaacctaaccaactataaaagcgtcaccgtggtagcccctgaactatcagcttaaacttccagctctatcaccactctcctgccaacccttgttctacaatctaaaccaaacatgtgctaggaagagaaactttgcgtctcagtgtttgtgttgctataaaggaataactgaggctgggtagtttaaaagaaaagagctttatttggctcacggctctgcaggctgtacaagaaacagtgagggcttcaggctgcttccacttatgcaggaagatgaagggaggcaacgtgagcagagatcacagggcaagaatgggttgaggggtaggggtaagtgccaggtgccagcctcgttttaacagccagctctggggtgggggagggacatatagagcgagaacttactcattaccccaccaatggaacgaagccattcatgagggatccaaacacctcccattaggccccacctccaacactgggaatccaatttcagcatgaggtttgcagggttgaatatccaaactacatcactttatcagataaatgagtagtcattcaggttgaaaaggtgctcagatacctttaaggagtacattcagattgttcaggttcaggttttttgcaaccattttactgctcattaatacattcattaacttacagataagggaaaggacctaacacttaaatcattctaatatttctgatgaagtgggatattatcccaaaatggaatttttaggtaatcttaaaattacattgatcaagctgggctcggtggctcacatctgtaatcccagcactttgggaggctgacgtgggcagatcacctgaggtcaggagtttgagaccagcctggccaacatggtgaaaccccatctctactaaaaatacaaaaattagctggacatggtggtgtgcatctgtagtcccagctacttgagaggctgaagccagagaattgcttgagaacctgggaggcggaggttgcagtgagccgagagtgtgccactgcactccagcttgggggacagagcaagactccatctcaaaaaaaaaaaaaaaaaaaaaaaaattacattgatcagtgctttccctgatcattatccttaaagatccaaacatgactgaacgaagttatacaatacaggacctgagagaataattcagctagaggtaagtctttatattagagttctatattcattaagtatcccacaattaaagtctgatgttaataacatgaatttggtccagtagagaaatataaaagtatataaaaaataggctctatatgaaaggataaaagaactagactgttgtacaatgttattattttgtttatgttattttgttgccttgacactctgtcagtttgattttagttccttcccttcatgacacttgttaacaatacaaaatggcacttcaaaacagtaagctaaaactcatttggcttaaggaatttcaaccccaaccccaagtatacattagtcactcaaagaatgactgctgttgctgattatacctaaagacagcagaaaggcatatgttatgaattacacctacaaaaggaagatgatgggcatgagaggtggcggagacctgtaggacatgcataatgccctattcagctcaccagaatatacatcattatagatttacactgctttccaatatgcagtcttctagactgatgcaaaagtataattaagtggtgatggttttgcaaaaggatgaactgaaaaggcccttaaaattacataaaatctcttacacactaaaaaatttttgatttataaaaatttggtatttacatttggggacacacgtaaccaaggacaacacaagtatgtataaggaaaataaatctgttcaataaggtgggcaaacctaacaaatgagctcaatgccaatatattttagagacatggagtaatctgtgataatattcagaaggacttgctgataataatatata

SEQ ID NO: 314325 - protein, 613 aa, Artificial Sequence
  derived and/or modified sequence
MGQALGIKSCDFQAARNNEEHHTKALSSRRLFVRRGQPFTIILYFRAPVRAFLPALKKVALTAQTEDAVFLKNEAQRMEYLLNQNGLIYLGTADCIQAESWDFGQFEGDVIDLSLRLLSKDKQVEKWSQPVHVARVLGALLHFLKEQRVLPTPQTQATQEGALLNKRRGSVPILRQWLTGRGRPVYDGQAWVLAAVACTVLRCLGIPARVVTTFASAQGTGGRLLIDEYYNEEGLQNGEGQRGRIWIFQTSTECWMTRPALPQGYDGWQILHPSAPNGGGVLGSCDLVPVRAVKEGTLGLTPAVSDLFAAINASCVVWKCCEDGTLELTDSNTKYVGNNISTKGVGSDRCEDITQNYKYPEGSLQEKEVLERVEKEKMEREKDNGIRPPSLETASPLYLLLKAPSSLPLRGDAQISVTLVNHSEQEKAVQLAIGVQAVHYNGVLAAKLWRKKLHLTLSANLEKIITIGLFFSNFERNPPENTFLRLTAMATHSESNLSCFAQEDIAICRPHLAIKMPEKAEQYQPLTASVSLQNSLDAPMEDCVISILGRGLIHRERSYRFRSVWPENTMCAKFQFTPTHVGLQRLTVEVDCNMFQNLTNYKSVTVVAPELSA

SEQ ID NO: 314326 - DNA, 1842 bp, Artificial Sequence
  derived and/or modified sequence
atgggtcaggcactgggcatcaaatcttgtgactttcaggcggctcgaaacaacgaagaacatcataccaaggctctgtccagccgacgtctgtttgtgcgtcgtgggcagccttttactatcatcctgtatttccgcgcacctgtcagggcgttcctgccagccttgaaaaaggtggccctgacagctcagactgaagatgctgtgttcctgaagaatgaagctcaaaggatggaatatcttctcaaccagaacggcctgatctacctgggcacagccgattgtattcaggcagagtcctgggactttggacagtttgaaggagacgtcatcgacttgtcactcaggcttctttccaaagataaacaagtggagaagtggtcccagcccgttcatgtggctcgggttttaggggccctccttcacttcctcaaggaacagagagtcctgcccacaccacagacccaagcgacccaggaaggcgctctactcaataaaagacggggctcagtgccaattctgcgccaatggctgaccgggcgcgggcgtccggtgtacgacggtcaagcctgggtcttagctgctgtcgcctgtaccgtgttaaggtgcctcggaattcctgcacgggtggtgactacgtttgcctctgctcagggaacaggtggtagattactgatagacgaatactacaacgaggagggactgcaaaacggagaaggccaaaggggtagaatctggatttttcagacatccacagaatgttggatgacccgacccgctttaccgcaaggctatgacgggtggcaaatcttacacccaagtgccccaaatgggggcggggtcctcggctcttgtgaccttgtgccagtcagggccgtgaaggagggcacccttggactgacccccgctgtctccgatctctttgctgcaatcaatgctagttgtgttgtgtggaaatgctgcgaagatggcaccctggaactcaccgatagcaacacaaaatatgttggaaataacatttccacgaagggcgtgggatcggacaggtgcgaggatatcacacagaactataaatacccagagggatccctccaggagaaggaagtgctcgagagggttgaaaaggaaaagatggagcgcgaaaaggataatggcattaggcctccttcactggaaaccgccagcccactttacctcctgcttaaggccccttcttccctgcccctcaggggtgatgcccaaatttccgtaaccttagtgaatcatagcgagcaggaaaaagccgttcagctggcgatcggtgtgcaagccgtgcattacaacggtgtcctggcagctaagctttggcggaagaagctccacctgaccttgagcgctaacctggaaaaaattattactattggtctcttttttagcaatttcgaacgcaatcctccggaaaatacattcctcaggctgacggcaatggcaacacactcagagtccaacctgagctgcttcgcacaagaagatatagctatctgtcgccctcatttagccattaaaatgccagagaaggctgagcaatatcagccactcacagctagtgtgagcctccagaatagcctggacgcgccgatggaggactgcgttatatccattctgggccgggggcttatacatcgggagcggtcctaccgcttccgttcggtctggcctgaaaacaccatgtgtgcaaaattccagttcacacctactcacgtaggtcttcagcgcttgacagtagaggttgattgtaatatgttccaaaatttaacaaattataaatccgtgaccgtggtcgctccagaattgagtgcctag

SEQ ID NO: 314327 - DNA, 1842 bp, Artificial Sequence
  derived and/or modified sequence
atgggccaggccctgggcatcaagagctgtgacttccaggccgccaggaacaatgaggagcaccacaccaaggccctgagcagcagaagactctttgtgcggcggggccagcccttcaccatcatcctgtacttccgggcccctgtgcgggccttcctgcctgccctgaagaaggtggccctgacagcccagacagaagatgctgtgttcctgaagaatgaggcccagaggatggagtacctgctgaaccagaatggcctcatctacctgggcacagctgactgcatccaggccgagagctgggactttggccagtttgaaggagatgtgattgacctgagcctgcggctgctgagcaaggacaagcaggtggagaagtggagccagcctgtgcacgtggcccgggtgctgggcgccctgctgcacttcctgaaggagcagagggtgctgcccaccccccagacccaggccacccaggagggcgccctgctgaacaagagaagaggctctgtgcccatcctgcggcagtggctgaccggccggggccggcctgtgtatgatggccaggcctgggtgctggccgctgtggcctgcaccgtgctgcgctgcctgggcatcccagcccgggtggtgaccacctttgccagcgcccagggcaccggcggccgcctgctgattgatgagtactacaatgaggagggcctgcagaatggagagggccagaggggccgcatctggatcttccagaccagcacagagtgctggatgaccaggcctgccctgccccagggctatgatggctggcagatcctgcaccccagcgccccaaatggaggcggcgtgctgggcagctgtgacctggtgcctgtgcgggctgtgaaggagggcaccctgggcctgaccccagctgtgtctgacctgtttgctgccatcaatgccagctgtgtggtgtggaagtgctgtgaagatggcaccctggagctgacagacagcaacaccaagtatgtgggcaacaacatcagcaccaagggcgtgggcagtgacagatgtgaggacatcacccagaactacaagtacccagagggcagcctgcaggagaaggaggtgctggagcgggtggagaaggagaagatggagcgggagaaggacaatggcatccggccccccagcctggagacagccagccccctgtacctgctgctgaaggcccccagcagcctgcccctgcggggagatgcccagatctctgtgaccctggtgaaccacagcgagcaggagaaggctgtgcagctggccatcggcgtgcaggccgtgcactacaatggagtgctggccgccaagctgtggaggaagaagctgcacctgaccctgagcgccaacctggagaagatcatcaccatcggcctcttcttcagcaactttgagaggaaccccccagagaacaccttcctgcggctgacagccatggccacccacagcgagagcaacctgagctgctttgcccaggaggacatcgccatctgccggccccacctggccatcaagatgcctgagaaggccgagcagtaccagcccctgacagcctctgtgtccctgcagaacagcctggatgcccccatggaggactgtgtgatcagcatcctgggccggggcctcatccaccgggagaggagctaccgcttccgctctgtgtggccagagaacaccatgtgtgccaagttccagttcacccccacccacgtgggcctgcagaggctgactgtggaggtggactgcaacatgttccagaacctgaccaactacaagtctgtgacagtggtggcccctgagctgagcgcctag

SEQ ID NO: 314328 - DNA, 1842 bp, Artificial Sequence
  derived and/or modified sequence
atgggccaggccctgggcatcaagagctgcgacttccaggccgccagaaacaacgaggaacaccatacaaaggcgttatcgtctagacgcctttttgtccggcgaggacagccatttactattattctgtactttagagcccctgttagggcctttctgcctgcccttaaaaaagtggctctgactgctcagactgaagacgccgtcttcctgaaaaacgaggctcaaagaatggagtacctactgaaccagaatggtcttatctatctcggcaccgccgactgtatccaggccgagagttgggatttcgggcagttcgaaggcgatgtgatcgatctaagtctgcgtctgctgtccaaggacaaacaggttgagaaatggagccagcctgtccatgttgcacgtgtcctgggagctttactccattttcttaaggagcaaagggtgctacccaccccgcaaacacaggcaacccaggaaggcgccctgcttaacaaacgccgcgggagtgtccccatccttaggcagtggttaacaggtcgcggtagacccgtgtatgatgggcaggcctgggtgttggcagcggtggcatgcacagtgctccgatgtctgggtatccccgcccgtgtcgtaactacttttgcgtccgctcagggaacaggaggaagactactcatcgatgagtactataacgaggagggactgcagaacggggaaggccaaagggggcgaatatggatcttccaaacatccacagaatgctggatgacacggcccgcactgccgcagggttatgatgggtggcagatccttcacccctccgcacctaatggtggtggagttttgggtagttgcgacctggttcccgttcgggcagtcaaagaggggacactgggcttgactccagctgtgtcagacttattcgcggcgatcaacgccagctgtgtggtctggaaatgttgtgaggacggtaccctggaactgacagatagcaatacgaaatatgtggggaacaatataagtaccaagggagtgggaagtgaccggtgcgaggacatcacccaaaattacaaatatccagaaggcagcctccaggagaaagaagtgctcgaacgtgtggaaaaggagaaaatggagcgagagaaagacaatggaatcaggccacctagccttgagacagcctcacccctttacctgctcctaaaagctccttcttcgctgcccttgaggggagatgctcaaatttccgtgacactggtaaatcattctgagcaggaaaaagctgtgcagcttgctatcggagtccaggccgtgcactataacggggtcttggccgctaagttatggagaaaaaaactccacctcacactctccgcaaatcttgagaaaatcattactatcggtcttttcttctcaaactttgaaagaaatccgcccgaaaacacttttctgcgtcttacagcgatggcaactcactccgagtctaatctgtcctgttttgcgcaggaggatattgcgatttgcagaccccatctagcaattaagatgcccgaaaaagctgaacagtaccaacccttgactgcttccgtcagcctgcaaaactctctcgatgccccgatggaagactgtgtcatcagcattctcgggcgcggcctaatccacagggagaggagttacagattccggtctgtgtggcccgagaataccatgtgcgcgaaatttcaatttacccccacgcatgtgggattgcagcgcctgactgttgaagtcgactgtaatatgtttcagaacttaacaaattacaaatcggttacagtggtggcacccgaactgtcagcatag

SEQ ID NO: 314329 - DNA, 1842 bp, Artificial Sequence
  derived and/or modified sequence
atgggtcaagcgctggggatcaagtcatgtgatttccaggcggctagaaacaatgaggagcaccacacgaaagccctgtcgtctcgtaggctctttgtccggaggggccagcccttcacgattatcctgtattttcgggcacccgtgcgcgcatttctccctgctctcaaaaaggttgccctcactgctcagaccgaagatgctgtgttcctgaagaatgaggctcagaggatggagtatctcctgaatcaaaacggcttaatctatcttggcactgctgattgtatacaggctgagtcttgggatttcggtcagttcgaaggagatgtgatcgacctgtctctgagattattatccaaggataaacaagtggaaaaatggtctcaacctgtccacgtggcgcgtgtactgggagcccttctgcatttcttaaaggagcagagggtactgccaaccccccagacccaggccacacaggaaggcgcactgctgaataagcgccgaggctcagtgcccattttgcgtcagtggctcacaggacggggtagacctgtctatgacggacaggcttgggttttagccgctgttgcctgcactgtgctgcgctgcctggggatacccgcacgggtcgttaccactttcgcttcagcccagggcacaggagggcgtctgctgatagatgagtattacaatgaggaaggcttgcagaacggggagggtcagcgcggaagaatctggatttttcaaactagcaccgaatgttggatgaccagacctgcactgccacaaggttatgatggctggcaaatcttacatcccagcgctcccaacggaggcggagtccttggatcttgtgatttggtccctgtgagagcggttaaggaaggaacgttgggtctgacgccagcagtttccgacttattcgcagctattaacgcctcctgcgtggtgtggaaatgttgcgaggacggcactttggaactgaccgattcaaatacgaaatacgtgggaaataatatcagcacgaaaggtgttggatccgacagatgcgaggatatcacccagaattataagtaccctgagggatccctccaggagaaggaggtccttgaaagagtggagaaggagaagatggagagggagaaagataacgggattcgtcctccatcactggagaccgctagtcctctgtatctgttactgaaggccccatcatctctgcccctgcggggtgacgcccagatatcagtgaccctcgtcaaccattctgagcaggagaaagccgtccagctggctataggtgttcaggctgttcactacaacggagtcttagcagcaaagctgtggaggaagaagcttcatctgacccttagtgctaacctggagaaaatcattacaatcgggttgtttttctctaactttgagagaaacccacccgagaatactttcttgaggctgaccgccatggcgactcacagtgagagcaacctgtcatgttttgctcaggaggacatagccatttgtcggcctcacctagcaattaagatgcctgagaaagcggagcagtatcagcccctcaccgcatcagtctctctgcagaatagcctggacgctcctatggaggactgcgtcattagtatcttggggagaggcttaatccatagggagagatcttataggtttcgctccgtttggccggagaacactatgtgcgccaaatttcaattcactcctacgcatgttggcctgcaaaggctcaccgtcgaggtggattgtaatatgtttcaaaacctgaccaattataaatccgtaaccgtggtcgcccctgaactgagtgcctag

SEQ ID NO: 314330 - DNA, 1842 bp, Artificial Sequence
  derived and/or modified sequence
atgggccaggccctgggcatcaagagctgcgacttccaggccgccagaaacaacgaggagcaccacaccaaggccctgagcagcagaagactgttcgtgagaagaggccagcccttcaccatcatcctgtacttcagagcccccgtgagagccttcctgcccgccctgaagaaggtggccctgaccgcccagaccgaggacgccgtgttcctgaagaacgaggcccagagaatggagtacctgctgaaccagaacggcctgatctacctgggcaccgccgactgcatccaggccgagagctgggacttcggccagttcgagggcgacgtgatcgacctgagcctgagactgctgagcaaggacaagcaggtggagaagtggagccagcccgtgcacgtggccagagtgctgggcgccctgctgcacttcctgaaggagcagagagtgctgcccaccccccagacccaggccacccaggagggcgccctgctgaacaagagaagaggcagcgtgcccatcctgagacagtggctgaccggcagaggcagacccgtgtacgacggccaggcctgggtgctggccgccgtggcctgcaccgtgctgagatgcctgggcatccccgccagagtggtgaccaccttcgccagcgcccagggcaccggcggcagactgctgatcgacgagtactacaacgaggagggcctgcagaacggcgagggccagagaggcagaatctggatcttccagaccagcaccgagtgctggatgaccagacccgccctgccccagggctacgacggctggcagatcctgcaccccagcgcccccaacggcggcggcgtgctgggcagctgcgacctggtgcccgtgagagccgtgaaggagggcaccctgggcctgacccccgccgtgagcgacctgttcgccgccatcaacgccagctgcgtggtgtggaagtgctgcgaggacggcaccctggagctgaccgacagcaacaccaagtacgtgggcaacaacatcagcaccaagggcgtgggcagcgacagatgcgaggacatcacccagaactacaagtaccccgagggcagcctgcaggagaaggaggtgctggagagagtggagaaggagaagatggagagagagaaggacaacggcatcagaccccccagcctggagaccgccagccccctgtacctgctgctgaaggcccccagcagcctgcccctgagaggcgacgcccagatcagcgtgaccctggtgaaccacagcgagcaggagaaggccgtgcagctggccatcggcgtgcaggccgtgcactacaacggcgtgctggccgccaagctgtggagaaagaagctgcacctgaccctgagcgccaacctggagaagatcatcaccatcggcctgttcttcagcaacttcgagagaaacccccccgagaacaccttcctgagactgaccgccatggccacccacagcgagagcaacctgagctgcttcgcccaggaggacatcgccatctgcagaccccacctggccatcaagatgcccgagaaggccgagcagtaccagcccctgaccgccagcgtgagcctgcagaacagcctggacgcccccatggaggactgcgtgatcagcatcctgggcagaggcctgatccacagagagagaagctacagattcagaagcgtgtggcccgagaacaccatgtgcgccaagttccagttcacccccacccacgtgggcctgcagagactgaccgtggaggtggactgcaacatgttccagaacctgaccaactacaagagcgtgaccgtggtggcccccgagctgagcgcctag

SEQ ID NO: 314331 - DNA, 2098 bp, Artificial Sequence
  derived and/or modified sequence
gaaacatgtcagggtgctcacaggagtagtggggggaggttttgctatttccagattcttaagccaacaaaagtgccttcatattttctgtctggaagacagaaagcccagaaggagcccagaagcaacagtttgagagaggcgctttctgcggccaagtggataagaggagcggcctgcaaccatgggacaggccctgggtatcaagagctgtgactttcaggcagcaagaaacaatgaggagcaccacaccaaggccctcagctcccggcgcctctttgtgaggagggggcagcccttcaccatcatcctgtacttccgcgctccagtccgtgcatttctgcctgccctgaagaaggtggccctcactgcacaaactgaggatgctgtgttcctgaagaatgaggctcagcgcatggagtacttgttgaaccagaatggtctcatctacctgggtacagctgactgcatccaggcagagtcctgggactttggccagttcgagggggatgtcattgacctcagcctgcgcttgctgagcaaggacaagcaggtagagaagtggagccagccggtgcacgtggcccgtgtgttgggtgccttgctgcattttctcaaggagcagagggtcctgcccaccccgcagacccaggccacccaggaaggggccttgctgaacaagcgccggggcagcgtgcccatcctgcggcagtggctcaccggccgaggccgacctgtgtatgatggccaggcctgggtgttggctgctgttgcttgcacagtgctgcgatgcctgggaatccctgcccgcgtggtgaccacgtttgcctcagcacagggcaccggtgggcgtcttctcatagatgaatactataatgaggagggacttcagaacggagaaggccagagaggcagaatctggatcttccagacttccacagagtgctggatgacgcggcctgccttgccccagggttatgatggatggcagattctgcacccaagtgctcctaatggaggtggagtcctggggtcctgtgatctggtgccggtcagagcagtcaaggaggggacgctggggctgaccccagcagtgtcagacctttttgctgccataaatgcctcatgtgtggtctggaagtgctgtgaggatgggacactggagttgactgactccaacacaaagtatgttggcaacaacatcagcaccaagggtgtgggcagtgaccgctgcgaggacatcactcagaactacaagtatcctgaagggtctcttcaggaaaaagaggtgctggagagagtcgagaaagagaaaatggaacgtgagaaagacaacggcatccgtcctcccagtctcgagactgccagtcctctgtacctgctcttgaaagcacccagctccctacccctgagaggggatgcccagatctcagtgacgctggttaatcacagtgagcaggagaaggcagtgcagctggcaattggggtccaggctgtacactacaacggtgtccttgctgccaagctctggaggaagaagctgcacctcacgctcagtgccaacctggaaaagataataaccatcggcctgttcttctccaattttgagcgaaacccacccgagaacaccttccttagactcaccgccatggcaacacactctgaatccaaccttagctgctttgctcaggaagacattgccatttgtagaccacaccttgccatcaagatgccagagaaagcagagcagtatcaacccctcacagcctcagtcagcctccagaactccctagatgcccccatggaggactgtgtgatctccatcctgggaagggggctcattcacagagagaggagctacagattccgttcagtgtggcctgaaaacaccatgtgtgccaagttccagttcacgccaacacatgtggggctccagagactcactgtggaagtggactgcaacatgttccagaacctaaccaactataaaagcgtcaccgtggtagcccctgaactatcagcttaaacttccagctctatcaccactctcctgccaacccttgttctacaatctaaaccaaacatgtgctaggaagag

SEQ ID NO: 314332 - protein, 545 aa, Artificial Sequence
  derived and/or modified sequence
MGFSSELCSPQGHGVLQQMQEAELRLLEGMRKWMAQRVKSDREYAGLLHHMSLQDSGGQSRAISPDSPISQSWAEITSQTEGLSRLLRQHAEDLNSGPLSKLSLLIRERQQLRKTYSEQWQQLQQELTKTHSQDIEKLKSQYRALARDSAQAKRKYQEASKDKDRDKAKDKYVRSLWKLFAHHNRYVLGVRAAQLHHQHHHQLLLPGLLRSLQDLHEEMACILKEILQEYLEISSLVQDEVVAIHREMAAAAARIQPEAEYQGFLRQYGSAPDVPPCVTFDESLLEEGEPLEPGELQLNELTVESVQHTLTSVTDELAVATEMVFRRQEMVTQLQQELRNEEENTHPRERVQLLGKRQVLQEALQGLQVALCSQAKLQAQQELLQTKLEHLGPGEPPPVLLLQDDRHSTSSSEQEREGGRTPTLEILKSHISGIFRPKFSLPPPLQLIPEVQKPLHEQLWYHGAIPRAEVAELLVHSGDFLVRESQGKQEYVLSVLWDGLPRHFIIQAHAPSEWRLLTPGPLPCRTCTDWKGKAFLAFLCSSTTY

SEQ ID NO: 314333 - DNA, 129 bp, Artificial Sequence
  derived and/or modified sequence
atgggcttcagcagcgagctgtgcagcccccagggccacggcgtgctgcagcagatgcaggaggccgagctgagactgctggagggcatgagaaagtggatggcccagagagtgaagagcgacagatag

SEQ ID NO: 314334 - DNA, 129 bp, Artificial Sequence
  derived and/or modified sequence
atgggcttctcttccgagctgtgtagtccccaggggcacggcgtgctgcagcagatgcaggaagccgaattgcgactcctcgagggaatgcggaagtggatggcacagagagtcaaaagtgaccgctag

SEQ ID NO: 314335 - DNA, 2461 bp, Artificial Sequence
  derived and/or modified sequence
ccaggagcagctgcccgtgcggaacagcactatgggcttctcttccgagctgtgcagcccccagggccacggggtcctgcagcaaatgcaggaggccgagcttcgtctactggagggcatgagaaagtggatggcccagcgggtcaagagtgacagggagtatgcaggactgcttcaccacatgtccctgcaggacagtgggggccagagccgggccatcagccctgacagccccatcagtcagtcctgggctgagatcaccagccaaactgagggcctgagccgcttgctgcggcagcacgcagaggatctgaactcagggcccctgagcaagctgagcctgctcatccgggaacggcagcagcttcgcaagacctacagcgagcagtggcagcagctgcagcaggagctcaccaagacccacagccaggacattgagaagctgaagagccagtaccgagctctggcacgggacagtgcccaagccaagcgcaagtaccaggaggccagcaaagacaaggaccgtgacaaggctaaggacaagtatgtgcgcagcctgtggaagctctttgctcaccacaaccgctatgtgctgggcgtgcgggctgcgcagctacaccaccagcaccaccaccagctcctgctgcccggcctgctgcggtcactgcaggacctgcacgaggagatggcttgcatcctgaaggagatcctgcaggaatacctggagattagcagcctggtgcaggatgaggtggtggccattcaccgggagatggctgcagctgctgcccgcatccagcctgaggctgagtaccaaggcttcctgcgacagtatgggtccgcacctgacgtcccaccctgtgtcacgttcgatgagtcactgcttgaggagggtgaaccgctggagcctggggagctccagctgaacgagctgactgtggagagcgtgcagcacacgctgacctcagtgacagatgagctggctgtggccaccgagatggtgttcaggcggcaggagatggttacgcagctgcaacaggagctccggaatgaagaggagaacacccacccccgggagcgggtgcagctgctgggcaagaggcaagtgctgcaagaagcactgcaggggctgcaggtagcgctgtgcagccaggccaagctgcaggcccagcaggagttgctgcagaccaagctggagcacctgggccccggcgagcccccgcctgtgctgctcctgcaggatgaccgccactccacgtcgtcctcggagcaggagcgagaggggggaaggacacccacgctggagatccttaagagccacatctcaggaatcttccgccccaagttctcgctccctccaccgctgcagctcattccggaggtgcagaagcccctgcatgagcagctgtggtaccacggggccatcccgagggcagaggtggctgagctgctggtgcactctggggacttcctggtgcgggagagccagggcaagcaggagtacgtgctgtcggtgctgtgggatggtctgccccggcacttcatcatccaggctcacgccccctcagaatggaggctgctgaccccgggtcccctgccctgcagaacctgtaccgactggaaggggaaggctttcctagcattcctttgctcatcgaccacctactgagcacccagcagcccctcaccaagaagagtggtgttgtcctgcacagggctgtgcccaaggacaagtgggtgctgaaccatgaggacctggtgttgggtgagcagattggacgggggaactttggcgaagtgttcagcggacgcctgcgagccgacaacaccctggtggcggtgaagtcttgtcgagagacgctcccacctgacctcaaggccaagtttctacaggaagcgaggatcctgaagcagtacagccaccccaacatcgtgcgtctcattggtgtctgcacccagaagcagcccatctacatcgtcatggagcttgtgcaggggggcgacttcctgaccttcctccgcacggagggggcccgcctgcgggtgaagactctgctgcagatggtgggggatgcagctgctggcatggagtacctggagagcaagtgctgcatccaccgggacctggctgctcggaactgcctggtgacagagaagaatgtcctgaagatcagtgactttgggatgtcccgagaggaagccgatggggtctatgcagcctcagggggcctcagacaagtccccgtgaagtggaccgcacctgaggcccttaactacgggggccgtctgccctgcccagagctgtgtcctgatgccgtgttcaggctcatggagcagtgctgggcctatgagcctgggcagcggcccagcttcagcaccatctaccaggagctgcagagcatccgaaagcggcatcggtgaggctgggacccccttctcaagctggtggcctctgcaggcc

SEQ ID NO: 314336 - DNA, 129 bp, Artificial Sequence
  derived and/or modified sequence
atgggcttcagcagcgagctgtgcagcccccagggccatggagtgctgcagcagatgcaggaggccgagctgcggctgctggagggcatgaggaagtggatggcccagagggtgaagagtgacagatag

SEQ ID NO: 314337 - DNA, 129 bp, Artificial Sequence
  derived and/or modified sequence
atgggcttcagcagcgagctgtgcagcccccagggccacggcgtgctccagcaaatgcaagaggccgagctccgactcctcgaggggatgcggaagtggatggcgcaaagggtaaagtctgatcgctag

SEQ ID NO: 314338 - DNA, 129 bp, Artificial Sequence
  derived and/or modified sequence
atgggcttcagcagtgaactgtgctcccctcagggccacggggtgctgcaacaaatgcaggaggcagagctgcggctcctggagggtatgaggaaatggatggctcagcgagtgaaaagcgatagatag

SEQ ID NO: 314339 - protein, 1275 aa, Artificial Sequence
  derived and/or modified sequence
MSLDFGSVALPVQNEDEEYDEEDYEREKELQQLLTDLPHDMLDDDLSSPELQYSDCSEDGTDGQPHHPEQLEMSWNEQMLPKSQSVNGPSCQGLEPYNKVTYKPYQSSAQNNGSPAQEITGSDTFEGLQQQFLGANENSAENMQIIQLQVLNKAKERQLENLIEKLNESERQIRYLNHQLVIIKDEKDGLTLSLRESQKLFQNGKEREIQLEAQIKALETQIQALKVNEEQMIKKSRTTEMALESLKQQLVDLHHSESLQRAREQHESIVMGLTKKYEEQVLSLQKNLDATVTALKEQEDICSRLKDHVKQLERNQEAIKLEKTEIINKLTRSLEESQKQCAHLLQSGSVQEVAQLQFQLQQAQKAHAMSANMNKALQEELTELKDEISLYESAAKLGIHPSDSEGELNIELTESYVDLGIKKVNWKKSKVTSIVQEEDPNEELSKDEFILKLKAEVQRLLGSNSMKRHLVSQLQNDLKDCHKKIEDLHQVKKDEKSIEVETKTDTSEKPKNQLWPESSTSDVVRDDILLLKNEIQVLQQQNQELKETEGKLRNTNQDLCNQMRQMVQDFDHDKQEAVDRCERTYQQHHEAMKTQIRESLLAKHALEKQQLFEAYERTHLQLRSELDKLNKEVTAVQECYLEVCREKDNLELTLRKTTEKEQQTQEKIKEKLIQQLEKEWQSKLDQTIKAMKKKTLDCGSQTDQVTTSDVISKKEMAIMIEEQKCTIQQNLEQEKDIAIKGAMKKLEIELELKHCENITKQVEIAVQNAHQRWLGELPELAEYQALVKAEQKKWEEQHEVSVNKRISFAVSEAKEKWKSELENMRKNILPGKELEEKIHSLQKELELKNEEVPVVIRAELAKARSEWNKEKQEEIHRIQEQNEQDYRQFLDDHRNKINEVLAAAKEDFMKQKTELLLQKETELQTCLDQSRREWTMQEAKRIQLEIYQYEEDILTVLGVLLSDTQKEHISDSEDKQLLEIMSTCSSKWMSVQYFEKLKGCIQKAFQDTLPLLVENADPEWKKRNMAELSKDSASQGTGQGDPGPAAGHHAQPLALQATEAEADKKKVLEIKDLCCGHCFQELEKAKQECQDLKGKLEKCCRHLQHLERKHKAVVEKIGEENNKVVEELIEENNDMKNKLEELQTLCKTPPRSLSAGAIENACLPCSGGALEELRGQYIKAVKKIKCDMLRYIQESKERAAEMVKAEVLRERQETARKMRKYYLICLQQILQDDGKEGAEKKIMNAASKLATMAKLLETPISSKSQSKTTQSGMSK

SEQ ID NO: 314340 - protein, 592 aa, Artificial Sequence
  derived and/or modified sequence
MSLDFGSVALPVQNEDEEYDEEDYEREKELQQLLTDLPHDMLDDDLSSPELQYSDCSEDGTDGQPHHPEQLEMSWNEQMLPKSQSVNGYNEIQSLYAGEKCGNVWEENRSKTEDRHPVYHPEEGGDEGGSGYSPPSKCEQTDLYHLPENFRPYTNGQKQEFNNQATNVIKFSDPQWNHFQGPSCQGLEPYNKVTYKPYQSSAQNNGSPAQEITGSDTFEGLQQQFLGANENSAENMQIIQLQVLNKAKERQLENLIEKLNESERQIRYLNHQLVIIKDEKDGLTLSLRESQKLFQNGKEREIQLEAQIKALETQIQALKVNEEQMIKKSRTTEMALESLKQQLVDLHHSESLQRAREQHESIVMGLTKKYEEQVLSLQKNLDATVTALKEQEDICSRLKDHVKQLERNQEAIKLEKTEIINKLTRSLEESQKQCAHLLQSGSVQEVAQLQFQLQQAQKAHAMSANMNKALQEELTELKDEISLYESAAKLGIHPSDSEGELNIELTESYVDLGIKKVNWKKSKVTSIVQEEDPNEELSKDEFILKLKAEVQRLLGSNSMKRHLVSQLQNDLKDCHKKIEDLHQVKKKKKKKK

SEQ ID NO: 314341 - protein, 68 aa, Artificial Sequence
  derived and/or modified sequence
MSLDFGSVALPVQNEDEEYDEEDYEREKELQQLLTDLPHDMLDDDLSSPELQYSDCSEDGTDGQPHHP

SEQ ID NO: 314342 - DNA, 3828 bp, Artificial Sequence
  derived and/or modified sequence
atgagcctggactttggatccgtggcgctacctgtccaaaacgaggacgaagagtacgacgaggaagattacgaaagagaaaaggaattacagcagctgttaaccgatctaccccacgatatgctggatgatgacctctcttcacccgagctacagtattccgactgcagcgaagacggaacagacgggcaacctcatcatcccgagcagctggagatgtcgtggaacgagcaaatgctgcctaaatcccagagcgttaacggtccttcctgtcagggtctggagccatacaataaggtaacgtacaagccatatcagagcagcgctcagaacaacggctcccccgcccaggagattaccggtagtgacaccttcgagggtttgcagcagcaatttctgggagccaatgagaatagtgctgaaaacatgcagattatacagctgcaggtgcttaataaggccaaggaacgccagttggagaacctcattgagaagctgaacgagtcagaaaggcagatcagatacctgaatcatcagctcgtgatcataaaagacgaaaaagacggtttgaccctaagccttcgggagagccagaaattattccagaatgggaaggagagagaaatccagctggaggcccaaatcaaagccctagagacacaaattcaggccctgaaagtaaacgaagagcagatgattaaaaaaagcaggaccacagagatggccttggagtcccttaagcagcagctggttgacctccatcactccgaaagcctgcagcgggctagggaacagcatgagtcgattgtgatgggtctgactaagaaatacgaggagcaggttttatctctgcagaaaaatttggacgccactgtgaccgcgctgaaagagcaggaagatatctgctcccgtttgaaagatcacgtaaagcagttggagcgcaaccaagaggccatcaaacttgaaaaaaccgaaatcatcaacaagctgacccgcagcctcgaagaatcccagaagcagtgtgcacatctgcttcaaagcggcagtgtgcaagaagtcgcccagctccagttccagctccagcaagcccagaaagctcatgccatgtctgccaatatgaacaaggcattacaagaagagcttactgagctgaaagacgagatatctttgtacgagtctgcggcgaagctcggcatccatcctagtgactcagagggcgagctgaacatcgaactcacagagagttatgtagatctgggcatcaagaaggtgaactggaagaagtccaaagtgacttcgattgtccaagaagaggacccaaacgaagaactgagtaaggatgagttcatcctgaagctaaaggctgaagtgcaacgacttctaggtagtaactccatgaagcggcatctggtctcccagctgcagaatgacctaaaggattgccacaagaaaatagaagacctccatcaggtgaagaaggatgaaaagtctatcgaagtggagaccaaaaccgacacctccgagaaacccaagaaccagctctggcccgaatcatcaacatctgacgtcgtccgcgacgacattttgcttctgaagaatgaaatccaggtgctccaacagcaaaaccaggagctgaaggagacagagggcaagctcagaaatactaaccaagacctttgcaaccagatgagacagatggtccaagactttgaccacgataaacaggaagccgtggatcgctgcgagcgcacgtatcagcagcatcacgaggccatgaagactcagataagagagtctctgttagctaagcacgcgctagagaagcagcagctctttgaggcgtacgagcggacacacctgcagctgcggagtgaactggacaaacttaacaaggaagtcaccgctgtacaggaatgttatctcgaagtgtgtcgagagaaggacaacctcgaattgaccttgaggaaaacaaccgagaaggagcagcaaacgcaagaaaaaatcaaggagaaacttattcagcagttagaaaaagagtggcagtcaaagttggaccagaccattaaagctatgaaaaagaagaccctagactgcggtagccagacagatcaagtgacaacctccgacgtgatttccaaaaaagaaatggccattatgatcgaggagcagaaatgcaccattcagcaaaacctcgagcaagaaaaagatattgccatcaagggggcaatgaagaagttggagatcgagctagaactgaagcactgcgagaacatcaccaaacaggttgagatcgcggtgcagaatgcccaccagaggtggctgggcgaacttcccgagctggcagaataccaagctctggtgaaagctgagcagaaaaagtgggaggaacagcacgaggtgtccgtaaataagcggatctcttttgccgtctctgaggccaaggagaagtggaagagcgaattagagaacatgagaaaaaacattctgcccggtaaggaactagaggaaaaaattcattctctccagaaggaattggagcttaagaacgaagaagtgcctgtagttatcagagccgaactcgcaaaggcaagaagcgaatggaataaagagaagcaagaggagattcaccgcatccaggagcagaacgagcaggattacagacagttccttgatgatcaccgtaacaaaattaatgaggtcctcgccgcagcaaaggaggacttcatgaagcagaaaactgaactactgctgcaaaaagagacagagctgcagacctgtctggatcagagtcgacgagagtggaccatgcaagaggccaaacgcatccagctagagatttatcagtatgaggaggacatcctgaccgtgctcggagtgctgttatcagacactcagaaagaacacatttcagacagcgaagataaacaactgctcgaaataatgtctacctgttccagcaaatggatgagcgttcagtatttcgagaagctcaaagggtgcattcagaaggcttttcaggacaccctgccgctcctcgtggaaaacgccgacccagagtggaagaagagaaatatggctgagctgtctaaagactccgcctcacaaggcacaggccagggcgaccctggccccgccgccggtcaccatgcccaacccctggccttacaggcaaccgaagcagaggccgacaagaagaaggttctcgaaatcaaagacttgtgctgcggccactgcttccaggaacttgagaaggctaagcaagagtgccaagacctcaaaggcaagctcgagaagtgttgcaggcatttgcaacacctcgagcgcaagcataaggccgtagttgaaaagattggcgaggaaaacaacaaggtagtggaggagcttattgaggagaataacgacatgaagaataagcttgaggagttacagactctgtgtaaaactccaccgcgatcactgagtgctggagctatagagaatgcgtgtctgccctgttccggaggcgcactagaggagttacggggccagtatataaaagctgttaagaaaattaagtgcgatatgttgcgttatattcaggaaagcaaagaacgggcagctgaaatggtgaaagccgaagtccttcgggagagacaggagactgcccgcaagatgagaaagtactatctaatatgtctccagcagatccttcaagacgatgggaaggaaggtgccgagaagaagatcatgaacgccgcgagtaaactagcaaccatggctaaactactggaaacaccgatctcctccaagtcccaaagtaagactacacagtccggaatgagcaaatag

SEQ ID NO: 314343 - DNA, 3828 bp, Artificial Sequence
  derived and/or modified sequence
atgagcctggactttggatctgtggccctgcctgtgcagaatgaagatgaggagtatgatgaggaggactatgaaagagagaaggagctgcagcagctgctgacagacctgccccatgacatgctggatgatgacctgagcagccctgagctgcagtacagcgactgcagtgaagatggaacagatggccagccccaccaccctgagcagctggagatgtcctggaatgagcagatgctgcccaagagccagagcgtgaatggccccagctgccagggcctggagccctacaacaaggtgacctacaagccctaccagagcagcgcccagaacaacggcagccctgcccaggagatcaccggcagtgacacctttgagggcctgcagcagcagttcctgggcgccaatgaaaattctgctgagaacatgcagatcatccagctgcaggtgctgaacaaggccaaggagcggcagctggagaacctgattgagaagctgaatgaaagtgagcggcagatccgctacctgaaccaccagctggtgatcatcaaggatgagaaggatggcctgaccctgagcctgcgggagagccagaagctgttccagaatggcaaggagcgggagatccagctggaggcccagatcaaggccctggagacccagatccaggccctgaaggtgaatgaggagcagatgatcaagaagagcaggaccacagagatggccctggagagcctgaagcagcagctggtggacctgcaccacagcgagagcctgcagagggcccgggagcagcacgagagcatcgtgatgggcctgaccaagaagtatgaggagcaggtgctgagcctgcagaagaacctggatgccaccgtgacagccctgaaggagcaggaggacatctgcagccggctgaaggaccacgtgaagcagctggagaggaaccaggaggccatcaagctggagaagacagagatcatcaacaagctgaccaggagcctggaggagagccagaagcagtgtgcccacctgctgcagagcggctctgtgcaggaggtggcccagctgcagttccagctgcagcaggcccagaaggcccacgccatgtctgccaacatgaacaaggccctgcaggaggagctgacagagctgaaggatgagatcagcctgtatgaatctgctgccaagctgggcatccaccccagcgacagcgagggggagctgaacatcgagctgacagagagctatgtggacctgggcatcaagaaggtgaactggaagaagagcaaggtgaccagcatcgtgcaggaggaggaccccaatgaggagctgagcaaggatgagttcatcctgaagctgaaggccgaggtgcagaggctgctgggcagcaacagcatgaagaggcacctggtgtcccagctgcagaatgacctgaaggactgccacaagaagattgaggacctgcaccaggtgaagaaggatgagaagagcattgaggtggagaccaagacagacaccagcgagaagcccaagaaccagctgtggccagagagcagcaccagtgatgtggtgagagatgacatcctgctgctgaagaatgagatccaggtgctgcagcagcagaaccaggagctgaaggagacagagggcaagctgaggaacaccaaccaggacctgtgcaaccagatgaggcagatggtgcaggactttgaccatgacaagcaggaggccgtggacagatgtgagaggacctaccagcagcaccacgaggccatgaagacccagatccgggagagcctgctggccaagcacgccctggagaagcagcagctgtttgaggcctatgaaagaacccacctgcagctgcggtctgagctggacaagctgaacaaggaggtgacagctgtgcaggagtgctacctggaggtgtgccgggagaaggacaacctggagctgaccctgaggaagaccacagagaaggagcagcagacccaggagaagatcaaggagaagctgatccagcagctggagaaggagtggcagagcaagctggaccagaccatcaaggccatgaagaagaagaccctggactgtggcagccagacagaccaggtgaccaccagtgatgtgatcagcaagaaggagatggccatcatgattgaggagcagaagtgcaccatccagcagaacctggagcaggagaaggacatcgccatcaagggggccatgaagaagctggagattgagctggagctgaagcactgtgagaacatcaccaagcaggtggagattgctgtgcagaatgcccaccagcgctggctgggggagctgcctgagctggccgagtaccaggccctggtgaaggccgagcagaagaagtgggaggagcagcacgaggtgtctgtgaacaagaggatcagctttgctgtgtctgaggccaaggagaagtggaagtctgagctggagaacatgaggaagaacatcctgcccgggaaggagctggaggagaagatccacagcctgcagaaggagctggagctgaagaatgaggaggtgcctgtggtgatccgggcagagctggccaaggcccggtctgagtggaacaaggagaagcaggaggagatccaccgcatccaggagcagaatgagcaggactaccggcagttcctggatgaccacaggaacaagatcaatgaggtgctggccgccgccaaggaggacttcatgaagcagaagacagagctgctgctgcagaaggagacagagctgcagacctgcctggaccagagcagaagagagtggaccatgcaggaggccaagaggatccagctggagatctaccagtatgaggaggacatcctgactgtgctgggcgtgctgctgagtgacacccagaaggagcacatcagtgacagcgaggacaagcagctgctggagatcatgagcacctgcagcagcaagtggatgtctgtgcagtactttgagaagctgaagggctgcatccagaaggccttccaggacaccctgcccctgctggtggagaatgctgaccctgagtggaagaagaggaacatggccgagctgagcaaggacagcgccagccagggcaccggccagggcgaccccggccctgctgctggccaccacgcccagcccctggccctgcaggccacagaggccgaggccgacaagaagaaggtgctggagatcaaggacctgtgctgcggccactgcttccaggagctggagaaggccaagcaggagtgccaggacctgaagggcaagctggagaagtgctgccgccacctgcagcacctggagaggaagcacaaggctgtggtggagaagattggagaggagaacaacaaggtggtggaggagctgattgaagaaaataatgacatgaagaacaagctggaggagctgcagaccctgtgcaagaccccacccaggagcctgtctgctggggccattgaaaatgcctgcctgccctgcagcggcggggccctggaggagctgcggggccagtacatcaaggctgtgaagaagatcaagtgtgacatgctgcgctacatccaggagagcaaggagagagctgctgagatggtgaaggccgaggtgctgcgggagcggcaggagacagccaggaagatgaggaagtactacctgatctgcctgcagcagatcctgcaggatgatggcaaggagggcgctgagaagaagatcatgaatgctgccagcaagctggccaccatggccaagctgctggagacccccatcagcagcaagagccagagcaagaccacccagagcggcatgagcaagtag

SEQ ID NO: 314344 - DNA, 3828 bp, Artificial Sequence
  derived and/or modified sequence
atgagcctggacttcggcagcgtggccctgcccgtgcagaacgaggatgaagaatacgacgaggaggattatgagcgcgaaaaggagctacaacagctgctgacggacctcccccacgatatgctggatgatgacctgagtagccctgaactgcagtatagtgattgcagcgaggatgggaccgatgggcagccccatcatcccgaacagctggaaatgagctggaacgaacagatgctgccaaagagccagtcggtcaatggcccatcctgccagggtcttgaaccttacaataaagtcacctataagccataccagagcagtgcccaaaacaatgggagccccgcccaggaaataaccggcagcgacacctttgagggtctgcagcaacagtttctgggcgcaaatgagaacagtgcagagaatatgcaaataatccagcttcaggttctcaataaggccaaggaaaggcaactggaaaacttaatcgagaagctgaacgaatcagaacgccagatacggtacctgaatcatcagctggttattatcaaggatgagaaggatggactgaccctctctttgcgagagtcacagaaactatttcagaatggcaaagaaagagagattcagctggaggctcaaataaaagctctggagacacaaattcaggctctgaaagtcaatgaagagcagatgattaaaaaaagccgtaccactgagatggctcttgagtccttaaagcaacagttagtcgacctgcaccatagtgaaagtctgcagcgggcaagagagcagcacgagtctatcgtaatgggtctcaccaaaaagtacgaggaacaagtgttatcactccagaaaaacttagatgccaccgttacagccctgaaggagcaggaggacatttgcagtcggctgaaggaccacgtgaagcaactcgaacgaaaccaggaagcaattaaattagagaaaaccgaaatcattaataagcttacgagaagcctggaagaatctcagaaacagtgtgcacatctcctacagtccggcagcgtgcaggaggtcgcccagcttcagttccagctgcagcaggcgcagaaagcccacgccatgagtgctaacatgaacaaagccctacaggaagagctgacggagttaaaagatgagattagcctctatgaaagtgcagccaaactgggtatccacccctcagattctgagggcgagctgaatatcgagctcaccgaatcttacgtagacctcgggattaagaaggtgaattggaagaagtctaaagtgactagcatcgtgcaagaagaggacccaaacgaggagctgtcaaaagacgagtttatcctaaagctcaaggcggaagttcagcgcctgctgggtagcaatagtatgaagaggcacctggtgagccagttgcagaacgatctgaaagattgtcataagaaaatcgaggatcttcatcaagtcaaaaaggacgaaaagagcattgaagtggaaaccaaaactgacacttctgagaagcccaaaaatcagctctggcctgaatcatccacatcagacgtggttagggacgatatcctgctcctgaagaatgaaatacaggtactacaacagcagaatcaagagctgaaggaaacagagggcaagctccgaaacaccaaccaagatctgtgcaaccaaatgagacaaatggtccaggactttgatcacgacaaacaggaggcggttgataggtgtgagcggacatatcagcagcaccatgaggctatgaaaacacagataagagaaagcctgttggcaaaacacgctctagaaaaacagcaactgttcgaggcctacgagagaactcacctccagctgagatctgaattagacaagctgaacaaagaggtgactgctgtccaggaatgttatttagaagtgtgccgcgaaaaggacaacctggagttaacactgagaaaaaccacggagaaagaacagcagacacaggagaaaataaaggaaaagctgatacagcagctggagaaagagtggcagtccaagctggatcaaacgatcaaagcaatgaagaaaaagaccctggattgcggtagccaaaccgatcaagtgaccaccagcgacgtgatttcaaaaaaagaaatggccattatgatcgaagagcaaaagtgcactattcagcaaaacctagaacaggagaaggatatcgctatcaaaggcgcaatgaaaaagttggagatcgaactagagctgaaacactgcgaaaatataaccaagcaggtggaaatagccgtgcagaacgcccaccagaggtggctcggcgagctcccagagttggccgagtaccaagcgctggttaaagccgaacagaaaaaatgggaagagcagcacgaagttagcgtcaacaagagaatcagctttgcagtcagtgaggcaaaggaaaaatggaaatctgagcttgagaacatgagaaaaaacattctccccgggaaggagttggaagaaaagatccactcccttcagaaagagctagaattgaagaacgaagaagtaccagtggtgattagagctgaacttgccaaagcccgcagcgaatggaacaaagagaagcaagaagagatccacagaatacaggagcagaacgaacaagactaccgccagtttcttgacgaccaccgcaacaaaatcaatgaagtgcttgcggctgcaaaggaggatttcatgaagcagaagaccgagctgctcctccagaaggagaccgaactgcagacttgccttgatcaaagccgccgtgagtggacgatgcaggaggctaaacggattcaactggagatttatcagtatgaagaggacatactcaccgtgctgggcgtgctcctgtccgacactcaaaaggaacacatttctgacagcgaagataagcaactgctggagatcatgagcacatgctcatcgaaatggatgagcgtacaatatttcgaaaagctcaaaggatgtatccagaaagcttttcaagatacactccctctcctggtggagaacgcagatccggaatggaaaaagagaaacatggccgagctgtccaaggacagcgcatcgcagggaacaggccagggggatcctggccctgcagccggacatcacgcccagccactcgcattgcaagcgactgaagccgaagctgataagaagaaggtcctggagatcaaggacttgtgctgcggtcattgcttccaggagctggagaaagctaaacaggagtgtcaagatttgaagggcaagcttgagaaatgctgcagacacttacagcatcttgagagaaaacacaaggccgtcgtggaaaagataggggaagaaaacaacaaggtggtcgaggagctgattgaagagaacaacgatatgaagaacaagctcgaggagctgcagacactgtgcaagaccccaccccgcagtctttcagctggcgctatcgagaacgcttgcctgccttgttctggcggtgccctcgaagagctacgcgggcaatatattaaagccgtgaagaaaattaaatgtgacatgcttcgctatattcaggaaagcaaagaaagggctgccgagatggtcaaagccgaggtattgcgggagagacaggaaacggcgaggaaaatgcgaaagtactatctcatctgcttgcagcagattttacaggatgatggaaaggagggagccgaaaaaaagataatgaatgcagcctcgaaattggccactatggcgaaattactggaaacaccaataagtagcaagtcacagtcaaaaacaactcagtctggcatgtccaagtag

SEQ ID NO: 314345 - DNA, 3828 bp, Artificial Sequence
  derived and/or modified sequence
atgtccctagactttggaagcgtggccctcccagtgcaaaacgaagacgaagagtatgacgaggaggactacgaacgcgaaaaggagttacaacagcttctgacagatcttcctcacgatatgctggatgatgacctcagttcccctgagttgcagtactcagattgcagcgaagatgggaccgacgggcagccccaccatcctgaacagcttgaaatgagctggaatgagcaaatgctccccaagagccaatcagttaatggcccaagctgtcaaggtctagaaccttacaacaaggtgacgtataaaccatatcagagcagcgcccagaataacggttctccggcacaggaaatcacagggagtgatacctttgaaggcctccagcagcaattcctaggggcaaatgaaaactccgccgagaacatgcagattatacagcttcaggtgctgaacaaggctaaagaacggcagctggaaaacctgatcgagaagcttaacgaatctgagagacagataagatatcttaaccaccagttagtcatcatcaaagacgagaaagatggactgaccctttcgctccgggagagccagaagctgtttcagaatggcaaggagagggagatccagctggaagcccagattaaagctttggagactcagatccaggccctcaaagtgaacgaagagcagatgatcaagaagtctagaacgactgagatggcattagaaagcttgaagcagcaactcgtcgacctgcatcatagcgagagcctccagcgggcacgagagcaacacgagagtatcgtcatgggtctcaccaaaaaatacgaagagcaggtgctgtccttacaaaaaaacttggacgcgactgtcaccgcgcttaaggagcaggaggatatctgttcccgcctcaaagaccacgtaaaacaacttgagcgtaatcaggaagctattaagctggagaagacggaaatcattaacaagctgacacgtagccttgaggaatcccagaaacaatgcgctcatctgctacagtcgggcagcgtgcaggaggtcgctcagctgcagtttcaactgcagcaggcccaaaaggctcacgccatgtcagcaaacatgaataaagccttacaggaagaactgaccgagttgaaagacgagatttctctgtacgagagcgccgctaagctgggcatccaccccagtgactccgagggggaactcaacattgagctgacggagtcatatgttgacttagggattaagaaggtgaactggaagaaaagcaaggtgacatccatcgtacaggaagaagaccctaatgaagagctgtccaaagatgagttcatacttaaactcaaagcggaagtgcagagattgctgggaagcaactctatgaaacggcatctcgtttcccagctccagaacgacctgaaggactgccacaagaagatagaggacctgcatcaagtcaagaaggacgaaaaaagcattgaggttgaaactaagactgacacctcagagaaacctaaaaaccaattgtggcctgagagttccacatcagacgttgttagggacgacatcctgcttcttaagaatgagattcaagtcttgcaacagcagaatcaagaactgaaagaaaccgagggtaagctgcggaataccaatcaagatctgtgcaaccaaatgagacagatggttcaagatttcgaccacgataaacaagaagccgtggaccgttgtgagcgaacatatcagcaacatcacgaggctatgaagacacagatcagggaatccttgttggcaaagcacgctctagagaaacagcagctgttcgaagcatacgagcgcacccacctgcagctgagaagcgaattggacaaattgaacaaggaagtgacggccgtgcaggaatgctacctcgaagtttgccgcgagaaggataatcttgaactgacactgagaaaaacaacagagaaagagcagcagacgcaggaaaagattaaggaaaagttgatacaacaactcgagaaggagtggcagagcaaactggaccagaccattaaagctatgaagaagaagacacttgattgcgggtctcaaaccgaccaggtgaccacaagcgatgtgatctccaagaaagagatggccattatgatcgaggagcaaaagtgtacaatccagcagaacctggagcaggagaaggacattgcgatcaaaggcgcaatgaaaaagttggagatcgagctagagctgaaacactgtgagaacattactaagcaggtggaaatcgccgtacaaaatgcccatcagagatggctcggggaacttcccgagttagccgaatatcaggcactggtgaaggccgaacagaaaaagtgggaagaacagcacgaggtatccgtcaacaaaagaatctcctttgcagtgtctgaggccaaagagaaatggaagtcggagctggagaatatgcgaaagaacatactccccggtaaggagctagaggaaaagatccacagtttacagaaagaactcgagttgaagaacgaagaagtgccggtggtgattcgagcggaactggccaaggctcggagcgaatggaacaaggagaaacaggaggaaatccaccggattcaggagcaaaatgaacaagattatagacagttcttggacgatcacaggaacaagataaatgaggtgctcgcggctgccaaagaggacttcatgaagcaaaaaactgaactgctgctgcagaaagagaccgaacttcagacctgcctggaccaatcccgtcgggagtggaccatgcaggaggccaaaaggatccagctggagatctatcagtatgaggaggacatacttactgtcctgggcgtgctgctttctgatacacagaaagaacatatctcggactccgaggacaagcagctgctggagattatgtctacctgtagcagcaaatggatgagcgtacagtatttcgagaagctgaaagggtgcatccaaaaggcctttcaggacacattacccttactggttgagaatgcagatcccgaatggaaaaagcgcaatatggctgagctgagtaaggattcagccagccaggggaccggccagggagaccctgggccagccgctgggcatcacgcccagccattagccttgcaggccaccgaagccgaagccgacaagaagaaagtactcgagattaaggatctgtgctgcgggcactgcttccaggagctcgaaaaggccaaacaggaatgtcaggacctgaaaggaaaattggaaaaatgttgcaggcacctgcagcatctcgagaggaaacacaaagctgtagtggaaaagatcggcgaagaaaacaacaaggtggtggaggaactcattgaggagaataacgatatgaaaaataagctggaggagctccagactctttgcaaaacacctcccagaagcctgagtgcaggggctatcgagaatgcttgtctgccttgcagtggcggagcgttagaggagctgagaggccagtacattaaggcagtgaaaaagataaagtgcgacatgcttcggtacatccaagagtctaaagagagagcagccgaaatggtcaaggccgaggtcttgcgcgagcgccaagaaaccgccagaaagatgaggaagtattatctgatttgcctgcagcagattttgcaggatgatggcaaagagggggctgaaaagaaaataatgaacgccgctagcaagctcgctactatggccaagctcctcgagacaccaatcagctcaaagtcccaaagcaagactacccagtccggcatgtccaagtag

SEQ ID NO: 314346 - DNA, 4986 bp, Artificial Sequence
  derived and/or modified sequence
gggatctgctagaagttggtcttccgccaggactagagtttcctcgcggtaacagcctccgtggcctccggaggaccatgtcattagactttggcagtgtggcactaccagtgcaaaatgaagatgaagagtatgacgaagaggactatgaaagagagaaagagttgcagcagttactcacagaccttccccatgacatgctggatgacgacctctcctctccagagctccagtattcggactgcagcgaggatggcacagacggacaaccacatcatcctgagcaattggagatgagctggaatgagcaaatgctgcccaaatctcaaagtgtaaatggtcccagttgtcaaggtttggaaccgtataataaagtgacatataaaccttatcagtcttctgcccagaataatggctcaccagcccaggagataacaggaagtgacacattcgaaggcctgcaacaacaatttttaggagctaatgagaactctgcagaaaatatgcagattattcaacttcaggttcttaacaaagcaaaagagagacaactggagaacttaattgaaaagttaaatgaaagtgaacgtcaaattcgatatctgaatcaccagcttgtaataataaaagatgaaaaggatggtttgactctcagccttcgagaatcacagaaactctttcagaatggaaaagaaagagagatacagcttgaagctcaaataaaagcactggagactcagatacaagcattaaaagtcaatgaagaacagatgatcaagaagtccagaacaactgaaatggctctggaaagcttgaagcagcagctggtggaccttcatcattctgaatcacttcaacgagctagagaacagcatgagagcattgttatgggcctcacaaagaagtacgaagagcaagtattgtccttacaaaagaatttggatgccacagtcaccgcacttaaagaacaggaagacatttgctctcgtctgaaagatcacgtgaaacaactggaaaggaatcaagaagcaatcaagttagaaaagactgagatcattaataagttgacaagaagtctagaggagagtcaaaagcagtgtgcccacttgttgcagtccgggtcagtacaagaggtggctcagctacagttccagctgcagcaagcacagaaggcacatgctatgagtgcaaacatgaacaaggctttgcaagaagaattaacagaactaaaagatgaaatttctctctatgaatctgctgcaaaactaggaatacatccaagtgactcagaaggagaattaaatatagaactcactgaatcgtatgtggatttgggtattaaaaaggtcaactggaaaaaatccaaagttaccagcattgtacaagaagaagacccaaatgaagagctttcaaaagatgagttcattctgaagttaaaggcagaagtacagcgtttgctgggtagcaactcaatgaagcgtcatctggtgtctcagttacaaaatgacctcaaagactgtcataagaaaattgaagatctccaccaagtgaagaaggatgaaaaaagcattgaggttgagactaaaacagatacctcagaaaaaccaaagaatcaattatggcctgagtcttctacttctgatgttgtcagagatgatattctgctgcttaaaaatgaaattcaagttttacaacaacaaaatcaggaacttaaagaaactgaaggaaaactgagaaatacaaatcaagacttatgtaatcaaatgagacaaatggtacaagattttgaccatgacaaacaagaagctgtggataggtgtgaaaggacttatcagcagcaccatgaagccatgaaaactcaaatacgtgaaagcctattagcaaagcatgctttggagaagcagcagctctttgaggcttatgagagaactcatttgcaactgaggtctgagttggataagttgaataaggaggtgactgctgtgcaggaatgttacctagaagtgtgcagagagaaggataatctagaattgactctcaggaagaccactgaaaaggagcaacagactcaggagaagatcaaagaaaaactcattcaacagcttgaaaaggagtggcagtctaagctggatcaaactataaaggcaatgaaaaagaagaccttagattgtggcagccaaactgaccaagtaaccaccagtgatgttatttccaagaaagagatggcaattatgatagaagagcagaagtgcacaatccagcaaaacttagaacaagagaaggacatagccatcaagggggctatgaagaaactcgaaattgaattggaactcaaacattgtgaaaatattaccaaacaggtagaaatagctgtgcaaaatgctcatcagcgatggctgggagaactaccagagctggcagagtatcaagcacttgtgaaggcagaacagaaaaagtgggaagaacagcatgaggtctctgtgaacaaaaggatatcatttgctgtttctgaagctaaagagaaatggaagagtgagcttgaaaatatgaggaaaaatatacttcctggaaaggaattggaagagaagattcattctcttcagaaggaacttgagttaaagaacgaagaagtccctgtggtcatcagggctgagttagctaaggctcggagtgaatggaacaaagaaaagcaagaagaaatccacagaatccaagaacaaaatgagcaagattaccggcaatttttagatgatcaccgaaataaaattaatgaggtgcttgcggcagctaaagaagactttatgaaacaaaaaactgaactacttcttcagaaggagacagaattacaaacttgtctagaccagagtcgtagagaatggactatgcaggaagccaagcggatccaactggaaatctatcagtatgaggaagacatcctgactgtacttggggttcttttaagtgatacccaaaaggagcacatcagtgattctgaggacaagcagcttttggaaatcatgtcgacttgttcttcaaaatggatgtctgtgcaatattttgaaaaactaaagggctgcatacagaaagcatttcaagatacacttcctctgcttgtagaaaacgctgacccagaatggaaaaagagaaatatggccgagctctctaaggattctgccagccagggcactggccaaggagaccctggacctgctgctggacaccatgctcagcccttggccttacaagcaacagaagcagaagctgataagaaaaaggtccttgaaattaaggatttatgctgtggacactgcttccaagaacttgaaaaggcaaagcaggaatgtcaagatctgaaaggaaaactggagaaatgctgtaggcatcttcagcatttagaaaggaagcacaaagctgtagtggaaaaaattggagaagagaataataaagttgttgaagaattaatagaagaaaacaacgacatgaagaataaattggaagaattgcaaacactttgtaaaacaccaccaaggtcattgtcagcaggggccattgaaaatgcttgcctgccatgcagtgggggagccttggaagaacttcgtgggcagtacattaaagctgtaaaaaaaattaaatgtgacatgcttcgttatattcaggagagtaaggaacgagctgcagaaatggtaaaagcagaggtactgcgagaacgtcaagaaaccgcccgaaagatgcgcaaatattatttgatttgcctccaacagattttgcaggatgatggaaaagaaggggctgagaaaaagattatgaatgctgctagcaaacttgctacaatggcaaaattactggaaacacctatttctagtaagtcccaaagcaaaactacacagtcaggtatgtcaaagtgagtcgccaaatggtttttctatcttttcttctttagctatttaatattttcagtatgaagaaggcagggaaggtaaggagtgagagttaatttgtgaagttttgtatgttttacttaaactagaagtttacgcaaaaagagtacacagtttccaatttaagtaggcagactgagcatgcccatcagtttcctattgctgcttccatccctcgaaatgatagaaaagattttaaacagcaaataaagaatgagaaaaagaagaaattataagtgggttttaaaaagttgcagtgggccaggcatcatggctcacacctgtaatcccagcactttgggaggctgaggtgggaggatcccttgatcccaggaatttgaggttgcagtaagctatgattgtgccactgtactccagcctgggtgacagagtgaggccctgtctcaaaaaaaaaaaaaaaaagtttgcagtggatagaccagaagctacaagaaatccctgagagaaagaagacagtataggatggaagatggaaacctcagttcaaaaccaccgggagatgactattgcaattaggagcaatatcaaaactgttccacatatgagggtgatatgttccaggagaaatagagggcctaggggatatgaatggggtaattagttggtgttctaaaccaacagcaaccaggtggggttaatcctctctttatttcttcttctcccctcctttccccaacctcaatattgagctgggcaacaacaacaggaacaaagaatctgggagcagggcagtgctccaggtggctagccatatcaagcaggaactgggagccgacttgccttgggaggctgagatgggaggatcacttgagtccgggaggtcaaggctgcagtgagctgtgatcgcaccactgcactccagcctgggaaacagagcagaccctgtctcaaaaaaaaaaaaaaaaaaaaaaaaaaaagtaagagtaaccaacaaaaacatagaacgtataactttaaaactggtaaaggaaaaacttggaaaaaaacattttcaatctaacaaaatcaggaaagaggaaaaaaacct

SEQ ID NO: 314347 - DNA, 3828 bp, Artificial Sequence
  derived and/or modified sequence
atgagcctggacttcggcagcgtggccctgcccgtgcagaacgaggacgaggagtacgacgaggaggactacgagagagagaaggagctgcagcagctgctgaccgacctgccccacgacatgctggacgacgacctgagcagccccgagctgcagtacagcgactgcagcgaggacggcaccgacggccagccccaccaccccgagcagctggagatgagctggaacgagcagatgctgcccaagagccagagcgtgaacggccccagctgccagggcctggagccctacaacaaggtgacctacaagccctaccagagcagcgcccagaacaacggcagccccgcccaggagatcaccggcagcgacaccttcgagggcctgcagcagcagttcctgggcgccaacgagaacagcgccgagaacatgcagatcatccagctgcaggtgctgaacaaggccaaggagagacagctggagaacctgatcgagaagctgaacgagagcgagagacagatcagatacctgaaccaccagctggtgatcatcaaggacgagaaggacggcctgaccctgagcctgagagagagccagaagctgttccagaacggcaaggagagagagatccagctggaggcccagatcaaggccctggagacccagatccaggccctgaaggtgaacgaggagcagatgatcaagaagagcagaaccaccgagatggccctggagagcctgaagcagcagctggtggacctgcaccacagcgagagcctgcagagagccagagagcagcacgagagcatcgtgatgggcctgaccaagaagtacgaggagcaggtgctgagcctgcagaagaacctggacgccaccgtgaccgccctgaaggagcaggaggacatctgcagcagactgaaggaccacgtgaagcagctggagagaaaccaggaggccatcaagctggagaagaccgagatcatcaacaagctgaccagaagcctggaggagagccagaagcagtgcgcccacctgctgcagagcggcagcgtgcaggaggtggcccagctgcagttccagctgcagcaggcccagaaggcccacgccatgagcgccaacatgaacaaggccctgcaggaggagctgaccgagctgaaggacgagatcagcctgtacgagagcgccgccaagctgggcatccaccccagcgacagcgagggcgagctgaacatcgagctgaccgagagctacgtggacctgggcatcaagaaggtgaactggaagaagagcaaggtgaccagcatcgtgcaggaggaggaccccaacgaggagctgagcaaggacgagttcatcctgaagctgaaggccgaggtgcagagactgctgggcagcaacagcatgaagagacacctggtgagccagctgcagaacgacctgaaggactgccacaagaagatcgaggacctgcaccaggtgaagaaggacgagaagagcatcgaggtggagaccaagaccgacaccagcgagaagcccaagaaccagctgtggcccgagagcagcaccagcgacgtggtgagagacgacatcctgctgctgaagaacgagatccaggtgctgcagcagcagaaccaggagctgaaggagaccgagggcaagctgagaaacaccaaccaggacctgtgcaaccagatgagacagatggtgcaggacttcgaccacgacaagcaggaggccgtggacagatgcgagagaacctaccagcagcaccacgaggccatgaagacccagatcagagagagcctgctggccaagcacgccctggagaagcagcagctgttcgaggcctacgagagaacccacctgcagctgagaagcgagctggacaagctgaacaaggaggtgaccgccgtgcaggagtgctacctggaggtgtgcagagagaaggacaacctggagctgaccctgagaaagaccaccgagaaggagcagcagacccaggagaagatcaaggagaagctgatccagcagctggagaaggagtggcagagcaagctggaccagaccatcaaggccatgaagaagaagaccctggactgcggcagccagaccgaccaggtgaccaccagcgacgtgatcagcaagaaggagatggccatcatgatcgaggagcagaagtgcaccatccagcagaacctggagcaggagaaggacatcgccatcaagggcgccatgaagaagctggagatcgagctggagctgaagcactgcgagaacatcaccaagcaggtggagatcgccgtgcagaacgcccaccagagatggctgggcgagctgcccgagctggccgagtaccaggccctggtgaaggccgagcagaagaagtgggaggagcagcacgaggtgagcgtgaacaagagaatcagcttcgccgtgagcgaggccaaggagaagtggaagagcgagctggagaacatgagaaagaacatcctgcccggcaaggagctggaggagaagatccacagcctgcagaaggagctggagctgaagaacgaggaggtgcccgtggtgatcagagccgagctggccaaggccagaagcgagtggaacaaggagaagcaggaggagatccacagaatccaggagcagaacgagcaggactacagacagttcctggacgaccacagaaacaagatcaacgaggtgctggccgccgccaaggaggacttcatgaagcagaagaccgagctgctgctgcagaaggagaccgagctgcagacctgcctggaccagagcagaagagagtggaccatgcaggaggccaagagaatccagctggagatctaccagtacgaggaggacatcctgaccgtgctgggcgtgctgctgagcgacacccagaaggagcacatcagcgacagcgaggacaagcagctgctggagatcatgagcacctgcagcagcaagtggatgagcgtgcagtacttcgagaagctgaagggctgcatccagaaggccttccaggacaccctgcccctgctggtggagaacgccgaccccgagtggaagaagagaaacatggccgagctgagcaaggacagcgccagccagggcaccggccagggcgaccccggccccgccgccggccaccacgcccagcccctggccctgcaggccaccgaggccgaggccgacaagaagaaggtgctggagatcaaggacctgtgctgcggccactgcttccaggagctggagaaggccaagcaggagtgccaggacctgaagggcaagctggagaagtgctgcagacacctgcagcacctggagagaaagcacaaggccgtggtggagaagatcggcgaggagaacaacaaggtggtggaggagctgatcgaggagaacaacgacatgaagaacaagctggaggagctgcagaccctgtgcaagaccccccccagaagcctgagcgccggcgccatcgagaacgcctgcctgccctgcagcggcggcgccctggaggagctgagaggccagtacatcaaggccgtgaagaagatcaagtgcgacatgctgagatacatccaggagagcaaggagagagccgccgagatggtgaaggccgaggtgctgagagagagacaggagaccgccagaaagatgagaaagtactacctgatctgcctgcagcagatcctgcaggacgacggcaaggagggcgccgagaagaagatcatgaacgccgccagcaagctggccaccatggccaagctgctggagacccccatcagcagcaagagccagagcaagaccacccagagcggcatgagcaagtag

SEQ ID NO: 314348 - DNA, 1779 bp, Artificial Sequence
  derived and/or modified sequence
atgtctctcgacttcggttccgtcgccttgcccgtgcagaatgaggatgaggagtacgacgaagaggattatgaacgagagaaggagctgcagcaactactgacagatctcccacatgacatgctggatgatgatttgtcaagcccagagttacagtattccgattgttcggaggatgggacggacggacaacctcatcatcccgagcagctcgaaatgtcttggaacgaacagatgctacctaagtcacagagtgttaatggttataatgagatacagtcgctttacgctggggagaagtgcgggaatgtctgggaagagaatcggtctaagacagaggacagacacccagtatatcatcccgaggaaggcggtgatgagggtgggagcgggtatagcccaccgtccaagtgtgaacagactgatctttaccatctccctgaaaatttcaggccctacactaatggccagaagcaggagtttaataaccaggctacgaatgtcataaagttcagtgacccacagtggaatcacttccagggcccctcttgtcagggcttggagccttacaacaaagtaacttataagccctaccaatcctctgcacaaaacaatggcagccccgcgcaggaaatcactggcagcgacacgtttgaaggtttgcagcagcaattcctgggagcaaatgaaaatagcgctgagaatatgcaaatcattcaactgcaggttttgaataaggctaaggagagacagctggagaaccttattgagaaactgaacgaatctgagaggcagatccggtacttgaatcaccagctggtgatcatcaaggacgaaaaagacgggctcacgctcagcctaagggagagccagaagctgttccagaacgggaaggaaagggagatccaactggaggcccaaattaaggctctcgagacccagattcaggctcttaaagtgaacgaggagcagatgatcaagaagagccggactaccgaaatggctcttgagagcctgaagcagcagcttgttgatctgcaccacagtgaatctttgcagagggctagagagcagcatgaatccattgttatgggcctgaccaagaagtatgaagagcaggtgctgagcctccaaaaaaatctggatgctaccgtcacagctctgaaggaacaggaagatatatgcagcagacttaaagatcacgtgaagcagttagagagaaatcaggaggccattaagctggagaaaaccgagataatcaacaaactgacacgcagtcttgaggaaagccaaaaacagtgtgctcaccttcttcagtcgggatccgtccaggaggtagcacagctgcagttccaactgcaacaggcacaaaaagcacacgccatgtctgccaacatgaataaggcactccaagaagagttgacagagttgaaggatgagatctcgctgtatgagtctgcggctaaactgggcatccacccctccgatagcgaaggggaactcaatattgagcttacagagtcttatgtggatctcggaattaaaaaggtgaactggaagaaatcaaaagtgacgagcatcgtgcaggaggaggacccgaacgaagagctgtccaaagacgagttcattctgaagctcaaggccgaggtgcaaagactcctggggagcaatagtatgaagcgccacctggtcagccagctacagaatgatctgaaagactgtcacaaaaagattgaggacctccaccaggtgaagaagaagaaaaaaaagaaaaagtag

SEQ ID NO: 314349 - DNA, 207 bp, Artificial Sequence
  derived and/or modified sequence
atgtcgctcgactttggaagcgtggccttgcccgtccagaacgaggatgaggagtacgacgaggaagactacgagagagagaaggagctccagcagcttttaacagatctccctcacgacatgttggatgatgacctctcttcgccggaactgcagtatagtgactgttccgaagatggcaccgacggccaaccgcaccacccctag

SEQ ID NO: 314350 - DNA, 1779 bp, Artificial Sequence
  derived and/or modified sequence
atgagcctggactttggatctgtggccctgcctgtgcagaatgaagatgaggagtatgatgaggaggactatgaaagagagaaggagctgcagcagctgctgacagacctgccccatgacatgctggatgatgacctgagcagccctgagctgcagtacagcgactgcagtgaagatggaacagatggccagccccaccaccctgagcagctggagatgtcctggaatgagcagatgctgcccaagagccagagcgtgaatggctacaatgagatccagagcctgtatgctggggagaagtgtggaaatgtgtgggaggagaacagaagcaagacagaagatagacaccctgtgtaccaccctgaggagggcggagatgagggcggcagcggctacagcccccccagcaaatgtgagcagacagacctgtaccacctgcctgagaacttccggccctacaccaacggccagaagcaggagttcaacaaccaggccaccaacgtcatcaagttcagtgacccccagtggaaccacttccagggccccagctgccagggcctggagccctacaacaaggtgacctacaagccctaccagagcagcgcccagaacaacggcagccctgcccaggagatcactggaagtgacacctttgagggcctgcagcagcagttcctgggcgccaatgaaaacagcgctgagaacatgcagatcatccagctgcaggtgctgaacaaggccaaggagcggcagctggagaacctgattgagaagctgaatgaaagtgagcggcagatccgctacctgaaccaccagctggtgatcatcaaggatgagaaggatggcctgaccctgagcctgcgggagagccagaagctgttccagaatggcaaggagcgggagatccagctggaggcccagatcaaggccctggagacccagatccaggccctgaaggtgaatgaggagcagatgatcaagaagagcaggaccacagagatggccctggagagcctgaagcagcagctggtggacctgcaccacagcgagagcctgcagagggcccgggagcagcacgagagcatcgtgatgggcctgaccaagaagtatgaggagcaggtgctgagcctgcagaagaacctggatgccaccgtgacagccctgaaggagcaggaggacatctgcagccggctgaaggaccacgtgaagcagctggagaggaaccaggaggccatcaagctggagaagacagagatcatcaacaagctgaccaggagcctggaggagagccagaagcagtgtgcccacctgctgcagagcggctctgtgcaggaggtggcccagctgcagttccagctgcagcaggcccagaaggcccacgccatgtctgccaacatgaacaaggccctgcaggaggagctgacagagctgaaggatgagatcagcctgtatgagagcgctgccaagctgggcatccaccccagcgacagcgagggggagctgaacatcgagctgacagagagctatgtggacctgggcatcaagaaggtgaactggaagaagagcaaggtgaccagcatcgtgcaggaggaggaccccaatgaggagctgagcaaggatgagttcatcctgaagctgaaggccgaggtgcagaggctgctgggcagcaacagcatgaagaggcacctggtgtcccagctgcagaatgacctgaaggactgccacaagaagattgaggacctgcaccaggtgaagaagaagaagaagaagaagaagtag

SEQ ID NO: 314351 - DNA, 207 bp, Artificial Sequence
  derived and/or modified sequence
atgagcctggactttggatctgtggccctgcctgtgcagaatgaagatgaggagtatgatgaggaggactatgaaagagagaaggagctgcagcagctgctgacagacctgccccatgacatgctggatgatgacctgagcagccctgagctgcagtacagcgactgcagtgaagatggaacagatggccagccccaccacccctag

SEQ ID NO: 314352 - DNA, 1779 bp, Artificial Sequence
  derived and/or modified sequence
atgagcctggacttcggcagcgtggccctgcccgtgcagaacgaggatgaggaatatgacgaggaggactacgagagagagaaggagctgcagcaattgcttactgatttgccgcacgacatgctcgatgacgacctgtccagtccagagctccaatactcagactgttcagaggatggaaccgacggccagcctcatcacccagagcagcttgaaatgtcttggaatgagcagatgcttccaaagagccaatctgttaacggttataacgaaattcagtccctgtacgccggcgaaaagtgtggtaacgtgtgggaggaaaacaggtccaagaccgaggatcgacaccctgtttaccaccctgaggaggggggtgacgagggtggctcaggctatagccctccctctaaatgtgagcagacggacttgtatcatctgccagagaactttagaccgtatactaacggccagaaacaggagtttaacaatcaggcaacaaatgtcattaagttttcggatcctcagtggaatcactttcaaggaccgagttgtcaaggcctcgagccatacaataaggtgacatataagccttaccagtccagtgctcagaacaatggtagcccagcccaggagatcactggctccgatacgttcgagggtcttcaacagcagttcttaggcgccaacgagaattctgctgagaacatgcagattattcagttgcaggttctgaacaaggccaaagagagacagttggaaaatctgatcgagaaactgaacgaaagcgagcgccagattaggtatctcaaccatcagcttgtgattataaaagatgaaaaggatggccttacccttagcctgcgggagagccaaaaactgttccagaatgggaaggaaagagagatccagctcgaagctcaaataaaggcgttagagacccagatccaggctctgaaagttaacgaagaacaaatgataaaaaagagtagaacgacagagatggcattggagtcactcaaacagcagttggtcgatttacatcattcggaaagccttcagcgggccagggagcagcatgagtctattgtgatgggcttgacaaagaagtatgaggaacaagttctgagcttgcagaagaacctggatgctaccgtgaccgctctgaaggaacaggaggatatctgctctcggcttaaggaccatgtgaaacaactggagcgaaatcaggaggccatcaaactggaaaaaacagagattataaataaactcactagaagtttggaagagagtcagaaacagtgcgcacatctccttcaaagtggctcggtgcaggaagtggcacagttgcaatttcagcttcagcaggcccagaaggctcacgctatgtccgccaacatgaataaggcgctgcaggaggagctcactgagttgaaagatgagataagtttgtacgaatcagcggctaaactgggtatccacccctctgatagcgaaggcgagctgaacatagaactaactgagagctatgttgacctgggtatcaaaaaggtcaactggaagaaaagtaaggttacatcaatagtgcaggaagaggatcccaacgaagagctgagtaaggacgaatttatactgaagttgaaggcagaggtgcagaggctcttgggatccaactctatgaagcgtcacctggtttctcagctgcagaatgatctcaaagactgccataaaaagatcgaggatctgcaccaagtcaagaagaagaagaagaagaaaaaatag

SEQ ID NO: 314353 - DNA, 207 bp, Artificial Sequence
  derived and/or modified sequence
atgagcctggacttcggcagcgtggccctgcccgtgcagaacgaggacgaggaatacgacgaggaggattatgagcgcgagaaggagcttcagcagcttctgaccgatctgccacacgacatgctggatgacgatctcagctcccctgaattacagtatagcgattgctccgaggacgggaccgacggacagccacaccatccatag

SEQ ID NO: 314354 - DNA, 1779 bp, Artificial Sequence
  derived and/or modified sequence
atgtcactcgatttcggctcagtcgctctcccagtgcagaatgaggatgaggagtacgacgaagaggactacgaaagagagaaggagctacaacagcttcttacagatctgccacacgacatgctggacgacgatctgtctagcccagagcttcagtactccgattgcagtgaggacgggaccgatgggcagccacatcatcctgaacagttggagatgtcctggaatgagcaaatgctcccaaagagccagtctgtgaatggctataatgagattcagtccctgtatgccggagagaagtgcggaaatgtttgggaagaaaatcgaagtaaaacagaagaccgacatcccgtctatcatcctgaggagggcggtgacgaagggggtagtgggtatagcccaccttccaagtgtgagcaaacagatctctaccacctcccggaaaactttcggccatacacaaacggccagaaacaggaattcaataaccaggccactaacgttatcaagtttagtgaccctcagtggaatcattttcagggcccaagctgccagggactcgagccctacaataaagtcacttacaagccatatcagtctagcgcccagaataatgggagccctgcccaggagatcaccggtagcgatacctttgaaggcctgcagcaacaattcctcggagccaatgagaacagtgcagaaaacatgcagatcattcaactacaggtgctgaataaggcaaaggagcggcagctagaaaatctcatagagaaactgaacgaatcagagaggcagattaggtacctcaaccatcagttagttattatcaaggatgagaaggatgggctgacactgtcattacgggaatcccaaaagctctttcagaacggcaaagagagagaaattcagctggaagcccagatcaaagcactggaaactcagattcaggctctgaaggtgaacgaggaacagatgatcaagaaatctaggaccaccgagatggcactagaatccctgaagcaacagcttgtggatttgcaccacagcgagtctctgcagagagctagggaacaacatgagtcaatcgttatggggctcacaaagaagtacgaggaacaagtcctgtccctgcagaaaaacctcgacgcgactgtaacagcactcaaagagcaggaggacatctgtagcaggctcaaagaccacgtgaaacagttagaaaggaaccaagaagcaatcaaactggagaagactgaaataatcaataagttgactagaagcctggaggaatcgcagaaacaatgcgcccaccttcttcagtcaggcagcgtgcaggaagtagcacagctgcagtttcagctccagcaggcccagaaagcccatgctatgtctgccaatatgaacaaggcactgcaggaggagcttactgagctgaaggacgagatcagcctctacgagtcagccgcaaaactgggcatccatccctccgacagcgagggagagctgaacattgagctgacagagagttatgtggacctaggcatcaagaaggtgaactggaaaaagagtaaggtgaccagcatagtccaggaagaggaccctaacgaggagctcagcaaggatgagttcatcttaaagctgaaagctgaagtacagcgcctcctggggtctaatagcatgaagaggcatcttgttagtcaattgcagaacgacctcaaggattgccataagaagattgaagatctgcatcaggtgaaaaagaaaaaaaaaaaaaagaagtag

SEQ ID NO: 314355 - DNA, 207 bp, Artificial Sequence
  derived and/or modified sequence
atgagcctggatttcgggtccgtagcactgccggtgcagaacgaggacgaggaatacgacgaagaagattatgagagggaaaaggagctacaacagctccttaccgacttaccacatgatatgctggacgatgatcttagtagccccgagctgcagtactctgactgttccgaagacgggacagatggacaacctcatcacccttag

SEQ ID NO: 314356 - DNA, 1896 bp, Artificial Sequence
  derived and/or modified sequence
ggttgtgactaggaaggagctagtggactagagccagggtaaggggatctgctagaagttggtcttccgccaggactagagtttcctcgcggtaacagcctccgtggcctccggaggaccatgtcattagactttggcagtgtggcactaccagtgcaaaatgaagatgaagagtatgacgaagaggactatgaaagagagaaagagttgcagcagttactcacagaccttccccatgacatgctggatgacgacctctcctctccagagctccagtattcggactgcagcgaggatggcacagacggacaaccacatcatcctgagcaattggagatgagctggaatgagcaaatgctgcccaaatctcaaagtgtaaatggctataatgaaattcagagtttatatgctggagaaaaatgtggtaatgtctgggaagaaaatagaagtaaaactgaagaccgacatcctgtgtaccatcctgaagaaggtggagatgaaggtggaagtggttatagtcctccaagtaaatgtgaacagactgatttatatcaccttcctgaaaactttaggccatataccaatggtcagaagcaggaatttaataaccaagcaaccaatgtaattaaattttcagatcctcaatggaaccattttcagggtcccagttgtcaaggtttggaaccgtataataaagtgacatataaaccttatcagtcttctgcccagaataatggctcaccagcccaggagataacaggaagtgacacattcgaaggcctgcaacaacaatttttaggagctaatgagaactctgcagaaaatatgcagattattcaacttcaggttcttaacaaagcaaaagagagacaactggagaacttaattgaaaagttaaatgaaagtgaacgtcaaattcgatatctgaatcaccagcttgtaataataaaagatgaaaaggatggtttgactctcagccttcgagaatcacagaaactctttcagaatggaaaagaaagagagatacagcttgaagctcaaataaaagcactggagactcagatacaagcattaaaagtcaatgaagaacagatgatcaagaagtccagaacaactgaaatggctctggaaagcttgaagcagcagctggtggaccttcatcattctgaatcacttcaacgagctagagaacagcatgagagcattgttatgggcctcacaaagaagtacgaagagcaagtattgtccttacaaaagaatttggatgccacagtcaccgcacttaaagaacaggaagacatttgctctcgtctgaaagatcacgtgaaacaactggaaaggaatcaagaagcaatcaagttagaaaagactgagatcattaataagttgacaagaagtctagaggagagtcaaaagcagtgtgcccacttgttgcagtccgggtcagtacaagaggtggctcagctacagttccagctgcagcaagcacagaaggcacatgctatgagtgcaaacatgaacaaggctttgcaagaagaattaacagaactaaaagatgaaatttctctctatgaatctgctgcaaaactaggaatacatccaagtgactcagaaggagaattaaatatagaactcactgaatcgtatgtggatttgggtattaaaaaggtcaactggaaaaaatccaaagttaccagcattgtacaagaagaagacccaaatgaagagctttcaaaagatgagttcattctgaagttaaaggcagaagtacagcgtttgctgggtagcaactcaatgaagcgtcatctggtgtctcagttacaaaatgacctcaaagactgtcataagaaaattgaagatctccaccaagtgaaaaaaaaaaaaaaaaaaaaaaaa

SEQ ID NO: 314357 - DNA, 588 bp, Artificial Sequence
  derived and/or modified sequence
agccccgggcatcctgggccccgtgcggctttggtcatgtttgtagtgccgtagctgacgccaaacagttcctcaaggtcattcgctcagcctgtggatgcttattgtgtattagcattactcgctccgccctctgggcaacttgaatcaatttgtccaaagtgctgttattagcactgatcacaagatgttgtgatcatttgtttatatgtctattttctttcccttcatcgtgtcctgttaaactttgtaatcttgaacagtgcttggtaaattgtcgaatgaatgaataaggtgtctccaccaggtgttgcaagtctaaaccgggctatgtgctctggctatttccattctagaaggcgagttatgtcagcaagaggaccatgtcattagactttggcagtgtggcactaccagtgcaaaatgaagatgaagagtatgacgaagaggactatgaaagagagaaagagttgcagcagttactcacagaccttccccatgacatgctggatgacgacctctcctctccagagctccagtattcggactgcagcgaggatggcacagacggacaaccacatcatcctg

SEQ ID NO: 314358 - DNA, 1779 bp, Artificial Sequence
  derived and/or modified sequence
atgagcctggacttcggcagcgtggccctgcccgtgcagaacgaggacgaggagtacgacgaggaggactacgagagagagaaggagctgcagcagctgctgaccgacctgccccacgacatgctggacgacgacctgagcagccccgagctgcagtacagcgactgcagcgaggacggcaccgacggccagccccaccaccccgagcagctggagatgagctggaacgagcagatgctgcccaagagccagagcgtgaacggctacaacgagatccagagcctgtacgccggcgagaagtgcggcaacgtgtgggaggagaacagaagcaagaccgaggacagacaccccgtgtaccaccccgaggagggcggcgacgagggcggcagcggctacagcccccccagcaagtgcgagcagaccgacctgtaccacctgcccgagaacttcagaccctacaccaacggccagaagcaggagttcaacaaccaggccaccaacgtgatcaagttcagcgacccccagtggaaccacttccagggccccagctgccagggcctggagccctacaacaaggtgacctacaagccctaccagagcagcgcccagaacaacggcagccccgcccaggagatcaccggcagcgacaccttcgagggcctgcagcagcagttcctgggcgccaacgagaacagcgccgagaacatgcagatcatccagctgcaggtgctgaacaaggccaaggagagacagctggagaacctgatcgagaagctgaacgagagcgagagacagatcagatacctgaaccaccagctggtgatcatcaaggacgagaaggacggcctgaccctgagcctgagagagagccagaagctgttccagaacggcaaggagagagagatccagctggaggcccagatcaaggccctggagacccagatccaggccctgaaggtgaacgaggagcagatgatcaagaagagcagaaccaccgagatggccctggagagcctgaagcagcagctggtggacctgcaccacagcgagagcctgcagagagccagagagcagcacgagagcatcgtgatgggcctgaccaagaagtacgaggagcaggtgctgagcctgcagaagaacctggacgccaccgtgaccgccctgaaggagcaggaggacatctgcagcagactgaaggaccacgtgaagcagctggagagaaaccaggaggccatcaagctggagaagaccgagatcatcaacaagctgaccagaagcctggaggagagccagaagcagtgcgcccacctgctgcagagcggcagcgtgcaggaggtggcccagctgcagttccagctgcagcaggcccagaaggcccacgccatgagcgccaacatgaacaaggccctgcaggaggagctgaccgagctgaaggacgagatcagcctgtacgagagcgccgccaagctgggcatccaccccagcgacagcgagggcgagctgaacatcgagctgaccgagagctacgtggacctgggcatcaagaaggtgaactggaagaagagcaaggtgaccagcatcgtgcaggaggaggaccccaacgaggagctgagcaaggacgagttcatcctgaagctgaaggccgaggtgcagagactgctgggcagcaacagcatgaagagacacctggtgagccagctgcagaacgacctgaaggactgccacaagaagatcgaggacctgcaccaggtgaagaagaagaagaagaagaagaagtag

SEQ ID NO: 314359 - DNA, 207 bp, Artificial Sequence
  derived and/or modified sequence
atgagcctggacttcggcagcgtggccctgcccgtgcagaacgaggacgaggagtacgacgaggaggactacgagagagagaaggagctgcagcagctgctgaccgacctgccccacgacatgctggacgacgacctgagcagccccgagctgcagtacagcgactgcagcgaggacggcaccgacggccagccccaccacccctag

SEQ ID NO: 314360 - protein, 156 aa, Artificial Sequence
  derived and/or modified sequence
MAVEGSTITSRIKNLLRSPSIKLRRSKAGNRREDLSSKVTLEKVLGITVSGGRGLACDPRSGLVAYPAGCVVVLFNPRKHKQHHILNSSRKTITALAFSPDGKYLVTGESGHMPAVRVWDVAEHSQVAELQEHKYGVACVAFSPSAKYIVSVGYQH

SEQ ID NO: 314361 - DNA, 381 bp, Artificial Sequence
  derived and/or modified sequence
ggtccctaccggcacatcacacactcctggaagcatgatcttcactcccttccttccacctgctgacctgtctgtctttcagaatgtgaaagggctgcaaaacgaccctgaggaatgggtggctgtgtctgacgccacggaggacccatccggtggcacaggcttgcccagggaacctgctcttctgcgagggtcttggaggagccggttccagagagccctggcatgtttcaccaagtgtttcaggggaggataccgggcactcggaatctgagaccaccggagccacagacacagagccatgaacggtgaccaagccccttctgctgctccatgcccctgctcgccgcagtgtcccagtcaccaggcctgaaataaatg

SEQ ID NO: 314362 - DNA, 453 bp, Artificial Sequence
  derived and/or modified sequence
ggccctcggcctctttgcacccggcagagtgacgagcttcgccggtgtcttcaacgaagtcctgtcggtccctaccggcacatcacacactcctggaagcatgatcttcactcccttccttccacctgctgacctgaatgtgaaagggctgcaaaacgaccctgaggaatgggtggctgtgtctgacgccacggaggacccatccggtggcacaggcttgcccagggaacctgctcttctgcgagggtcttggaggagccggttccagagagccctggcatgtttcaccaagtgtttcaggggaggataccgggcactcggaatctgagaccaccggagccacagacacagagccatgaacggtgaccaagccccttctgctgctccatgcccctgctcgccgcagtgtcccagtcaccaggcctgaaataaatgctggcacgcttgactgtt

SEQ ID NO: 314363 - DNA, 471 bp, Artificial Sequence
  derived and/or modified sequence
atggccgtggagggcagcaccatcaccagcagaatcaagaacctgctgagaagccccagcatcaagctgagaagaagcaaggccggcaacagaagagaggacctgagcagcaaggtgaccctggagaaggtgctgggcatcaccgtgagcggcggcagaggcctggcctgcgaccccagaagcggcctggtggcctaccccgccggctgcgtggtggtgctgttcaaccccagaaagcacaagcagcaccacatcctgaacagcagcagaaagaccatcaccgccctggccttcagccccgacggcaagtacctggtgaccggcgagagcggccacatgcccgccgtgagagtgtgggacgtggccgagcacagccaggtggccgagctgcaggagcacaagtacggcgtggcctgcgtggccttcagccccagcgccaagtacatcgtgagcgtgggctaccagcactag

SEQ ID NO: 314364 - DNA, 471 bp, Artificial Sequence
  derived and/or modified sequence
atggccgtggaagggtctacaatcacttctcggattaagaatctccttcgaagcccaagtattaagctgagaagaagcaaagctggaaacaggcgggaggacttgtcatctaaggtgacactggagaaagtgttaggaattaccgtatctgggggtcgcggcctggcctgcgatccccgcagcggcctcgtggcatatcctgctggctgcgtggtagtgttgtttaacccccgtaagcacaaacaacatcatatcctcaattccagccgaaaaaccattacagccctggcattctcccccgacggaaagtatctggttactggagagtcgggccatatgccagctgtgcgggtatgggatgtggccgagcacagccaggtagctgagctgcaggagcataaatacggcgttgcatgcgtggcattttcaccttcggctaaatacattgtttccgtggggtatcagcattag

SEQ ID NO: 314365 - DNA, 471 bp, Artificial Sequence
  derived and/or modified sequence
atggctgtggagggcagcaccatcaccagccgcatcaagaacctgctgcggagccccagcatcaagctgcggcgcagcaaggccggcaacagaagagaggacctgagcagcaaggtgaccctggagaaggtgctgggcatcaccgtgtctgggggccggggcctggcctgtgaccccaggagcggcctggtggcctacccagctggctgtgtggtggtgctcttcaaccccaggaagcacaagcagcaccacatcctgaacagcagcaggaagaccatcacagccctggccttctccccagatggcaagtacctggtgactggagagagcggccacatgcctgctgtgcgggtgtgggatgtggccgagcacagccaggtggccgagctgcaggagcacaagtatggagtggcctgtgtggccttcagccccagcgccaagtacatcgtgtctgtgggctaccagcactag

SEQ ID NO: 314366 - DNA, 471 bp, Artificial Sequence
  derived and/or modified sequence
atggccgtggagggcagcaccatcaccagccggatcaagaacctgttacggtctccttcaatcaagctaaggagaagcaaggctgggaatcgcagagaggaccttagctccaaagtgaccctggaaaaggtgctgggtatcaccgtcagcggcggaagggggctggcatgtgaccctcggtccgggctcgtggcgtatccagcagggtgcgtggtggttcttttcaatccacgcaagcacaagcaacaccacatcctgaactctagcagaaagacaatcaccgccctagcattctctccggatggcaagtacctggtgactggtgaatctgggcacatgccagccgtgcgtgtttgggacgtggcagagcatagtcaggtagcggagcttcaggagcacaagtatggagtcgcctgtgtcgccttcagtccttctgcaaagtatatcgtgagcgtaggctaccagcactag

SEQ ID NO: 314367 - DNA, 908 bp, Artificial Sequence
  derived and/or modified sequence
agagcgagctctggaggatagggagtgggggagggaggctcccgtggcagaacgagttgtgggctacggcgagccccgccgcgtccccgccggcgctagcgcaggtgtccaggcctgcggaaatccctggtggtctcggcggcctcctcccttggacactacagttgccatgggaacagttgggcattaacgggaaccagatcgtccacgagaccaactggggcccatcccatccatctcgccagttaaacgcctctggcgggcgtgggcctggcatttcttcgtggcttaggattttccccccctttttcgtgagcctttccttccgacgttgtaagaaactgtgcagggctagaaggtggggatgagggaaatggtgagagcaatacccagaggtaaaagctgcagacttcgctaggcagaagggtttctcgtcataatggctgtggaagggtcaaccattaccagccggatcaagaatctgttgagatctccatccatcaaactgcgcaggagtaaggcaggaaaccgacgagaggacctcagctccaaggtgaccttggagaaggtgctgggaattacagtgtctggaggcagaggacttgcctgtgacccccgatcaggtttagttgcttacccagcagggtgtgtggttgtgttgttcaatccccggaaacacaaacagcaccacatcctcaacagttccaggaaaaccatcactgcccttgccttctcccctgatggcaagtacttggtcactggagagagtgggcacatgcctgccgtgcgggtttgggacgtggcagagcacagccaggtggccgagctgcaggagcacaagtatggtgtggcttgtgtggccttctctcctagcgccaagtacattgtctctgtgggctaccagcatg

SEQ ID NO: 314368 - DNA, 471 bp, Artificial Sequence
  derived and/or modified sequence
atggctgtggagggatctacaatcacgagtcgaatcaaaaacttattgcgcagcccgtccattaaactgcggagatctaaggctggcaatcgcagggaagatctgtcatccaaagtgacattggagaaggtcttaggtattactgtgtccggcggacggggactggcctgtgaccctaggtctggacttgttgcctatcctgccggttgcgtggttgtgctgttcaacccgagaaaacataaacaacatcacatcctgaacagctccagaaagactatcactgccctggcatttagcccagacggtaaatatctcgtcacaggcgaatctggtcatatgcctgccgtgcgggtgtgggatgtcgcagagcactcccaggtagcagagctgcaagagcacaagtacggcgtcgcttgcgtggctttcagcccctctgcaaaatacatcgtgagcgttgggtaccagcactag

SEQ ID NO: 314369 - protein, 482 aa, Artificial Sequence
  derived and/or modified sequence
MANVYTMEEFMELGNEVPEEALDAIIDTQQPNQCCVLVYTSGTTGNPKGVMLSQDNITWTARYGSQAGDIRPAEVQQEVVVSYLPLSHIAAQIYDLWTGIQWGAQVCFAEPDALKGSLVNTLREVEPTSHMGVPRVWEKIMERIQEVAAQSGFIRRKMLLWAMSVTLEQNLTCPGSDLKPFTTRLADYLVLAKVRQALGFAKCQKNFYGAAPMMAETQHFFLGLNIRLYAGYGLSETSGPHFMSSPYNYRLYSSGKLVPGCRVKLVNQDAEGIGEICLWGRTIFMGYLNMEDKTCEAIDEEGWLHTGDAGRLDADGFLYITGRLKELIITAGGENVPPVPIEEAVKMELPIISNAMLIGDQRKFLSMLLTLKCTLDPDTSDQTDNLTEQAMEFCQRVGSRATTVSEIIEKKDEAVYQAIEEGIRRVNMNAAARPYHIQKWAILERDFSISGGELGPTMKLKRLTVLEKYKGIIDSFYQEQKM

SEQ ID NO: 314370 - DNA, 1449 bp, Artificial Sequence
  derived and/or modified sequence
atggccaatgtgtatactatggaagaattcatggaactcggcaatgaagttccagaggaagccctggatgctatcatcgacactcagcagcctaatcagtgttgcgttttggtttacacgtccgggaccactgggaatcccaaaggggtgatgctctcgcaggataacataacctggacggcccggtatggttcccaggccggagatatcaggccggctgaagtgcagcaagaagttgttgtctcgtatttgccactcagccatattgctgctcaaatctacgacctgtggacaggaatccagtggggggcccaagtttgttttgcagagccagacgccctgaagggttccttagtgaatacgctgagggaggtagagccgacctcacacatgggagttccgcgggtgtgggaaaagatcatggagcggattcaggaggtggcagcacaaagcggtttcatcagaaggaaaatgctgctgtgggcaatgtctgtaaccttggagcaaaacctgacctgcccaggcagcgatcttaaacctttcacaacccgcctcgcagattatctggtgctggccaaagtgcgacaagccttgggatttgccaaatgtcagaaaaacttctatggcgcagctcctatgatggccgagacccagcacttcttcctgggtctcaatatcagactctacgccggttacggcctgtccgagaccagtggaccacatttcatgagcagtccctacaactacaggctgtattcctcagggaagctcgttcctggttgcagagtgaaactggttaaccaagatgctgagggaatcggggagatctgtttatgggggagaacaatctttatgggttaccttaacatggaagataagacgtgtgaggccatcgatgaagagggctggttgcacaccggtgatgccggaagactggatgcagacgggtttctctacattaccgggagactgaaagaactgatcataaccgccggcggagagaacgtacctccggtgcccatcgaagaagctgttaaaatggagctgcctatcataagcaacgccatgctaatcggtgaccaaagaaagtttttgtcaatgctcctgactctgaagtgtacgctggacccagatacaagcgatcagactgataacttgaccgaacaggcgatggagttttgccagagagtgggatctcgtgcaaccactgtgagcgagataatagagaagaaggacgaggcggtatatcaagcaattgaggagggcattcgccgagtgaatatgaatgccgccgcgcgcccgtatcacattcagaagtgggccattctcgagcgggattttagcattagcggcggcgagctggggccaacaatgaagttaaagaggctcactgtcctggaaaagtacaagggcatcatcgacagcttctatcaggagcagaaaatgtag

SEQ ID NO: 314371 - DNA, 1449 bp, Artificial Sequence
  derived and/or modified sequence
atggccaacgtgtacaccatggaggagttcatggagctgggcaatgaggtgcctgaggaggccctggatgccatcatcgacacccagcagcccaaccagtgctgcgtgctggtgtacaccagcggcaccaccggcaaccccaagggcgtgatgctgagccaggacaacatcacctggacagcccgctatggcagccaggccggggacatccggcctgctgaggtgcagcaggaggtggtggtgtcctacctgcccctgagccacatcgccgcccagatctatgacctgtggacaggcatccagtggggcgcccaggtgtgctttgctgagccagatgccctgaagggcagcctggtgaacaccctgcgggaggtggagcccaccagccacatgggcgtgccccgggtgtgggagaagatcatggagcgcatccaggaggtggccgcccagagcggcttcatccggaggaagatgctgctgtgggccatgtctgtgaccctggagcagaacctgacctgccccggcagtgacctgaagcccttcaccacccggctggccgactacctggtgctggccaaggtgcggcaggccctgggctttgccaagtgccagaagaacttctacggggccgcccccatgatggccgagacccagcacttcttcctgggcctgaacatccggctgtatgccggctacggcctgtctgagaccagcggcccccacttcatgagcagcccctacaactaccgcctgtacagcagcggcaagctggtgcccggctgccgggtgaagctggtgaaccaggatgctgagggcattggagagatctgcctgtggggccgcaccatcttcatgggctacctgaacatggaggacaagacctgtgaggccattgatgaggagggctggctgcacactggagatgctggccgcctggatgctgatggcttcctgtacatcaccggccgcctgaaggagctgatcatcacagctggaggagaaaatgtgccccctgtgcccatcgaggaggccgtgaagatggagctgcccatcatcagcaatgccatgctgattggagaccagaggaagttcctgtccatgctgctgaccctgaagtgcaccctggaccctgacaccagtgaccagacagacaacctgacagagcaggccatggagttctgccagagggtgggcagccgggccaccaccgtgtctgagatcatcgagaagaaggatgaggccgtgtaccaggccatcgaggagggcatccggcgggtgaacatgaatgctgctgcccggccctaccacatccagaagtgggccatcctggagcgggacttcagcatcagcggcggggagctgggccccaccatgaagctgaagaggctgactgtgctggagaagtacaagggcatcatcgacagcttctaccaggagcagaagatgtag

SEQ ID NO: 314372 - DNA, 1449 bp, Artificial Sequence
  derived and/or modified sequence
atggccaacgtgtacaccatggaggagttcatggagctgggcaacgaggtgcccgaggaagctttggacgccataattgacactcaacaaccgaaccagtgctgcgtgcttgtttatacgagtggcaccacaggaaaccccaaaggagttatgttaagtcaggacaatattacatggacagctcggtacggcagtcaggccggcgatatccggcctgccgaggtgcagcaggaagtggttgtgtcttaccttccattaagccatatagccgctcagatttatgatctttggaccggcatccagtggggagcacaggtatgcttcgcagaacccgatgcactgaaagggtccctggtaaatacgctccgcgaagtcgagcccacatctcacatgggagtccctagagtgtgggagaaaatcatggagcgcatccaggaagtagctgcccaaagcggcttcatccgcagaaaaatgctcttgtgggcaatgtcggtaacactggagcagaacctcacatgtcctggctccgaccttaagccttttacaactcgtttagccgactacctggtgttggctaaggtgcgtcaagctttaggcttcgcaaagtgtcagaaaaatttttatggtgcggctccgatgatggcggagacccagcatttcttcctcgggctgaacattaggttatatgccggctatgggctgtccgagacaagtggcccccactttatgtccagcccttataattatcgactgtactcttcaggcaagttagtcccaggttgccgcgtgaagctggtgaaccaggacgcagagggaatcggggaaatttgtttgtggggaaggacgatatttatggggtatctgaatatggaggacaaaacctgcgaggccattgacgaagaaggatggctgcacacaggtgatgccggaagactagatgccgacggcttcctgtacatcactgggagacttaaagaattaattattactgccggcggagaaaatgtaccgccagtgcctatcgaggaagctgtcaagatggagctccctattatctctaacgccatgctgattggcgaccaacgaaaatttctgagtatgctcctgacgctgaaatgcactctcgatccggatacatccgatcagactgataatttgacagaacaagctatggaattttgtcagagagtgggctcacgggcaacaaccgtgagcgagatcattgagaaaaaagacgaggctgtctatcaagctatcgaggaggggataaggagagttaacatgaacgccgcagcccggccctaccacattcaaaagtgggctatcctggagcgtgacttctcaatctcgggaggcgaactgggccccactatgaagctcaagaggctcaccgtgcttgagaaatataaggggataattgacagcttctaccaggagcagaagatgtag

SEQ ID NO: 314373 - DNA, 1449 bp, Artificial Sequence
  derived and/or modified sequence
atggcgaatgtgtatacaatggaggaatttatggaattgggtaacgaggtgcctgaggaagccctagatgcgatcattgacactcagcagcctaatcagtgctgtgtcttggtttatactagtggcactactggcaatccaaaaggagtcatgctctcccaggataacattacatggacagccaggtacggaagccaggcaggagacatccggccagctgaagtgcagcaggaagtcgtagtgtcttatttacctctctcccatattgctgcacaaatctatgatctttggacgggcatccagtggggtgcgcaagtgtgctttgcagaacctgacgctttgaaaggctcactggttaacacattaagggaggttgagcccaccagtcacatgggagtgccgcgagtctgggagaagatcatggagagaatccaggaggtggctgcccagagcggcttcatccggagaaagatgctgctgtgggcaatgagcgtgacactggagcagaacctgacctgcccaggctcagacttgaagccattcacaactcgactcgccgactaccttgttctggcaaaagtacggcaggctcttggcttcgctaaatgtcagaagaacttctacggggctgcccctatgatggctgagacacagcacttctttctaggactgaacatcagactttatgctgggtacggcctgtctgagacaagcggaccacatttcatgtcctcaccatataattaccgtctgtacagttccgggaagttagtgccaggttgccgggtgaagctggtgaatcaggacgctgaggggataggagaaatctgtctttgggggagaactatcttcatgggttacttgaacatggaggacaagacttgtgaagccattgatgaagagggctggctgcatactggtgatgctggtcgtctcgatgctgatggattcttatatattaccgggaggctgaaggagcttattattaccgccggaggcgagaacgtgcctcccgttcccatagaggaagctgtcaaaatggaactgcccattatctccaatgcaatgctgatcggcgaccagcgaaaatttctttccatgcttctgactctcaaatgtaccctcgatcccgacactagcgaccagacggataatctcactgaacaggccatggagttctgtcaaagagtcggatccagggctacgacagtttcagagattatcgaaaaaaaggacgaagctgtgtatcaggctatcgaagaaggaatccgcagagtgaatatgaacgctgcagcgaggccgtaccacattcaaaaatgggccatcctagagcgtgacttctctatctcaggcggtgagttaggacctacaatgaagctcaagcgactcaccgtgctcgagaaatacaaaggaatcattgacagcttctaccaggagcagaagatgtag

SEQ ID NO: 314374 - DNA, 1449 bp, Artificial Sequence
  derived and/or modified sequence
atggccaacgtgtacaccatggaggagttcatggagctgggcaacgaggtgcccgaggaggccctggacgccatcatcgacacccagcagcccaaccagtgctgcgtgctggtgtacaccagcggcaccaccggcaaccccaagggcgtgatgctgagccaggacaacatcacctggaccgccagatacggcagccaggccggcgacatcagacccgccgaggtgcagcaggaggtggtggtgagctacctgcccctgagccacatcgccgcccagatctacgacctgtggaccggcatccagtggggcgcccaggtgtgcttcgccgagcccgacgccctgaagggcagcctggtgaacaccctgagagaggtggagcccaccagccacatgggcgtgcccagagtgtgggagaagatcatggagagaatccaggaggtggccgcccagagcggcttcatcagaagaaagatgctgctgtgggccatgagcgtgaccctggagcagaacctgacctgccccggcagcgacctgaagcccttcaccaccagactggccgactacctggtgctggccaaggtgagacaggccctgggcttcgccaagtgccagaagaacttctacggcgccgcccccatgatggccgagacccagcacttcttcctgggcctgaacatcagactgtacgccggctacggcctgagcgagaccagcggcccccacttcatgagcagcccctacaactacagactgtacagcagcggcaagctggtgcccggctgcagagtgaagctggtgaaccaggacgccgagggcatcggcgagatctgcctgtggggcagaaccatcttcatgggctacctgaacatggaggacaagacctgcgaggccatcgacgaggagggctggctgcacaccggcgacgccggcagactggacgccgacggcttcctgtacatcaccggcagactgaaggagctgatcatcaccgccggcggcgagaacgtgccccccgtgcccatcgaggaggccgtgaagatggagctgcccatcatcagcaacgccatgctgatcggcgaccagagaaagttcctgagcatgctgctgaccctgaagtgcaccctggaccccgacaccagcgaccagaccgacaacctgaccgagcaggccatggagttctgccagagagtgggcagcagagccaccaccgtgagcgagatcatcgagaagaaggacgaggccgtgtaccaggccatcgaggagggcatcagaagagtgaacatgaacgccgccgccagaccctaccacatccagaagtgggccatcctggagagagacttcagcatcagcggcggcgagctgggccccaccatgaagctgaagagactgaccgtgctggagaagtacaagggcatcatcgacagcttctaccaggagcagaagatgtag

SEQ ID NO: 314375 - DNA, 2257 bp, Artificial Sequence
  derived and/or modified sequence
gtcttcagtggaagcccgaggcagatgccacgcaattctggagctggatacggctgcccacacggggaccccagcatgctggacagcagagagaccccacaggagagccggcaggacatgattgtgaggaccacccaagaaaaattgaaaaccagatctggaaacagttgccacatctaaaggcagtcgtgatatataaagaacctcctccaaacaagatggccaatgtgtacacgatggaggaattcatggagctggggaatgaagtgcctgaggaagccctggacgccatcattgacacccagcagcccaaccagtgctgtgtgctagtctacacttccggcaccactgggaaccccaagggcgtgatgctgagtcaagacaatatcacgtggacggcacggtacggcagccaggccggtgacatccggccggcagaagtccagcaggaggtggtagtcagctacctgcccctcagccatattgccgcccagatctacgacctgtggacaggcatccagtggggggcccaggtttgctttgccgaacccgacgccctgaaggggagcctggtgaacacgctgcgggaggtggagcccacatcacacatgggggtgccccgggtatgggagaagatcatggagcgcatccaggaggtggcggctcagtctggcttcatccggcgaaagatgctgctgtgggccatgtcggtgaccttggagcagaacctcacctgccccggcagcgacctgaagcccttcacaaccagactggcagattacctggtgctagccaaggttcgccaggcactgggatttgccaagtgtcaaaagaacttctatggagcggcccccatgatggcagagacacagcacttcttcctgggtctcaacatccgcttgtatgcgggctacggcctcagtgagacctcaggcccccacttcatgtccagtccctacaactaccggctgtacagctcaggcaagttggtgcccggctgtcgggtgaagctggtgaaccaggacgcagagggcattggcgagatctgcctgtggggccgcaccatattcatgggctacctgaacatggaggacaagacttgtgaggccatcgacgaggaaggctggctgcacacgggtgatgctggccgcctggacgccgatggcttcctctacatcactgggcgcctcaaagaattaatcatcacagctggtggggagaatgtgccccctgtgcccatcgaggaggccgtgaagatggagctgcccatcatcagcaacgccatgctcattggggaccagaggaagttcctgtccatgctgctcaccttgaagtgcactctggacccagacacctctgaccagactgataatctgactgaacaagctatggagttctgccagagggtgggcagcagagccaccacagtgtccgagatcatagagaagaaggatgaggccgtgtaccaggccatcgaagaggggatccggagggtcaacatgaacgcggcggcccggccctaccacatccagaagtgggccattctcgagagagacttctccatttcgggtggagagttgggtcccacgatgaaactgaaacggctcacagttttggagaagtacaaaggtatcattgactccttttaccaagagcaaaaaatgtaatcagggcctatgcctgcagtttctatagaatagagggcaggcgttccgagcctcttcctgagccccaggtctcttcagtctgggcacaggcatttctgccaagtctgttagatctccaggtcagggcacagcactggctctacatttaccaggtcttacgccaacaatagctgacaattccaagaagcttcacgtgtgggtagttttaattcagtttaagtattgctttttgttcaggtgacaaatgagatcagctctccttccagaacgaaagggctgataatttttggccttagttccaggtagattaaaaagctgctagctcacatacaggacagccagcagtaggctgtggagcgggtaggagagagatggctgatactgctcacgtgcgctgcaggaaaagcaatcagtcacaactcacctagcgacctgacttactctggaatcttggcgggcatcgccgaccctattattccattaccaggcactccgccacccacatgccaactgacttgatgcttaataaaactgctgctgcctgtttgattctatttaatgtataatttgaatattaaaccttttaacag

SEQ ID NO: 314376 - DNA, 291 bp, Artificial Sequence
  derived and/or modified sequence
atgaccccctgcctggagagcttctgccagcgggccaaggactgcaaacagaatatacccctgccctttctgattcaggactggccattaagcgaatccaaaccacagggccaggatttttggacaccacagcccctgcaggctgccgctcctagccacgagtttcagcaagtggccctgcatcctgctaggactcgattagcaagtaggccccagggcgggcgactaatgtccagccgggaagtcgggctccgggccccaagatgctcttgtggaaaacgcaaacgctag

SEQ ID NO: 314377 - DNA, 85 bp, Artificial Sequence
  derived and/or modified sequence
agaaaaaaacaaacagcccattaaaaggtagacaaaggacatgaacacttttcaaaagaagacatacatgtggccaaacagcatg

SEQ ID NO: 314378 - protein, 81 aa, Artificial Sequence
  derived and/or modified sequence
MFQASMRSPNMEPFKQQKVEDFYDIGEELGSGQFAIVKKCREKSTGLEYAAKFIKKRQSRASRRGVSREEIEREVSILRQV

SEQ ID NO: 314379 - DNA, 246 bp, Artificial Sequence
  derived and/or modified sequence
atgtttcaggccagcatgaggtcacctaacatggaaccgtttaaacagcagaaggtggaagacttttacgacattggcgaagaattaggaagtggacagtttgccattgtgaagaaatgcagagagaaatcaaccggcctggaatatgccgccaagtttattaaaaagcgccagtcccgagctagtcgtagaggggtgtcgcgcgaagaaatcgagagagaggtcagcattctgaggcaggtgtag

SEQ ID NO: 314380 - DNA, 246 bp, Artificial Sequence
  derived and/or modified sequence
atgttccaggcctccatgaggagccccaacatggagcccttcaagcagcagaaggtggaggacttctatgacattggagaggagctgggcagcggccagtttgccatcgtgaagaagtgccgggagaagagcacaggcctggagtatgctgccaagttcatcaagaagaggcagagccgggccagcagaagaggagtgtcccgggaggagattgagcgggaggtgtccatcctgcggcaggtgtag

SEQ ID NO: 314381 - DNA, 246 bp, Artificial Sequence
  derived and/or modified sequence
atgttccaggccagcatgcggagccccaacatggagcccttcaagcaacaaaaggtcgaggatttctacgatattggtgaagagttgggatccggacagtttgcaattgtgaagaagtgcagagaaaaaagcactggcttagaatatgctgccaaatttattaagaagcggcagtcccgcgcctcaagaaggggcgtgtctagagaggagatagagcgcgaagtgagcattcttcgccaagtctag

SEQ ID NO: 314382 - DNA, 246 bp, Artificial Sequence
  derived and/or modified sequence
atgttccaggcctccatgcggtccccaaatatggagcctttcaagcagcagaaggtggaggacttctacgacattggcgaggagttgggaagcggacaattcgccattgtgaaaaagtgcagggaaaaaagtacggggttggagtatgcggctaagttcattaagaagcgacagagccgcgctagtagaaggggtgtgtcgagagaagaaatagaacgcgaagtaagtattctgcggcaggtctag

SEQ ID NO: 314383 - DNA, 246 bp, Artificial Sequence
  derived and/or modified sequence
atgttccaggccagcatgagaagccccaacatggagcccttcaagcagcagaaggtggaggacttctacgacatcggcgaggagctgggcagcggccagttcgccatcgtgaagaagtgcagagagaagagcaccggcctggagtacgccgccaagttcatcaagaagagacagagcagagccagcagaagaggcgtgagcagagaggagatcgagagagaggtgagcatcctgagacaggtgtag

SEQ ID NO: 314384 - DNA, 724 bp, Artificial Sequence
  derived and/or modified sequence
gaatccagctgctatgtcacgagaactcaagccaccctgtggagaattccacacggagtgcagctgaggcctcccaacaacaaccagcagcaatttgcaaaccatgtgtctcctacagctactggtgtgttttttgcatattggccttccaacatttcttgttgaattatttcaggctcaccttggtcataatgagtggatctggctttacccagggcttcagcctttagcatttcacatgaggaatatccactgagctgggggtcaagaggcctgacctttaatcttggctctgccccaggcaagtgtgaacttgggtaagaacactgaggccaggaaatgttgagtgacgtgtccatactcacatagcatggaagaatcagaggccatggggtcaggacctatgggcttaggatataccggaagaggcctgatttccagtcgagcatttgccaaaaatcagcagcgtgatttgggattgtatgttccaggcctcaatgaggagtccaaacatggagccattcaagcagcagaaggtggaggacttttatgacatcggagaggagctggggagtggccagtttgccatcgtgaagaagtgccgggagaagagcacggggcttgagtatgcagccaagttcatcaagaagcggcagagccgggcgagccggcgcggtgtgagccgggaggagatcgagcgggaggtgagcatcctgcggcaggt

SEQ ID NO: 314385 - DNA, 406 bp, Artificial Sequence
  derived and/or modified sequence
aggaggggatgtgtatgagaacttctgagaagaaaggatcagaatgtatgcattctttttttgagcagaatattgatggttcatttttgtgacttacaagaaccagcagtttattggcttcattttgtaggaagcagatgtccctggtagatttgggaaagaagcttttagaagcggcacgagcaggtcaagatgatgaagttcgtattttgatggcaaatggagctccctttactacagactggctgggaacttctccacttcatctagcagcacagtatggtcattattccaccacagaggtactgctgcgagctggtgtgagcagagatgccagaaccaaagtggaccgaacaccattacatatggcagcttctgagggccatgccagcatagtagaggtttt

SEQ ID NO: 314386 - DNA, 730 bp, Artificial Sequence
  derived and/or modified sequence
atgtgtccctccgcgcgcagcacgggggacttttcggtggggattttgggcgccgaccagacgcggcattttcggaaaatagcgccctgtgcagctgaagcgctttgtgtgtagcggggccgcgtcagcccggccgggtacgaggcgcctcgggtccccgcaccacctcctgctgccttcccgtcgccgctcccgaagcttttccaggattattccctcctttgctggacctctagtatccatggcacttgcccattaaatgctagcagagcatcctcaccttcagtctccaaaatgcctctataaacatacaaagggccctgaagggggcagtgctgctaccaatgagaaccactgatttccaagaatccatctacattaatctaccatatggcggccgggcgcggtggctcacgcctgtaatcccagcactatgggaggccgaggcgggcagatcacgagatgtccctggtagatttgggaaagaagcttttagaagcggcacgagcaggtcaagatgatgaagttcgtattttgatggcaaatggagctccctttactacagactggctgggaacttctccacttcatctagcagcacagtatggtcattattccaccacagaggtactgctgcgagctggtgtgagcagagatgccagaaccaaagtggaccgaacaccattacatatggcagcttctgagggccatgccagcatagtagaggttt

SEQ ID NO: 314387 - DNA, 270 bp, Artificial Sequence
  derived and/or modified sequence
atgtccctggtcgatctcggaaagaaacttctggaggctgctcgggcagggcaagatgatgaggtcagaattctgatggccaacggagcgccttttactaccgactggctaggcacatctccattgcatttagctgctcagtacggccactattcaacaaccgaggttctcctccgggccggtgtgtctagagatgctagaaccaaagtggaccgcaccccccttcatatggccgcaagcgaaggacatgcaagcattgtggaggtgtag

SEQ ID NO: 314388 - DNA, 270 bp, Artificial Sequence
  derived and/or modified sequence
atgtctctcgttgaccttggcaaaaaactccttgaagcagcacgggccgggcaagacgatgaggtcaggatcctcatggccaatggcgccccctttacaacagactggttagggacatctccattgcacttagccgctcaatacggtcattacagtacgaccgaggtgctactgagggccggcgtctctcgtgacgcgcggactaaggtggatcgcaccccactgcacatggcagcctcagaggggcacgcctcaatcgttgaagtttag

SEQ ID NO: 314389 - DNA, 270 bp, Artificial Sequence
  derived and/or modified sequence
atgagcctggtggacctgggcaagaagctgctggaggccgcccgggccggccaggatgatgaggtgcgcatcctgatggccaacggggcccccttcaccacagactggctgggcaccagccccctgcacctggccgcccagtatggccactacagcaccacagaggtgctgctgcgggccggcgtgtccagagatgcccggaccaaggtggacaggacccccctgcacatggccgccagcgagggccacgccagcatcgtggaggtgtag

SEQ ID NO: 314390 - DNA, 270 bp, Artificial Sequence
  derived and/or modified sequence
atgagcctggtggacctgggcaagaagctgctggaggccgcccgggcagggcaggacgatgaggtccggatactcatggcgaatggagccccctttactacagattggctgggcacttcccccttgcatctggcagctcagtatgggcactattccaccaccgaggtgctgcttagggcaggtgtgtcccgagacgctagaacgaaggttgatcgcacgccacttcatatggcagctagtgaagggcacgcctcaatcgtggaagtgtag

SEQ ID NO: 314391 - DNA, 270 bp, Artificial Sequence
  derived and/or modified sequence
atgagcctggtggacctgggcaagaagctgctggaggccgcccgggccggccaggatgatgaagtgcggatattgatggccaacggtgccccttttactactgactggctgggcacatcccccttgcaccttgcagctcagtatggccactactctaccactgaggtcctgctacgggcaggggtctcaagggacgcaagaacgaaggtagatagaactccactccacatggccgccagcgagggccacgcttcaatcgtcgaggtatag

SEQ ID NO: 314392 - DNA, 270 bp, Artificial Sequence
  derived and/or modified sequence
atgtccctggtggacttaggcaagaagctgctggaagccgctcgcgctggccaagacgacgaagtgagaattttaatggcaaatggtgctcctttcaccaccgactggctcggcacgagtccactccatctggccgcacagtatggccactattccaccacagaggtcttgctgcgtgctggagtgagtcgagacgcaaggactaaggtcgaccgcaccccacttcacatggccgcttcagaaggccatgctagcatcgtggaagtatag

SEQ ID NO: 314393 - DNA, 270 bp, Artificial Sequence
  derived and/or modified sequence
atgtccctagtcgacctgggtaaaaaactgctggaagctgcacgagcgggacaggacgatgaagtgcgcattctgatggctaacggcgctccttttactacagactggctcggaacaagtcctctgcatctggccgctcagtacggacattacagcaccacagaagtcctcctgagggctggagtgtctagagacgccagaaccaaagtagataggacaccattgcacatggcggcttccgagggacacgcctccattgtggaagtctag

SEQ ID NO: 314394 - DNA, 270 bp, Artificial Sequence
  derived and/or modified sequence
atgagcctggtggacctgggcaagaagctgctggaggccgccagagccggccaggacgacgaggtgagaatcctgatggccaacggcgcccccttcaccaccgactggctgggcaccagccccctgcacctggccgcccagtacggccactacagcaccaccgaggtgctgctgagagccggcgtgagcagagacgccagaaccaaggtggacagaacccccctgcacatggccgccagcgagggccacgccagcatcgtggaggtgtag

SEQ ID NO: 314395 - protein, 1132 aa, Artificial Sequence
  derived and/or modified sequence
MASDGASALPGPDMSMKPSAAPSPSPALPFLPPTSDPPDHPPREPPPQPIMPSVFSPDNPLMLSAFPSSLLVTGDGGPCLSGAGAGKVIVKVKTEGGSAEPSQTQNFILTQTALNSTAPGTPCGGLEGPAPPFVTASNVKTILPSKAVGVSQEGPPGLPPQPPPPVAQLVPIVPLEKAWPGPHGTTGEGGPVATLSKPSLGDRSKISKDVYENFRQWQRYKALARRHLSQSPDTEALSCFLIPVLRSLARLKPTMTLEEGLPLAVQEWEHTSNFDRMIFYEMAERFMEFEAEEMQIQNTQLMNGSQGLSPATPLKLDPLGPLASEVCQQPVYIPKKAASKTRAPRRRQRKAQRPPAPEAPKEIPPEAVKEYVDIMEWLVGTHLATGESDGKQEEEGQQQEEEGMYPDPGLLSYINELCSQKVFVSKVEAVIHPQFLADLLSPEKQRDPLALIEELEQEEGLTLAQLVQKRLMALEEEEDAEAPPSFSGAQLDSSPSGSVEDEDGDGRLRPSPGLQGAGGAACLGKVSSSGKRAREVHGGQEQALDSPRGMHRDGNTLPSPSSWDLQPELAAPQGTPGPLGVERRGSGKVINQVSLHQDGHLGGAGPPGHCLVADRTSEALPLCWQGGFQPESTPSLDAGLAELAPLQGQGLEKQVLGLQKGQQTGGRGVLPQGKEPLAVPWEGSSGAMWGDDRGTPMAQSYDQNPSPRAAGERDDVCLSPGVWLSSEMDAVGLELPVQIEEVIESFQVEKCVTEYQEGCQGLGSRGNISLGPGETLVPGDTESSVIPCGGTVAAAALEKRNYCSLPGPLRANSPPLRSKENQEQSCETVGHPSDLWAEGCFPLLESGDSTLGSSKETLPPTCQGNLLIMGTEDASSLPEASQEAGSRGNSFSPLLETIEPVNILDVKDDCGLQLRVSEDTCPLNVHSYDPQGEGRVDPDLSKPKNLAPLQESQESYTTGTPKATSSHQGLGSTLPRRGTRNAIVPRETSVSKTHRSADRAKGKEKKKKEAEEEDEELSNFAYLLASKLSLSPREHPLSPHHASGGQGSQRASHLLPAGAKGPSKLPYPVAKSGKRALAGGPAPTEKTPHSGAQLGVPREKPLALGVVRPSQPRKRRCDSFVTGRRKKRRRSQ

SEQ ID NO: 314396 - DNA, 3399 bp, Artificial Sequence
  derived and/or modified sequence
atggccagcgacggcgccagcgccctgcccggccccgacatgagcatgaagcccagcgccgcccccagccccagccccgccctgcccttcctgccccccaccagcgacccccccgaccacccccccagagagccccccccccagcccatcatgcccagcgtgttcagccccgacaaccccctgatgctgagcgccttccccagcagcctgctggtgaccggcgacggcggcccctgcctgagcggcgccggcgccggcaaggtgatcgtgaaggtgaagaccgagggcggcagcgccgagcccagccagacccagaacttcatcctgacccagaccgccctgaacagcaccgcccccggcaccccctgcggcggcctggagggccccgccccccccttcgtgaccgccagcaacgtgaagaccatcctgcccagcaaggccgtgggcgtgagccaggagggcccccccggcctgcccccccagccccccccccccgtggcccagctggtgcccatcgtgcccctggagaaggcctggcccggcccccacggcaccaccggcgagggcggccccgtggccaccctgagcaagcccagcctgggcgacagaagcaagatcagcaaggacgtgtacgagaacttcagacagtggcagagatacaaggccctggccagaagacacctgagccagagccccgacaccgaggccctgagctgcttcctgatccccgtgctgagaagcctggccagactgaagcccaccatgaccctggaggagggcctgcccctggccgtgcaggagtgggagcacaccagcaacttcgacagaatgatcttctacgagatggccgagagattcatggagttcgaggccgaggagatgcagatccagaacacccagctgatgaacggcagccagggcctgagccccgccacccccctgaagctggaccccctgggccccctggccagcgaggtgtgccagcagcccgtgtacatccccaagaaggccgccagcaagaccagagcccccagaagaagacagagaaaggcccagagaccccccgcccccgaggcccccaaggagatcccccccgaggccgtgaaggagtacgtggacatcatggagtggctggtgggcacccacctggccaccggcgagagcgacggcaagcaggaggaggagggccagcagcaggaggaggagggcatgtaccccgaccccggcctgctgagctacatcaacgagctgtgcagccagaaggtgttcgtgagcaaggtggaggccgtgatccacccccagttcctggccgacctgctgagccccgagaagcagagagaccccctggccctgatcgaggagctggagcaggaggagggcctgaccctggcccagctggtgcagaagagactgatggccctggaggaggaggaggacgccgaggccccccccagcttcagcggcgcccagctggacagcagccccagcggcagcgtggaggacgaggacggcgacggcagactgagacccagccccggcctgcagggcgccggcggcgccgcctgcctgggcaaggtgagcagcagcggcaagagagccagagaggtgcacggcggccaggagcaggccctggacagccccagaggcatgcacagagacggcaacaccctgcccagccccagcagctgggacctgcagcccgagctggccgccccccagggcacccccggccccctgggcgtggagagaagaggcagcggcaaggtgatcaaccaggtgagcctgcaccaggacggccacctgggcggcgccggcccccccggccactgcctggtggccgacagaaccagcgaggccctgcccctgtgctggcagggcggcttccagcccgagagcacccccagcctggacgccggcctggccgagctggcccccctgcagggccagggcctggagaagcaggtgctgggcctgcagaagggccagcagaccggcggcagaggcgtgctgccccagggcaaggagcccctggccgtgccctgggagggcagcagcggcgccatgtggggcgacgacagaggcacccccatggcccagagctacgaccagaaccccagccccagagccgccggcgagagagacgacgtgtgcctgagccccggcgtgtggctgagcagcgagatggacgccgtgggcctggagctgcccgtgcagatcgaggaggtgatcgagagcttccaggtggagaagtgcgtgaccgagtaccaggagggctgccagggcctgggcagcagaggcaacatcagcctgggccccggcgagaccctggtgcccggcgacaccgagagcagcgtgatcccctgcggcggcaccgtggccgccgccgccctggagaagagaaactactgcagcctgcccggccccctgagagccaacagcccccccctgagaagcaaggagaaccaggagcagagctgcgagaccgtgggccaccccagcgacctgtgggccgagggctgcttccccctgctggagagcggcgacagcaccctgggcagcagcaaggagaccctgccccccacctgccagggcaacctgctgatcatgggcaccgaggacgccagcagcctgcccgaggccagccaggaggccggcagcagaggcaacagcttcagccccctgctggagaccatcgagcccgtgaacatcctggacgtgaaggacgactgcggcctgcagctgagagtgagcgaggacacctgccccctgaacgtgcacagctacgacccccagggcgagggcagagtggaccccgacctgagcaagcccaagaacctggcccccctgcaggagagccaggagagctacaccaccggcacccccaaggccaccagcagccaccagggcctgggcagcaccctgcccagaagaggcaccagaaacgccatcgtgcccagagagaccagcgtgagcaagacccacagaagcgccgacagagccaagggcaaggagaagaagaagaaggaggccgaggaggaggacgaggagctgagcaacttcgcctacctgctggccagcaagctgagcctgagccccagagagcaccccctgagcccccaccacgccagcggcggccagggcagccagagagccagccacctgctgcccgccggcgccaagggccccagcaagctgccctaccccgtggccaagagcggcaagagagccctggccggcggccccgcccccaccgagaagaccccccacagcggcgcccagctgggcgtgcccagagagaagcccctggccctgggcgtggtgagacccagccagcccagaaagagaagatgcgacagcttcgtgaccggcagaagaaagaagagaagaagaagccagtag

SEQ ID NO: 314397 - DNA, 1329 bp, Artificial Sequence
  derived and/or modified sequence
atggccagcgacggcgccagcgccctgcccggccccgacatgagcatgaagcccagcgccgcccccagccccagccccgccctgcccttcctgccccccaccagcgacccccccgaccacccccccagagagccccccccccagcccatcatgcccagcgtgttcagccccgacaaccccctgatgctgagcgccttccccagcagcctgctggtgaccggcgacggcggcccctgcctgagcggcgccggcgccggcaaggtgatcgtgaaggtgaagaccgagggcggcagcgccgagcccagccagacccagaacttcatcctgacccagaccgccctgaacagcaccgcccccggcaccccctgcggcggcctggagggccccgccccccccttcgtgaccgccagcaacgtgaagaccatcctgcccagcaaggccgtgggcgtgagccaggagggcccccccggcctgcccccccagccccccccccccgtggcccagctggtgcccatcgtgcccctggagaaggcctggcccggcccccacggcaccaccggcgagggcggccccgtggccaccctgagcaagcccagcctgggcgacagaagcaagatcagcaaggacgtgtacgagaacttcagacagtggcagagatacaaggccctggccagaagacacctgagccagagccccgacaccgaggccgtgaaggagtacgtggacatcatggagtggctggtgggcacccacctggccaccggcgagagcgacggcaagcaggaggaggagggccagcagcaggaggaggagggcatgtaccccgaccccggcctgctgagctacatcaacgagctgtgcagccagaaggtgttcgtgagcaaggtggaggccgtgatccacccccagttcctggccgacctgctgagccccgagaagcagagagaccccctggccctgatcgaggagctggagcaggaggagggcctgaccctggcccagctggtgcagaagagactgatggccctggaggaggaggaggacgccgaggccccccccagcttcagcggcgcccagctggacagcagccccagcggcagcgtggaggacgaggacggcgacggcagactgagacccagccccggcctgcagggcgccggcggcgccgcctgcctgggcaaggtgagcagcagcggcaagagagccagagaggtgcacggcggccaggagcaggccctggacagccccagaggcatgcacagagacggcaacaccctgcccagccccagcagctgggacctgcccaccaacggcgagagccagtgctag

SEQ ID NO: 314398 - DNA, 3399 bp, Artificial Sequence
  derived and/or modified sequence
atggcttctgatggcgcctccgccctcccgggtcccgatatgagtatgaaaccctccgcagctccgtcccccagtccagcattgcccttcttacccccaacaagcgatcccccagatcacccaccccgggaaccaccgcctcaacctattatgccgagtgtttttagccctgacaaccctctcatgctttccgcctttcccagtagtctcctggtcaccggcgatgggggaccatgtcttagtggagccggcgctggcaaggtgatcgtgaaggttaaaacagaaggggggtccgcagagcccagccaaacgcagaatttcatcttgacgcagaccgcactaaatagcaccgcccctggaaccccctgcggcggtttggaaggcccggcccctcccttcgtgaccgccagtaatgtgaaaaccatcttgcccagcaaagcagtcggtgtgtcccaagagggcccccctggtcttccacctcagccaccgccgcccgtcgctcaactggtcccaattgtgcccctcgaaaaggcatggcccggaccacatggcaccacgggcgagggcggacctgtggccaccctgtccaaaccttcactgggcgatcgctcgaagatttctaaagatgtgtatgaaaacttccgacaatggcagagatataaggccctggcccggcggcatttgtcgcaatccccagatacagaggctctgtcatgcttcctgattcccgttctgaggagtttggcgcgactgaagcctacaatgaccctggaggaggggttacccctcgcagtgcaggaatgggagcacacttcaaacttcgacagaatgatcttctacgagatggccgagcgttttatggaattcgaggcagaagagatgcagatacagaacacacagttgatgaacggatcacaggggctgagcccagccactcctctgaagcttgacccattaggccctctcgcttccgaggtgtgccaacagccagtgtatatcccgaagaaggcagcatccaaaacccgcgctcccaggaggaggcagcgaaaagctcagagaccgcccgcgcctgaggcgccaaaagaaatccctcccgaggccgtcaaagagtacgtagatattatggaatggctggtgggcactcacctcgctactggagaaagcgacggaaagcaggaggaggaaggccagcagcaggaggaggagggaatgtaccccgaccctgggctgctgtcgtatatcaatgaactatgttcccaaaaagtcttcgtgagcaaagtagaggccgttattcaccctcaattcctggccgatcttctgtcacctgagaaacaaagagatcctctggcgctcatcgaagagctagaacaggaagaaggcctgaccctcgctcagcttgtccagaaaaggctgatggcactggaggaggaggaggacgccgaagctccacctagcttttctggagctcagctggactcttccccaagtgggagcgttgaggatgaagacggtgatgggcggctcaggcccagtcccgggctgcagggagctggcggcgcagcatgcctgggcaaggtgagttctagtggcaaacgggcgcgcgaagtgcatgggggtcaggagcaagctctggattccccacgcggtatgcaccgtgacggaaacacccttccgagcccctcttcctgggacctccagcccgagctcgctgccccacagggcacacctggtccgcttggggtggaaagaagaggctctgggaaagtgataaatcaggtaagcctgcaccaggacgggcatctggggggagctggccctccaggtcactgtctggtcgctgatcggacatccgaggcactgccgctgtgttggcagggaggcttccagcctgagtccacgccgtctcttgatgctggactggctgagttggctcccctacagggccaaggactggagaagcaggtactggggctacagaaagggcagcaaactggcggaagaggagtgttgccccagggcaaggagccactcgctgtaccttgggagggaagttctggggccatgtggggggatgatcgcggcacccctatggcacagagttatgatcagaaccctagcccgcgagcagcaggcgagcgggacgatgtctgcctctccccaggtgtgtggctctcgagtgaaatggacgccgttggcctggaactaccggtccaaatcgaggaagtgattgagtctttccaagtggaaaagtgtgttacggagtaccaagaaggttgccagggactgggcagtcgaggaaacatctctttagggccaggcgagaccctggtgcctggggacacagaatctagtgttatcccctgcgggggcactgtggctgctgccgcattggagaagcgcaactactgttccttaccaggccctttgcgcgctaattctcctccactccgtagcaaggaaaatcaggaacagagttgtgaaaccgtgggtcatccttcagatctctgggccgagggatgctttccgctgctggagtccggcgacagtacccttggcagttcaaaggagaccctccctccaacttgtcagggcaatctcttgatcatgggtactgaggacgcaagctctctgcctgaagcatcccaagaagccggtagccgaggtaacagtttcagccctctccttgagacgattgaaccagtgaacatcctcgacgtgaaagacgactgcggcctgcagttgcgcgtgtccgaggacacatgtcccctcaatgtgcatagttacgaccctcagggggaaggccgggtggaccctgatctgagtaagccaaagaatctggccccactacaagagagccaggaatcttacacaactggtacgcccaaagctacaagcagccatcagggcctcggaagtaccctgccgcgccgcgggactaggaacgccatcgtgcctcgcgagacatctgtttcaaagactcaccgatccgctgatagagcaaaagggaaggaaaagaagaaaaaagaggcagaagaggaggatgaagagctgtcaaattttgcttatcttttagcttctaagttaagcctgtctccaagggagcatcctctgtccccacaccatgcatcagggggacagggcagccaaagagccagccacctcctgcccgcaggagctaagggcccatcaaagctaccataccctgttgccaagagcggaaaacgcgcacttgctggtggccccgccccaaccgagaaaaccccccactccggggctcagctgggagtgccacgggagaaacctctggccttaggggtcgtgcggccatctcagccaaggaagcgcaggtgcgactcatttgtaaccgggagacgcaaaaagcgtcgccggtcccagtag

SEQ ID NO: 314399 - DNA, 1329 bp, Artificial Sequence
  derived and/or modified sequence
atggccagtgatggtgcttcggctctacctggacccgatatgagcatgaagccgtcggctgctccaagccctagtcctgcccttccgttcctgccccccacctcagaccctccggatcaccccccacgggagcctccccctcagcccataatgccctccgtgttttcaccagacaacccactgatgctgtctgcctttcctagctctttgctggtgaccggggacggtggaccatgcctgtccggtgccggggccgggaaggtcattgtgaaggtaaaaaccgaaggtgggagcgcagaaccttcacagacccaaaacttcattctgactcagaccgccctgaacagcaccgctccgggcaccccctgcggcggcctcgagggtcccgcgcctccattcgtcaccgcttccaatgttaagactatcctgccaagcaaagctgtcggggtctctcaagagggcccccccggactgcctccccagccacccccaccagtggctcagctggtcccaatagtgccacttgagaaagcttggccaggtccccacggcacaacaggtgagggaggccccgtggctactttgagcaagccaagcctcggagatcgtagcaagatcagcaaagacgtgtatgagaactttagacagtggcagaggtacaaagcccttgcacgacgtcacctctcccagtctcccgacacagaagcagtgaaggaatacgtggatatcatggaatggcttgtgggaacacacctcgccactggagagagcgatgggaagcaggaggaagagggacagcagcaggaagaagaaggcatgtacccagaccctggcctgttgtcatatatcaatgaattatgtagtcagaaggtttttgtaagcaaggtcgaggctgtgatccacccccagttcctggccgacttgctgtctcctgaaaaacagcgggaccccctagccctgatagaggagctggagcaggaagaggggctgacactagcccaactagttcagaagcggctcatggcgctggaggaggaagaggatgccgaagccccgccctcattctcaggtgctcagctggattcatctcctagtggaagcgttgaagacgaggacggggacgggcggctgcggccttcaccgggtctgcagggagcgggaggagccgcctgcctggggaaagtcagttcttcagggaaaagagctagggaagtgcatggaggacaagaacaggctctggactcgccacgcgggatgcaccgtgacggcaatacactgccctctcccagctcatgggacctcccgacaaatggcgaaagccagtgttag

SEQ ID NO: 314400 - DNA, 3399 bp, Artificial Sequence
  derived and/or modified sequence
atggccagtgatggagccagcgccctgcccggccctgacatgtccatgaagcccagcgctgcccccagccccagccctgccctgcccttcctgccccccaccagtgaccccccagaccaccccccccgggagcccccaccccagcccatcatgcccagcgtcttctccccagacaaccccctgatgctgagcgccttccccagcagcctgctggtgactggagatggcggcccctgcctgtctggagctggagctgggaaggtgattgtgaaggtgaagacagagggcggcagcgctgagcccagccagacccagaacttcatcctgacccagacagccctgaacagcacagcccctggcaccccctgtggcggcctggagggccctgcccccccatttgtgacagccagcaatgtgaagaccatcctgcccagcaaggctgtgggcgtgtcccaggagggccccccaggcctgcccccccagcccccacctcctgtggcccagctggtgcccatcgtgcccctggagaaggcctggccaggcccccacggcaccaccggggagggcggccctgtggccaccctgagcaagcccagcctgggggacaggagcaagatcagcaaggatgtgtatgagaacttccggcagtggcagcgctacaaggccctggcccggcggcacctgagccagagcccagacacagaggccctgagctgcttcctgatccctgtgctgcggagcctggcccggctgaagcccaccatgaccctggaggagggcctgcccctggccgtgcaggagtgggagcacaccagcaactttgacaggatgatcttctatgagatggccgagcgcttcatggagtttgaagctgaggagatgcagatccagaacacccagctgatgaatggcagccagggcctgagccctgccacccccctgaagctggaccccctgggccccctggccagcgaggtgtgccagcagcctgtgtacatccccaagaaggccgccagcaagacccgggccccccggcggcggcagaggaaggcccagaggcccccagcccctgaggcccccaaggagatccccccagaggccgtgaaggagtatgtggacatcatggagtggctggtgggcacccacctggccactggagagagtgatggcaagcaggaggaggagggccagcagcaggaggaggagggcatgtacccagaccccggcctgctgagctacatcaatgagctgtgcagccagaaggtgtttgtgtccaaggtggaggccgtcatccacccccagttcctggccgacctgctgagccctgagaagcagagggaccccctggccctgattgaggagctggagcaggaggagggcctgaccctggcccagctggtgcagaagaggctgatggccctggaggaggaggaggatgctgaggcccctccttccttcagcggggcccagctggacagcagccccagcggctctgtggaggatgaagatggagatggccgcctgcggcccagccctggcctgcagggcgccggcggggccgcctgcctgggcaaggtgagcagcagcggcaagagggcccgggaggtgcatggaggccaggagcaggccctggacagcccccggggcatgcacagagatggcaacaccctgcccagccccagctcctgggacctgcagcctgagctggccgccccccagggcaccccaggccccctgggcgtggagcggcggggcagcggcaaggtgatcaaccaggtgtccctgcaccaggacggccacctgggcggggccggccccccaggccactgcctggtggccgacaggaccagcgaggccctgcccctgtgctggcagggcggcttccagcctgagagcacccccagcctggatgctggcctggccgagctggcccccctgcagggccagggcctggagaagcaggtgctgggcctgcagaagggccagcagacaggaggccggggcgtgctgccccagggcaaggagcccctggccgtgccctgggagggcagcagcggggccatgtggggagatgaccggggcacccccatggcccagagctatgaccagaaccccagccccagggctgctggggagagagatgatgtgtgcctgagccctggggtgtggctgagcagcgagatggatgctgtgggcctggagctgcctgtgcagatcgaggaggtgattgagagcttccaggtggagaagtgtgtgacagagtaccaggagggctgccagggcctgggcagccggggcaacatcagcctgggccctggagagaccctggtgcctggggacacagagagcagcgtcatcccctgtggcggcaccgtggccgctgctgccctggagaagaggaactactgcagcctgcccggccccctgcgggccaacagcccccccctgcggagcaaggagaaccaggagcagagctgtgagaccgtgggccaccccagcgacctgtgggccgagggctgcttccccctgctggagagcggggacagcaccctgggcagcagcaaggagaccctgccccccacctgccagggcaacctgctgatcatgggcacagaagatgccagcagcctgcctgaggccagccaggaggccggcagccggggcaacagcttcagccccctgctggagaccatcgagcctgtgaacatcctggatgtgaaggatgactgtggcctgcagctgcgggtgtctgaggacacctgccccctgaatgtgcacagctatgacccccagggcgagggccgggtggaccctgacctgagcaagcccaagaacctggcccccctgcaggagagccaggagagctacaccaccggcacccccaaggccaccagcagccaccagggcctgggcagcaccctgccccggcggggcaccagaaatgccatcgtgccccgggagacctctgtgtccaagacccacaggtctgctgaccgggccaagggcaaggagaagaagaagaaggaggccgaggaggaggatgaggagctgagcaactttgcctacctgctggccagcaagctgagcctgagcccccgggagcaccccctgagcccccaccacgccagcggcggccagggcagccagagggccagccacctgctgcctgctggggccaagggccccagcaagctgccctaccctgtggccaagagcggcaagagggccctggccggcggccctgcccccacagagaagaccccccacagcggggcccagctgggcgtgccccgggagaagcccctggccctgggcgtggtgcggcccagccagcccaggaagagaagatgtgacagctttgtgacaggccgcaggaagaagagaagaagaagccagtag

SEQ ID NO: 314401 - DNA, 1329 bp, Artificial Sequence
  derived and/or modified sequence
atggccagtgatggagccagcgccctgcccggccctgacatgtccatgaagcccagcgctgcccccagccccagccctgccctgcccttcctgccccccaccagtgaccccccagaccaccccccccgggagcccccaccccagcccatcatgcccagcgtcttctccccagacaaccccctgatgctgagcgccttccccagcagcctgctggtgactggagatggcggcccctgcctgtctggagctggagctgggaaggtgattgtgaaggtgaagacagagggcggcagcgctgagcccagccagacccagaacttcatcctgacccagacagccctgaacagcacagcccctggcaccccctgtggcggcctggagggccctgcccccccatttgtgacagccagcaatgtgaagaccatcctgcccagcaaggctgtgggcgtgtcccaggagggccccccaggcctgcccccccagcccccacctcctgtggcccagctggtgcccatcgtgcccctggagaaggcctggccaggcccccacggcaccaccggggagggcggccctgtggccaccctgagcaagcccagcctgggggacaggagcaagatcagcaaggatgtgtatgagaacttccggcagtggcagcgctacaaggccctggcccggcggcacctgagccagagcccagacacagaggccgtgaaggagtatgtggacatcatggagtggctggtgggcacccacctggccaccggggagagtgatggcaagcaggaggaggagggccagcagcaggaggaggagggcatgtacccagaccccggcctgctgagctacatcaatgagctgtgcagccagaaggtgtttgtgtccaaggtggaggccgtcatccacccccagttcctggccgacctgctgagccctgagaagcagagggaccccctggccctgattgaggagctggagcaggaggagggcctgaccctggcccagctggtgcagaagaggctgatggccctggaggaggaggaggatgctgaggccccacccagcttcagcggggcccagctggacagcagccccagcggctctgtggaggatgaagatggagatggccgcctgcggcccagccctggcctgcagggcgctgggggcgccgcctgcctgggcaaggtgagcagcagcggcaagagggcccgggaggtgcacggcggccaggagcaggccctggacagcccccggggcatgcacagagatggcaacaccctgcccagccccagctcctgggacctgcccaccaatggagagagccagtgctag

SEQ ID NO: 314402 - DNA, 3399 bp, Artificial Sequence
  derived and/or modified sequence
atggccagcgacggcgccagcgccctgcccggccccgacatgagcatgaaaccctcagccgccccatcaccttctccagcgctgcccttcttgcctcccacgtccgaccctcccgaccaccctccgagggagcccccaccacagcccattatgcctagtgtgtttagtcccgacaatcccctgatgttaagtgcctttccttcctccttactggtgaccggcgacggaggaccatgcctgtctggagcaggggcaggaaaggttattgtcaaagtgaaaacagagggcggttcggctgagccatctcagactcagaattttatcctcacgcagaccgccctgaattctacagcccctggaaccccttgtggcggactggaaggacccgcaccacctttcgtcactgctagtaacgttaaaacgattctcccatctaaggctgtgggggtgagccaagagggtcctcctggtctacccccacagccccctcctcctgtggcgcagcttgtgcccatcgtgccattagagaaggcttggcccggcccccatggaacgacaggagaaggcgggccagttgccactctgtccaagccctcactcggcgacagatccaagatttcaaaagatgtgtatgagaattttcgtcagtggcagcgatataaggcactggctcgacgccacctgtcccaatcgcctgataccgaggctctgtcttgtttccttattcctgtcttacgttcactggccagactcaagcccaccatgacccttgaggagggcttgccactggccgttcaggaatgggaacatacgtctaacttcgacaggatgatcttctacgagatggcagaaaggtttatggaatttgaggccgaggaaatgcagatacaaaatacacagttgatgaacggctcacaaggattgtctcctgcaacaccccttaagcttgaccctctgggaccgctggcctccgaagtgtgccaacagcctgtgtatatccccaagaaagcagccagtaagacacgagcacccagacgtagacagcggaaagcccagagaccacccgcccccgaggcccccaaagaaatccctccggaagccgtgaaagaatacgtcgatattatggagtggttggtgggcacccacctggcaaccggcgaatctgatggaaaacaggaggaagaaggacagcagcaagaggaggagggtatgtaccccgatccaggccttctgagctacatcaacgagctctgttcccagaaagtgtttgtctcaaaggttgaagccgtgattcatccacaattcctcgctgacttgttaagtccagagaaacagcgggaccccctggcattgatcgaggagctagagcaagaggaaggtcttactctggcccagttggtccaaaagaggctcatggcccttgaagaagaggaggatgccgaggcccctcctagtttttctggggcccaactagatagcagcccctccggtagcgtcgaagatgaggacggtgatggacggctgaggccatctcccggtctccaaggagcaggcggggcagcctgcctgggcaaggtctctagctcaggcaaacgggcaagggaggtccacgggggccaggagcaggctttagatagcccgcgaggaatgcacagggacggcaacacccttcccagtcccagttcctgggacctgcagcctgagctggccgcccctcagggcacccctgggcctttgggagtggagcgaagaggctccggaaaggtcattaatcaggtatcacttcatcaggatgggcatctcggaggggcgggccctccgggccattgtttggtggcagaccgcacatcggaagccttacccttatgttggcagggcggtttccagccagagtccacgccatcgctggacgccggactcgccgagctggcccctctacagggccaaggcctcgaaaaacaggttctggggctccagaaaggccagcagaccgggggccgtggcgtgcttccacagggaaaagagcccttagccgtgccttgggaaggatcctctggggctatgtggggagacgatcggggaactccaatggcccagtcttacgaccagaatcctagtccacgcgccgcaggggagagagacgacgtgtgcttatccccgggcgtgtggctgtcgtcagagatggatgccgtgggactcgagctgccggtccagattgaagaagtgatcgaatccttccaagttgagaagtgcgttacagagtaccaggagggctgccagggcttgggatcacggggaaatatctccctaggcccaggggagacattggtgcctggagatacagaaagctcggtgataccgtgcggcggcactgtagcagccgctgctctggaaaaacgcaactactgttctctacctgggcccttgcgggcaaactcccctcccctcaggtcgaaagaaaaccaggagcagtcttgtgagactgtcgggcacccctcggatctgtgggcggagggatgctttcctcttctggaatcaggcgactctacgctcggaagctctaaggaaacactaccgcccacttgccagggaaaccttctcattatggggactgaagatgcctctagcctcccagaggcatcccaagaggccggctcaagaggaaattcttttagccccctgttggaaacgatcgagcctgtgaacatactagatgttaaggacgactgtggactccagctgcgtgtttctgaagatacatgccctcttaacgtgcattcatacgaccctcaaggggagggacgagtggatccggacttatctaaaccgaagaaccttgcccccctgcaggaatcgcaggaaagctatacgacagggactcccaaggctacatccagtcaccagggactgggctctacactgccgcgtcggggcacccgcaatgccatcgtcccaagggagacatctgtatcgaagactcaccgcagcgccgatcgtgctaagggaaaggaaaaaaaaaaaaaggaggctgaggaggaggacgaggagttgtctaatttcgcctacttgctggcctcaaaactctctctgtcaccacgagaacaccccttgtcccctcaccatgcctcaggtggacagggaagtcagcgcgcgagccatctgctacctgcgggggccaagggcccatctaaactcccttacccagtagcaaagtctggcaaaagagcactagccggcggccccgcaccgactgagaagacgcctcactcaggggcgcagcttggcgtgccacgagagaaacccttggctcttggtgtggtacgtcccagccaaccaagaaaacgaaggtgcgacagcttcgttaccggtcgcaggaagaagaggagacgatcccagtag

SEQ ID NO: 314403 - DNA, 1329 bp, Artificial Sequence
  derived and/or modified sequence
atggccagcgacggcgccagcgccctgcccggccccgacatgagcatgaagccatcagctgcaccaagccctagcccggcgctgccattcctgccccctacttcagacccgcctgaccatcctcctcgcgagccccccccgcaacccatcatgccttccgtgttctccccagacaatcccctgatgctgtccgcttttccctcctccctgctggttaccggggatggtggtccctgtttgtcaggtgctggcgccgggaaagtaattgtgaaagttaaaaccgagggagggtccgctgagccatctcaaacgcagaactttattctcacccagactgccttgaactccactgctccgggtaccccgtgtggggggctagaaggtcccgccccgccctttgtgacagcttccaatgtgaaaacaatccttccatcaaaagccgtgggcgtaagtcaggaaggcccaccaggtttgccaccccaacctccccctcctgtggcccagcttgtgccaatcgtacctctggagaaagcctggcctggccctcacggcactacaggtgagggaggtcccgttgccaccctcagcaagccaagtcttggggacaggtcaaaaatatctaaagacgtgtacgagaacttcagacagtggcaacgctacaaggcgctggcgaggagacatctttcacagtccccagataccgaggcagtgaaggagtatgtggacattatggagtggctggtgggcacgcacctggccacgggcgagagcgatggaaaacaggaagaggaggggcagcagcaagaagaggagggaatgtatcctgatcccggactcctttcatacattaatgagctctgcagccagaaggtgttcgtcagtaaggtggaggctgtcatacatcctcagtttttggccgaccttttgtcccccgagaaacagcgcgaccccttagcactgatcgaagaacttgaacaggaggaagggttgactctggcccaactcgtgcaaaaaaggctcatggccttagaagaagaggaggatgctgaggccccaccttccttctctggagctcaactagattcttccccttcgggcagtgtggaagatgaggacggcgatggccgcctgcgcccatcccccggccttcagggggcaggcggggccgcctgtctaggcaaagtgagtagtagtggcaagcgtgcaagggaggtccatggggggcaggagcaggcgttggatagtcctcggggcatgcacagagatggaaataccctgccctctcctagttcttgggatctgccgaccaacggagagtctcaatgttag

SEQ ID NO: 314404 - DNA, 3399 bp, Artificial Sequence
  derived and/or modified sequence
atggcttctgatggagcctctgctctgcccggtcctgatatgagcatgaaaccatccgccgcacctagcccctccccggctctgcccttccttccacctacgtctgatcctccagaccatccaccacgcgaacctcctccccagcccatcatgccatctgtgttttcccctgacaaccctctgatgctgtcggctttcccctcatctctcttggttacgggggacggcggaccctgcttgagcggagcaggcgcaggcaaggtcatagtgaaagttaagacagaaggtggcagcgctgaaccatcccagactcagaacttcatcctgacacagacagccctgaattccactgctccaggaactccgtgcggcggtttggaggggccagcccctccatttgttacggcttcgaatgttaaaaccatcctaccctccaaggctgtcggggtgagccaggaggggcctcccggactaccgcctcagcctccaccacctgtagcccaactagtgcctattgttccccttgagaaagcgtggcccggaccacacggcacaacgggtgaaggaggccctgtggccaccctgagcaagccaagtctcggcgaccggtccaaaatctccaaggacgtatacgagaacttccgccagtggcagaggtataaggctctggcacgccgacatcttagccagtcccccgatacagaagctctgtcttgctttcttatccccgtcctgcgaagccttgccagactgaaacctaccatgaccctcgaggaagggctgcccctggctgtgcaggagtgggagcacacctctaattttgataggatgatcttctacgagatggctgagagattcatggaattcgaagctgaggagatgcaaatccagaacacccagcttatgaatggatctcaggggctgtccccagccacccccctaaaactggatccactcggacccctagctagtgaggtgtgccaacagcccgtatacattcccaagaaagcagccagcaagaccagggcgcctcgtcggcgtcaacgcaaagctcaacgtccccctgccccagaggcccctaaagagattcctccggaggcagtcaaggagtacgtcgatatcatggagtggctggtaggaacccatctggccaccggcgagtccgacggaaagcaagaggaagagggtcagcaacaggaagaggaaggcatgtatcctgaccctggcctcttatcatatataaatgagttgtgctcccaaaaagtctttgtctccaaggtcgaggctgtgattcaccctcagtttttggcggatctgcttagtcccgagaagcagagagacccactggctctgatcgaagagttagagcaggaggaaggcttgactctggctcagctggtacagaagcggcttatggccttggaggaggaggaggacgctgaggctccacccagctttagtggcgctcagctcgacagcagcccttctggctccgtggaagacgaggacggtgacgggaggttaagaccttcccccggattgcagggagccggaggcgcagcctgcctgggtaaggtgtccagctccggaaaacgagccagggaagtccatggcggacaggagcaggcgctggactcccccagaggaatgcatcgcgatgggaatacgttgccaagcccaagctcatgggaccttcagcccgaactggcagctccccaggggacgcccggacccttgggcgtcgagcgccgtgggtctgggaaggttatcaaccaggtctctcttcaccaagacggacatttaggcggtgcagggccacctggacactgccttgtcgcagaccgcacatccgaggctctccccctgtgctggcagggagggttccagcctgagagcacgccttccttagatgctgggctagcagaactcgccccattgcagggtcaagggctcgagaagcaggtgctggggcttcagaaaggccagcagacgggaggcaggggagtcttgccgcaggggaaggagccactggcggtcccatgggagggttccagtggcgcaatgtggggtgacgatagaggtactcccatggcccagagttatgatcagaatcccagcccccgagccgcaggcgagcgggacgacgtgtgcctgagtccaggcgtctggctcagcagtgagatggacgccgttggtcttgagctgcctgtccaaatagaggaggtgatcgagtcttttcaggtcgaaaagtgcgtcactgagtatcaggagggatgtcaagggctggggagcagaggaaacatatctcttggtcctggcgagactttggtgcctggagacaccgagtcttcagtgataccatgtgggggtacagtggcagccgctgccctggagaaaagaaattattgctccttacctgggccactgcgggctaattctccacctctccgctcaaaggaaaatcaggagcagtcttgcgagactgtgggacatccttcagacctttgggctgagggctgttttcctctcttggagagcggagatagtacacttggtagttctaaggaaaccctgcccccaacctgtcagggcaatctgctaattatggggacggaggatgcttcttccctgccagaggcttcccaggaagctggaagccggggaaatagtttttcacctctgctggaaaccatcgaacccgtgaatattcttgacgtcaaggacgattgtgggttgcaactgagagtcagcgaggatacgtgtcctctcaacgtgcatagctacgatccccagggggagggacgggtagaccccgatctgagcaagcctaagaatctggcccctctccaagagtcacaggaatcatacacaacaggcacgcctaaggcaacaagttcacaccagggcctggggagtacgctgccgaggaggggcacacggaacgcaatcgtacctagagaaacttccgtctccaagactcacagaagtgctgatcgcgctaaaggcaaagagaagaagaagaaggaagcggaagaagaagacgaggaattgagtaatttcgcatacctgctggccagcaaactgtctctctcccccagagaacatccccttagtcctcaccacgccagcgggggacaaggcagtcagcgggcaagccacctcctacccgcaggtgctaagggcccaagtaaattgccctaccccgtagcaaagagcgggaaacgagccttagcgggtggtcccgcacctaccgaaaagactccacactccggagcgcagctaggcgtgcctagggagaagccactggccctcggggttgtccggccatctcaacctagaaaaaggagatgcgactccttcgtaactggcaggaggaaaaaacgcagacggagccagtag

SEQ ID NO: 314405 - DNA, 1329 bp, Artificial Sequence
  derived and/or modified sequence
atggcctcagacggcgcttctgccctgcctggacctgacatgagtatgaagccctctgccgctccatcaccaagcccagcccttccattcctgcctccaacctctgatccccctgaccaccctccccgagaacctcccccacaaccgatcatgccctctgtcttttcccctgataacccgttgatgctgtctgccttcccttcatcactgttggtgacaggcgacggcggaccttgcctgtccggagctggagctgggaaagtgatcgtcaaggttaaaacggaagggggtagcgccgagccctcccaaacccagaacttcatcctgactcagactgcccttaacagtacagccccaggaacgccatgtgggggtctcgagggaccggcacctccatttgttactgcttccaatgtgaaaacaattcttccaagcaaggcagtaggggtgtcgcaggaagggcctcccggtttgccaccccagccgccacctcctgtagcgcagctggtacctattgttccattagagaaggcgtggcctggaccacacggaacgactggcgaggggggtcccgtggccactctgagtaaaccgtcactgggggaccgttccaaaattagcaaagatgtgtacgaaaattttcggcagtggcaaagatataaggctttagccaggaggcacctgtctcagagccccgatacagaagcggttaaggagtacgtcgacatcatggaatggcttgtggggacccatctggccacgggcgaatctgacggcaaacaagaggaagagggccaacaacaggaagaagaagggatgtatcccgaccccggactccttagctacataaacgagctctgcagccagaaggtcttcgtgtccaaagtcgaggccgtgatccacccccagttcctggcagatctgctgtcgccagagaagcagagagatccgctggcattgatcgaggaactcgaacaagaggagggactcactctggcgcaactggtgcagaaacggttgatggcactggaagaggaggaggatgcagaagccccaccttcgttctctggtgcccagttagactccagtccgtcagggtccgttgaagacgaggatggcgatggaaggctcagaccgtcacctgggctgcagggcgcaggaggggctgcttgcctgggcaaggtgtccagcagtggtaagagggccagggaagtccatggagggcaggagcaggccttggactcccctaggggcatgcacagagacgggaacacactccctagtccatcttcctgggatttaccgactaacggagagagccagtgctag

SEQ ID NO: 314406 - protein, 1102 aa, Artificial Sequence
  derived and/or modified sequence
MRTSLQAVALWGQKAPPHSITAIMITDDQRTIVTGSQEGQLCLWNLSHELKISAKELLFGHSASVTCLARARDFSKQPYIVSAAENGEMCVWNVTNGQCMEKATLPYRHTAICYYHCSFRMTGEGWLLCCGEYQDVLIIDAKTLAVVHSFRSSQFPDWINCMCIVHSMRIQEDSLLVVSVAGELKVWDLSSSINSIQEKQDVYEKESKFLESLNCQTIRFCTYTERLLLVVFSKCWKVYDYCDFSLLLTEVSRNGQFFAGGEVIAAHRILIWTEDGHSYIYQLLNSGLSKSIYPADGRVLKETIYPHLLCSTSVQENKEQSRPFVMGYMNERKEPFYKVLFSGEVSGRITLWHIPDVPVSKFDGSPREIPVTATWTLQDNFDKHDTMSQSIIDYFSGLKDGAGTAVVTSSEYIPSLDKLICGCEDGTIIITQALNAAKARLLEGGSLVKDSPPHKVLKGHHQSVTSLLYPHGLSSKLDQSWMLSGDLDSCVILWDIFTEEILHKFFLEAGPVTSLLMSPEKFKLRGEQIICCVCGDHSVALLHLEGKSCLLHARKHLFPVRMIKWHPVENFLIVGCADDSVYIWEIETGTLERHETGERARIILNCCDDSQLVKSVLPIASETLKHKSIEQRSSSPYQLGPLPCPGLQVESSCKVTDAKFCPRPFNVLPVKTKWSNVGFHILLFDLENLVELLLPTPLSDVDSSSSFYGGEVLRRAKSTVEKKTLTLRKSKTACGPLSAEALAKPITESLAQGDNTIKFSEENDGIKRQKKMKISKKMQPKPSRKVDASLTIDTAKLFLSCLLPWGVDKDLDYLCIKHLNILKLQGPISLGISLNEDNFSLMLPGWDLCNSGMIKDYSGVNLFSRKVLDLSDKYTATLPNQVGIPRGLENNCDSLRESDTIVYLLSRLFLVNKLVNMPLELACRVGSSFRMESIHNKMRGAGNDILNMSSFYSCLRNGKNESHVPEADLSLLKLISCWRDQSVQVTEAIQAVLLAEVQQHMKSLGKIPVNSQPVSMAENGNCEMKQMLPKLEWTEELELQCVRNTLPLQTPVSPVKHDSNSNSANFQDVEDMPDRCALEESESPGEPRHHSWIAKVCPCKVS

SEQ ID NO: 314407 - protein, 1099 aa, Artificial Sequence
  derived and/or modified sequence
MRTSLQAVALWGQKAPPHSITAIMITDDQRTIVTGSQEGQLCLWNLSHELKISAKELLFGHSASVTCLARARDFSKQPYIVSAAENGEMCVWNVTNGQCMEKATLPYRHTAICYYHCSFRMTGEGWLLCCGEYQDVLIIDAKTLAVVHSFRSSQFPDWINCMCIVHSMRIQDSLLVVSVAGELKVWDLSSSINSIQEKQDVYEKESKFLESLNCQTIRFCTYTERLLLVVFSKCWKVYDYCDFSLLLTEVSRNGQFFAGGEVIAAHRILIWTEDGHSYIYQLLNSGLSKSIYPADGRVLKETIYPHLLCSTSVQENKSRPFVMGYMNERKEPFYKVLFSGEVSGRITLWHIPDVPVSKFDGSPREIPVTATWTLQDNFDKHDTMSQSIIDYFSGLKDGAGTAVVTSSEYIPSLDKLICGCEDGTIIITQALNAAKARLLEGGSLVKDSPPHKVLKGHHQSVTSLLYPHGLSSKLDQSWMLSGDLDSCVILWDIFTEEILHKFFLEAGPVTSLLMSPEKFKLRGEQIICCVCGDHSVALLHLEGKSCLLHARKHLFPVRMIKWHPVENFLIVGCADDSVYIWEIETGTLERHETGERARIILNCCDDSQLVKSVLPIASETLKHKSIEQRSSSPYQLGPLPCPGLQVESSCKVTDAKFCPRPFNVLPVKTKWSNVGFHILLFDLENLVELLLPTPLSDVDSSSSFYGGEVLRRAKSTVEKKTLTLRKSKTACGPLSAEALAKPITESLAQGDNTIKFSEENDGIKRQKKMKISKKMQPKPSRKVDASLTIDTAKLFLSCLLPWGVDKDLDYLCIKHLNILKLQGPISLGISLNEDNFSLMLPGWDLCNSGMIKDYSGVNLFSRKVLDLSDKYTATLPNQVGIPRGLENNCDSLRESDTIVYLLSRLFLVNKLVNMPLELACRVGSSFRMESIHNKMRGAGNDILNMSSFYSCLRNGKNESHVPEADLSLLKLISCWRDQSVQVTEAIQAVLLAEVQQHMKSLGKIPVNSQPVSMAENGNCEMKQMLPKLEWTEELELQCVRNTLPLQTPVSPVKHDSNSNSANFQDVEDMPDRCALEESESPGEPRHHSWIAKVCPCKVS

SEQ ID NO: 314408 - protein, 775 aa, Artificial Sequence
  derived and/or modified sequence
MRTSLQAVALWGQKAPPHSITAIMITDDQRTIVTGSQEGQLCLWNLSHELKISAKELLFGHSASVTCLARARDFSKQPYIVSAAENGEMCVWNVTNGQCMEKATLPYRHTAICYYHCSFRMTGEGWLLCCGEYQDVLIIDAKTLAVVHSFRSSQFPDWINCMCIVHSMRIQEDSLLVVSVAGELKVWDLSSSINSIQEKQDVYEKESKFLESLNCQTIRFCTYTERLLLVVFSKCWKVYDYCDFSLLLTEVSRNGQFFAGGEVIAAHRILIWTEDGHSYIYQLLNSGLSKSIYPADGRVLKETIYPHLLCSTSVQENKEQSRPFVMGYMNERKEPFYKVLFSGEVSGRITLWHIPDVPVSKFDGSPREIPVTATWTLQDNFDKHDTMSQSIIDYFSGLKDGAGTAVVTSSEYIPSLDKLICGCEDGTIIITQALNAAKARLLEGGSLVKDSPPHKVLKGHHQSVTSLLYPHGLSSKLDQSWMLSGDLDSCVILWDIFTEEILHKFFLEAGPVTSLLMSPEKFKLRGEQIICCVCGDHSVALLHLEGKSCLLHARKHLFPVRMIKWHPVENFLIVGCADDSVYIWEIETGTLERHETGERARIILNCCDDSQLVKSVLPIASETLKHKSIEQRSSSPYQLGPLPCPGLQVESSCKVTDAKFCPRPFNVLPVKTKWSNVGFHILLFDLENLVELLLPTPLSDVDSSSSFYGGEVLRRAKSTVEKKTLTLRKSKTACGPLSAEALAKPITESLAQGDNTIKFSEENDGIKRQKKMKIS

SEQ ID NO: 314409 - DNA, 3309 bp, Artificial Sequence
  derived and/or modified sequence
atgagaaccagcctgcaggccgtggccctgtggggccagaaggcccccccccacagcatcaccgccatcatgatcaccgacgaccagagaaccatcgtgaccggcagccaggagggccagctgtgcctgtggaacctgagccacgagctgaagatcagcgccaaggagctgctgttcggccacagcgccagcgtgacctgcctggccagagccagagacttcagcaagcagccctacatcgtgagcgccgccgagaacggcgagatgtgcgtgtggaacgtgaccaacggccagtgcatggagaaggccaccctgccctacagacacaccgccatctgctactaccactgcagcttcagaatgaccggcgagggctggctgctgtgctgcggcgagtaccaggacgtgctgatcatcgacgccaagaccctggccgtggtgcacagcttcagaagcagccagttccccgactggatcaactgcatgtgcatcgtgcacagcatgagaatccaggaggacagcctgctggtggtgagcgtggccggcgagctgaaggtgtgggacctgagcagcagcatcaacagcatccaggagaagcaggacgtgtacgagaaggagagcaagttcctggagagcctgaactgccagaccatcagattctgcacctacaccgagagactgctgctggtggtgttcagcaagtgctggaaggtgtacgactactgcgacttcagcctgctgctgaccgaggtgagcagaaacggccagttcttcgccggcggcgaggtgatcgccgcccacagaatcctgatctggaccgaggacggccacagctacatctaccagctgctgaacagcggcctgagcaagagcatctaccccgccgacggcagagtgctgaaggagaccatctacccccacctgctgtgcagcaccagcgtgcaggagaacaaggagcagagcagacccttcgtgatgggctacatgaacgagagaaaggagcccttctacaaggtgctgttcagcggcgaggtgagcggcagaatcaccctgtggcacatccccgacgtgcccgtgagcaagttcgacggcagccccagagagatccccgtgaccgccacctggaccctgcaggacaacttcgacaagcacgacaccatgagccagagcatcatcgactacttcagcggcctgaaggacggcgccggcaccgccgtggtgaccagcagcgagtacatccccagcctggacaagctgatctgcggctgcgaggacggcaccatcatcatcacccaggccctgaacgccgccaaggccagactgctggagggcggcagcctggtgaaggacagccccccccacaaggtgctgaagggccaccaccagagcgtgaccagcctgctgtacccccacggcctgagcagcaagctggaccagagctggatgctgagcggcgacctggacagctgcgtgatcctgtgggacatcttcaccgaggagatcctgcacaagttcttcctggaggccggccccgtgaccagcctgctgatgagccccgagaagttcaagctgagaggcgagcagatcatctgctgcgtgtgcggcgaccacagcgtggccctgctgcacctggagggcaagagctgcctgctgcacgccagaaagcacctgttccccgtgagaatgatcaagtggcaccccgtggagaacttcctgatcgtgggctgcgccgacgacagcgtgtacatctgggagatcgagaccggcaccctggagagacacgagaccggcgagagagccagaatcatcctgaactgctgcgacgacagccagctggtgaagagcgtgctgcccatcgccagcgagaccctgaagcacaagagcatcgagcagagaagcagcagcccctaccagctgggccccctgccctgccccggcctgcaggtggagagcagctgcaaggtgaccgacgccaagttctgccccagacccttcaacgtgctgcccgtgaagaccaagtggagcaacgtgggcttccacatcctgctgttcgacctggagaacctggtggagctgctgctgcccacccccctgagcgacgtggacagcagcagcagcttctacggcggcgaggtgctgagaagagccaagagcaccgtggagaagaagaccctgaccctgagaaagagcaagaccgcctgcggccccctgagcgccgaggccctggccaagcccatcaccgagagcctggcccagggcgacaacaccatcaagttcagcgaggagaacgacggcatcaagagacagaagaagatgaagatcagcaagaagatgcagcccaagcccagcagaaaggtggacgccagcctgaccatcgacaccgccaagctgttcctgagctgcctgctgccctggggcgtggacaaggacctggactacctgtgcatcaagcacctgaacatcctgaagctgcagggccccatcagcctgggcatcagcctgaacgaggacaacttcagcctgatgctgcccggctgggacctgtgcaacagcggcatgatcaaggactacagcggcgtgaacctgttcagcagaaaggtgctggacctgagcgacaagtacaccgccaccctgcccaaccaggtgggcatccccagaggcctggagaacaactgcgacagcctgagagagagcgacaccatcgtgtacctgctgagcagactgttcctggtgaacaagctggtgaacatgcccctggagctggcctgcagagtgggcagcagcttcagaatggagagcatccacaacaagatgagaggcgccggcaacgacatcctgaacatgagcagcttctacagctgcctgagaaacggcaagaacgagagccacgtgcccgaggccgacctgagcctgctgaagctgatcagctgctggagagaccagagcgtgcaggtgaccgaggccatccaggccgtgctgctggccgaggtgcagcagcacatgaagagcctgggcaagatccccgtgaacagccagcccgtgagcatggccgagaacggcaactgcgagatgaagcagatgctgcccaagctggagtggaccgaggagctggagctgcagtgcgtgagaaacaccctgcccctgcagacccccgtgagccccgtgaagcacgacagcaacagcaacagcgccaacttccaggacgtggaggacatgcccgacagatgcgccctggaggagagcgagagccccggcgagcccagacaccacagctggatcgccaaggtgtgcccctgcaaggtgagctag

SEQ ID NO: 314410 - DNA, 3300 bp, Artificial Sequence
  derived and/or modified sequence
atgagaaccagcctgcaggccgtggccctgtggggccagaaggcccccccccacagcatcaccgccatcatgatcaccgacgaccagagaaccatcgtgaccggcagccaggagggccagctgtgcctgtggaacctgagccacgagctgaagatcagcgccaaggagctgctgttcggccacagcgccagcgtgacctgcctggccagagccagagacttcagcaagcagccctacatcgtgagcgccgccgagaacggcgagatgtgcgtgtggaacgtgaccaacggccagtgcatggagaaggccaccctgccctacagacacaccgccatctgctactaccactgcagcttcagaatgaccggcgagggctggctgctgtgctgcggcgagtaccaggacgtgctgatcatcgacgccaagaccctggccgtggtgcacagcttcagaagcagccagttccccgactggatcaactgcatgtgcatcgtgcacagcatgagaatccaggacagcctgctggtggtgagcgtggccggcgagctgaaggtgtgggacctgagcagcagcatcaacagcatccaggagaagcaggacgtgtacgagaaggagagcaagttcctggagagcctgaactgccagaccatcagattctgcacctacaccgagagactgctgctggtggtgttcagcaagtgctggaaggtgtacgactactgcgacttcagcctgctgctgaccgaggtgagcagaaacggccagttcttcgccggcggcgaggtgatcgccgcccacagaatcctgatctggaccgaggacggccacagctacatctaccagctgctgaacagcggcctgagcaagagcatctaccccgccgacggcagagtgctgaaggagaccatctacccccacctgctgtgcagcaccagcgtgcaggagaacaagagcagacccttcgtgatgggctacatgaacgagagaaaggagcccttctacaaggtgctgttcagcggcgaggtgagcggcagaatcaccctgtggcacatccccgacgtgcccgtgagcaagttcgacggcagccccagagagatccccgtgaccgccacctggaccctgcaggacaacttcgacaagcacgacaccatgagccagagcatcatcgactacttcagcggcctgaaggacggcgccggcaccgccgtggtgaccagcagcgagtacatccccagcctggacaagctgatctgcggctgcgaggacggcaccatcatcatcacccaggccctgaacgccgccaaggccagactgctggagggcggcagcctggtgaaggacagccccccccacaaggtgctgaagggccaccaccagagcgtgaccagcctgctgtacccccacggcctgagcagcaagctggaccagagctggatgctgagcggcgacctggacagctgcgtgatcctgtgggacatcttcaccgaggagatcctgcacaagttcttcctggaggccggccccgtgaccagcctgctgatgagccccgagaagttcaagctgagaggcgagcagatcatctgctgcgtgtgcggcgaccacagcgtggccctgctgcacctggagggcaagagctgcctgctgcacgccagaaagcacctgttccccgtgagaatgatcaagtggcaccccgtggagaacttcctgatcgtgggctgcgccgacgacagcgtgtacatctgggagatcgagaccggcaccctggagagacacgagaccggcgagagagccagaatcatcctgaactgctgcgacgacagccagctggtgaagagcgtgctgcccatcgccagcgagaccctgaagcacaagagcatcgagcagagaagcagcagcccctaccagctgggccccctgccctgccccggcctgcaggtggagagcagctgcaaggtgaccgacgccaagttctgccccagacccttcaacgtgctgcccgtgaagaccaagtggagcaacgtgggcttccacatcctgctgttcgacctggagaacctggtggagctgctgctgcccacccccctgagcgacgtggacagcagcagcagcttctacggcggcgaggtgctgagaagagccaagagcaccgtggagaagaagaccctgaccctgagaaagagcaagaccgcctgcggccccctgagcgccgaggccctggccaagcccatcaccgagagcctggcccagggcgacaacaccatcaagttcagcgaggagaacgacggcatcaagagacagaagaagatgaagatcagcaagaagatgcagcccaagcccagcagaaaggtggacgccagcctgaccatcgacaccgccaagctgttcctgagctgcctgctgccctggggcgtggacaaggacctggactacctgtgcatcaagcacctgaacatcctgaagctgcagggccccatcagcctgggcatcagcctgaacgaggacaacttcagcctgatgctgcccggctgggacctgtgcaacagcggcatgatcaaggactacagcggcgtgaacctgttcagcagaaaggtgctggacctgagcgacaagtacaccgccaccctgcccaaccaggtgggcatccccagaggcctggagaacaactgcgacagcctgagagagagcgacaccatcgtgtacctgctgagcagactgttcctggtgaacaagctggtgaacatgcccctggagctggcctgcagagtgggcagcagcttcagaatggagagcatccacaacaagatgagaggcgccggcaacgacatcctgaacatgagcagcttctacagctgcctgagaaacggcaagaacgagagccacgtgcccgaggccgacctgagcctgctgaagctgatcagctgctggagagaccagagcgtgcaggtgaccgaggccatccaggccgtgctgctggccgaggtgcagcagcacatgaagagcctgggcaagatccccgtgaacagccagcccgtgagcatggccgagaacggcaactgcgagatgaagcagatgctgcccaagctggagtggaccgaggagctggagctgcagtgcgtgagaaacaccctgcccctgcagacccccgtgagccccgtgaagcacgacagcaacagcaacagcgccaacttccaggacgtggaggacatgcccgacagatgcgccctggaggagagcgagagccccggcgagcccagacaccacagctggatcgccaaggtgtgcccctgcaaggtgagctag

SEQ ID NO: 314411 - DNA, 2328 bp, Artificial Sequence
  derived and/or modified sequence
atgagaaccagcctgcaggccgtggccctgtggggccagaaggcccccccccacagcatcaccgccatcatgatcaccgacgaccagagaaccatcgtgaccggcagccaggagggccagctgtgcctgtggaacctgagccacgagctgaagatcagcgccaaggagctgctgttcggccacagcgccagcgtgacctgcctggccagagccagagacttcagcaagcagccctacatcgtgagcgccgccgagaacggcgagatgtgcgtgtggaacgtgaccaacggccagtgcatggagaaggccaccctgccctacagacacaccgccatctgctactaccactgcagcttcagaatgaccggcgagggctggctgctgtgctgcggcgagtaccaggacgtgctgatcatcgacgccaagaccctggccgtggtgcacagcttcagaagcagccagttccccgactggatcaactgcatgtgcatcgtgcacagcatgagaatccaggaggacagcctgctggtggtgagcgtggccggcgagctgaaggtgtgggacctgagcagcagcatcaacagcatccaggagaagcaggacgtgtacgagaaggagagcaagttcctggagagcctgaactgccagaccatcagattctgcacctacaccgagagactgctgctggtggtgttcagcaagtgctggaaggtgtacgactactgcgacttcagcctgctgctgaccgaggtgagcagaaacggccagttcttcgccggcggcgaggtgatcgccgcccacagaatcctgatctggaccgaggacggccacagctacatctaccagctgctgaacagcggcctgagcaagagcatctaccccgccgacggcagagtgctgaaggagaccatctacccccacctgctgtgcagcaccagcgtgcaggagaacaaggagcagagcagacccttcgtgatgggctacatgaacgagagaaaggagcccttctacaaggtgctgttcagcggcgaggtgagcggcagaatcaccctgtggcacatccccgacgtgcccgtgagcaagttcgacggcagccccagagagatccccgtgaccgccacctggaccctgcaggacaacttcgacaagcacgacaccatgagccagagcatcatcgactacttcagcggcctgaaggacggcgccggcaccgccgtggtgaccagcagcgagtacatccccagcctggacaagctgatctgcggctgcgaggacggcaccatcatcatcacccaggccctgaacgccgccaaggccagactgctggagggcggcagcctggtgaaggacagccccccccacaaggtgctgaagggccaccaccagagcgtgaccagcctgctgtacccccacggcctgagcagcaagctggaccagagctggatgctgagcggcgacctggacagctgcgtgatcctgtgggacatcttcaccgaggagatcctgcacaagttcttcctggaggccggccccgtgaccagcctgctgatgagccccgagaagttcaagctgagaggcgagcagatcatctgctgcgtgtgcggcgaccacagcgtggccctgctgcacctggagggcaagagctgcctgctgcacgccagaaagcacctgttccccgtgagaatgatcaagtggcaccccgtggagaacttcctgatcgtgggctgcgccgacgacagcgtgtacatctgggagatcgagaccggcaccctggagagacacgagaccggcgagagagccagaatcatcctgaactgctgcgacgacagccagctggtgaagagcgtgctgcccatcgccagcgagaccctgaagcacaagagcatcgagcagagaagcagcagcccctaccagctgggccccctgccctgccccggcctgcaggtggagagcagctgcaaggtgaccgacgccaagttctgccccagacccttcaacgtgctgcccgtgaagaccaagtggagcaacgtgggcttccacatcctgctgttcgacctggagaacctggtggagctgctgctgcccacccccctgagcgacgtggacagcagcagcagcttctacggcggcgaggtgctgagaagagccaagagcaccgtggagaagaagaccctgaccctgagaaagagcaagaccgcctgcggccccctgagcgccgaggccctggccaagcccatcaccgagagcctggcccagggcgacaacaccatcaagttcagcgaggagaacgacggcatcaagagacagaagaagatgaagatcagctag

SEQ ID NO: 314412 - DNA, 3309 bp, Artificial Sequence
  derived and/or modified sequence
atgagaacatctctgcaggccgtagctctttggggccaaaaggccccacctcactctataacggcaatcatgatcaccgatgaccagagaaccattgtgacagggtcccaggaagggcaactctgtctctggaatcttagtcacgaactgaaaatcagcgcaaaagaattgctgtttggccactccgcttccgtgacctgcctcgcccgggcgcgtgactttagtaagcaaccatacattgtatctgcagctgaaaacggagaaatgtgtgtctggaacgttaccaatgggcagtgcatggagaaggccaccctgccgtatcgccatactgccatatgttactaccactgctccttccgaatgaccggcgaaggctggttgctgtgctgtggggagtaccaggacgtgcttatcatcgacgccaaaactctcgctgtcgtccactcattccgaagttctcaattccccgactggataaattgtatgtgtattgtgcactccatgcggatccaagaagactctcttttggtggtgtctgttgcaggagagctgaaggtctgggacctgagctctagcataaattcaatacaggagaagcaagatgtttacgagaaggaatccaagtttctggaaagtctgaactgtcagactattcgattttgtacctacaccgaacggctgctgcttgtcgtgtttagtaagtgttggaaggtctacgattactgcgattttagcttactcttgactgaggtaagtcgtaatgggcaatttttcgctgggggcgaggttatagcagcccacagaatacttatctggacagaggacggacattcttacatatatcaattgctgaacagcgggctgtccaaaagcatttaccccgccgatggccgcgtgctgaaggagaccatttacccccatctgttatgttccacctccgtgcaggagaacaaggagcagagcagaccattcgtgatggggtatatgaatgaacgcaaagagcctttttataaggtgctcttttccggggaggtgtctggccgaatcactctctggcacatccctgatgtgcctgtaagcaagtttgatgggtctccaagggaaattcctgtaaccgccacctggaccctccaagataactttgacaaacacgatacgatgtcgcagagtattatcgattatttctccggtctgaaagatggagccggtaccgcagtcgtgacgtctagcgagtacattcctagccttgataagctcatctgcggatgcgaggatggaaccattattatcacgcaagcacttaatgccgcaaaggcacgacttcttgagggtgggtccctcgttaaagattcacccccccataaagttctgaagggccaccaccagagcgtgacctcgctgctgtacccccacggtctctccagtaaactcgaccagtcatggatgctgagtggggatctagactcatgcgtgatattatgggacattttcacggaagaaatactgcataagtttttcctcgaagctggacccgttacatctctgctgatgtcccctgaaaagttcaaacttcgtggggagcagatcatttgctgcgtgtgcggcgaccatagcgtggcactgttgcacctagaggggaaatcctgtttactgcatgcccgcaaacacctgttcccagtccgcatgattaaatggcatccagtagaaaactttctgatagttgggtgcgccgacgactcagtgtacatatgggaaatagaaaccgggactctggagaggcatgaaactggcgagcgagcaagaatcatcctgaattgctgtgatgactctcagttggtcaaaagcgtgctgcccatcgcctcagagaccctgaagcacaaatccatcgagcagaggtcctctagcccctatcagttaggccctctgccatgccctggactgcaggtggagtctagctgtaaggtgactgacgcgaaattttgtcctcggccgtttaatgttctgcccgtaaagacgaagtggagtaacgttgggttccacatactcctcttcgacctcgagaacctggtggagctgctgctccccactccgctaagtgatgtggacagctcctcaagtttttacggcggggaagttctgcgacgagcaaaaagtacggttgaaaaaaagactctgacactgaggaagtcaaagacagcttgtggccctctgagcgcggaagctctggcaaagcccataactgaaagtttggcccagggtgataacactattaagttttcggaggaaaatgacggcatcaagcggcagaagaaaatgaaaatctccaagaagatgcagcccaaacctagcagaaaggttgacgccagcctcaccatcgacacagcgaaactgttcctttcctgcctgctaccatggggtgtcgataaggatctggattacttgtgtattaaacatttaaatatcctcaagctgcagggcccgatttctctggggatctcattaaatgaggataatttcagcctcatgctccctggatgggatctatgtaatagcggtatgatcaaggattattcgggtgtcaatctgttttcacggaaggtcctggacctgtccgataagtacaccgccacgctgcctaatcaggtgggtattcccagaggccttgagaacaattgcgatagcctgcgggagagcgatacaattgtgtatctcctgtcaagactgtttttagtcaataagctcgtgaacatgcccctggagctcgcctgtcgtgtggggtccagcttccgcatggagtctatacacaacaaaatgaggggggcgggtaacgacattcttaacatgtcgtcattctactcatgcctacggaatggaaagaacgagagtcatgtgccagaagcagatttgagcctgctcaaactgatttcatgttggcgagaccaatccgttcaagtgacagaagcaatccaggctgtcctccttgctgaggtgcagcagcacatgaagtcgctggggaaaatacctgtcaactctcaaccggtgtcaatggctgagaatggcaattgcgaaatgaaacaaatgttgcctaagttggaatggacagaggagttagaactgcagtgtgtcagaaataccctgccgctccagacaccggtttcacccgttaagcatgactcaaacagtaatagcgcaaatttccaggacgtcgaagacatgcctgaccggtgtgcattagaagaaagtgaatcacctggggaaccaaggcaccacagctggatcgctaaggtttgtccttgtaaggtgagttag

SEQ ID NO: 314413 - DNA, 3309 bp, Artificial Sequence
  derived and/or modified sequence
atgaggacttcactccaggccgtggcattgtggggacagaaagccccgccccattccatcacagccatcatgatcacggacgaccagcgcactatcgtcacaggaagccaggaaggacaactctgcttgtggaacctgtctcacgagctgaaaatttcagccaaggaactcttatttggacatagcgctagcgtcacctgtctggcgagagctcgtgactttagcaagcagccctatatcgtcagtgcagcagagaacggcgaaatgtgcgtgtggaacgtaaccaatggccagtgcatggagaaagcgacgctaccatacagacataccgctatttgctactatcattgctccttccgcatgacgggcgaaggatggcttctgtgttgcggtgaataccaggacgtgctcataatcgatgcaaaaaccctagccgtggtgcacagcttcagatcgtctcagtttcctgattggataaactgcatgtgtattgtgcatagtatgcggattcaggaagattcgctcttagtagtctccgtcgccggggagcttaaggtctgggacctctcctccagcattaacagcatccaggagaagcaggacgtgtacgagaaagagagcaagttcctggagtccctgaactgtcagacaatccggttttgcacatataccgagagactcctgctggtcgtcttttctaaatgctggaaggtctacgactattgcgacttctcccttctcctgacagaagtgagcaggaatggacagttctttgccgggggggaagtgattgctgctcatcgcatcctgatctggacagaggacgggcatagctacatataccagctcttaaactctgggctgtcaaagagtatatatccggccgatggaagagtcttaaaagagacaatttatcctcacttattatgttcaacatcggtccaggaaaacaaagagcagagtcgaccatttgtgatgggctatatgaacgagaggaaagaacccttttacaaagtcctgttctccggcgaagtgtcaggcagaattacactctggcatataccggacgtgccagtctccaaattcgacggaagccctcgagagatccctgtcaccgcaacctggacactgcaggacaattttgacaagcatgatacgatgagccagagcattattgactatttttctggcctcaaggacggcgccgggacagcagtcgtcacgagcagcgaatacattccatcccttgataaactgatttgtgggtgcgaggatggcacaattattattacccaagccttgaatgccgctaaggccagactcctcgaaggaggcagcctcgtcaaggacagccctcctcataaggtccttaagggccatcaccagtcagttacaagcctgctctatccccacggcctgtcaagtaagctcgaccagtcttggatgcttagtggcgatctggatagctgtgttatcttgtgggatatttttaccgaagaaatactacacaaattctttctcgaggctggaccagtaacctctctcctcatgagccccgagaagttcaaactacggggcgagcagattatttgttgcgtgtgtggtgaccatagcgtggccttgctgcatctggaagggaagtcttgtctgctgcatgctagaaagcatttgttccccgtccggatgatcaagtggcatccggtggaaaacttcctcatagtaggttgcgccgatgactccgtctatatatgggaaattgagacagggactctcgagcgccatgagactggcgaacgggctagaatcattctgaattgctgtgacgattcacagctcgtgaaatcagttctgccaatcgcttctgagaccctcaagcataagagcatcgagcagcggtctagttccccttatcagctgggcccgctgccatgtcccggactacaggtggagagttcatgtaaggttaccgacgccaaattttgtcctcggcctttcaatgtcctgcctgtgaagacgaaatggagcaatgtaggatttcacattttattatttgaccttgaaaatctcgtggaactgctgctgcccactcccttaagcgacgtggattcatcatctagcttttatgggggtgaggttttgagacgcgcaaaatccacggtggaaaagaagaccctgactctgcgcaagtcaaagaccgcttgcggaccccttagtgcggaggccctcgccaagcctatcacagagagcctagcccagggcgataacactatcaaattttctgaagagaacgacggtataaagcggcagaaaaagatgaagatctcaaagaaaatgcagcccaaaccctccagaaaggtggacgcttctttaacgattgacactgccaaactctttctatcatgtctactgccttggggagtcgacaaagatctcgactacctctgcattaagcacctcaacatccttaagttgcagggtccaatcagtctgggtatcagtttgaacgaagataacttttccttaatgctgcccggctgggacctgtgtaacagcggcatgatcaaggattactccggcgtcaatttattcagcagaaaggtcttggatctgtctgataagtatacagccaccttgcctaatcaggttgggatcccccgaggcctcgaaaataactgtgatagcttgagagagtccgacacgatagtttacctgttgtctcggcttttcctcgtgaataaacttgtgaatatgcctctggagcttgcctgccgagtaggctccagcttcaggatggaaagcatccataataagatgcgcggcgctgggaacgatattctgaatatgtcttcattctacagctgtcttcgaaatggcaaaaatgagtcacatgtaccggaggccgacctgtccctgctgaagcttatttcctgttggagggatcagagcgttcaggtcactgaggcaatccaggccgttttattggccgaagtccagcagcacatgaaatccctaggcaaaatccctgtgaactctcagcctgtctcaatggccgagaatggcaattgtgagatgaagcaaatgctgcccaagctggaatggacagaggagctcgaactacagtgcgtccgcaacaccctccctctccagacccctgtttctcccgtaaagcacgacagtaattctaatagcgcaaatttccaagacgttgaagatatgccggaccggtgcgccctagaggaatctgaatcgcccggagaacctcggcatcactcatggattgccaaggtgtgcccttgcaaggtgtcttag

SEQ ID NO: 314414 - DNA, 3300 bp, Artificial Sequence
  derived and/or modified sequence
atgagaacctctctccaggccgtcgccttatggggacagaaggcaccaccccacagcatcactgcaatcatgatcaccgacgatcaacggactatcgttactggctcccaggaagggcagttgtgtctttggaatctgtcccacgagctcaaaattagcgccaaggaacttctttttggccactccgcatccgtcacttgcttggcgcgggcccgggatttttcaaagcagccatatattgtgtccgctgctgagaacggagagatgtgcgtgtggaatgtgacaaacgggcagtgtatggagaaagcgacactgccttatcgccataccgcaatctgctactaccactgttcatttcgaatgacgggcgaggggtggctgctctgttgtggtgagtaccaggacgtgttaatcatcgacgctaaaacactagccgtagtgcacagctttaggagctcacaatttcccgattggatcaactgcatgtgcatcgtccattccatgcggatccaagactccctgcttgtggtgagcgtggctggcgagttgaaagtgtgggacctcagctcttctattaatagtatccaggagaagcaagatgtgtacgaaaaagagagtaaattccttgagagcctgaattgccagaccattcggttctgtacatacacagagcgactgctccttgtggttttctccaagtgttggaaagtctatgattattgtgattttagcctgctgcttacagaagtgtcgcgaaatggtcagttctttgccgggggcgaggtgatagcggcacatcgcatcttaatatggactgaggacggacattcatacatttatcagctcttgaactctgggctcagcaaatcgatctatccagctgatggtagggtcttaaaggagacgatctatccacatcttctctgtagtaccagtgtgcaagaaaacaaatccaggccatttgttatgggatacatgaatgagaggaaagagcctttttataaagtgttgttcagtggggaggtgtccgggaggattactctttggcatatccccgatgtgccagtgtcaaaattcgacggatctccaagagaaatacccgtgaccgctacatggactcttcaggacaactttgacaaacatgatacaatgagtcagagcatcatcgattatttcagcgggcttaaagacggcgcaggaaccgcggttgtaactagctcggagtatataccatcactggacaaacttatctgtggatgcgaggacggaaccattatcattactcaagctcttaatgcggccaaagcgcggctgttagaggggggctccctggtaaaggatagtccgccgcacaaagtgctgaaaggacatcaccagtctgtaacttctctcttgtatccacacggtctgtcatccaagctggaccagtcttggatgctgagcggcgaccttgatagctgtgtgatcctctgggatatatttactgaagagatcctgcacaagttcttcctggaggcggggccagtaacttccttactgatgtccccagagaaatttaaactgaggggcgagcagatcatttgctgcgtttgtggagatcactccgtggccttgctgcacctggagggcaagtcttgtctactgcacgccagaaaacatctgtttccagtgcgtatgatcaaatggcatcccgtggagaactttcttattgtggggtgcgccgacgatagtgtgtatatctgggagattgaaaccggtacgcttgagcgccacgagacgggcgagagagcgcggataatactgaattgttgcgatgactcccaactggtcaaatcagtactccctatcgccagcgagacactaaaacataaaagcattgagcagaggtccagcagtccataccaattgggtcctcttccctgtccaggattgcaggttgagtcaagctgcaaagttaccgacgctaaattctgtccacgcccattcaatgtgttaccagtgaaaacaaaatggagcaacgtggggttccacattctcctgttcgacctggaaaatttagtagagctgctcctaccaactccgcttagcgacgtggattcctccagttccttctacggtggagaagtgctacggagggccaagagtactgttgagaagaagacattgacgcttaggaaatccaagacagcatgtggcccattaagcgcagaagcgctggctaaacctataacagagagtttggcccagggggacaacactatcaaatttagcgaagagaacgatgggataaagcgccagaagaaaatgaagataagtaaaaagatgcagcccaagcccagtaggaaggttgatgcttccctgactatcgatacggccaagttgtttctttcgtgcctgttaccttggggtgtggataaggacctcgattatttgtgcatcaaacacctcaacattctgaagctgcaagggcctatatccctcgggatcagtctaaacgaggacaattttagcctgatgctgccagggtgggacttgtgtaacagcgggatgatcaaggattactcaggcgtgaacttattcagccgcaaagttctggacctgtctgacaagtatactgccaccctgccaaaccaggttggtatcccacgcggactggaaaataattgcgattcccttcgcgaatccgacacaattgtgtacctcctgagtcgactgttcttggtgaacaaactggtgaacatgccccttgaactggcatgcagggtgggatcgagctttagaatggagagtatccacaacaagatgcgcggtgctggcaatgacatcctgaatatgagctcattttattcctgcctgagaaatggcaaaaatgaaagtcacgtccctgaggccgacttgtcccttttgaaactcattagctgctggcgcgaccagtctgtgcaggtgacagaagcaattcaggctgtcctgcttgccgaggtgcaacagcatatgaagagcttgggcaaaatccctgtgaactctcagcccgtgagcatggctgaaaacggcaactgtgaaatgaaacagatgcttccaaaactggagtggactgaagagctcgagctgcagtgtgtaagaaataccctaccgttacagactcccgtgtctcccgtcaagcatgactctaattcaaattccgccaactttcaggacgtggaagacatgccagatcgctgtgccctggaggagtctgagtcacccggcgagccaaggcaccattcatggattgcgaaggtgtgcccttgcaaggtgagctag

SEQ ID NO: 314415 - DNA, 2328 bp, Artificial Sequence
  derived and/or modified sequence
atgagaactagcctgcaggccgtcgccttgtggggccaaaaagcgccccctcactccattaccgctattatgattacagacgatcagcggacaatcgtgactggatctcaggaggggcagctgtgtctttggaatctgtcgcacgaattaaaaatctcagctaaagagctgctgtttggtcatagcgccagtgtcacctgtctggcgagggcgcgggacttcagtaaacaaccctacattgtatctgctgcggaaaacggagaaatgtgcgtctggaacgtaaccaacgggcagtgtatggaaaaagcaactctcccatatagacatactgctatctgttattaccactgcagtttccgcatgaccggagagggatggctcctgtgctgcggggagtaccaagacgtgctaattatagatgccaaaacgctggccgtcgtgcactcgtttaggagttctcagtttccagactggatcaattgcatgtgcatcgtgcatagtatgcggattcaggaggattccctgctcgtggtaagtgtggcgggtgaattaaaagtgtgggacctctccagtagtattaactctatccaggaaaaacaggatgtgtatgaaaaggagtccaaatttctggagagcctgaactgtcaaaccatacgcttttgcacttataccgaaagactgcttttagtggtttttagcaaatgctggaaagtgtatgattactgcgacttttctttgctcctgacggaggtgagccggaatggccaattctttgcagggggcgaagttatcgctgcacaccgaatactaatctggaccgaggatggccactcttacatataccagcttttaaactctggtctgagcaagagtatctacccagcagatggtagggtcctgaaggagacgatctacccacatctgctgtgctcaacgagcgtacaggaaaacaaggagcagagtcgccctttcgtgatgggctatatgaacgaacggaaagaacccttctataaagtcctattcagtggggaggtgtccggaagaatcacattgtggcatattccagatgtgcctgtctcgaaattcgacggaagcccaagggagattcctgtgaccgctacctggactcttcaggacaactttgataagcatgacacaatgtcgcagtcgatcatcgattatttctctggtctcaaagacggagccgggactgctgtggttaccagcagtgaatacataccatcactggataaacttatctgtggatgcgaggacgggaccatcatcatcactcaggcgctgaacgctgcaaaggccagactgttggagggagggtcgctcgtgaaggattcgcctccccacaaggtgctgaaaggacatcaccagtcagtcacgtccctcctatacccacacgggctttccagtaagctggaccagtcatggatgctgagcggcgacctcgattcgtgcgtgatcctctgggatatctttactgaggaaatcctgcataagttctttctcgaagccggtcccgtgacctcactcctgatgtctccagaaaagtttaaactccgcggcgaacagataatctgctgcgtgtgcggtgaccattctgtggccctgctccacctcgagggaaagagttgcctcctgcacgctcgcaagcacctcttcccagttagaatgatcaagtggcaccctgtcgaaaatttcctcatagtcgggtgtgcagacgacagcgtgtatatatgggaaattgaaacaggaacgctggaacggcatgagacgggagagagagccaggattatcctgaactgctgcgatgacagccagttggtgaagagcgttcttcccatagctagcgaaaccctcaagcacaaaagcattgagcagcgctcctcgtctccataccagctcggccccctcccctgtccaggtctccaggtggagtcaagttgcaaagtgacagacgctaagttctgtccacgcccgttcaacgtcctaccagttaagacaaagtggtcaaacgtgggattccacatcctgcttttcgatttagagaatctggtcgagttactgttacccacccctcttagtgacgtggactcatcctccagtttttacggaggggaagtcctgcggcgggccaagtctaccgtggagaagaaaactctgacattgcggaagtctaagaccgcctgtggccctctttcggctgaggcactagctaagccaattacagaatccctggcccagggggacaacacaatcaaattttccgaggagaatgatggcatcaaaagacagaaaaagatgaagattagttag

SEQ ID NO: 314416 - DNA, 3309 bp, Artificial Sequence
  derived and/or modified sequence
atgaggaccagcctgcaggccgtggccctgtggggccagaaggccccaccccacagcatcacagccatcatgatcacagatgaccagaggaccatcgtgacaggcagccaggagggccagctgtgcctgtggaacctgagccatgagctgaagatcagcgccaaggagctgctgtttggccacagcgcctctgtgacctgcctggcccgggcccgggacttcagcaagcagccctacatcgtgtctgctgctgaaaatggagagatgtgtgtgtggaatgtgaccaacggccagtgcatggagaaggccaccctgccctaccgccacacagccatctgctactaccactgcagcttcaggatgaccggggagggctggctgctgtgctgcggggagtaccaggatgtgctgatcattgatgccaagaccctggccgtggtgcacagcttccgcagcagccagttcccagactggatcaactgcatgtgcatcgtgcacagcatgaggatccaggaggacagcctgctggtggtgtctgtggccggggagctgaaggtgtgggacctgagcagcagcatcaacagcatccaggagaagcaggatgtgtatgagaaggagagcaagttcctggagagcctgaactgccagaccatccgcttctgcacctacacagagcggctgctgctggtggtgttcagcaagtgctggaaggtgtatgactactgtgacttcagcctgctgctgacagaggtgtccagaaatggccagttctttgctggaggagaggtgattgctgcccaccgcatcctgatctggacagaagatggccacagctacatctaccagctgctgaacagcggcctgagcaagagcatctacccagcagatggccgggtgctgaaggagaccatctacccccacctgctgtgcagcacctctgtgcaggagaacaaggagcagagccggccctttgtgatgggctacatgaatgaaaggaaggagcccttctacaaggtgctcttcagcggggaggtgtctggccgcatcaccctgtggcacatcccagatgtgcctgtgtccaagtttgatggcagcccccgggagatccctgtgacagccacctggaccctgcaggacaactttgacaagcatgacaccatgagccagagcatcatcgactacttcagcggcctgaaggatggagctggaacagctgtggtgaccagcagcgagtacatccccagcctggacaagctgatctgtggctgtgaagatggcaccatcatcatcacccaggccctgaatgctgccaaggcccggctgctggagggcggcagcctggtgaaggacagccccccccacaaggtgctgaagggccaccaccagagcgtgaccagcctgctgtacccccacggcctgagcagcaagctggaccagagctggatgctgagcggggacctggacagctgtgtgatcctgtgggacatcttcacagaggagatcctgcacaagttcttcctggaggccggccctgtgaccagcctgctgatgagccctgagaagttcaagctgcggggggagcagatcatctgctgcgtgtgtggggaccacagcgtggccctgctgcacctggagggcaagagctgcctgctgcacgccaggaagcacctgtttcctgtgaggatgatcaagtggcaccctgtggagaacttcctgattgtgggctgtgctgatgacagcgtgtacatctgggagattgagaccggcaccctggagagacatgagaccggggagcgggcccgcatcatcctgaactgctgtgatgacagccagctggtgaagtctgtgctgcccatcgccagcgagaccctgaagcacaagagcattgagcagaggagcagcagcccctaccagctgggccccctgccctgccccggcctgcaggtggagagcagctgcaaggtgacagatgccaagttctgcccccggcccttcaacgtgctgcctgtgaagaccaagtggagcaatgtgggcttccacatcctgctgtttgacctggagaacctggtggagctgctgctgcccacccccctgagtgatgtggacagcagcagcagcttctacggcggggaggtgctgcggcgggccaagagcacagtggagaagaagaccctgaccctgaggaagagcaagacagcctgtggccccctgtctgctgaggccctggccaagcccatcacagagagcctggcccagggcgacaacaccatcaagttcagcgaggagaatgatggcatcaagaggcagaagaagatgaagatcagcaagaagatgcagcccaagcccagcaggaaggtggatgccagcctgaccatcgacacagccaagctgttcctgagctgcctgctgccctggggcgtggacaaggacctggactacctgtgcatcaagcacctgaacatcctgaagctgcagggccccatcagcctgggcatcagcctgaatgaagacaacttcagcctgatgctgcccggctgggacctgtgcaacagcggcatgatcaaggactacagcggcgtgaacctcttcagcaggaaggtgctggacctgagtgacaagtacacagccaccctgcccaaccaggtgggcatcccccggggcctggagaacaactgtgacagcctgcgggagagtgacaccatcgtgtacctgctgagccgcctcttcctggtgaacaagctggtgaacatgcccctggagctggcctgccgggtgggcagcagcttcaggatggagagcatccacaacaagatgagaggagctggaaatgacatcctgaacatgagcagcttctacagctgcctgagaaatggcaagaatgaaagccacgtgcctgaggccgacctgagcctgctgaagctgatcagctgctggagggaccagagcgtgcaggtgacagaggccatccaggccgtgctgctggccgaggtgcagcagcacatgaagagcctgggcaagatccctgtgaacagccagcctgtgtccatggccgagaatggaaactgtgagatgaagcagatgctgcccaagctggagtggacagaggagctggagctgcagtgtgtgaggaacaccctgcccctgcagacccctgtgtcccctgtgaagcatgacagcaacagcaacagcgccaacttccaggatgtggaggacatgccagacagatgtgccctggaggagagcgagagccctggagagcccaggcaccacagctggatcgccaaggtgtgcccctgcaaggtgtcctag

SEQ ID NO: 314417 - DNA, 3300 bp, Artificial Sequence
  derived and/or modified sequence
atgaggaccagcctgcaggccgtggccctgtggggccagaaggccccaccccacagcatcacagccatcatgatcacagatgaccagaggaccatcgtgacaggcagccaggagggccagctgtgcctgtggaacctgagccatgagctgaagatcagcgccaaggagctgctgtttggccacagcgcctctgtgacctgcctggcccgggcccgggacttcagcaagcagccctacatcgtgtctgctgctgaaaatggagagatgtgtgtgtggaatgtgaccaacggccagtgcatggagaaggccaccctgccctaccgccacacagccatctgctactaccactgcagcttcaggatgaccggggagggctggctgctgtgctgcggggagtaccaggatgtgctgatcattgatgccaagaccctggccgtggtgcacagcttccgcagcagccagttcccagactggatcaactgcatgtgcatcgtgcacagcatgaggatccaggacagcctgctggtggtgtctgtggccggggagctgaaggtgtgggacctgagcagcagcatcaacagcatccaggagaagcaggatgtgtatgagaaggagagcaagttcctggagagcctgaactgccagaccatccgcttctgcacctacacagagcggctgctgctggtggtgttcagcaagtgctggaaggtgtatgactactgtgacttcagcctgctgctgacagaggtgtccagaaatggccagttctttgctggaggagaggtgattgctgcccaccgcatcctgatctggacagaagatggccacagctacatctaccagctgctgaacagcggcctgagcaagagcatctacccagcagatggccgggtgctgaaggagaccatctacccccacctgctgtgcagcacctctgtgcaggagaacaagagccggccctttgtgatgggctacatgaatgaaaggaaggagcccttctacaaggtgctcttctctggagaggtgtctggccgcatcaccctgtggcacatcccagatgtgcctgtgtccaagtttgatggcagcccccgggagatccctgtgacagccacctggaccctgcaggacaactttgacaagcatgacaccatgagccagagcatcatcgactacttcagcggcctgaaggatggagctggaacagctgtggtgaccagcagcgagtacatccccagcctggacaagctgatctgtggctgtgaagatggcaccatcatcatcacccaggccctgaatgctgccaaggcccggctgctggagggcggcagcctggtgaaggacagccccccccacaaggtgctgaagggccaccaccagagcgtgaccagcctgctgtacccccacggcctgagcagcaagctggaccagagctggatgctgagcggggacctggacagctgtgtgatcctgtgggacatcttcacagaggagatcctgcacaagttcttcctggaggccggccctgtgaccagcctgctgatgagccctgagaagttcaagctgcggggggagcagatcatctgctgcgtgtgtggggaccacagcgtggccctgctgcacctggagggcaagagctgcctgctgcacgccaggaagcacctgtttcctgtgaggatgatcaagtggcaccctgtggagaacttcctgattgtgggctgtgctgatgattctgtgtacatctgggagattgaaacaggcaccctggagagacatgaaacaggagagcgggcccgcatcatcctgaactgctgtgatgacagccagctggtgaagtctgtgctgcccatcgccagcgagaccctgaagcacaagagcattgagcagaggagcagcagcccctaccagctgggccccctgccctgccccggcctgcaggtggagagcagctgcaaggtgacagatgccaagttctgcccccggcccttcaacgtgctgcctgtgaagaccaagtggagcaatgtgggcttccacatcctgctgtttgacctggagaacctggtggagctgctgctgcccacccccctgagtgatgtggacagcagcagcagcttctatggaggagaggtgctgcggcgggccaagagcacagtggagaagaagaccctgaccctgaggaagagcaagacagcctgtggccccctgtctgctgaggccctggccaagcccatcacagagagcctggcccagggcgacaacaccatcaagttctctgaagaaaatgatggcatcaagaggcagaagaagatgaagatcagcaagaagatgcagcccaagcccagcaggaaggtggatgccagcctgaccatcgacacagccaagctgttcctgagctgcctgctgccctggggcgtggacaaggacctggactacctgtgcatcaagcacctgaacatcctgaagctgcagggccccatcagcctgggcatcagcctgaatgaagacaacttcagcctgatgctgcccggctgggacctgtgcaacagcggcatgatcaaggactacagcggcgtgaacctcttcagcaggaaggtgctggacctgagtgacaagtacacagccaccctgcccaaccaggtgggcatcccccggggcctggagaacaactgtgacagcctgcgggagagtgacaccatcgtgtacctgctgagccgcctcttcctggtgaacaagctggtgaacatgcccctggagctggcctgccgggtgggcagcagcttcaggatggagagcatccacaacaagatgagaggagctggaaatgacatcctgaacatgagcagcttctacagctgcctgagaaatggcaagaatgaaagccacgtgcctgaggccgacctgagcctgctgaagctgatcagctgctggagggaccagagcgtgcaggtgacagaggccatccaggccgtgctgctggccgaggtgcagcagcacatgaagagcctgggcaagatccctgtgaacagccagcctgtgtccatggctgaaaatggaaactgtgagatgaagcagatgctgcccaagctggagtggacagaggagctggagctgcagtgtgtgaggaacaccctgcccctgcagacccctgtgtcccctgtgaagcatgacagcaacagcaacagcgccaacttccaggatgtggaggacatgccagacagatgtgccctggaggagagcgagagccctggagagcccaggcaccacagctggatcgccaaggtgtgcccctgcaaggtgtcctag

SEQ ID NO: 314418 - DNA, 2328 bp, Artificial Sequence
  derived and/or modified sequence
atgaggaccagcctgcaggccgtggccctgtggggccagaaggccccaccccacagcatcacagccatcatgatcacagatgaccagaggaccatcgtgacaggcagccaggagggccagctgtgcctgtggaacctgagccatgagctgaagatcagcgccaaggagctgctgtttggccacagcgcctctgtgacctgcctggcccgggcccgggacttcagcaagcagccctacatcgtgtctgctgctgaaaatggagagatgtgtgtgtggaatgtgaccaacggccagtgcatggagaaggccaccctgccctaccgccacacagccatctgctactaccactgcagcttcaggatgaccggggagggctggctgctgtgctgcggggagtaccaggatgtgctgatcattgatgccaagaccctggccgtggtgcacagcttccgcagcagccagttcccagactggatcaactgcatgtgcatcgtgcacagcatgaggatccaggaggacagcctgctggtggtgtctgtggccggggagctgaaggtgtgggacctgagcagcagcatcaacagcatccaggagaagcaggatgtgtatgagaaggagagcaagttcctggagagcctgaactgccagaccatccgcttctgcacctacacagagcggctgctgctggtggtgttcagcaagtgctggaaggtgtatgactactgtgacttcagcctgctgctgacagaggtgtccagaaatggccagttctttgctggaggagaggtgattgctgcccaccgcatcctgatctggacagaagatggccacagctacatctaccagctgctgaacagcggcctgagcaagagcatctacccagcagatggccgggtgctgaaggagaccatctacccccacctgctgtgcagcacctctgtgcaggagaacaaggagcagagccggccctttgtgatgggctacatgaatgaaaggaaggagcccttctacaaggtgctcttcagcggggaggtgtctggccgcatcaccctgtggcacatcccagatgtgcctgtgtccaagtttgatggcagcccccgggagatccctgtgacagccacctggaccctgcaggacaactttgacaagcatgacaccatgagccagagcatcatcgactacttcagcggcctgaaggatggagctggaacagctgtggtgaccagcagcgagtacatccccagcctggacaagctgatctgtggctgtgaagatggcaccatcatcatcacccaggccctgaatgctgccaaggcccggctgctggagggcggcagcctggtgaaggacagccccccccacaaggtgctgaagggccaccaccagagcgtgaccagcctgctgtacccccacggcctgagcagcaagctggaccagagctggatgctgagcggggacctggacagctgtgtgatcctgtgggacatcttcacagaggagatcctgcacaagttcttcctggaggccggccctgtgaccagcctgctgatgagccctgagaagttcaagctgcggggggagcagatcatctgctgcgtgtgtggggaccacagcgtggccctgctgcacctggagggcaagagctgcctgctgcacgccaggaagcacctgtttcctgtgaggatgatcaagtggcaccctgtggagaacttcctgattgtgggctgtgctgatgacagcgtgtacatctgggagattgagaccggcaccctggagagacatgagaccggggagcgggcccgcatcatcctgaactgctgtgatgacagccagctggtgaagtctgtgctgcccatcgccagcgagaccctgaagcacaagagcattgagcagaggagcagcagcccctaccagctgggccccctgccctgccccggcctgcaggtggagagcagctgcaaggtgacagatgccaagttctgcccccggcccttcaacgtgctgcctgtgaagaccaagtggagcaatgtgggcttccacatcctgctgtttgacctggagaacctggtggagctgctgctgcccacccccctgagtgatgtggacagcagcagcagcttctacggcggggaggtgctgcggcgggccaagagcacagtggagaagaagaccctgaccctgaggaagagcaagacagcctgtggccccctgtctgctgaggccctggccaagcccatcacagagagcctggcccagggcgacaacaccatcaagttcagcgaggagaatgatggcatcaagaggcagaagaagatgaagatctcctag

SEQ ID NO: 314419 - DNA, 3309 bp, Artificial Sequence
  derived and/or modified sequence
atgcggaccagcctgcaggccgtggccctgtggggccagaaggccccaccacactccatcactgccatcatgatcactgatgaccagcggacaattgtcacgggttctcaggaggggcagctctgcctttggaatctgagccacgaacttaagatctccgcaaaagagcttctttttgggcattccgcgtccgtgacctgcctcgcacgggccagagacttttccaagcagccatatattgtgagcgccgcagaaaatggcgagatgtgtgtttggaacgttactaacggccagtgcatggagaaagcaacgttaccatacagacacaccgccatttgctattatcactgctccttcaggatgaccggcgagggttggctgctatgctgtggggaatatcaggacgtcctgattatagacgcaaagactctggcggttgtgcattcattccggtcaagccagttccccgattggattaattgtatgtgcatcgtacactccatgaggattcaggaagatagccttcttgtggttagtgtggcgggggaactcaaggtgtgggatttgagctccagcataaactccattcaagaaaaacaggatgtgtatgaaaaggaaagtaagttcctggagagcctgaattgtcagaccattagattctgcacctacaccgagcggttgctcctggtagtgttctctaagtgctggaaagtgtacgattactgcgattttagcctgctgctgacagaagtgtccaggaatgggcagttttttgccgggggtgaagtaatcgctgcgcaccgaatccttatctggaccgaggacggacatagttatatctatcaactgctgaatagcggcctgtcaaagtccatttaccctgcagatggtagagtgctgaaagagactatttacccgcacctcctttgcagcacatccgtccaagagaataaagagcagagccgaccttttgtgatgggatacatgaatgagcgaaaggagcccttttataaggtgctgttttcaggtgaagtgtctggccgaattaccctttggcatatcccggacgtccccgtgtccaaatttgatggaagtccgcgtgaaatcccagtaacagcaacctggacgttgcaggataactttgacaaacatgacacaatgagccagtcaattattgactatttttctgggctgaaagatggggctggtacggccgtggtgacaagcagcgagtatatcccctcattggataaactcatctgcggctgcgaagacggtacaatcattataacccaggccctcaacgcggccaaagcaagactactcgaggggggcagtctggtgaaagactctccgcctcacaaggtgctgaagggtcatcaccagtctgtaacaagccttttataccctcatggacttagctccaaattggatcagtcttggatgctatccggtgaccttgattcttgtgtcattctatgggatatcttcacggaggaaatcctgcacaagttttttttagaggctgggccggttacatcccttctgatgtccccagaaaaattcaaactgagaggtgaacagattatatgttgtgtctgcggtgatcacagtgttgccctgctgcacctggagggtaaatcttgtctgttgcacgcccggaaacacctttttcccgtgaggatgatcaaatggcatccggtagagaatttcctcattgtcggctgtgcggacgattcagtgtatatttgggaaattgagacagggaccctggaacgacacgagacaggcgagagggcccgcataatcctgaattgctgcgatgattcgcagcttgtcaaatcagtgctccctattgccagcgaaaccctaaaacacaagagtatagagcagcgaagcagcagcccctaccagctaggacctctgccttgtccgggactccaggtggagtcatcgtgtaaagtgaccgacgcaaagttttgtccccgccccttcaatgtcctacccgttaagacaaaatggtcaaacgtcggctttcacatattgctgttcgatttggaaaaccttgtggagctgctgcttcccacacccctgtcagacgtcgactcctcatcctccttttacggcggagaggtgcttcgtagggctaagtctacggtggaaaaaaaaacgctcacccttcggaagagtaaaactgcctgcggccccctatcagctgaggccctcgcgaagcctataactgaaagtctggctcaaggcgataacaccattaaatttagtgaggaaaacgacggtatcaagcggcagaaaaagatgaagatctcaaaaaagatgcagccaaagccgtccaggaaagtggacgcatcccttacaatcgataccgcgaagctgtttttgtcatgtctgttgccatggggcgtggacaaagaccttgattacctgtgcattaaacacctgaatattcttaagctccaaggccccatcagtctaggtatttctttgaacgaagacaatttttccttgatgctgcccggctgggacctgtgcaattccgggatgatcaaggactactcaggcgtgaacttgttctcacgaaaagtcctggacctcagcgacaagtacacagctacactgccaaatcaggtggggatcccccgcggtttagagaataactgtgattccctgagagagtctgataccatcgtgtacctgctcagtaggctttttctcgtgaataagctcgttaatatgccccttgaactggcctgcagagtgggcagttcatttcggatggagtccatacataacaaaatgcgcggagcagggaatgacattttgaatatgtcctctttttactcatgcctgcgaaatgggaagaacgaaagccatgtccccgaggcggatctcagcctacttaaactgatctcctgttggcgcgaccagagtgtgcaggtgaccgaggccatccaggctgtgctactggcagaggtccagcaacacatgaagtcactcgggaagatccccgtgaattctcagccggtgagcatggccgagaacggcaactgtgagatgaaacagatgctacccaaacttgaatggactgaagagctcgaactccaatgcgtgagaaacacactgcccctgcagacccctgtaagtcccgtcaaacacgacagtaactccaatagcgccaacttccaggatgtggaagacatgccagatagatgcgcacttgaagagtctgaatctccaggggagccacgccaccacagctggatagcgaaagtttgcccctgtaaagtgagttag

SEQ ID NO: 314420 - DNA, 3309 bp, Artificial Sequence
  derived and/or modified sequence
atgcggaccagcctgcaggccgtggccctgtggggccagaaggccccaccgcacagtatcaccgctattatgataacagacgatcagcgaaccattgttaccgggagccaggagggacagctctgtttgtggaaccttagtcatgagctaaagatctctgcaaaggaacttttgtttggtcattctgccagcgtgacttgcctcgcgcgggccagagacttctctaaacaaccatacattgtctcagcagccgagaatggcgagatgtgcgtttggaatgtcaccaacgggcagtgtatggagaaggctacccttccttatcggcatacggcgatctgttactaccattgcagctttcgcatgaccggcgagggttggctcctgtgttgcggcgagtatcaggacgttctgataattgatgccaagacactggctgtggtgcactcatttaggagctcacagttccctgactggatcaattgtatgtgcatcgtccactctatgcgtatacaggaggatagccttctggtcgtgagcgtcgctggcgaactcaaggtctgggatttatcgagctccatcaacagtattcaggagaaacaggatgtgtatgagaaggaatcaaaattcttagaatctctgaactgccagaccatacggttctgcacatacacagagcgcctgttgctggtggtctttagtaaatgctggaaggtctatgattactgcgacttttctctcttactgaccgaggtgagccggaatgggcagttcttcgctggcggagaggtaatcgctgcacaccgcatcctgatatggactgaagacgggcattcatacatataccaactgcttaacagcggcttgtccaaaagcatttatccagcagatggccgggtgctcaaggaaactatttatccacacctgctgtgcagtacatcagttcaggagaataaggagcagtccagaccttttgttatggggtatatgaacgaaaggaaagaacccttctacaaggtgttgttttcaggggaagtatcaggacgcattaccctgtggcatatcccagatgtgcccgtctctaaatttgacggcagtcccagagaaattcccgtgacggctacctggacactacaggataattttgacaagcacgacacgatgagccagtccattatcgactatttctcaggattgaaagacggtgcagggactgctgttgtgactagtagcgaatacataccaagcctggataagctcatctgcggttgcgaggacggcaccattatcatcacacaggccctcaatgcggcgaaagccagactgctggagggcgggtctctcgtgaaagactccccccctcataaggttctgaaaggacatcatcagagtgtgacgagcttgctgtatcctcatgggctgtcctctaagctcgaccagagctggatgctgtcaggcgacctggacagctgtgtaatcctctgggacatattcacagaagaaattctgcataagttcttcctggaagccggacccgtaacctctctcctcatgtcccccgagaaatttaagcttaggggggaacagattatctgctgcgtgtgcggagatcacagcgtggcactgctccatctggaagggaagtcttgtctgcttcatgccaggaagcatttgtttcctgtgagaatgatcaagtggcaccccgtggagaattttctgattgtgggctgtgccgacgattccgtttacatctgggagatagaaaccggcactctcgaacgccacgaaacaggcgagcgcgcaaggatcattctgaattgctgcgatgactcacaactggtgaaatccgtgctcccgatcgcgtctgagacccttaaacataagagtattgagcagaggtcctcatccccatatcagctcgggccactcccgtgccctggactgcaagtagaaagctcgtgtaaagttaccgacgctaagttttgtccccgtcctttcaatgtactgcctgtcaagacaaaatggagcaacgtgggctttcatatcctgctttttgatttggagaacctggtggagctgctgctccctactccattgtcagacgtggattcatcttcctctttctacggtggggaggttctgcgaagggcaaaatctactgtggagaaaaaaacactgactctgcgcaaatccaaaacggcctgtgggccgctatctgcagaagccctagccaagcctattacagaatcccttgcccagggtgacaataccatcaagtttagtgaggagaatgacggcattaagcgtcagaaaaaaatgaagatttccaagaaaatgcagcccaagccatcccgaaaggtggatgcttctctgactatcgacaccgctaaactgtttctaagttgcctgcttccatggggggtggacaaagacctggactacctctgtataaaacatcttaacatcctgaagcttcagggtcctatatccctgggaatcagcctgaatgaggacaatttttctctgatgctcccaggctgggacctctgcaatagtggtatgatcaaggactacagcggcgtgaacctgttctcgcgcaaggtcttggacttatccgataaatacaccgccactttgcctaaccaggtgggcattccccgggggctggaaaataattgtgactccctgcgtgaaagtgacacaatagtgtacctgttatcgcgacttttcctggtgaacaaactggtcaatatgcccttggagctcgcatgcagggtgggcagctcattcaggatggagagcattcataacaaaatgagaggcgctggcaatgacatcttaaatatgagctcattctacagttgcttacgtaatggcaaaaatgaaagccatgtgcccgaagccgatctgagcctactcaagctgatcagttgttggcgggatcaatctgtccaggtcaccgaagccatacaggccgtgttgctggcagaggtgcaacagcatatgaaatctctaggaaaaattccagtgaattctcaacccgtttctatggccgaaaatggtaattgcgagatgaagcagatgttgccaaaactggaatggacagaagagctggaattacagtgtgtgcgaaataccctgcccctgcagacaccggtttctccagtcaagcatgacagcaatagtaattccgctaattttcaggatgtggaagatatgccagaccgctgtgcattggaagagtcagagtcccctggagagccccgacaccactcttggattgctaaggtgtgtccatgcaaagtttcctag

SEQ ID NO: 314421 - DNA, 3300 bp, Artificial Sequence
  derived and/or modified sequence
atgcggaccagcctgcaggccgtggccctgtggggccagaaggccccaccccactctatcaccgccattatgattactgatgatcagaggaccatagttactggatcccaggaaggccagctctgtctgtggaacctgagtcacgagctgaaaatttccgctaaagaactcctcttcgggcactcagcgtctgtgacctgccttgctagggcacgtgacttcagtaagcagccctacattgtaagcgctgccgagaacggtgagatgtgtgtttggaacgtgaccaacggccagtgcatggagaaagcaacactgccataccgccacactgcaatctgctactaccactgtagtttccgcatgacaggcgaaggatggctactttgttgcggcgaataccaagatgtgctcatcattgacgcaaaaaccctcgctgtggtgcacagtttccggagctctcagttccctgattggatcaactgcatgtgcatcgtccacagtatgcgtatccaggactctctcttggtggttagtgtagctggcgagctgaaagtgtgggatctgtcctccagtatcaactctattcaagaaaagcaagatgtttacgagaaagagtctaagttcttggagtccctcaactgccaaaccattagattttgtacctacacggagaggctgttgcttgtggttttcagtaaatgttggaaggtgtatgactattgtgatttttccttgctcctgacggaggtgagccgaaacggccagttctttgcagggggagaggtcattgctgcccataggatactgatatggactgaggatgggcatagctacatctaccaattgctaaactccggactctctaaaagtatctaccctgcggacggaagagtgcttaaggagaccatctacccccatctgctgtgttccaccagcgtccaagaaaataagagcaggccatttgttatggggtatatgaatgaaagaaaagaaccattctataaggtgctgttttccggcgaggtctctggcagaatcacactgtggcacatccccgatgtgcccgtaagcaagtttgacgggtcaccccgagaaattcccgtgaccgcaacatggactttacaagataattttgataagcacgacacaatgtcgcaatccattatcgactactttagcggactgaaggatggcgccggaaccgcagtggtgacgagcagcgagtatattccttccctcgataagctgatctgcggctgcgaagacggtacaatcattataacacaagcactgaatgcggctaaggctcgcttgctggaaggtggcagtctggtgaaagattcccccccacacaaagtactcaaggggcatcaccagagtgtcaccagcctgctatacccccatgggctatcctcaaaactggaccagtcttggatgctctcgggtgatttggacagctgcgtgattttgtgggacatctttacagaggaaatcttacacaagttcttcctcgaagcaggacccgtgacaagtctgctgatgagtccagaaaaatttaaacttcggggagagcaaattatttgctgcgtgtgcggcgaccattcagtcgcactcctacacctggagggcaagtcttgcctgctccacgctaggaaacacctattcccagtaagaatgattaagtggcacccagtggaaaactttctgattgtaggctgcgccgatgactcagtgtacatatgggagattgagacgggtaccttggaaaggcacgagactggagagcgcgcccggatcatcctgaactgttgtgacgacagccagctggtaaagagtgtcttaccaatcgcttctgagacgttgaagcataaatcaatcgaacagcgtagctcttccccttaccaactaggaccgctcccctgtccagggctccaggtcgagtcatcctgtaaggtcaccgacgccaaattctgtccgcgtcccttcaacgtgcttccagttaaaaccaagtggtccaatgtggggttccatatcttgttattcgacctggagaatctcgtggaactattgctgcccacacctctgtccgacgtcgactcctcgagctcattctacgggggcgaagtcctcagaagggcaaagtcaacagttgaaaaaaagaccctgactttgcgaaaaagcaaaactgcctgcggtccactatccgccgaggccctagcaaaacccataacagaatccttggcacagggggacaatactatcaagttttccgaggagaatgacggcatcaaacgccaaaagaagatgaagatcagcaagaagatgcagcccaaaccttctcgcaaggtagacgcctccctgacaatagacacagccaaactgttcctgtcctgtctgctcccctggggagtcgataaggatcttgactatctgtgtataaaacatctaaacattctgaagctgcagggcccaatcagcctggggatctctctgaacgaggacaatttttcattaatgctgcccggctgggacttgtgcaactccggcatgatcaaggattatagcggagttaacctttttagtcggaaagtcctcgatctgtctgacaagtatactgccacactgccaaaccaggtcggcattccgcgcggcttggaaaacaattgcgatagcctccgagagtcagacaccattgtatatttattgtcacgactgtttttggtgaataaactggttaatatgccactggagctggcatgtcgggtcggcagcagtttccgcatggaatcgatacataacaagatgagaggcgccggaaatgatattctgaatatgtcctccttctactcttgcctccgtaacggcaagaacgagtctcacgttccagaggctgacctatcgctgctcaagctgatttcctgttggagggaccagagcgtgcaggtgactgaggcaatccaggccgtcctgctcgccgaagttcaacagcatatgaagtcactgggtaaaatccccgttaacagccagcccgtctccatggccgagaatggtaattgcgaaatgaagcagatgttacccaagttggagtggaccgaggaattagaacttcagtgcgtgcggaataccttgcctctgcagacaccagttagtcccgtcaaacacgattctaatagcaattctgcaaactttcaggacgtggaagacatgccggaccgatgcgcactcgaggaatccgagtccccgggtgagcctcgacatcactcttggatcgctaaagtttgcccttgtaaggtctcctag

SEQ ID NO: 314422 - DNA, 2328 bp, Artificial Sequence
  derived and/or modified sequence
atgcggaccagcctgcaggccgtggccctgtggggccagaaggccccaccccattccatcactgcaattatgatcacggacgaccagcggactatcgtgacaggttcccaggaagggcaactgtgcttgtggaacttgtcccatgagctgaaaatttctgcgaaggaattactatttggccattccgcctcagtgacttgtctcgcccgtgcccgcgacttctccaaacaaccatacatcgtctctgcagcagagaatggcgagatgtgtgtctggaacgtgaccaacggacagtgcatggaaaaggccaccctgccatacaggcacactgctatttgttactaccactgctccttccgcatgacaggagaggggtggttgctgtgttgtggagaatatcaggacgtcctgatcattgacgccaagacgttagctgtcgttcactcattccggtcgtcccagttccccgactggattaattgtatgtgcatcgtgcactcgatgcggatccaggaagatagtctgctggtggtctccgttgccggagagctgaaggtctgggatctctcatcatcgatcaatagtattcaggaaaagcaggatgtctacgaaaaagaatctaaattccttgagagcctgaattgccagaccatccgattttgcacctataccgaaaggctgttgcttgtagtcttctcaaagtgttggaaagtgtatgattattgcgacttctcgcttctgctcaccgaagtgtcccggaatggccagttttttgcaggtggggaggtgattgcagcccatagaatacttatctggaccgaggacgggcattcttacatataccaattattgaatagcggtttaagcaaatcaatctacccagctgatggacgggtgttgaaagaaactatttatcctcacttgctgtgcagcacatcggtccaagagaataaagaacaatctcggccttttgtgatgggttatatgaacgagaggaaggaaccattctacaaagtgctgtttagtggcgaggtatctggccggatcactttatggcatattcctgacgtacctgtcagcaaatttgacggctcgcctcgtgaaattcctgttaccgccacatggactctgcaggacaatttcgataagcatgatactatgtctcagagcattattgactacttttcgggactgaaggacggggctggcacagccgtggtgacttcatctgagtacattccatcacttgataaacttatctgcggctgtgaggacggcaccataattatcacacaggcgttgaacgccgctaaagcgcggttgctggagggggggtccttggtgaaggactcgcctcctcacaaggttctcaagggccaccatcagagcgtgacaagcctattgtatcctcatggactgagcagcaagctcgaccagagttggatgctgagcggcgacctggattcttgcgtgatcctgtgggatatcttcacagaagaaattctgcataagttcttccttgaagctggccccgttacctccctgctgatgtccccagagaagtttaaactacggggcgaacaaatcatctgttgcgtttgtggagatcatagcgtggcactactgcatttagagggcaagagttgtctgctccacgccaggaagcatcttttcccagtaagaatgatcaagtggcaccccgtggaaaatttcttgatagtgggatgcgcagatgattctgtttacatctgggagatcgaaacagggacactcgaacgccatgagaccggggaacgagccagaattattctgaactgttgcgacgactcgcaattggtgaagagcgtgttacccattgcctcagaaaccttgaagcataagtctatcgagcagaggtctagcagtccttaccaactgggaccactgccttgccctggactgcaggtggaaagctcgtgcaaagtgaccgatgcaaagttctgcccacgcccattcaacgtactgcccgtgaaaaccaaatggagcaacgttgggttccacatcctactgttcgatctcgaaaacttagtggaacttcttctgcctacacccttatcagacgtagattcctcttcatccttttatggcggggaggtgctgcgccgcgccaagtctaccgtcgaaaaaaaaacactgacactgagaaaatctaagactgcttgcggaccattgtcagcggaagctttggctaagccgatcaccgagagcctggcccagggagacaatactataaaattctcagaggagaatgatggcattaagagacagaaaaagatgaaaataagctag

SEQ ID NO: 314423 - DNA, 3309 bp, Artificial Sequence
  derived and/or modified sequence
atgcggacatcattgcaggccgttgccttatggggccaaaaagcccctcctcatagcataacggccatcatgataactgacgaccagagaaccatagttactggatctcaggaagggcagctgtgcctgtggaacctgtctcatgagttgaagatctctgccaaagaactgctatttggccattctgcctctgtgacttgtctggcccgagcacgtgattttagcaaacagccttacattgtgtcggcggctgaaaatggcgagatgtgcgtttggaacgttacaaatggacaatgtatggagaaagctacgctgccataccgacatacagctatctgctactatcattgctcctttcggatgactggggaaggctggctgctctgttgcggcgagtaccaggacgtgctgatcattgacgctaagacattggctgtcgtgcactctttcagatcctcacaatttccagactggatcaattgtatgtgtatcgtgcactctatgcgaattcaagaggacagtcttctggtggtgagtgtggcaggcgaacttaaggtgtgggatctgtctagctccatcaattcgatccaggagaagcaggacgtgtatgaaaaggaatctaagttcttggaaagcctgaactgtcagaccattaggttctgtacctacactgaacgcctgctcttagtggtgttttccaagtgctggaaggtctacgattactgtgatttctccctcctgctcacggaagtgagcaggaacggacaatttttcgccggaggagaggtgatcgctgctcatcgcatcctgatttggaccgaagatggccactcttatatctatcagctgctcaactctgggctgagtaaatccatttaccccgcagatggaagggttctcaaagaaacaatctatccgcacctgttatgcagtacatcagtacaggaaaacaaggagcaatcacggccatttgtgatgggatacatgaacgagcgtaaggaaccattttataaggtgctctttagtggagaggtaagcggcagaattaccctgtggcacatcccagacgtgccagtgagtaaattcgacggatctcccagggagatccctgtgaccgccacatggacactgcaggacaacttcgacaagcacgatacaatgagccagtccattatcgattatttcagcggcctcaaggatggagctgggacagctgtcgtgacatcttctgagtatatccctagcctcgataaactgatctgcggttgtgaggacggcactatcattattacccaggcgttgaacgccgctaaagccagacttctcgaggggggtagccttgtaaaggacagtccccctcacaaggttctgaagggccaccaccagtccgtgacttcactcttgtatccccatgggctgagcagcaaactggaccagagttggatgctgtccggggacctagacagctgcgtgatcctctgggacattttcacagaagagatcctgcataaattttttctggaagctggcccagtgaccagcctactgatgagtccagaaaagttcaaactgcggggagagcagatcatttgctgcgtttgcggagatcattccgtggcattgctgcatctggagggaaagtcttgtttgttgcacgcccgaaaacacttgtttcccgttaggatgataaagtggcaccccgtggagaactttctgatcgtaggctgcgctgatgacagtgtctatatctgggaaattgagacaggcaccctggagagacatgagaccggagaacgcgctagaattatcctgaattgctgcgatgattctcagctcgtaaagtccgtcctccctattgccagcgaaaccttgaaacataagagtatagagcagagatcttcaagtccttaccagttgggaccattgccgtgccctggattgcaggtcgagagctcgtgtaaagtgactgatgccaaattttgtcctaggccattcaacgtgctacctgtgaagaccaagtggagtaacgtggggtttcacatcctgctgttcgacctagaaaacttagtggagttgctactgcctaccccgttgagcgacgtcgacagcagtagctccttctacggtggcgaggtcctgagacgcgctaagtccactgtcgagaagaagacactcacattgaggaaaagcaaaacggcttgtggtcctctcagtgccgaagcactggctaagccaatcactgaatcgctcgcacagggggacaatacgatcaagttttcggaagaaaacgatggaattaagagacagaaaaagatgaagataagtaagaagatgcagccaaagccgtcccggaaagtagacgctagcttaactatcgacacagccaagcttttcctttcttgtctgctgccatggggcgtcgacaaggacctggactacttgtgtatcaaacatttgaatattctgaaattgcagggccctatcagcctaggaatttccttaaacgaggataacttctccttgatgctgcctggttgggatttgtgtaactctggtatgatcaaagactacagcggcgtgaatctcttcagccgcaaagtcttggacctgtccgacaaatacacagctactttgccaaatcaggtgggtattcctcggggtctcgagaataactgcgacagtctgcgagagagtgatactatcgtgtatctcctcagccgcctgtttctggtgaacaagttggttaacatgccgctggagctggcatgccgtgtgggaagtagctttcgcatggaaagcattcacaataaaatgcgtggagccggaaatgacattctgaacatgagcagcttctatagctgtctgcggaatggtaagaatgaaagtcatgtccctgaagccgatctgagtctgcttaaattaatatcctgttggagagaccagtctgtgcaggtcactgaagcgatccaagccgtgttgttggccgaggtccagcaacacatgaaatcgctgggtaagattccagtgaactctcagcctgtgagcatggcggaaaatggcaactgcgagatgaaacaaatgcttccgaaacttgagtggactgaagagctggaactccagtgtgtgcgaaacaccctgccactgcagacacctgttagcccagtcaagcatgactcaaactccaacagtgctaactttcaggatgtggaggatatgcctgatcggtgtgctcttgaggaaagtgaatctcccggtgagcctcgccatcatagctggatcgccaaagtctgtccctgtaaggtgtcttag

SEQ ID NO: 314424 - DNA, 3309 bp, Artificial Sequence
  derived and/or modified sequence
atgcgcaccagtttgcaagctgtggcactgtgggggcagaaggctccccctcattcaataactgccatcatgatcacggacgaccagagaaccattgtcacaggctcccaggagggccagctctgtttatggaacctctcacatgaattaaaaattagcgccaaggagcttttgtttgggcactcagcctctgtcacttgtctagcacgtgcgagggacttctctaagcagccgtatattgtctcagccgctgagaacggcgaaatgtgcgtgtggaatgtgacaaacggacaatgcatggagaaggcaacactgccctaccgtcacacggccatctgttactaccactgcagctttcgtatgactggagagggctggctcttgtgttgcggagagtatcaagacgttctcatcatagacgcgaagaccctcgccgtagtgcatagtttccggagttcacagtttcccgactggatcaattgtatgtgtattgttcatagtatgcggatccaggaagattctctcttggttgtctccgtagctggggagctcaaagtgtgggatctcagcagttcaattaatagcattcaggagaagcaggatgtttacgaaaaagaatctaaatttctagagagtctaaattgtcagactataagattttgtacctatacagaaagactgctgctcgttgtcttctccaagtgttggaaggtatatgactactgcgacttcagcctgctcttgacagaagtgagcaggaacggtcagttttttgccggtggtgaggtaatcgctgcgcatcgcattctaatctggaccgaggatgggcactcctacatttaccagctcctcaacagcgggctgagcaagagcatttatcccgctgatggcagagtcttgaaggaaaccatctacccacacctcctgtgttccacttccgtgcaggagaacaaggaacagtctagacccttcgttatggggtatatgaacgaaagaaaggaacctttctataaagttctattctctggggaagtgtccggcagaataacattgtggcatatccctgatgtcccagtgtctaagttcgatggatccccgagggagatccccgtgaccgccacttggacactgcaggataacttcgacaagcacgacaccatgtctcaatctattatcgactatttctcagggttaaaggatggggcaggaacagctgttgttacctcttcggagtacataccatcactagacaaactgatctgcggttgcgaggatggaactattattatcacccaggcgctgaatgcagccaaggccaggcttctggaggggggaagcctggttaaagattcccctccccacaaggtgctaaaagggcatcatcagtccgtcacatctctcttgtaccctcacggactttcatcaaaacttgatcagtcttggatgctgtcgggggatctggattcctgtgtgattctctgggatatcttcacagaagaaattctccacaagttttttctggaggccggaccagtgaccagcctgctgatgtctcccgagaagttcaaactgcggggtgaacagatcatctgttgcgtctgcggggatcactctgtggctttgctgcatctggaaggcaagtcttgccttttgcacgcacgcaaacatttgttcccagtgaggatgattaagtggcatcctgttgagaatttcctgatcgtgggctgtgccgatgacagcgtttacatctgggagatcgaaaccggtactctggagaggcacgagactggggaacgcgctaggatcattctgaattgctgcgacgactctcagctggtgaagtccgtgctgccaattgcatctgagactctcaagcacaagtctatcgaacaaaggtcctcaagcccttaccagctgggacctctcccctgccccggattacaggtggaatcttcttgcaaagtgaccgacgcaaagttctgcccgaggccatttaacgtgttacccgttaagactaagtggtctaatgtcgggttccatattcttctctttgacctggaaaaccttgtagagctcctgttgcccaccccactgtcagacgtggacagtagtagttcgttctatggcggtgaggtgctgaggcgcgctaaatctacagtggagaagaaaaccctgactctgcggaaatcaaaaaccgcgtgtgggcctctctccgctgaggccttggcaaagcccattactgagtctctggcacagggggacaacacaatcaagttcagcgaagagaatgacggtattaagcggcagaagaagatgaagatctccaaaaagatgcagccgaaacctagtcgcaaggtggacgctagtctgaccattgacactgctaagcttttcttatcgtgtctgctaccctggggggtggacaaagacctggactatctgtgtatcaaacatctgaacatcctgaagctgcaagggcctatctccctaggaatttctctgaatgaagacaattttagcctcatgctgccaggctgggatttgtgcaatagcggaatgataaaagactatagcggagttaacctgttttccaggaaggtactggacctttcagataagtatacagccaccctgcccaaccaggtgggaatcccaagaggattggaaaataattgtgattccttgagagaaagcgacacgatcgtttatctgctgtcaaggctcttcctggtcaataagctcgtgaatatgccgctggaactggcctgtcgtgtgggcagttcgtttcggatggagtcaatccataataagatgaggggagcgggtaacgacatcctgaacatgtcctctttttattcttgtcttcgtaacggaaaaaacgagtcacatgtgcccgaggcagacctgtccttactgaaactcatctcttgctggcgagaccagtccgttcaggtcaccgaagcaatccaggcggtgctgctggccgaggtccagcagcatatgaaatccctgggtaaaatccccgtgaactcacagccagtgagtatggcagagaatggaaattgtgagatgaaacagatgcttcctaagctggaatggacagaagagttggaactacagtgcgtgcgcaacacgctgcctctccaaacccccgtgagccccgtgaagcacgactcgaactcaaatagtgcaaactttcaggacgtcgaagatatgcctgacaggtgcgccctcgaagagtccgagagtcccggagagccgaggcaccatagctggattgccaaggtttgtccttgtaaggttagctag

SEQ ID NO: 314425 - DNA, 3300 bp, Artificial Sequence
  derived and/or modified sequence
atgcgcacatccctgcaggccgtagccctgtggggccagaaggcccctccacatagtattacggccatcatgatcacagacgaccaacggaccatcgtcaccgggagtcaagagggccaactctgcctatggaatctgtcccatgagctgaaaatctcagcaaaggaactgctgttcggtcacagcgcgtcagtaacttgcctcgctcgggcacgagacttctctaagcagccatacatcgtgtcagccgcagaaaatggagaaatgtgcgtctggaacgtcactaacgggcaatgcatggaaaaggccaccttgccctatagacacactgccatctgttactatcactgctcgtttcgaatgactggggaaggctggctcctctgctgcggcgagtatcaggacgttctgattattgatgctaagaccttggcagtggtgcactccttcagaagcagccagtttccggattggataaattgcatgtgtatcgtacactctatgaggattcaagacagcctcctcgtcgtaagtgtagccggagagctgaaggtttgggacttaagtagtagcattaatagcattcaggagaaacaagacgtgtacgagaaggagtcaaaatttctcgagagtctgaactgccagaccatcaggttttgcacgtacactgagcggcttctcctcgtcgtttttagtaaatgttggaaggtgtacgattactgtgacttttccctcctgttgactgaagttagtagaaacggccagttttttgcgggtggagaagtgatagccgcacacaggatcctgatatggactgaggacggccacagttatatatatcagttactcaactcaggactgtcaaagtctatctaccccgcagacggcagagttctcaaggagactatctatccgcatctgctgtgctcaacaagcgtgcaggaaaacaaaagccggccttttgtgatggggtacatgaacgaaaggaaagagcccttctacaaggtcctgtttagcggggaggtgtctggacgcatcactctgtggcatatccctgatgtcccagtgtcaaagttcgatgggagtccgagagagatacctgtgacggcgacctggacactgcaggataactttgataagcatgacactatgtctcagagtatcatcgactacttttccggtctgaaagacggtgcgggaacggctgtggtgacctcttctgaatacataccaagccttgataagctgatttgcggatgcgaagacggcactatcataatcactcaagcattgaatgccgctaaggccagattgctggagggcggtagtctggttaaggacagtccaccgcataaagtcttgaaagggcaccaccagtcagtgacaagtctgctttacccacacggattgtccagcaaactggatcagagctggatgctttcgggggatctggatagttgtgttatactgtgggacatttttactgaagaaatcctgcacaagttttttctggaagccggacccgtcacttccctgctaatgagccctgaaaaattcaagctcagaggggaacagatcatatgttgtgtttgcggagatcattcagtagcactccttcatctggaggggaaatcctgtttgcttcacgccagaaagcacctgtttccagtacggatgattaagtggcatcctgtggagaatttcttgattgtgggttgtgccgacgactcagtgtatatctgggagattgaaacagggacattagaaaggcatgagacaggggaaagagctcgtataatcctgaactgttgtgacgattcgcagctggtgaagagcgttcttcctatcgccagtgagacactgaaacacaaatctatcgaacagagatccagctctccctaccagctcggtcccctgccatgcccaggactgcaggtcgagagttcctgcaaggttaccgacgcgaagttttgcccgcgtccattcaatgtgctgcctgtgaaaaccaaatggtccaacgtcggtttccacatactgctgttcgatctggaaaacctggttgagctcttgctgccaacccccctttctgatgttgacagctcaagctcattttatgggggtgaagtgctgaggcgggctaaatccacagtggaaaaaaagacactgactcttaggaagtcaaagacagcatgtggcccactgtccgcggaggctttagccaaacctatcaccgagtctctggctcagggtgataataccatcaaattcagcgaagagaatgatggcataaaacggcagaagaaaatgaagatctctaaaaaaatgcaaccgaaaccttctcggaaggtggacgcttccctgacaatcgatactgctaagctctttctgagctgcttgctgccttggggggtggataaagatctcgattacttgtgcatcaaacatctgaacatcttgaagctccaaggtcccatatctcttggaatctcactgaatgaagataacttttccctcatgctccctggctgggatctgtgcaactcaggaatgataaaggattactccggggtcaacctgttcagccgtaaagtcttggatttgagcgacaagtacacagccactttgcctaaccaggtgggaatccccagggggctagaaaacaactgcgactcccttagggagtctgacactattgtctacctcctgtcccgcctctttctcgtgaataagctcgtcaacatgccactggagctagcctgtagagtgggcagtagctttagaatggaatccatccataataagatgcgcggtgccggaaatgacatcctgaacatgtcaagcttttatagctgtctgaggaacgggaaaaacgagagccatgtaccggaagctgacttatccctcctcaagctgatcagttgttggcgagatcaaagtgtccaagtgaccgaagcaatccaagcagtgctcttagctgaagtgcaacagcacatgaaaagtttgggcaaaattcctgtcaactcacagcctgtttctatggctgaaaacggaaactgcgagatgaaacagatgctaccaaagctggaatggaccgaggagctggaactccagtgtgtgcgcaatacgctccctctgcagacacccgtcagccctgtgaaacacgacagtaattcaaacagcgccaatttccaggacgtggaggacatgccagacaggtgcgccctcgaagagtccgagtcgcctggagaaccgcgacatcatagctggatagccaaggtctgtccatgcaaggtcagttag

SEQ ID NO: 314426 - DNA, 2328 bp, Artificial Sequence
  derived and/or modified sequence
atgaggacctcccttcaagccgtggccctctggggtcagaaggcgcctcctcactctatcacagccattatgattaccgatgatcagagaaccatagttaccgggagtcaggagggtcaactgtgtctgtggaacctgagccacgaactgaaaataagcgccaaagagctcctcttcggtcactcagcatcagtaacctgccttgccagagctcgtgacttttcaaagcagccatatatcgtatccgccgctgagaacggagagatgtgcgtgtggaatgtgacaaatggtcagtgtatggagaaggcaaccctcccctacaggcatacagccatctgttattaccattgtagtttccgcatgacgggagagggctggcttctgtgttgcggggaataccaggacgttctcattatcgacgctaaaactctggcggtagtacattccttccgcagttcacagttcccagattggattaattgcatgtgtatcgtgcattccatgcgcattcaagaggatagcctgcttgtcgtgtcagtggcgggtgaattaaaggtctgggatctgtcatcgagtataaactctatacaggaaaagcaagatgtatacgaaaaagagtctaagtttttagagtcactgaattgtcagaccatacgcttttgcacctatacagagcggctgttactggttgtcttttctaagtgctggaaagtctacgattattgcgacttcagcctgctccttacggaagtcagcagaaacggtcagttttttgcaggaggagaggtgatagccgcacaccgcatcctcatctggacggaggatgggcattcttacatctaccagttgctgaacagcggcctgagtaagtctatttatccagccgacggcagggtgctgaaagagacaatctacccgcacctgctgtgctctacttccgtgcaagagaacaaggagcagtcccgaccttttgtgatggggtatatgaatgagagaaaagagccattttacaaagtgttgttcagtggcgaagtgagcggcaggatcaccctgtggcatattccagatgtaccagtgtcaaagtttgatggctcccctcgcgagattcctgtaaccgcaacttggaccctacaggacaactttgataaacatgacaccatgagccagtccataattgactatttctctggcctcaaggacggcgcaggtacagccgtggtcactagctcagagtatattcccagcctcgataagctgatttgtgggtgtgaggatggaacaattatcattacccaggctctcaatgcggctaaagcccgtctgttagagggcggttccttggtcaaggattctcccccacataaagttctgaagggtcatcaccagagcgttactagcttgctgtacccccatggtctcagctcgaaactagatcagagttggatgttgtctggcgaccttgacagctgtgttattctctgggatatctttacagaagaaatactacataaattctttctcgaggccggtccagtaacttctcttctcatgtcccctgagaaattcaagctcagaggcgagcagatcatttgctgcgtatgtggggaccattccgtcgccctcttacacttagagggcaagtcatgtctactgcacgcaaggaagcacttatttccggtgagaatgatcaaatggcatccggtggagaatttcttaatcgtcggttgcgcagacgattctgtgtatatctgggagatcgagacgggcacacttgagagacacgagactggagaacgtgcaaggattattcttaattgctgtgatgactctcagctggtgaagagcgtcctcccaattgcctccgaaaccctcaaacataagagcatcgaacagcgcagctcatcaccttaccagctcggcccattgccttgccctggtttgcaggtcgagtccagctgcaaagtcaccgacgcgaaattttgtcccaggccttttaatgtgctgcccgtcaagactaagtggtcaaacgtcggattccacattcttctcttcgacctagagaatctagtggaactgctgctccccacccctctatcagacgtggattcttcaagctccttttacgggggagaagtgctgcggagagcaaaatctacggtggaaaagaagactctgactttgcggaaatcgaagactgcttgcggaccacttagtgctgaagctctagccaaaccaataacagagtcattggctcagggcgacaacactattaaatttagcgaggaaaacgacgggatcaagcgccagaagaagatgaagatatcctag

SEQ ID NO: 314427 - DNA, 5887 bp, Artificial Sequence
  derived and/or modified sequence
cctctgccgctcctccgccccacggctcaggattcgcccaaaatgaggacttccctgcaggcagtggcactctggggacagaaggcccctccccacagcatcactgccatcatgatcactgatgaccagcgaacgattgtgactggaagtcaagagggtcagctctgtctctggaatctctcacatgaactaaagatttcagcgaaagaactcctatttggtcattcagcttcggtaacatgtttggcaagagcaagggacttctctaaacagccctacattgttagtgctgctgaaaatggggagatgtgtgtttggaatgtcaccaatggacagtgcatggagaaggctacacttccttacaggcacactgcaatctgttattaccactgctcattccggatgacaggagaaggctggcttctttgttgtggagaatatcaagatgtccttataattgatgccaaaactttggctgttgttcacagttttagatcatctcagtttcctgactggatcaactgcatgtgcattgttcactccatgagaattcaagaagattctctcttggtggtatcagtagctggtgagctcaaagtatgggatctttcctcatctatcaacagcattcaggaaaagcaagatgtctatgaaaaagaatccaagtttcttgagtccttgaactgccagacaattcgattttgcacatatactgagagacttctattggtggtattttctaaatgttggaaggtttatgattattgtgatttttcccttctgctgactgaagttagtagaaatgggcagttctttgctggtggagaagtgattgctgctcacagaatcctcatctggacagaagatggtcacagttacatctatcagctgctgaacagtgggctttcaaaaagcatataccctgctgatggaagagtgcttaaagagaccatttatcctcatttactgtgctctacttctgtgcaggaaaataaggaacagagccgtccctttgttatgggctacatgaatgaaaggaaagagcctttttacaaggtacttttctctggagaagtctcaggaagaattactttgtggcacatccctgatgttcctgtatccaagtttgatggttctcctagagagataccagtaactgccacctggactcttcaagataattttgataagcatgatactatgtcacaaagtattattgactatttctctgggcttaaagatggggcaggaactgctgtagtcacttcatcagagtatattccaagtcttgataaactaatatgtggctgtgaagatgggacaattatcattacccaggctttgaatgctgccaaagcaagacttctggaaggtggttctttagtaaaagattctccccctcataaagttcttaaaggccaccaccaaagtgtcacttcattactctatccacatggtctctcttcgaaattagaccaaagttggatgttgtctggggacctggactcatgtgtgatcttgtgggatatctttactgaagaaattttgcataaattctttttggaagctggtccagtaacaagtcttttgatgtcaccagagaagtttaaactaaggggtgagcagataatttgctgtgtgtgcggtgaccattccgtggctctccttcaccttgagggaaagagttgcctcctgcatgcccggaagcacctttttcctgtgaggatgataaaatggcacccggttgagaattttttaattgttggatgtgcagatgactcagtttatatctgggaaattgaaacaggcactttggaaagacatgagacaggagaaagagcacgaattattcttaattgttgtgatgattcacagcttgtgaagtctgtacttcccattgcctcagagacacttaagcacaaaagtatagaacagagatcctccagcccctaccagcttgggccattaccttgccctggtctgcaggtggagtcttcatgtaaggttactgatgccaaattttgcccaagaccttttaatgtcttgcctgtgaagacaaaatggagtaacgttggctttcatattcttctatttgatctggaaaaccttgttgaacttttgctaccaactccactcagtgatgttgactcttccagttcattctatggtggtgaggtcctgagaagagccaagagcacagtggagaagaagacactgacactgagaaaaagtaaaactgcctgtggtcctctttcagcagaggcactagccaagcctattactgaaagcctggcccaaggagataataccatcaaattctcagaagaaaatgatggcattaaaaggcagaagaaaatgaagatctccaaaaaaatgcagcctaagccatcaagaaaagtagatgccagtctcacaatagacacagcaaaattgtttctgtcttgccttttgccatggggagtggataaagatttagattatctttgcattaagcacctcaatattttaaagcttcagggtcctatttctttgggaatttctttgaatgaagataatttctcactgatgttgccaggttgggatttatgcaatagtggaatgataaaagactattcaggagtaaatttattttccaggaaagttttggacttgtcagataaatacacagccactcttccaaatcaggttggaattccaagaggattggaaaataattgtgattctttgcgagagtcagatactatagtttatttgttgagcagactatttttagttaataaattagttaacatgcctttagaattggcatgtagagttggcagttctttcagaatggaaagtatacataataagatgagaggtgctgggaatgacattttaaatatgtcaagcttctacagttgcttacgaaatggtaagaatgaatcccatgtacctgaggctgacctttcacttttgaagctaatttcctgttggagagaccagtctgtgcaggtaactgaagcaatacaagctgttctcttggcggaagttcaacaacacatgaagagtttgggaaagatacccgtcaatagtcaaccagtgtccatggcagagaatggtaactgtgagatgaagcagatgctgccaaagctggaatggacagaagaactagagttacagtgtgttagaaacactttgcctctgcaaactccagtcagcccggtcaagcatgacagcaactcaaactcggcaaacttccaagacgtggaggacatgcctgacagatgtgccttggaagagtctgagagtccaggtgagccaaggcatcattcatggatagcaaaggtctgcccctgcaaggtgtcttaaatggaatctcatcagtaggagctgaatttggacaaattaagaaatccaaaagatgccatttgtttattactgtataaaagcattgttgttattggtcaagttattaggctgtagtggatttgctaatactttagccaacatgtattaaagtgattttaatacatgctgattacaatgcaatacatactgattgaaaatattcatattcatctaattttagaaaaatattgcctagatcattctctattcctgtttcttactttttctgttaatatttccaacagggaatgccagtccacagacacaaatttaatactgctttaaattttctcctatccttttagtccctgaattatataataaacaatgttaaaaccaatgtagtacacaatacttacttacaaatttaatactgcttcaaggtatttaatctaaaattttaccaactttgatttgtctggttaggatattttgttttagtggatatgctttaattcggatcaattactgcagtaaatctcatccctaagcatgaaatgttgtcaacaaatacccagttccatttagttatcaattagcccaaataagagatacaaagtataacagtgaccaaccttgtactgttgagttaatttgaacttctaatgacattgaggctaatgtctttagctcaaggttgatcttgttggccatatagatgtgaactagggaaggggaatcaacttacagcatatcacaattgatccttattaagtataaactcttgtaggtcttttcccagaaagaagcttgactagcaggaattctaaaactgaaatatatcaaacagcataaataggaatagacataaagtgctcttctattaaagcctttggtgatctatttactatgatttatattgtacagttcctcgatttacagaaaatcatcaaaattattaatctacatatcttatgtatataaatattgcctaatccatagaaaaaaggatataaagtattaaatatgtgatatatagctatatctatctatctatgtatctaatagggaagtccaagtcacttcaattgaagaaacatatctctgagcataggagcagcctcaggtcctatggtgggatgcagtggacaggagagggggaaattagaaaagagaactatataattgaaaaagggatataaagcattaaatatatgatatatagctatatctatgtatgtatctaacagagaagttcaagtcacttcaattaaagaaacatttttgagcatgggaccagcctcaggtcttatgctgggatgcagtagacaggagatggggaaattagaaaagagaactgtgtaattgaaatgacgtgggctgcacccttaaggaacttataattaatgatgatctgaataaacataccaggataaagatgtcaaatgagtgtgactcccttaaagtagattaaagtgtgcattctttgtttcctaaaatatgattttactgcttgaaattacatttgagttgaagtttagaaactaacatagcattaatatgaataatcatggaaaattattatcctttgaaaactgattgataaatatattccccctcctttagaaacagtcaaaagccacttcaaacaagtttcaaaataaaggaaggtagcaagttaggcgatggattatattttcttgcttgttgtataccagttgtcaaggacattataaggactcccaaaagcattttgaaggatggcaatatcaaataagtgtatgtcctctcaaatgaggcatttttaattgttaaaatctatttggacgctcaggttatgatatgtttatgaaaaataagcttcattatttttatagctacatcctattattcccttttagaaacaagaataacaataggttttaatagttgccatacttagcatttatcagttctaatgaaaccaatattgaatctctgataaatattttctgatgttactagctatgggaaattagaactggcacaaccctgacattactaagtggaaatgttaggatttttcggcatcgcatgttagaatctctaaaatttaaacattcctgttaaatgactaaggtttgcttttatcaatatgaattctgaaggccaatatcataccattaactatgaaagcttttaattcctaaaaatagttttagagatattcaagcaatgctctcctaatatccatacgcaagtgtgtttatgacacaaattcactagtctgtttaaaaatgaattctttatattgactggtgttccacatatttcagtaatttctgttatgagaggacttgaaatagcaaattgccacacagttaactggatagaccacgtacgtggtgatcataaccacttggtactacacccagaaactcaaaattgtctttctcctgatgagatatgggtgtccttttgtacgtctaggcctaggtaaccagtggagtgattatattagcaaatgtgtttgtatccggagtcttcctgtcattgtaataaaaaatttatttaaaaa

SEQ ID NO: 314428 - DNA, 7507 bp, Artificial Sequence
  derived and/or modified sequence
gttcttttgttcttttctctctgcccccattttgtgggcccccaaattattatgggtcctgggcaccgtccctaatggataagccagccctgatctgagacacagagaggctgagggtctctaagaccactaagctagctacagcagagctcagacaagagcaactaggtctagacctctttctacatttgcgactatgaaaactatggagaaggctctgctcaagaggattcgcccaaaatgaggacttccctgcaggcagtggcactctggggacagaaggcccctccccacagcatcactgccatcatgatcactgatgaccagcgaacgattgtgactggaagtcaagagggtcagctctgtctctggaatctctcacatgaactaaagatttcagcgaaagaactcctatttggtcattcagcttcggtaacatgtttggcaagagcaagggacttctctaaacagccctacattgttagtgctgctgaaaatggggagatgtgtgtttggaatgtcaccaatggacagtgcatggagaaggctacacttccttacaggcacactgcaatctgttattaccactgctcattccggatgacaggagaaggctggcttctttgttgtggagaatatcaagatgtccttataattgatgccaaaactttggctgttgttcacagttttagatcatctcagtttcctgactggatcaactgcatgtgcattgttcactccatgagaattcaagaagattctctcttggtggtatcagtagctggtgagctcaaagtatgggatctttcctcatctatcaacagcattcaggaaaagcaagatgtctatgaaaaagaatccaagtttcttgagtccttgaactgccagacaattcgattttgcacatatactgagagacttctattggtggtattttctaaatgttggaaggtttatgattattgtgatttttcccttctgctgactgaagttagtagaaatgggcagttctttgctggtggagaagtgattgctgctcacagaatcctcatctggacagaagatggtcacagttacatctatcagctgctgaacagtgggctttcaaaaagcatataccctgctgatggaagagtgcttaaagagaccatttatcctcatttactgtgctctacttctgtgcaggaaaataaggaacagagccgtccctttgttatgggctacatgaatgaaaggaaagagcctttttacaaggtacttttctctggagaagtctcaggaagaattactttgtggcacatccctgatgttcctgtatccaagtttgatggttctcctagagagataccagtaactgccacctggactcttcaagataattttgataagcatgatactatgtcacaaagtattattgactatttctctgggcttaaagatggggcaggaactgctgtagtcacttcatcagagtatattccaagtcttgataaactaatatgtggctgtgaagatgggacaattatcattacccaggctttgaatgctgccaaagcaagacttctggaaggtggttctttagtaaaagattctccccctcataaagttcttaaaggccaccaccaaagtgtcacttcattactctatccacatggtctctcttcgaaattagaccaaagttggatgttgtctggggacctggactcatgtgtgatcttgtgggatatctttactgaagaaattttgcataaattctttttggaagctggtccagtaacaagtcttttgatgtcaccagagaagtttaaactaaggggtgagcagataatttgctgtgtgtgcggtgaccattccgtggctctccttcaccttgagggaaagagttgcctcctgcatgcccggaagcacctttttcctgtgaggatgataaaatggcacccggttgagaattttttaattgttggatgtgcagatgactcagtttatatctgggaaattgaaacaggcactttggaaagacatgagacaggagaaagagcacgaattattcttaattgttgtgatgattcacagcttgtgaagtctgtacttcccattgcctcagagacacttaagcacaaaagtatagaacagagatcctccagcccctaccagcttgggccattaccttgccctggtctgcaggtggagtcttcatgtaaggttactgatgccaaattttgcccaagaccttttaatgtcttgcctgtgaagacaaaatggagtaacgttggctttcatattcttctatttgatctggaaaaccttgttgaacttttgctaccaactccactcagtgatgttgactcttccagttcattctatggtggtgaggtcctgagaagagccaagagcacagtggagaagaagacactgacactgagaaaaagtaaaactgcctgtggtcctctttcagcagaggcactagccaagcctattactgaaagcctggcccaaggagataataccatcaaattctcagaagaaaatgatggcattaaaaggcagaagaaaatgaagatctccaaaaaaatgcagcctaagccatcaagaaaagtagatgccagtctcacaatagacacagcaaaattgtttctgtcttgccttttgccatggggagtggataaagatttagattatctttgcattaagcacctcaatattttaaagcttcagggtcctatttctttgggaatttctttgaatgaagataatttctcactgatgttgccaggttgggatttatgcaatagtggaatgataaaagactattcaggagtaaatttattttccaggaaagttttggacttgtcagataaatacacagccactcttccaaatcaggttggaattccaagaggattggaaaataattgtgattctttgcgagagtcagatactatagtttatttgttgagcagactatttttagttaataaattagttaacatgcctttagaattggcatgtagagttggcagttctttcagaatggaaagtatacataataagatgagaggtgctgggaatgacattttaaatatgtcaagcttctacagttgcttacgaaatggtaagaatgaatcccatgtacctgaggctgacctttcacttttgaagctaatttcctgttggagagaccagtctgtgcaggtaactgaagcaatacaagctgttctcttggcggaagttcaacaacacatgaagagtttgggaaagatacccgtcaatagtcaaccagtgtccatggcagagaatggtaactgtgagatgaagcagatgctgccaaagctggaatggacagaagaactagagttacagtgtgttagaaacactttgcctctgcaaactccagtcagcccggtcaagcatgacagcaactcaaactcggcaaacttccaagacgtggaggacatgcctgacagatgtgccttggaagagtctgagagtccaggtgagccaaggcatcattcatggatagcaaaggtctgcccctgcaaggtgtcttaaatggaatctcatcagtaggagctgaatttggacaaattaagaaatccaaaagatgccatttgtttattactgtataaaagcattgttgttattggtcaagttattaggctgtagtggatttgctaatactttagccaacatgtattaaagtgattttaatacatgctgattacaatgcaatacatactgattgaaaatattcatattcatctaattttagaaaaatattgcctagatcattctctattcctgtttcttactttttctgttaatatttccaacagggaatgccagtccacagacacaaatttaatactgctttaaattttctcctatccttttagtccctgaattatataataaacaatgttaaaaccaatgtagtacacaatacttacttacaaatttaatactgcttcaaggtatttaatctaaaattttaccaactttgatttgtctggttaggatattttgttttagtggatatgctttaattcggatcaattactgcagtaaatctcatccctaagcatgaaatgttgtcaacaaatacccagttccatttagttatcaattagcccaaataagagatacaaagtataacagtgaccaaccttgtactgttgagttaatttgaacttctaatgacattgaggctaatgtctttagctcaaggttgatcttgttggccatatagatgtgaactagggaaggggaatcaacttacagcatatcacaattgatccttattaagtataaactcttgtaggtcttttcccagaaagaagcttgactagcaggaattctaaaactgaaatatatcaaacagcataaataggaatagacataaagtgctcttctattaaagcctttggtgatctatttactatgatttatattgtacagttcctcgatttacagaaaatcatcaaaattattaatctacatatcttatgtatataaatattgcctaatccatagaaaaaaggatataaagtattaaatatgtgatatatagctatatctatctatctatgtatctaatagggaagtccaagtcacttcaattgaagaaacatatctctgagcataggagcagcctcaggtcctatggtgggatgcagtggacaggagagggggaaattagaaaagagaactatataattgaaaaagggatataaagcattaaatatatgatatatagctatatctatgtatgtatctaacagagaagttcaagtcacttcaattaaagaaacatttttgagcatgggaccagcctcaggtcttatgctgggatgcagtagacaggagatggggaaattagaaaagagaactgtgtaattgaaatgacgtgggctgcacccttaaggaacttataattaatgatgatctgaataaacataccaggataaagatgtcaaatgagtgtgactcccttaaagtagattaaagtgtgcattctttgtttcctaaaatatgattttactgcttgaaattacatttgagttgaagtttagaaactaacatagcattaatatgaataatcatggaaaattattatcctttgaaaactgattgataaatatattccccctcctttagaaacagtcaaaagccacttcaaacaagtttcaaaataaaggaaggtagcaagttaggcgatggattatattttcttgcttgttgtataccagttgtcaaggacattataaggactcccaaaagcattttgaaggatggcaatatcaaataagtgtatgtcctctcaaatgaggcatttttaattgttaaaatctatttggacgctcaggttatgatatgtttatgaaaaataagcttcattatttttatagctacatcctattattcccttttagaaacaagaataacaataggttttaatagttgccatacttagcatttatcagttctaatgaaaccaatattgaatctctgataaatattttctgatgttactagctatgggaaattagaactggcacaaccctgacattactaagtggaaatgttaggatttttcggcatcgcatgttagaatctctaaaatttaaacattcctgttaaatgactaaggtttgcttttatcaatatgaattctgaaggccaatatcataccattaactatgaaagcttttaattcctaaaaatagttttagagatattcaagcaatgctctcctaatatccatacgcaagtgtgtttatgacacaaattcactagtctgtttaaaaatgaattctttatattgactggtgttccacatatttcagtaatttctgttatgagaggacttgaaatagcaaattgccacacagttaactggatagaccacgtacgtggtgatcataaccacttggtactacacccagaaactcaaaattgtctttctcctgatgagatatgggtgtccttttgtacgtctaggcctaggtaaccagtggagtgattatattagcaaatgtgtttgtatccggagtcttcctgtcattgtaataaaaaatttatttaaaaattttgtcttgtgtttcttttttggtaatcatcttggtgatatttatgaatgtatttgtgtgtgtgtgtgtgtgtgtatacatacatatatatgtgtgtatatatatacacacatatatatacacatatatatgtgtgtatatatatatatatatggcatatcccccaaaggaatatcatattttcatttgcaagccttgattctttgacttgctgttgagtttcacattggctccattgtatattgcaggaaaaagtacctggaaagcctggagggttaaaagcagaggctcctcggcagcgtgtccaggccgtgtgtgcttgctgtgcttgtcagagcctcattccctcccctgtgttggagagctttctcacagggctcatccagaggtgctagaaagcaatgtgagcactattaaacacttcaaatataaggaaaaatgtataatgttagaaacacacagttaaaaagtagccccaggtatcaaacattctgttactattttagaaactaaattaaggctgctttgaacatgatggtattagaaaaatggtagaatacagtttgttaaatattaatattctatctttagatgatagcatttggtgacttttatttcttttctcatacattttttccagtgttctgtatttttaaaatcctttcataattattataatgaacactttagaaaagatactatttctcttccatccttagagggcacattataataattgagtattttaaaattaaattttatgccatgtatttaaaatgaaagttcaggttacattaattccaactgattttaaagccttattttcacagagtggactcattcaattttttaaattttatattcatacattttgattgctcagttatataaaagcggtgttatagactcctttattctccacaaaatgttgtcttatatgtaaagtgccaaaagttgtgtttaatttcctaagaaagtcattgctttgtaaacatttgcataatacttagtgttttttgtaattttaaaaaattagcttaaccaaaagagttgcaaaattaaaacttacttgagtaggtatctttcagacaaagctgcatggcttcatgtacaatagtccccagatcacctcgcactgtagtttgctcaagaaggagcctacagatggcaggtaggagaaggtaaactggaaattaacaggtctgtctgtaagagcatgccactggaaacacccatccaatttgggacccctggaagacagcatgtgtctaatgggaggcctgtcctagtacaactcctttactcttttcaccttcatcttgaccttctcagataccatctttatgtaaaatgttgatgttgtggagtttttgcagtaatttaatttttataaatattgtattaaaatatatttatcttga

SEQ ID NO: 314429 - DNA, 5900 bp, Artificial Sequence
  derived and/or modified sequence
aggtaaggcaggcacccccagagcgcaggtcgggctgccgggtcccaggattcgcccaaaatgaggacttccctgcaggcagtggcactctggggacagaaggcccctccccacagcatcactgccatcatgatcactgatgaccagcgaacgattgtgactggaagtcaagagggtcagctctgtctctggaatctctcacatgaactaaagatttcagcgaaagaactcctatttggtcattcagcttcggtaacatgtttggcaagagcaagggacttctctaaacagccctacattgttagtgctgctgaaaatggggagatgtgtgtttggaatgtcaccaatggacagtgcatggagaaggctacacttccttacaggcacactgcaatctgttattaccactgctcattccggatgacaggagaaggctggcttctttgttgtggagaatatcaagatgtccttataattgatgccaaaactttggctgttgttcacagttttagatcatctcagtttcctgactggatcaactgcatgtgcattgttcactccatgagaattcaagattctctcttggtggtatcagtagctggtgagctcaaagtatgggatctttcctcatctatcaacagcattcaggaaaagcaagatgtctatgaaaaagaatccaagtttcttgagtccttgaactgccagacaattcgattttgcacatatactgagagacttctattggtggtattttctaaatgttggaaggtttatgattattgtgatttttcccttctgctgactgaagttagtagaaatgggcagttctttgctggtggagaagtgattgctgctcacagaatcctcatctggacagaagatggtcacagttacatctatcagctgctgaacagtgggctttcaaaaagcatataccctgctgatggaagagtgcttaaagagaccatttatcctcatttactgtgctctacttctgtgcaggaaaataagagccgtccctttgttatgggctacatgaatgaaaggaaagagcctttttacaaggtacttttctctggagaagtctcaggaagaattactttgtggcacatccctgatgttcctgtatccaagtttgatggttctcctagagagataccagtaactgccacctggactcttcaagataattttgataagcatgatactatgtcacaaagtattattgactatttctctgggcttaaagatggggcaggaactgctgtagtcacttcatcagagtatattccaagtcttgataaactaatatgtggctgtgaagatgggacaattatcattacccaggctttgaatgctgccaaagcaagacttctggaaggtggttctttagtaaaagattctccccctcataaagttcttaaaggccaccaccaaagtgtcacttcattactctatccacatggtctctcttcgaaattagaccaaagttggatgttgtctggggacctggactcatgtgtgatcttgtgggatatctttactgaagaaattttgcataaattctttttggaagctggtccagtaacaagtcttttgatgtcaccagagaagtttaaactaaggggtgagcagataatttgctgtgtgtgcggtgaccattccgtggctctccttcaccttgagggaaagagttgcctcctgcatgcccggaagcacctttttcctgtgaggatgataaaatggcacccggttgagaattttttaattgttggatgtgcagatgactcagtttatatctgggaaattgaaacaggcactttggaaagacatgagacaggagaaagagcacgaattattcttaattgttgtgatgattcacagcttgtgaagtctgtacttcccattgcctcagagacacttaagcacaaaagtatagaacagagatcctccagcccctaccagcttgggccattaccttgccctggtctgcaggtggagtcttcatgtaaggttactgatgccaaattttgcccaagaccttttaatgtcttgcctgtgaagacaaaatggagtaacgttggctttcatattcttctatttgatctggaaaaccttgttgaacttttgctaccaactccactcagtgatgttgactcttccagttcattctatggtggtgaggtcctgagaagagccaagagcacagtggagaagaagacactgacactgagaaaaagtaaaactgcctgtggtcctctttcagcagaggcactagccaagcctattactgaaagcctggcccaaggagataataccatcaaattctcagaagaaaatgatggcattaaaaggcagaagaaaatgaagatctccaaaaaaatgcagcctaagccatcaagaaaagtagatgccagtctcacaatagacacagcaaaattgtttctgtcttgccttttgccatggggagtggataaagatttagattatctttgcattaagcacctcaatattttaaagcttcagggtcctatttctttgggaatttctttgaatgaagataatttctcactgatgttgccaggttgggatttatgcaatagtggaatgataaaagactattcaggagtaaatttattttccaggaaagttttggacttgtcagataaatacacagccactcttccaaatcaggttggaattccaagaggattggaaaataattgtgattctttgcgagagtcagatactatagtttatttgttgagcagactatttttagttaataaattagttaacatgcctttagaattggcatgtagagttggcagttctttcagaatggaaagtatacataataagatgagaggtgctgggaatgacattttaaatatgtcaagcttctacagttgcttacgaaatggtaagaatgaatcccatgtacctgaggctgacctttcacttttgaagctaatttcctgttggagagaccagtctgtgcaggtaactgaagcaatacaagctgttctcttggcggaagttcaacaacacatgaagagtttgggaaagatacccgtcaatagtcaaccagtgtccatggcagagaatggtaactgtgagatgaagcagatgctgccaaagctggaatggacagaagaactagagttacagtgtgttagaaacactttgcctctgcaaactccagtcagcccggtcaagcatgacagcaactcaaactcggcaaacttccaagacgtggaggacatgcctgacagatgtgccttggaagagtctgagagtccaggtgagccaaggcatcattcatggatagcaaaggtctgcccctgcaaggtgtcttaaatggaatctcatcagtaggagctgaatttggacaaattaagaaatccaaaagatgccatttgtttattactgtataaaagcattgttgttattggtcaagttattaggctgtagtggatttgctaatactttagccaacatgtattaaagtgattttaatacatgctgattacaatgcaatacatactgattgaaaatattcatattcatctaattttagaaaaatattgcctagatcattctctattcctgtttcttactttttctgttaatatttccaacagggaatgccagtccacagacacaaatttaatactgctttaaattttctcctatccttttagtccctgaattatataataaacaatgttaaaaccaatgtagtacacaatacttacttacaaatttaatactgcttcaaggtatttaatctaaaattttaccaactttgatttgtctggttaggatattttgttttagtggatatgctttaattcggatcaattactgcagtaaatctcatccctaagcatgaaatgttgtcaacaaatacccagttccatttagttatcaattagcccaaataagagatacaaagtataacagtgaccaaccttgtactgttgagttaatttgaacttctaatgacattgaggctaatgtctttagctcaaggttgatcttgttggccatatagatgtgaactagggaaggggaatcaacttacagcatatcacaattgatccttattaagtataaactcttgtaggtcttttcccagaaagaagcttgactagcaggaattctaaaactgaaatatatcaaacagcataaataggaatagacataaagtgctcttctattaaagcctttggtgatctatttactatgatttatattgtacagttcctcgatttacagaaaatcatcaaaattattaatctacatatcttatgtatataaatattgcctaatccatagaaaaaaggatataaagtattaaatatgtgatatatagctatatctatctatctatgtatctaatagggaagtccaagtcacttcaattgaagaaacatatctctgagcataggagcagcctcaggtcctatggtgggatgcagtggacaggagagggggaaattagaaaagagaactatataattgaaaaagggatataaagcattaaatatatgatatatagctatatctatgtatgtatctaacagagaagttcaagtcacttcaattaaagaaacatttttgagcatgggaccagcctcaggtcttatgctgggatgcagtagacaggagatggggaaattagaaaagagaactgtgtaattgaaatgacgtgggctgcacccttaaggaacttataattaatgatgatctgaataaacataccaggataaagatgtcaaatgagtgtgactcccttaaagtagattaaagtgtgcattctttgtttcctaaaatatgattttactgcttgaaattacatttgagttgaagtttagaaactaacatagcattaatatgaataatcatggaaaattattatcctttgaaaactgattgataaatatattccccctcctttagaaacagtcaaaagccacttcaaacaagtttcaaaataaaggaaggtagcaagttaggcgatggattatattttcttgcttgttgtataccagttgtcaaggacattataaggactcccaaaagcattttgaaggatggcaatatcaaataagtgtatgtcctctcaaatgaggcatttttaattgttaaaatctatttggacgctcaggttatgatatgtttatgaaaaataagcttcattatttttatagctacatcctattattcccttttagaaacaagaataacaataggttttaatagttgccatacttagcatttatcagttctaatgaaaccaatattgaatctctgataaatattttctgatgttactagctatgggaaattagaactggcacaaccctgacattactaagtggaaatgttaggatttttcggcatcgcatgttagaatctctaaaatttaaacattcctgttaaatgactaaggtttgcttttatcaatatgaattctgaaggccaatatcataccattaactatgaaagcttttaattcctaaaaatagttttagagatattcaagcaatgctctcctaatatccatacgcaagtgtgtttatgacacaaattcactagtctgtttaaaaatgaattctttatattgactggtgttccacatatttcagtaatttctgttatgagaggacttgaaatagcaaattgccacacagttaactggatagaccacgtacgtggtgatcataaccacttggtactacacccagaaactcaaaattgtctttctcctgatgagatatgggtgtccttttgtacgtctaggcctaggtaaccagtggagtgattatattagcaaatgtgtttgtatccggagtcttcctgtcattgtaataaaaaatttatttaaaaatttt

SEQ ID NO: 314430 - DNA, 2572 bp, Artificial Sequence
  derived and/or modified sequence
cagatgtggcatcaggagtgaacaaagccgctcatctcgcagtatccctacctatgctcctgggaggagtctaccccagatacgctctgaccttcggcaagttacttatgttctccaagactcattttcttcatgtttggaatagtgataataatgcatattgatattatgaggaccgcatgaagcagtgaacgtaatctaagcagcacagtgtctacaacttaacatatagtcagattcgcccaaaatgaggacttccctgcaggcagtggcactctggggacagaaggcccctccccacagcatcactgccatcatgatcactgatgaccagcgaacgattgtgactggaagtcaagagggtcagctctgtctctggaatctctcacatgaactaaagatttcagcgaaagaactcctatttggtcattcagcttcggtaacatgtttggcaagagcaagggacttctctaaacagccctacattgttagtgctgctgaaaatggggagatgtgtgtttggaatgtcaccaatggacagtgcatggagaaggctacacttccttacaggcacactgcaatctgttattaccactgctcattccggatgacaggagaaggctggcttctttgttgtggagaatatcaagatgtccttataattgatgccaaaactttggctgttgttcacagttttagatcatctcagtttcctgactggatcaactgcatgtgcattgttcactccatgagaattcaagaagattctctcttggtggtatcagtagctggtgagctcaaagtatgggatctttcctcatctatcaacagcattcaggaaaagcaagatgtctatgaaaaagaatccaagtttcttgagtccttgaactgccagacaattcgattttgcacatatactgagagacttctattggtggtattttctaaatgttggaaggtttatgattattgtgatttttcccttctgctgactgaagttagtagaaatgggcagttctttgctggtggagaagtgattgctgctcacagaatcctcatctggacagaagatggtcacagttacatctatcagctgctgaacagtgggctttcaaaaagcatataccctgctgatggaagagtgcttaaagagaccatttatcctcatttactgtgctctacttctgtgcaggaaaataaggaacagagccgtccctttgttatgggctacatgaatgaaaggaaagagcctttttacaaggtacttttctctggagaagtctcaggaagaattactttgtggcacatccctgatgttcctgtatccaagtttgatggttctcctagagagataccagtaactgccacctggactcttcaagataattttgataagcatgatactatgtcacaaagtattattgactatttctctgggcttaaagatggggcaggaactgctgtagtcacttcatcagagtatattccaagtcttgataaactaatatgtggctgtgaagatgggacaattatcattacccaggctttgaatgctgccaaagcaagacttctggaaggtggttctttagtaaaagattctccccctcataaagttcttaaaggccaccaccaaagtgtcacttcattactctatccacatggtctctcttcgaaattagaccaaagttggatgttgtctggggacctggactcatgtgtgatcttgtgggatatctttactgaagaaattttgcataaattctttttggaagctggtccagtaacaagtcttttgatgtcaccagagaagtttaaactaaggggtgagcagataatttgctgtgtgtgcggtgaccattccgtggctctccttcaccttgagggaaagagttgcctcctgcatgcccggaagcacctttttcctgtgaggatgataaaatggcacccggttgagaattttttaattgttggatgtgcagatgactcagtttatatctgggaaattgaaacaggcactttggaaagacatgagacaggagaaagagcacgaattattcttaattgttgtgatgattcacagcttgtgaagtctgtacttcccattgcctcagagacacttaagcacaaaagtatagaacagagatcctccagcccctaccagcttgggccattaccttgccctggtctgcaggtggagtcttcatgtaaggttactgatgccaaattttgcccaagaccttttaatgtcttgcctgtgaagacaaaatggagtaacgttggctttcatattcttctatttgatctggaaaaccttgttgaacttttgctaccaactccactcagtgatgttgactcttccagttcattctatggtggtgaggtcctgagaagagccaagagcacagtggagaagaagacactgacactgagaaaaagtaaaactgcctgtggtcctctttcagcagaggcactagccaagcctattactgaaagcctggcccaaggagataataccatcaaattctcagaagaaaatgatggcattaaaaggcagaagaaaatgaagatctcc

SEQ ID NO: 314431 - DNA, 624 bp, Artificial Sequence
  derived and/or modified sequence
atgaactgcctcgtcgacggaaacatcccccccagctcaggactgagctcttcatcggccctggtttgttgtgccgggctcgttacgcttactgtgctggggaggaacctgagtaaagtggaattggccgagatctgcgccaagtccgagagatacatcgggactgaaggcggcggaatggaccagagtatctcttttttagccgaggagggtactgcgaagttaatagagttcagtcccctccgcgccacagacgtgaaacttccttctggggctgtcttcgtcatagctaattcttgcgtagaaatgaacaaagccgctacttctcatttcaatatccgcgtgatggagtgtcgactggctgccaaactcctcgccaaatataaatccctccaatgggacaaggtgctacgtttggaggaggttcaggctaaactgggtattagcctggaagaaatgctgctggtcacagaagacgccttgcatccagagccttacaaccctgaagaaatttgtcgatgcttaggaatctccctagaggaactccgaacccagatcctgagccccaacacacaggacgacggggttgtgctctatcgaccgggctggagcgccaccgcctag

SEQ ID NO: 314432 - DNA, 624 bp, Artificial Sequence
  derived and/or modified sequence
atgaactgcctggtggatggcaacatcccccccagcagcggcctgagcagcagcagcgccctggtgtgctgtgccggcctggtgaccctgactgtgctgggcaggaacctgagcaaggtggagctggccgagatctgtgccaagtctgagcgctacatcggcacagaaggaggcggcatggaccagagcatctccttcctggccgaggagggcacagccaagctgattgagttcagccccctgcgggccacagatgtgaagctgcccagcggggctgtgtttgtgattgccaacagctgtgtggagatgaacaaggccgccaccagccacttcaacatccgggtgatggagtgccgcctggccgccaagctgctggccaagtacaagagcctgcagtgggacaaggtgctgcggctggaggaggtgcaggccaagctgggcatcagcctggaggagatgctgctggtgacagaagatgccctgcaccctgagccctacaaccctgaggagatctgccgctgcctgggcatcagcctggaggagctgcggacccagatcctgagccccaacacccaggatgatggagtggtgctgtacagacctggctggagcgccacagcctag

SEQ ID NO: 314433 - DNA, 624 bp, Artificial Sequence
  derived and/or modified sequence
atgaactgcctggtggacggcaacatcccccccagcagcggcctgtcaagctctagcgccttagtgtgttgcgccgggttggtaactctgaccgttcttggacgcaacttgtctaaagtggagttggccgagatctgtgccaaatcagaacggtatatcggcacggagggcgggggtatggaccagagtatcagcttcctggctgaagagggaactgccaagctcatcgaattttcgccactgcgcgccaccgatgtgaagctgccctcaggagccgtttttgtcattgcaaactcctgtgtggagatgaataaagccgccacttcgcactttaatattagagtgatggagtgtcgcctggcagccaaactgctggctaaatacaagtctctacaatgggataaagttctgagactggaggaagtccaggctaagctaggcatcagcttagaggaaatgctactcgttactgaggacgcactccatccagagccatacaatccagaggaaatctgccgctgccttgggatttcactggaagaactgaggactcagatcctgagcccaaacacacaagatgacggggttgtcctttaccgccctgggtggagtgctactgcgtag

SEQ ID NO: 314434 - DNA, 624 bp, Artificial Sequence
  derived and/or modified sequence
atgaactgtctggtggacggaaacattccaccctcttctggcctgtccagctcatccgcactggtgtgttgcgcaggattagtcacattaacagtgctggggaggaacctttctaaagtagagctagcagagatttgcgctaaatctgaacgctatattggcacggagggcggtggaatggaccagtctatcagcttcttagctgaggaggggacggctaagctcatcgaattctctccacttagagccaccgatgttaaacttccctctggcgctgtttttgtgatcgccaattcgtgcgttgagatgaacaaagccgctacctcccattttaatatcagagtgatggagtgcagactcgccgctaaattacttgccaagtataaaagtctgcaatgggataaagtcctgaggctggaggaagttcaggccaaactggggatcagcttagaggaaatgttgctcgtcacagaggacgccttacacccggagccttacaatcctgaggaaatatgccgatgcctgggtatttctctggaggaactgaggacacaaattctgtcccccaacacccaggacgacggggtggtgctctatcgccctgggtggtcagcaaccgcctag

SEQ ID NO: 314435 - DNA, 624 bp, Artificial Sequence
  derived and/or modified sequence
atgaactgcctggtggacggcaacatcccccccagcagcggcctgagcagcagcagcgccctggtgtgctgcgccggcctggtgaccctgaccgtgctgggcagaaacctgagcaaggtggagctggccgagatctgcgccaagagcgagagatacatcggcaccgagggcggcggcatggaccagagcatcagcttcctggccgaggagggcaccgccaagctgatcgagttcagccccctgagagccaccgacgtgaagctgcccagcggcgccgtgttcgtgatcgccaacagctgcgtggagatgaacaaggccgccaccagccacttcaacatcagagtgatggagtgcagactggccgccaagctgctggccaagtacaagagcctgcagtgggacaaggtgctgagactggaggaggtgcaggccaagctgggcatcagcctggaggagatgctgctggtgaccgaggacgccctgcaccccgagccctacaaccccgaggagatctgcagatgcctgggcatcagcctggaggagctgagaacccagatcctgagccccaacacccaggacgacggcgtggtgctgtacagacccggctggagcgccaccgcctag

SEQ ID NO: 314436 - protein, 419 aa, Artificial Sequence
  derived and/or modified sequence
MSAEQEKDPISLKRVRGGDSGLDGLGGPGVQLGSPDKKKRKANTQGPSFPPLSEYAPPPNPNSDHLVAANPFDDNYNTISYKPLPSSNPYLGPGYPGFGGYSTFRMPPHVPPRMSSPYCGPYSLRNQPHPFPQNPLGMGFNRPHAFNFGPHDNSSFGNPSYNNALSQNVNMPNQHFRQNPAENFSQIPPQNASQVSNPDLASNFVPGNNSNFTSPLESNHSFIPPPNTFGQAKAPPPKQDFTQGATKNTNQNSSAHPPHLNMDDTVNQSNIELKNVNRNNAVNQENSRSSSTEATNNNPANGTQNKPRQPRGAADACTTEKSNKSSLHPNRHGHSSSDPVYPCGICTNEVNDDQDAILCEASCQKWFHRICTGMTETAYGLLTAEASAVWGCDTCMADKDVQLMRTRETFGPSAVGSDA

SEQ ID NO: 314437 - DNA, 1260 bp, Artificial Sequence
  derived and/or modified sequence
atgtctgcggagcaagagaaagacccaattagcctcaagagagttcgcgggggagattcaggcctggacggcctgggcggcccaggggtgcaactgggatctccagacaagaagaaacgcaaggctaacacccagggtccaagttttccacccctaagcgaatatgctcctcctcccaatccaaattctgaccacttggtcgcagctaatccgttcgatgataactacaatacaattagttataaaccacttccatcttcaaacccatacctgggacccgggtaccctggcttcggaggatactctacgttcaggatgcccccacacgtgcctccccgcatgtcctcaccgtattgtggcccttattcgttgcggaaccagccccaccctttcccccagaatccactggggatgggctttaacaggcctcatgcatttaatttcggccctcatgataactcctcctttggtaacccttcatataacaatgcgctgagccagaatgttaacatgcccaaccagcactttagacagaacccggcggaaaacttctcacagatccccccacagaacgcgtcccaggtttcaaacccagacctggcttctaacttcgtcccagggaataacagcaacttcaccagccctctggagagcaatcattcttttattcccccaccaaacacattcggccaggccaaggccccaccaccaaagcaggactttacacaaggtgccacaaagaacacaaatcagaacagtagcgctcacccccctcacctcaacatggatgatacggttaaccagtccaacatcgagcttaaaaacgttaacaggaacaacgctgttaaccaagagaacagtcgtagctcttcaactgaggcaaccaataacaacccagccaacggaacacaaaataaacctaggcagcctcgtggcgccgccgatgcctgtactaccgagaagtctaacaagtccagcctacacccgaataggcatggacatagctctagcgaccctgtgtatccctgcgggatctgtacgaatgaggtgaatgacgatcaggacgccatcctgtgcgaagcctcctgccaaaagtggttccacagaatatgcaccggcatgacagaaaccgcttacgggctgttgactgctgaggcctctgcggtctggggctgtgacacctgcatggcagataaggatgtgcagctgatgaggacccgcgaaacctttggccccagcgctgtgggcagtgatgcatag

SEQ ID NO: 314438 - DNA, 1260 bp, Artificial Sequence
  derived and/or modified sequence
atgtctgctgagcaggagaaggaccccatcagcctgaagagggtgcggggcggggacagcggcctggatggcctgggcggccctggggtgcagctgggcagcccagacaagaagaagaggaaggccaacacccagggccccagcttcccccccctgtctgaatatgcccccccacccaaccccaacagcgaccacctggtggccgccaacccctttgatgacaactacaacaccatctcctacaagcccctgcccagcagcaacccctacctgggccctggctacccaggctttggaggctacagcaccttcaggatgcctcctcatgtgccccccaggatgagcagcccctactgcggcccctacagcctgaggaaccagccccaccccttcccccagaaccccctgggcatgggcttcaaccggccccacgccttcaactttggcccccatgacaacagcagctttggaaaccccagctacaacaatgccctgagccagaatgtgaacatgcccaaccagcacttccggcagaacccagctgagaacttcagccagatccccccccagaatgccagccaggtgagcaacccagacctggccagcaactttgtgcccggcaacaacagcaacttcaccagccccctggagagcaaccacagcttcatccccccacccaacaccttcggccaggccaaggcccccccacccaagcaggacttcacccagggcgccaccaagaacaccaaccagaacagcagcgcccaccccccccacctgaacatggatgacacagtgaaccagagcaacatcgagctgaagaatgtgaacagaaataatgctgtgaaccaggagaacagccgcagcagcagcacagaggccaccaacaacaacccagccaacggcacccagaacaagccccggcagcccagaggagctgctgatgcctgcaccacagagaagagcaacaagagcagcctgcaccccaacagacatggccacagcagcagtgaccctgtgtacccctgtggcatctgcaccaatgaggtgaatgatgaccaggatgccatcctgtgtgaggccagctgccagaagtggttccaccgcatctgcaccggcatgacagaaacagcctacggcctgctgacagctgaggccagcgctgtgtggggctgtgacacctgcatggctgacaaggatgtgcagctgatgaggacccgggagaccttcggccccagcgctgtgggcagtgatgcctag

SEQ ID NO: 314439 - DNA, 2714 bp, Artificial Sequence
  derived and/or modified sequence
ctcctcctcagagggcgctgtgagtgtgccgccagggccgggccgcgagcctcctgcttcccctgtcagcatcaaagagaccgaattcccgcggcctgggggggagtcatgctttgcggtctgtaatgtcagcagaacaggagaaggatcccatttcgctgaagagagttcgaggtggtgatagtggactggatgggttaggaggaccaggtgtacaactaggaagcccagataagaaaaagcgcaaggcaaatacacagggaccttctttccctccattgtctgagtatgctccaccaccgaatccaaactctgaccatctagtggctgctaatccatttgatgacaactataatactatttcctataaaccactaccttcgtcaaatccatatcttggccctggttatcctggctttggaggctatagtacattcagaatgccacctcacgttcccccaagaatgtcttccccatactgtggtccttactcactcaggaaccagccacacccatttcctcagaatcctctgggcatgggttttaatcgacctcatgcttttaactttgggccacatgataattcaagtttcggtaatccatcttataataatgcactaagtcagaatgtcaacatgcctaatcaacattttagacaaaatcctgctgaaaatttcagtcaaattcctccacagaatgctagccaagtttctaaccccgatttggcatctaattttgttcctggaaataattcaaattttacttctccgttagaatctaatcattcttttattcctcccccaaacacttttggtcaagcaaaagcaccacccccaaaacaagactttactcaaggagcaaccaaaaacactaatcaaaattcctctgctcatccacctcacttgaatatggatgacacagtgaatcagagtaatattgaattaaaaaatgttaatcgaaacaatgcagtaaatcaggagaacagccgttcaagtagcactgaagccacaaacaataaccctgcaaatgggacgcagaataagccacgacaaccaagaggtgcagcagatgcctgcaccacagaaaaaagcaataaatcctctcttcacccaaaccgtcatggccattcgtcttctgacccagtgtatccttgtggaatttgtacaaacgaggtgaacgatgatcaggatgccatcttatgtgaggcctcttgtcagaaatggtttcatcggatctgtactggaatgactgaaacagcttatggcctcttaactgcagaagcatctgcagtatggggctgtgatacctgtatggctgacaaagatgtccagttaatgcgtactagagaaacttttggtccatctgcagtgggcagtgatgcttaatcaaaggcattaactaaagtgggtttattttcctgtgcattgcagaagttcattgacacaggattttaatgttttacattatttttttaaatgcatacacaaaaacattatttacttagtttttattaatcacttcatcactagagcaaattttttattgtctttgcttgctgtcttaaatgagaataatgtatatgggggtgctttagaaacataaataaatgttagttgttgttatttatcacaaacataaaagcctcttgaaacttcaaaataatatataacaaatgtaggcaagttttaacttttaaaagttagaatcattgaaaaacgtgtatttcagtgctgaactttggttgtaccatattaaagatttagttcaaaaagtttatcaaggatccacttaacacgtcttcacaacataatatatgtaactgtaacatgggggaaagcatacatttttatggattaaaaaaataatagtatgacaccagattcctcctccactagggtctttggaatcaatgaatttcatatttcaagtgagttttcaggatatctgtttgtacagatacgagacagatcttagcatatagtaaattctcagtaagtattgttgattaacttgtggatggtaccacatgaaattgctaatattagatcagttgaaaattgactgcaattagtaaagttggtataacgtacgttcccagttgtgctatttagaattatgatagtattatgctcctacttttctttgatattgagttgtcttgttattgtttattgttttccagagaaatactatagtatccacagaagaattgtgaatacttttttataattttgaactgggacatattgcagatgaggaaggtagaaacatccatttggccttagagggctctgctagtaaaagaactactcagtggtggtttgaaaaatcttgttctggggatctgaatttcaaaaatgaaccctaggggagatcaaaatccattttaaacaaagatcaattaagagccaaagtgaaatctaacttgcaaacaacaatttgaagccttgcagcagacttaaggaattcccgctctgactggggaaaagtataaaaatggacctgagagtaccctcttgagggatgatcaagaatggagacagttggagttgtgctcattaagattcaaaacagcagaaatccatttttggagcagattataacctgtggccaaaaaaaaaaaatgtgtgctgtttgacagctaatggcaatttatacaatcattggaggctggtaaagctccctaatatgttgccaccattatcattgcaacc

SEQ ID NO: 314440 - DNA, 1260 bp, Artificial Sequence
  derived and/or modified sequence
atgagcgccgagcaggagaaggaccccatcagcctgaagcgggtgagaggcggtgacagcggcctagacggactcggtggacccggagtccagctggggtcaccagataaaaaaaaacggaaagcgaacacccagggcccctctttccccccattatccgaatacgcaccacccccgaaccctaattccgaccacctcgtagctgctaatccatttgatgataattacaacaccatctcttacaagccacttccgagttcaaacccctacctgggaccaggatatcctggattcggaggatactccacatttagaatgccccctcatgtccccccgaggatgtctagtccctactgcggcccttacagtctgagaaaccagcctcacccttttccacagaacccactcggaatgggctttaaccggcctcatgcctttaacttcggtcctcacgacaactcatcctttggcaacccttcctacaacaatgctctgtcacagaatgtaaacatgcccaaccagcatttccgacagaatccagccgagaacttctctcaaatccctccccagaacgcgtcacaggtgagtaaccctgatttagcgagcaactttgtgcctgggaataacagcaacttcacctccccattggagtctaaccactccttcattcctccaccaaatacattcggacaagccaaagccccccctcccaaacaggactttactcagggagctaccaagaacacaaatcagaactcttccgcccatccccctcacctaaacatggacgatactgtaaaccagagtaatattgaattgaagaatgtcaatcggaataacgctgtgaatcaggaaaattcacggagctctagcactgaagccactaataataaccctgccaacggcacacagaacaagcctagacagccgagaggagctgcagatgcgtgcacaaccgagaagagtaacaagagctccctgcaccctaatagacacgggcactcctccagcgatcccgtctacccttgtgggatatgtactaacgaagttaatgatgaccaggacgccattctttgcgaagcttcttgccagaagtggttccaccgcatctgtaccggcatgacagagaccgcctatggcctcctcacagctgaagccagcgcagtatggggttgtgatacttgtatggcggacaaggatgttcaacttatgaggacgagagaaacatttggacccagtgccgttggctccgatgcctag

SEQ ID NO: 314441 - DNA, 1260 bp, Artificial Sequence
  derived and/or modified sequence
atgagtgccgaacaggaaaaggaccccatcagcctaaaacgggtgagggggggagactcaggattggacggcctgggcggtcctggcgtgcagctgggttctcccgataaaaaaaaaagaaaggccaacacacagggcccaagtttcccgccactgagcgagtatgcacctccacctaacccaaattcagaccatctcgtggccgcaaacccctttgacgacaactataatactatcagttataagccgttgcccagttcaaacccctaccttggaccgggttacccaggttttggcggttacagtacattccggatgcccccacatgtcccacctcggatgagctccccgtactgcgggccatatagtctcaggaatcagccgcaccccttcccccagaaccctttgggcatggggttcaatcgtccacatgctttcaattttgggccacacgacaactcaagtttcggaaacccgagctataacaacgcactgtcacagaacgtaaatatgccgaaccagcattttcggcagaatcccgctgaaaattttagccagattcccccacagaacgcaagtcaggtgagcaaccccgacttagcctccaattttgtccccggaaataattccaattttacgtcaccactggaatcaaaccactctttcattccaccaccaaacactttcggtcaggcgaaggcccctcctcctaagcaggactttacacagggcgcaacgaagaacactaatcagaactcctccgctcatccaccccatcttaatatggacgatactgtgaaccagtcgaatattgagttgaagaacgtgaatcgcaacaatgctgttaaccaggaaaattcgcgttcatcatcaactgaagccacaaacaacaaccccgcaaacgggactcagaataagcctcgacagccgaggggggcagcagatgcatgtaccactgagaagagtaacaaatcttcacttcaccctaatcgacatggccattccagctctgatccagtgtacccctgcggaatttgcactaatgaagtgaatgatgaccaggacgcgattctgtgtgaagcatcttgtcagaagtggtttcaccgtatttgcaccggtatgaccgaaactgcatatggcttgctgacggccgaagcctcggccgtctggggctgtgacacttgcatggcggacaaggatgtgcagctcatgcgtacccgggagaccttcggaccatcagcagtcgggagcgatgcttag

SEQ ID NO: 314442 - DNA, 1260 bp, Artificial Sequence
  derived and/or modified sequence
atgagcgccgagcaggagaaggaccccatcagcctgaagagagtgagaggcggcgacagcggcctggacggcctgggcggccccggcgtgcagctgggcagccccgacaagaagaagagaaaggccaacacccagggccccagcttcccccccctgagcgagtacgcccccccccccaaccccaacagcgaccacctggtggccgccaaccccttcgacgacaactacaacaccatcagctacaagcccctgcccagcagcaacccctacctgggccccggctaccccggcttcggcggctacagcaccttcagaatgcccccccacgtgccccccagaatgagcagcccctactgcggcccctacagcctgagaaaccagccccaccccttcccccagaaccccctgggcatgggcttcaacagaccccacgccttcaacttcggcccccacgacaacagcagcttcggcaaccccagctacaacaacgccctgagccagaacgtgaacatgcccaaccagcacttcagacagaaccccgccgagaacttcagccagatccccccccagaacgccagccaggtgagcaaccccgacctggccagcaacttcgtgcccggcaacaacagcaacttcaccagccccctggagagcaaccacagcttcatccccccccccaacaccttcggccaggccaaggcccccccccccaagcaggacttcacccagggcgccaccaagaacaccaaccagaacagcagcgcccaccccccccacctgaacatggacgacaccgtgaaccagagcaacatcgagctgaagaacgtgaacagaaacaacgccgtgaaccaggagaacagcagaagcagcagcaccgaggccaccaacaacaaccccgccaacggcacccagaacaagcccagacagcccagaggcgccgccgacgcctgcaccaccgagaagagcaacaagagcagcctgcaccccaacagacacggccacagcagcagcgaccccgtgtacccctgcggcatctgcaccaacgaggtgaacgacgaccaggacgccatcctgtgcgaggccagctgccagaagtggttccacagaatctgcaccggcatgaccgagaccgcctacggcctgctgaccgccgaggccagcgccgtgtggggctgcgacacctgcatggccgacaaggacgtgcagctgatgagaaccagagagaccttcggccccagcgccgtgggcagcgacgcctag

SEQ ID NO: 314443 - DNA, 1017 bp, Artificial Sequence
  derived and/or modified sequence
atgtcaggaagcagtctgcctagcgctttagctctctccctgctcctcgtgtccggcagcttgctgccaggacccggtgcagctcagaacgcagggtttgtgaaatcccctatgtctgagaccaagttaaccggcgacgccttcgaactctattgtgacgtggtagggagtcctacccccgagattcagtggtggtatgctgaagtcaatagagctgagtcttttaggcagctgtgggatggagctcggaaacgacgcgttacagtgaatactgcatacggttctaatggcgtgagcgtgctgcgcattacacgcctgacactggaggattcagggacatacgagtgcagagcttccaacgatcctaagagaaacgatctccgccagaatccatctattacctggatacgtgcacaggccactatcagtgtcttgcagaagcccagaatagtgacctccgaggaagttatcattcgggattcccctgtcctgcctgtgacactgcagtgtaacctgacctcctcttcccatacactgacctattcttattggaccaagaacggagtagaactgtcagccacccggaaaaacgccagcaatatggagtatcgcatcaataagccccgggcagaagacagtggggagtatcattgtgtctatcactttgtgagtgcacctaaggctaatgcaactatagaagtaaaagccgcccccgacattacaggtcataaaaggagtgaaaacaaaaatgagggacaggacgctacaatgtactgcaagagtgtggggtacccccacccagactggatttggcggaagaaagaaaacggcatgcccatggacattgtgaatacgagcgggaggtttttcattattaacaaagaaaattacaccgaactcaacattgtcaatctccagatcaccgaggaccctggagagtacgagtggtgcggtgctacatggccacactctggactctcgtgggagttctggttgaaactttcctcactgtggtag

SEQ ID NO: 314444 - DNA, 1017 bp, Artificial Sequence
  derived and/or modified sequence
atgagcggcagcagcctgcccagcgccctggccctgagcctgctgctggtgtctggcagcctgctgcccggccctggagctgcccagaatgccggctttgtgaagagccccatgtctgagaccaagctgactggagatgcctttgagctgtactgtgatgtggtgggcagccccaccccagagatccagtggtggtatgcagaggtgaacagagctgagagcttccggcagctgtgggatggagccaggaagagaagagtgacagtgaacacagcctacggcagcaatggagtgtctgtgctgcgcatcacccggctgaccctggaggacagcggcacctatgaatgtcgggccagcaatgaccccaagagaaatgacctgcggcagaaccccagcatcacctggatccgggcccaggccaccatctctgtgctgcagaagccccgcatcgtgaccagcgaggaggtgatcatccgggacagccctgtgctgcctgtgaccctgcagtgcaacctgaccagcagcagccacaccctgacctacagctactggaccaagaatggagtggagctgagcgccaccaggaagaatgccagcaacatggagtaccgcatcaacaagcccagggcagaagattctggagagtaccactgtgtgtaccactttgtgtctgcccccaaggccaatgccaccatcgaggtgaaggccgccccagacatcaccggccacaagagaagtgagaacaagaatgaaggccaggatgccaccatgtactgcaagtctgtgggctacccccacccagactggatctggaggaagaaggaaaatggcatgcccatggacatcgtgaacaccagcggccgcttcttcatcatcaacaaggagaactacacagagctgaacatcgtgaacctgcagatcacagaagatcctggagaatatgagtggtgtggggccacctggccccacagcggcctgtcctgggagttctggctgaagctgagcagcctgtggtag

SEQ ID NO: 314445 - DNA, 1017 bp, Artificial Sequence
  derived and/or modified sequence
atgagcggcagcagcctgcccagcgccctggccctgagcctgctgttggtgtctggtagcctgctgccaggaccgggggctgcacaaaacgcagggttcgtcaaaagccccatgtccgagacaaagctcaccggagatgcatttgagctttattgtgacgtggttggctcccctacccccgagatacaatggtggtacgccgaagtcaaccgggcagagagttttaggcaactctgggacggagccaggaaacggcgagtgacagtaaatacggcttatggcagtaatggagtcagtgtgctccggattacgcggctaacactggaagacagcggtacgtacgagtgtcgtgcgagcaacgaccccaagcgtaatgacttacgtcagaatccatcgattacgtggatcagagcccaggccaccatctcagtgttgcagaagccacgcatcgtgacgtccgaagaggtcatcatcagggattcaccagtcctgcccgtcacactgcagtgcaaccttacctcttcctcacataccctgacatattcatattggacgaagaacggcgtggaactatccgctactcggaagaatgcgtctaatatggagtatcggataaataagcccagagcggaggattccggcgagtatcactgcgtctaccatttcgtgagtgctccgaaagctaatgctaccatagaggttaaggccgctccggacatcaccggccacaaacggtcggaaaacaagaatgaagggcaggacgctaccatgtattgtaaaagcgtgggttatccccaccctgactggatatggcgcaagaaggaaaacgggatgccaatggatatcgtcaacacgtccggcagattttttatcattaacaaagagaattacactgagctcaacatcgtgaacctgcagatcacggaagacccaggggagtacgaatggtgtggcgctacctggcctcacagcggcctctcttgggagttctggttgaagctaagttctctttggtag

SEQ ID NO: 314446 - DNA, 1205 bp, Artificial Sequence
  derived and/or modified sequence
agcgaaggtctcgcgaggcctgggcgctgcggcggcaggaggaggacggggaaggacggagccgagccgcggctgcctccctcgctcactccctcgcgcactcgcccgccccctccctccctcccctcccttccccggccccggctctggccccggcccattcgctgttgggtcttctgctagggaggatgtcgggttcgtcgctgcccagcgccctggccctctcgctgttgctggtctctggctccctcctcccagggccaggcgccgctcagaacgctgggtttgtcaagtcgcccatgtcagaaactaagctcacgggggacgcctttgagctgtactgtgacgtggtcgggagccccacgccagagatccagtggtggtacgcagaagtcaaccgggcagagtctttcagacagctgtgggacggtgctcggaagcgccgtgtcaccgtaaacaccgcctacgggtcaaacggcgtgagtgtgctgagaataacccggctcaccttggaggactctgggacttacgagtgcagggccagcaacgaccccaagaggaatgacttgaggcaaaacccctccataacatggattcgagcccaggccaccataagcgtccttcagaagccaaggattgtcaccagtgaagaggtcattattcgagacagccctgttctccctgtcaccctgcagtgtaacctcacctccagctctcacacccttacatacagctactggacaaagaatggggtggaactgagtgccactcgtaagaatgccagcaacatggagtacaggatcaataagccgagagctgaggattcaggcgaataccactgcgtatatcactttgtcagcgctcctaaagcaaacgccaccattgaagtgaaagccgctcctgacatcactggccataaacggagtgagaacaagaatgaagggcaggatgccactatgtattgcaagtcagttggctacccccacccagactggatatggcgcaagaaggagaacgggatgcccatggacattgtcaatacctctggccgcttcttcatcatcaacaaggaaaattacactgagttgaacattgtgaacctgcagatcacggaagaccctggcgagtatgaatggtgcggagccacctggccccactctggcctttcttgggaattctggctgaaattatcatccttgtggtga

SEQ ID NO: 314447 - DNA, 1017 bp, Artificial Sequence
  derived and/or modified sequence
atgtcgggtagcagtctcccaagtgcccttgctttaagcctgctcctcgtaagcggatccttgttgcccggtccaggggcagcacaaaatgccggatttgtgaaatccccaatgtctgagacaaagctgactggagacgcattcgagctttattgtgatgtggtgggctccccgactcccgaaatccaatggtggtatgctgaggtgaaccgggcagagtctttccgacagctttgggacggcgcacgaaagaggagggtgacggtgaatactgcatatggctcaaacggagtctctgtgctgcgcatcacccgcctcactcttgaggactctggcacatatgaatgcagagcgtcaaatgaccctaagcggaacgatctgcggcagaaccccagtatcacttggatccgagcgcaggctacaatcagcgttctgcagaaacctagaatcgtgacctccgaggaagtcatcatccgggactcgccagtcctacccgtgaccttgcaatgcaacctaacctcatcttctcacacactaacctatagttattggaccaaaaacggagtggagttgtctgccaccaggaagaatgctagcaacatggagtacagaatcaacaagcccagagcagaggattccggagagtatcactgcgtctatcactttgtctctgcccctaaggctaacgctacaattgaggtgaaggctgcacctgatataactggacataaaagaagcgagaacaagaacgaggggcaggatgccacaatgtactgcaagagtgtggggtaccctcatccagactggatctggcggaagaaagaaaatggcatgccaatggacatagtaaatacttcaggcagattctttattattaataaggaaaactacacggaattaaacatcgttaacctgcagatcaccgaagaccctggtgaatatgagtggtgcggggctacctggccacattctggattatcttgggagttttggcttaagctctccagcctgtggtag

SEQ ID NO: 314448 - DNA, 1017 bp, Artificial Sequence
  derived and/or modified sequence
atgagcggcagcagcctgcccagcgccctggccctgagcctgctgctggtgagcggcagcctgctgcccggccccggcgccgcccagaacgccggcttcgtgaagagccccatgagcgagaccaagctgaccggcgacgccttcgagctgtactgcgacgtggtgggcagccccacccccgagatccagtggtggtacgccgaggtgaacagagccgagagcttcagacagctgtgggacggcgccagaaagagaagagtgaccgtgaacaccgcctacggcagcaacggcgtgagcgtgctgagaatcaccagactgaccctggaggacagcggcacctacgagtgcagagccagcaacgaccccaagagaaacgacctgagacagaaccccagcatcacctggatcagagcccaggccaccatcagcgtgctgcagaagcccagaatcgtgaccagcgaggaggtgatcatcagagacagccccgtgctgcccgtgaccctgcagtgcaacctgaccagcagcagccacaccctgacctacagctactggaccaagaacggcgtggagctgagcgccaccagaaagaacgccagcaacatggagtacagaatcaacaagcccagagccgaggacagcggcgagtaccactgcgtgtaccacttcgtgagcgcccccaaggccaacgccaccatcgaggtgaaggccgcccccgacatcaccggccacaagagaagcgagaacaagaacgagggccaggacgccaccatgtactgcaagagcgtgggctacccccaccccgactggatctggagaaagaaggagaacggcatgcccatggacatcgtgaacaccagcggcagattcttcatcatcaacaaggagaactacaccgagctgaacatcgtgaacctgcagatcaccgaggaccccggcgagtacgagtggtgcggcgccacctggccccacagcggcctgagctgggagttctggctgaagctgagcagcctgtggtag

SEQ ID NO: 314449 - protein, 342 aa, Artificial Sequence
  derived and/or modified sequence
MVVVEQIKSQKIHGCQILETVYKHSCGGLPPVRSALEKILAVCHGVMYKQLSAWMLHGLLLDQHEEFFIKQGPSSGNVSAQPEEDEEDLGIGGLTGKQLRELQDLRLIEEENMLAPSLKQFSLRVEILPSYIPVRVAEKILFVGESVQMFENQNVNLTRKGSILKNQEDTFAAELHRLKQQPLFSLVDFEQVVDRIRSTVAEHLWKLMVEESDLLGQLKIIKDFYLLGRGELFQAFIDTAQHMLKTPPTAVTEHDVNVAFQQSAHKVLLDDDNLLPLLHLTIEYHGKEHKADATQAREGPSRETSPREAPASGWAALGLSYKVQWPLHILFTPAVLEKNRQF

SEQ ID NO: 314450 - DNA, 1029 bp, Artificial Sequence
  derived and/or modified sequence
atggtggtggtggagcagatcaagagccagaagatccacggctgccagatcctggagaccgtgtacaagcacagctgcggcggcctgccccccgtgagaagcgccctggagaagatcctggccgtgtgccacggcgtgatgtacaagcagctgagcgcctggatgctgcacggcctgctgctggaccagcacgaggagttcttcatcaagcagggccccagcagcggcaacgtgagcgcccagcccgaggaggacgaggaggacctgggcatcggcggcctgaccggcaagcagctgagagagctgcaggacctgagactgatcgaggaggagaacatgctggcccccagcctgaagcagttcagcctgagagtggagatcctgcccagctacatccccgtgagagtggccgagaagatcctgttcgtgggcgagagcgtgcagatgttcgagaaccagaacgtgaacctgaccagaaagggcagcatcctgaagaaccaggaggacaccttcgccgccgagctgcacagactgaagcagcagcccctgttcagcctggtggacttcgagcaggtggtggacagaatcagaagcaccgtggccgagcacctgtggaagctgatggtggaggagagcgacctgctgggccagctgaagatcatcaaggacttctacctgctgggcagaggcgagctgttccaggccttcatcgacaccgcccagcacatgctgaagaccccccccaccgccgtgaccgagcacgacgtgaacgtggccttccagcagagcgcccacaaggtgctgctggacgacgacaacctgctgcccctgctgcacctgaccatcgagtaccacggcaaggagcacaaggccgacgccacccaggccagagagggccccagcagagagaccagccccagagaggcccccgccagcggctgggccgccctgggcctgagctacaaggtgcagtggcccctgcacatcctgttcacccccgccgtgctggagaagaacagacagttctag

SEQ ID NO: 314451 - DNA, 1029 bp, Artificial Sequence
  derived and/or modified sequence
atggttgttgtcgagcagattaagtctcagaagatccacgggtgccagatcctggagactgtctataaacactcatgcggaggcctacctcccgttcgcagtgctcttgagaaaatactggccgtctgtcacggtgttatgtacaaacagttgagcgcttggatgttgcatggactccttctagaccagcatgaggaatttttcataaagcaggggccgtcttccgggaacgtcagcgcacagccggaggaggacgaggaggatttgggcatagggggtttgacagggaagcaattgagggagctccaagatctcagactgattgaggaagagaatatgcttgcccccagccttaagcagttcagccttagagttgaaatcctgccgagttacatccctgtgagggtggctgaaaaaatccttttcgtgggagaaagcgttcagatgttcgaaaaccagaatgtgaatttgacaaggaaagggagcatactgaagaaccaggaggacacctttgcagcggaactgcaccgcctgaagcaacagcctctctttagcctggtggattttgagcaagtggtggaccgcatcagatccacggtggccgagcacctttggaagttgatggttgaagagagtgaccttcttggtcagctgaagattattaaggacttctatcttctcggccgcggggagctctttcaggcctttattgataccgctcagcacatgctgaaaacacccccaactgccgtgaccgagcacgacgtcaacgtcgcctttcaacaatctgcccataaggtgttgctggatgatgataacctgttacctcttctgcacctgacgatagagtatcacggcaaagaacacaaggccgacgccacccaagcccgggaagggccaagcagagagaccagcccaagggaagctccagcctcaggatgggccgccctgggtctgtcctacaaagtacagtggccccttcacattctctttacacctgctgtgttagagaaaaacaggcaattctag

SEQ ID NO: 314452 - DNA, 1029 bp, Artificial Sequence
  derived and/or modified sequence
atggtggtggtggagcagatcaagagccagaagatccacggctgccagatcctggagaccgtgtacaagcacagctgtggcggcctgccccctgtgcgcagcgccctggagaagatcctggccgtgtgccacggcgtgatgtacaagcagctgagcgcctggatgctgcacggcctgctgctggaccagcacgaggagttcttcatcaagcagggccccagcagtggaaatgtgtctgcccagcctgaggaggatgaggaggacctgggcattggaggcctgaccgggaagcagctgcgggagctgcaggacctgcggctcatcgaggaggagaacatgctggcccccagcctgaagcagttcagcctgcgggtggagatcctgcccagctacatccctgtgcgggtggccgagaagatcctgtttgtgggggagagcgtgcagatgtttgagaaccagaatgtgaacctgaccaggaagggcagcatcctgaagaaccaggaggacacctttgctgctgagctgcaccggctgaagcagcagcccctcttcagcctggtggactttgagcaggtggtggaccgcatccgcagcacagtggccgagcacctgtggaagctgatggtggaggagagtgacctgctgggccagctgaagatcatcaaggacttctacctgctgggccgcggggagctgttccaggccttcatcgacacagcccagcacatgctgaagaccccacccacagctgtgacagaacatgatgtgaatgtggccttccagcagagcgcccacaaggtgctgctggatgatgacaacctgctgcccctgctgcacctgaccatcgagtaccacggcaaggagcacaaggcagatgccacccaggcccgggagggccccagccgggagaccagcccccgggaggccccagccagcggctgggccgccctgggcctgagctacaaggtgcagtggcccctgcacatcctcttcaccccagctgtgctggagaagaaccggcagttctag

SEQ ID NO: 314453 - DNA, 1029 bp, Artificial Sequence
  derived and/or modified sequence
atggtggtggtggagcagatcaagagccagaagatccacggctgccaaatacttgaaacagtgtacaaacactcctgtggcggactgccccccgtgcggtctgccctagaaaagatcttggcagtgtgccatggagtgatgtacaaacagttatctgcttggatgctgcatggcttgctcctggaccagcatgaagaattcttcatcaagcaaggaccctcatctgggaacgtatccgcccagcccgaagaggacgaagaagatcttggcattggtgggctgaccggaaagcagctgcgcgaactgcaggatctgcgcctaatagaagaagagaatatgttggcccctagtctaaaacaatttagcttaagggtcgaaattctcccaagctatattcctgtgagagtggccgagaaaatcctgttcgtgggagaatctgtccagatgttcgaaaatcagaatgttaatctgactcggaaaggaagtatcctgaagaatcaggaggacacattcgctgccgaacttcatagactgaaacagcagcccttgttcagcctagtcgacttcgagcaagtggtggatagaattcgttctaccgtcgctgagcacctttggaagctcatggtcgaagagtctgatctcctggggcagctcaagatcattaaggacttctacctgcttggtcgtggagagttgtttcaggcctttatagatacggcgcagcacatgctcaagactcctccaactgcggtgactgaacacgatgtaaatgtcgcgtttcagcaaagcgctcataaggttcttctagacgacgacaacctactgccgctcctgcaccttacaattgagtatcatgggaaggaacacaaagccgatgctacacaagctcgggagggccctagcagagagactagcccgcgggaggctcctgcaagtggatgggcagccctggggctgagctacaaggtgcaatggcccctccacatactcttcacccctgccgtcctcgaaaaaaacaggcagttttag

SEQ ID NO: 314454 - DNA, 1029 bp, Artificial Sequence
  derived and/or modified sequence
atggtcgtggtagagcagataaagagccagaagattcacggttgccagatcctagagactgtgtacaagcacagttgtggaggactcccacccgttcggtccgctcttgaaaagatccttgctgtatgccacggagtaatgtataagcagcttagcgcatggatgcttcacggtctcctcctggatcagcacgaggagtttttcattaaacaaggaccctcctcgggtaatgtgtctgcccagccagaagaggatgaagaagacctcggcatcggtggcctgacaggcaagcagttgcgagagctgcaagacctacgactgatcgaggaagagaacatgctggcaccatctcttaagcagttttcactgagagtagagattctgccgtcgtacatccctgtgagagtggccgagaaaatcctatttgtcggggaatctgtgcaaatgtttgaaaatcaaaacgtcaatttaacccggaaaggatccattttaaagaaccaagaggacacattcgcggctgaactccaccgtctcaaacagcagccactcttcagtctcgtggactttgagcaggtagttgacagaatccggtctaccgtggccgagcatctgtggaaactgatggtggaggaatccgacttgcttggtcagctcaagattattaaggatttctaccttctgggaaggggcgaactgttccaagcattcattgatactgctcaacatatgctgaagactccaccaactgccgtgactgaacatgacgtgaacgtagccttccaacagagcgcgcataaagtactgctggatgacgacaacctgctcccactcctgcatcttaccatcgagtaccacggaaaggagcacaaggcagacgctacacaagcccgagaggggccatctagggaaaccagtcccagggaggcccctgcaagtggctgggctgccctgggcctgtcctacaaggtccaatggccgcttcatatcctttttacaccagccgtgctggagaaaaatcggcagttttag

SEQ ID NO: 314455 - DNA, 312 bp, Artificial Sequence
  derived and/or modified sequence
atggcaaagggcttctatatttccaagagtctgggaatcctgggaattctattgggcgtggccgccgtgtgcactattattgccctttctgtcgtctatagccaggagaaaaataagaacgcaaacagttccccagtggcctcaactacacctagcgccagtgccaccactaaccccgcctcagccacgacactggatcagtcaaaggcgtggaaccgatacagactgccaaataccctcaaacccgacagttacagggtaaccctccgcccctaccttacaccaaacgatagaggcctgtatgtgttctag

SEQ ID NO: 314456 - DNA, 186 bp, Artificial Sequence
  derived and/or modified sequence
atggctaagggtttttatatctcgaagagtctgggcatcctggggatccttctaggagtggccgccgtgtgtacaattattgccctttccgttgtgtattcgcaggagaagaacaaaaatgccaacagtagccctgtggcatctactacgcccagcgcttcagccaccactaacccagcttcatag

SEQ ID NO: 314457 - DNA, 312 bp, Artificial Sequence
  derived and/or modified sequence
atggccaagggcttctacatcagcaagagcctgggcatcctgggcatcctgctgggcgtggccgctgtgtgcaccatcatcgccctgtctgtggtgtacagccaggagaagaacaagaatgccaacagcagccctgtggccagcaccacccccagcgccagcgccaccaccaacccagccagcgccaccaccctggaccagagcaaggcctggaaccgctaccgcctgcccaacaccctgaagccagacagctacagagtgaccctgcggccctacctgaccccaaatgaccggggcctgtatgtgttctag

SEQ ID NO: 314458 - DNA, 186 bp, Artificial Sequence
  derived and/or modified sequence
atggccaagggcttctacatcagcaagagcctgggcatcctgggcatcctgctgggcgtggccgctgtgtgcaccatcatcgccctgtctgtggtgtacagccaggagaagaacaagaatgccaacagcagccctgtggccagcaccacccccagcgccagcgccaccaccaacccagccagctag

SEQ ID NO: 314459 - DNA, 312 bp, Artificial Sequence
  derived and/or modified sequence
atggccaagggcttctacatcagcaagagcctgggcatcctgggcattttgctgggcgtcgctgccgtctgtacaattatcgcacttagtgtggtatattcccaggaaaaaaacaagaatgcgaattctagccctgtcgcctctacaacaccctctgcatctgcaactacaaatcccgcatccgctaccacacttgaccagagtaaggcctggaatcgctatagattacctaatacattgaaaccggattcttaccgtgtgaccctgcgaccttatctgacccctaatgaccgaggcttatatgtgttctag

SEQ ID NO: 314460 - DNA, 186 bp, Artificial Sequence
  derived and/or modified sequence
atggccaagggcttctacatcagcaagagcctgggcatcctgggcatcctgctgggtgtagccgcagtatgtacaattatagccctcagcgtggtctactcgcaagagaagaacaaaaatgcaaacagctcaccagtcgcgagtaccacaccatctgcctccgcaaccacaaatcccgctagctag

SEQ ID NO: 314461 - DNA, 312 bp, Artificial Sequence
  derived and/or modified sequence
atggccaagggattctatatctccaaaagcctgggaattctgggaatactgctgggagtcgcggcagtatgtaccatcatcgctcttagtgttgtttattctcaggaaaagaacaaaaacgcgaacagtagccctgtggcatctaccaccccttcggcttctgccactacgaatcctgcatcggccacaaccttagatcagtccaaggcatggaatcgctatcggctgcctaatacgctgaagcctgattcatatagagtgaccctccgaccttatctgacaccaaacgatcggggactctacgtgttctag

SEQ ID NO: 314462 - DNA, 186 bp, Artificial Sequence
  derived and/or modified sequence
atggctaaggggttctacataagcaagagcctggggatcctgggcattttactcggggtggccgctgtctgtaccattattgcattgtcagttgtctactcccaggagaagaataaaaacgcaaactcctcccctgtcgcatcaactacaccgtccgcgtctgcgacaaccaaccccgcaagctag

SEQ ID NO: 314463 - DNA, 663 bp, Artificial Sequence
  derived and/or modified sequence
gagcgacagagcgagactctgtctcaaaaacaaataaaggaaaaagaaaaaaatgagaagcgcgtgttcccgactccggtgctttttcgcaaggtcgtgctactgcgccttctgaactacgagtcccaggcaccccccgagcccagctccacacaccgttcctggatctcctctccccaggcggagcgtgcccctgcccagtccagtgaccttcgcctgttggagccctggttaatttttgcccagtctgcctgttgtggggctcctcccctttggggatataagcccggcctggggctgctccgttctctgcctggcctgaggctccctgagccgcctccccaccatcaccatggccaagggcttctatatttccaagtccctgggcatcctggggatcctcctgggcgtggcagccgtgtgcacaatcatcgcactgtcagtggtgtactcccaggagaagaacaagaacgccaacagctcccccgtggcctccaccaccccgtccgcctcagccaccaccaaccccgcctcggccaccaccttggaccaaagtaaagcgtggaatcgttaccgcctccccaacacgctgaaacccgattcctaccgggtgacgctgagaccgtacctcacccccaatgacaggggcctgtacgtttttaa

SEQ ID NO: 314464 - DNA, 638 bp, Artificial Sequence
  derived and/or modified sequence
gaggagtccagtgctggaggggcagggacggcggcggcgcagctcggaacccgccagggtccagggtccaggttccagcgcccggcggcccagctctcaagcagatcaatgcaatgccacctggccgcttgctttgcccactgggcctacagccggaagcctgcccttcagccctcgggcctgatcccaggccgcctgcagcctgtaaccagacactgtttgcttccagcaggcaccccccgagcccagctccacacaccgttcctggatctcctctccccaggcggagcgtgcccctgcccagtccagtgaccttcgcctgttggagccctggttaatttttgcccagtctgcctgttgtggggctcctcccctttggggatataagcccggcctggggctgctccgttctctgcctggcctgaggctccctgagccgcctccccaccatcaccatggccaagggcttctatatttccaagtccctgggcatcctggggatcctcctgggcgtggcagccgtgtgcacaatcatcgcactgtcagtggtgtactcccaggagaagaacaagaacgccaacagctcccccgtggcctccaccaccccgtccgcctcagccaccaccaaccccgcctcg

SEQ ID NO: 314465 - DNA, 312 bp, Artificial Sequence
  derived and/or modified sequence
atggccaagggcttctacatcagcaagagcctgggcatcctgggcatcctgctgggcgtggccgccgtgtgcaccatcatcgccctgagcgtggtgtacagccaggagaagaacaagaacgccaacagcagccccgtggccagcaccacccccagcgccagcgccaccaccaaccccgccagcgccaccaccctggaccagagcaaggcctggaacagatacagactgcccaacaccctgaagcccgacagctacagagtgaccctgagaccctacctgacccccaacgacagaggcctgtacgtgttctag

SEQ ID NO: 314466 - DNA, 186 bp, Artificial Sequence
  derived and/or modified sequence
atggccaagggcttctacatcagcaagagcctgggcatcctgggcatcctgctgggcgtggccgccgtgtgcaccatcatcgccctgagcgtggtgtacagccaggagaagaacaagaacgccaacagcagccccgtggccagcaccacccccagcgccagcgccaccaccaaccccgccagctag

SEQ ID NO: 314467 - protein, 339 aa, Artificial Sequence
  derived and/or modified sequence
MSTVHEILCKLSLEGDHSTPPSAYGSVKAYTNFDAERDALNIETAIKTKGVDEVTIVNILTNRSNAQRQDIAFAYQRRTKKELASALKSALSGHLETVILGLLKTPAQYDASELKASMKGLGTDEDSLIEIICSRTNQELQEINRVYKEMYKTDLEKDIISDTSGDFRKLMVALAKGRRAEDGSVIDYELIDQDARDLYDAGVKRKGTDVPKWISIMTERSVPHLQKVFDRYKSYSPYDMLESIRKEVKGDLENAFLNLVQCIQNKPLYFADRLYDSMKGKGTRDKVLIRIMVSRSEVDMLKIRSEFKRKYGKSLYYYIQQDTKGDYQKALLYLCGGDD

SEQ ID NO: 314468 - protein, 176 aa, Artificial Sequence
  derived and/or modified sequence
MSTVHEILCKLSLEGDHSTPPSAYGSVKAYTNFDAERDALNIETAIKTKGVDEVTIVNILTNRSNAQRQDIAFAYQRRTKKELASALKSALSGHLETVILGLLKTPAQYDASELKASMKGLGTDEDSLIEIICSRTNQELQEINRVYKEMYKTDLEKDIISDTSGDFRKLMVALAK

SEQ ID NO: 314469 - protein, 134 aa, Artificial Sequence
  derived and/or modified sequence
MSTVHEILCKLSLEGDHSTPPSAYGSVKAYTNFDAERDALNIETAIKTKGVDEVTIVNILTNRSNAQRQDIAFAYQRRTKKELASALKSALSGHLETVILGLLKTPAQYDASELKASMKGLGTDEDSLIEIICS

SEQ ID NO: 314470 - protein, 133 aa, Artificial Sequence
  derived and/or modified sequence
MSTVHEILCKLSLEGDHSTPPSAYGSVKAYTNFDAERDALNIETAIKTKGVDEVTIVNILTNRSNAQRQDIAFAYQRRTKKELASALKSALSGHLETVILGLLKTPAQYDASELKASMKGLGTDEDSLIEIIC

SEQ ID NO: 314471 - protein, 149 aa, Artificial Sequence
  derived and/or modified sequence
MSTVHEILCKLSLEGDHSTPPSAYGSVKAYTNFDAERDALNIETAIKTKGVDEVTIVNILTNRSNAQRQDIAFAYQRRTKKELASALKSALSGHLETVILGLLKTPAQYDASELKASMKGLGTDEDSLIEIICSRTNQELQEINRVYKE

SEQ ID NO: 314472 - protein, 119 aa, Artificial Sequence
  derived and/or modified sequence
MSTVHEILCKLSLEGDHSTPPSAYGSVKAYTNFDAERDALNIETAIKTKGVDEVTIVNILTNRSNAQRQDIAFAYQRRTKKELASALKSALSGHLETVILGLLKTPAQYDASELKASMK

SEQ ID NO: 314473 - protein, 227 aa, Artificial Sequence
  derived and/or modified sequence
MSTVHEILCKLSLEGDHSTPPSAYGSVKAYTNFDAERDALNIETAIKTKGVDEVTIVNILTNRSNAQRQDIAFAYQRRTKKELASALKSALSGHLETVILGLLKTPAQYDASELKASMKGLGTDEDSLIEIICSRTNQELQEINRVYKEMYKTDLEKDIISDTSGDFRKLMVALAKGRRAEDGSVIDYELIDQDARDLYDAGVKRKGTDVPKWISIMTERSVPHLQK

SEQ ID NO: 314474 - protein, 110 aa, Artificial Sequence
  derived and/or modified sequence
MSTVHEILCKLSLEGDHSTPPSAYGSVKAYTNFDAERDALNIETAIKTKGVDEVTIVNILTNRSNAQRQDIAFAYQRRTKKELASALKSALSGHLETVILGLLKTPAQYD

SEQ ID NO: 314475 - DNA, 1020 bp, Artificial Sequence
  derived and/or modified sequence
atgtccaccgtgcacgagatcctgtgcaagctcagccttgaaggggaccatagtacgccaccctcagcatacggcagcgtaaaggcctacacaaattttgatgccgagagagacgccctaaatattgagactgccattaaaacaaagggcgttgacgaagtgaccatcgtcaatatcctgactaacagaagcaatgcccagagacaggatatcgcatttgcttaccagagacgcacgaagaaggagttggcaagcgccctcaagagcgcgctctctggtcatctggagacagtaattctgggactcctgaagactccagctcagtacgatgctagcgaactcaaagcgtctatgaaagggttgggtaccgatgaggacagcttaatagagataatatgcagtcgcactaaccaggaattgcaagagatcaacagagtatataaagagatgtataaaacagatctggagaaggacatcatcagtgatacaagtggcgattttagaaaactgatggtggctctggccaaggggagaagagccgaagacggcagtgtcattgattatgaactgattgatcaggatgctcgcgatctttacgatgccggagtgaagcgaaaagggacggatgtgccaaagtggatctctattatgaccgaacggtcagtcccccacctgcagaaagtatttgatcgatataagtcctacagcccatatgacatgctggagagcatcagaaaggaggtcaagggggaccttgaaaacgcttttctgaatctcgttcagtgtatccagaataaacctctctactttgcggaccgcctctacgactcaatgaaaggaaaagggacaagggataaagttctgatacgcataatggtcagcagatccgaggtggacatgctgaaaattaggtctgagttcaagagaaagtacggaaagagtttgtactactatatccagcaggacactaaaggcgactatcagaaagcacttctgtatttatgtggcggcgatgattag

SEQ ID NO: 314476 - DNA, 1020 bp, Artificial Sequence
  derived and/or modified sequence
atgagtacggtgcacgagatcctgtgtaagctgagtttggaaggcgatcattccacacctcccagcgcttatgggtctgttaaagcctacacgaacttcgatgccgaaagagatgccctgaacattgaaacagcgataaagacaaagggggtggacgaggtcactattgtaaacatactgacaaaccgctcgaacgctcagcgccaggatatcgccttcgcttatcaacgacgtaccaaaaaggagcttgcatccgcactaaagagcgcactgagcggccatctcgagactgtaattctgggtctgctcaagacccctgcacagtatgatgccagtgagctcaaggcttctatgaaagggctcggtaccgacgaggacagcctcattgaaattatatgcagccgtactaaccaggagctgcaagagatcaaccgagtgtataaagagatgtataaaaccgacctcgagaaggatatcatcagcgatacctcaggcgattttcgaaagctgatggtggcgctcgccaaggggcggcgggctgaggacgggagcgtcattgactacgaattgattgatcaggacgctagggatctgtacgacgccggtgtgaaacggaagggaacagacgtcccaaaatggatttcaattatgaccgagcggtctgttcctcacctgcaaaaagtctttgaccgctacaaaagttatagtccttatgacatgctcgaaagcatccggaaggaggtgaaaggggacctggagaacgcttttctgaatctggttcagtgcatccagaacaagcctctttacttcgcggaccggctctatgactcaatgaaaggcaaagggactcgagacaaggtgctgatccgcataatggtctctcgatccgaggtggacatgttgaaaatcaggagtgagtttaaacgcaagtatggaaagtccctctattattatattcagcaggacaccaagggcgactatcagaaagccctcctctatctgtgtggcggggacgactag

SEQ ID NO: 314477 - DNA, 1020 bp, Artificial Sequence
  derived and/or modified sequence
atgtcaactgtgcatgagattttgtgcaagctctctcttgagggcgaccactcaacacccccgtcagcctatggatctgtaaaggcctatacaaattttgatgcagagcgggacgctctgaacatcgagacagcgatcaagacaaagggagtggacgaggtgactatagtaaacattcttaccaatcgatctaacgcacagagacaggatatcgcattcgcgtatcaaaggcggacaaaaaaagaattagcaagtgctctgaaatccgccctttctgggcacctagaaactgttattttaggcctgttgaagactcctgcccagtacgacgcatccgaactgaaagcatccatgaaggggttgggcacggacgaggactctctaatagagattatttgcagccgcaccaaccaggagctgcaggaaatcaaccgtgtgtataaggagatgtacaagacagacctggagaaggacatcattagtgacactagtggagactttaggaagttgatggtggctctcgctaaggggagacgcgctgaggatggttccgtgatcgattacgagcttatagatcaggatgctagagatctgtatgacgcaggcgtgaaaagaaagggcacagatgtgccaaagtggatctcgatcatgacagaacgaagcgtgccccatctgcagaaagtgtttgatagatataagagctactctccctatgatatgctggaatcaataagaaaagaagtaaaaggcgacctggagaacgctttcctcaatcttgtgcagtgcatccaaaacaaaccactctattttgctgatcggttgtatgacagcatgaagggaaaaggaactcgagataaagttctcatacggatcatggtgtccagaagcgaagtcgacatgctgaagatccggtctgagttcaaacggaaatacggcaaaagcttatattattatatacagcaagacacaaagggcgattaccagaaagctctcctgtacctttgcgggggagatgattag

SEQ ID NO: 314478 - DNA, 246 bp, Artificial Sequence
  derived and/or modified sequence
atgtccaccgtgcacgagatcctctgtaagctcagcctggagggggatcatagcacccccccttccgcatacggctccgtcaaagcatacacaaactttgatgccgagcgtgatgcactgaatattgaaacagctatcaaaacaaagggggtggatgaagtgacaattgttaatatactgacgaatcgaagtaacgcccagaggcaggatatcgctttcgcttatcagagacggacaaaaaaatag

SEQ ID NO: 314479 - DNA, 531 bp, Artificial Sequence
  derived and/or modified sequence
atgtccaccgtccatgaaatactgtgcaaactgtccctggagggtgaccactccactccaccatcagcctatggaagcgtcaaagcttacactaacttcgatgcagaacgcgacgccttgaatatcgaaaccgctatcaaaaccaaaggcgtcgacgaagtaacaattgtaaatatactgaccaacagaagcaatgctcagcgccaggacattgctttcgcctatcaacggaggacaaagaaggaactggcatcagccctgaagtccgccctcagtggccatctggaaacagtcatcctgggcctgttgaagacaccggcccagtacgacgcaagtgagttgaaggcttcaatgaagggactaggaaccgatgaagattcccttatagaaattatatgtagtcgaacgaaccaggaacttcaggagatcaacagggtttataaggagatgtacaaaacagatctcgaaaaggacattatatccgacactagcggcgattttaggaagttgatggtggctctcgctaagtag

SEQ ID NO: 314480 - DNA, 144 bp, Artificial Sequence
  derived and/or modified sequence
atgtctaccgtgcacgaaatactgtgtaaattaagtctcgaaggagaccattcaacaccgccatcagcctacgggagtgtcaaggcctatactaacttcgacgctgaacgggatgccctgaacattgaaaccgctatcaaatag

SEQ ID NO: 314481 - DNA, 405 bp, Artificial Sequence
  derived and/or modified sequence
atgagcacagtgcacgagatactgtgtaagctgagtctcgaaggggatcattcgactccaccatccgcttacggttccgttaaggcctatacaaactttgacgcagagcgggatgcgctaaacatagaaacagctattaagacaaagggggtagacgaggtgacgattgtcaacatattgaccaataggtctaatgcgcagcgccaggatattgctttcgcttaccagaggcgcacaaaaaaggaattagccagcgcactcaagagcgcactctccgggcatttagagacggtgatccttgggctccttaagaccccagcccaatatgacgctagcgaacttaaggcatccatgaagggactcggcactgacgaagattctctgatagaaatcatttgttcgtag

SEQ ID NO: 314482 - DNA, 402 bp, Artificial Sequence
  derived and/or modified sequence
atgtctactgtgcacgagatcctgtgtaaactgagtctcgagggggatcactctactccaccaagcgcttacggatccgtgaaggcctacacaaacttcgatgctgagagagacgctttgaatatcgaaacagctatcaagaccaaaggcgtggatgaggtgaccatcgtaaatatcctgaccaaccggagcaacgcccagagacaggacattgcatttgcgtaccagaggcggaccaagaaggagttggcaagtgcacttaaatccgctctctctggccatctggaaactgtgatactggggctgctgaagacccccgcccagtacgacgccagtgaactgaaagcctcgatgaaggggctgggtaccgatgaggatagcttgatcgagatcatttgttag

SEQ ID NO: 314483 - DNA, 450 bp, Artificial Sequence
  derived and/or modified sequence
atgtccaccgtgcatgagattctttgtaaactttccctggaaggggaccacagcacccctccctctgcgtacggctcagtaaaggcctacaccaacttcgatgccgaacgcgatgccttaaacatcgaaaccgctattaaaacgaagggagtggatgaagttaccatcgtcaatattctgaccaatcgttccaatgcacagcggcaagacattgccttcgcctatcagcggaggactaagaaggaattagcctccgcgctaaaaagcgcgttatccggccaccttgagaccgtcattctgggcctgctgaaaacacccgcgcagtacgacgcttctgaattgaaagcctcaatgaagggcttgggaacagatgaggattcccttattgaaatcatttgcagtcggaccaaccaggagctgcaggaaataaatcgggtgtacaaagagtag

SEQ ID NO: 314484 - DNA, 198 bp, Artificial Sequence
  derived and/or modified sequence
atgtcaacagtgcacgagatactctgcaaactttccttggagggcgaccactccactcccccatctgcctatggatctgtgaaagcctacacaaattttgatgccgaacgagacgcactgaatatagagaccgcgattaagaccaaaggcgtggacgaggtgactatcgtgaacatcctgactaatagatccaattag

SEQ ID NO: 314485 - DNA, 360 bp, Artificial Sequence
  derived and/or modified sequence
atgtcgacagtgcacgagatcctctgtaagctgagtttggaaggggatcacagtacccccccctcagcatacgggtccgtgaaggcctacactaatttcgacgccgagcgggacgcactgaatatcgagaccgcgattaagactaagggcgtggatgaggtcaccatagtgaacatcttgactaaccggagcaacgcacagcgccaggacattgccttcgcctatcagagacgcaccaaaaaagagctcgcgagtgcccttaagagcgctctgtcagggcacttagaaacagtcatcctggggctgctgaaaactcctgctcaatacgacgcctccgagttgaaagcttctatgaaatag

SEQ ID NO: 314486 - DNA, 771 bp, Artificial Sequence
  derived and/or modified sequence
atgtccacggtccacgagatcctttgtaagctctctctagaaggcgatcacagcacccccccatcagcatatggctccgttaaggcttatacaaattttgacgccgaaagggatgcccttaatatcgaaacagccatcaaaaccaagggggtcgacgaagtaaccatcgtcaatatattaaccaaccgctctaacgcgcaaaggcaggacattgcctttgcttatcagcgccggaccaagaaggagctcgccagcgcattaaaaagcgcactgtctggacatctagagactgtgatcttaggactgctaaaaacgcctgcccagtatgacgcctcggagctgaaggcttccatgaagggccttggcacagatgaggacagcctgatcgaaattatatgtagccgaaccaaccaggagctgcaggaaattaacagggtatataaggaaatgtataaaaccgacctcgagaaggacatcatctctgatacatctggagacttcagaaagctaatggtcgcactcgcaaaggggaggcgtgccgaggatggctccgtgattgactatgaacttatcgatcaagatgccagggacctctatgacgccggagtgaaacggaaggggaccgatgtccccaaatggatttcgattatgaccgagcgttccgtgccgcatcttcagaaagtgttcgaccgctacaagagctatagcccgtacgatatgctggagtccattcgtaaagaggtaaaaggagatctggaaaacgccttttag

SEQ ID NO: 314487 - DNA, 360 bp, Artificial Sequence
  derived and/or modified sequence
atgtccacagttcacgagatcttatgtaaattaagtctggagggggatcattctacacctccctccgcgtacggttctgtgaaggcctacaccaattttgatgctgaacgtgatgccctgaacatagaaacggccatcaagaccaagggcgttgatgaagtgactatagttaacattctcaccaatcgttcaaatgcccagcgccaagatattgccttcgcctatcaaaggagaacgaaaaaagaactggcctcagccctcaaatcagccttgtcgggtcaccttgagacggtcatcctcgggcttttgaagacccctgcacagtacgacgcctccgagctgaaggcatccatgaaatag

SEQ ID NO: 314488 - DNA, 531 bp, Artificial Sequence
  derived and/or modified sequence
atgtctaccgtccacgagatcctgtgtaaactgtccttggaaggcgaccattctaccccaccgtccgcatatgggtccgtaaaggcgtatactaatttcgacgccgagcgtgatgccttaaacatcgaaacagccatcaaaactaaaggcgtggatgaagtgaccattgtgaatatcctgaccaacagatctaatgcgcaacggcaggacatcgccttcgcataccagaggaggaccaagaaggaactagcatcggcgctgaagtccgctctgagcggacacctagagacggtgatacttgggctactcaagacccctgcccagtacgacgccagcgaacttaaggcctccatgaaaggccttggtacggatgaagatagccttatcgagattatttgctctaggactaatcaagagctccaggagattaaccgagtttacaaggagatgtataagacggacctggagaaagatattattagcgacacctccggggacttcaggaaattgatggtggccttagccaagtag

SEQ ID NO: 314489 - DNA, 684 bp, Artificial Sequence
  derived and/or modified sequence
atgtctaccgtccacgaaatcctttgcaaacttagtctggaaggggatcacagcacgcccccatcggcatacggaagtgtgaaggcctacactaactttgatgcagagagggatgcactgaacatcgagactgcaattaagactaaaggagtggatgaagtaacaattgtgaacatcctgacaaacagaagcaatgcccagcgccaggatattgcctttgcatatcagcgcagaactaagaaggaactggccagcgctctgaaaagcgccctcagtggccacctcgagacagtgatcttggggctgttgaagaccccggcccagtacgatgcttccgaattaaaagcttccatgaaggggctggggacagatgaggacagtttgatcgagattatttgcagccggacaaatcaggaactacaggaaataaaccgggtttacaaggagatgtacaaaacagacttggagaaagatataatatccgatacttctggagacttcaggaagcttatggttgccctggcaaaagggcggagggcagaggacggaagcgtaatcgactacgaactcatcgaccaggatgccagggacctgtacgatgcaggagtgaagcgaaaaggcactgatgtccccaaatggatttcgatcatgacagagcgcagtgttccacatctccagaagtag

SEQ ID NO: 314490 - DNA, 531 bp, Artificial Sequence
  derived and/or modified sequence
atgtcaaccgtgcacgaaattctgtgcaagttaagcctggagggagatcattccaccccgccctcggcctacggatctgtgaaagcgtatacaaatttcgatgctgagagagacgctctgaacattgagacagctattaagaccaaaggggtggatgaggtgactattgtgaatatcctgaccaacaggtctaacgctcagcggcaggatattgcgttcgcctaccagaggcgtaccaagaaggagctggcctccgccttaaagagcgccctgagtggtcacctggagaccgtaatactcggcctgctcaaaacaccggcacaatacgacgcgtccgagctcaaggcctctatgaaggggttaggcacagacgaggattcccttatcgagattatctgtagtcgtacaaatcaagaactgcaggaaatcaatcgcgtgtataaggagatgtacaagactgacctagaaaaagacattatctccgatacttctggtgactttcggaaactcatggttgctctagctaagtag

SEQ ID NO: 314491 - DNA, 333 bp, Artificial Sequence
  derived and/or modified sequence
atgagcacagtgcacgaaatactgtgcaaactaagcctggaaggagatcattctacgcctcccagtgcctatggatcggtcaaggcttacactaattttgatgccgagcgtgacgcactgaacatcgagactgctataaaaactaagggcgtcgacgaggtcactattgttaatatcctgaccaaccgctcgaatgcacagcggcaagatatcgccttcgcatatcaacggcgcacaaagaaagagctggcttccgcactgaaaagcgcactctccggtcatctggagacagttatccttggactgcttaagacgcctgcgcagtacgactag

SEQ ID NO: 314492 - DNA, 1020 bp, Artificial Sequence
  derived and/or modified sequence
atgagcacagtgcatgagatcctgtgcaagctgagcctggagggggaccacagcaccccacccagcgcctacggctctgtgaaggcctacaccaactttgatgctgagagagatgccctgaacatcgagacagccatcaagaccaagggcgtggatgaggtgaccatcgtgaacatcctgaccaacagaagcaatgcccagaggcaggacatcgcctttgcctaccagaggaggaccaagaaggagctggccagcgccctgaagagcgccctgagcggccacctggagaccgtcatcctgggcctgctgaagaccccagcccagtatgatgccagcgagctgaaggcctccatgaagggcctgggcacagatgaggacagcctgattgagatcatctgcagcaggaccaaccaggagctgcaggagatcaacagagtgtacaaggagatgtacaagacagacctggagaaggacatcatcagtgacaccagcggggacttcaggaagctgatggtggccctggccaagggccggcgggcagaagatggcagcgtcatcgactatgagctgattgaccaggatgcccgggacctgtatgatgctggggtgaagaggaagggcacagatgtgcccaagtggatcagcatcatgacagagaggtctgtgccccacctgcagaaggtgtttgaccgctacaagagctacagcccctatgacatgctggagagcatcaggaaggaggtgaagggggacctggagaatgccttcctgaacctggtgcagtgcatccagaacaagcccctgtactttgctgaccggctgtatgacagcatgaagggcaagggcacccgggacaaggtgctgatccgcatcatggtgagccgctctgaggtggacatgctgaagatccgctctgagttcaagaggaaatatggcaagagcctgtactactacatccagcaggacaccaagggggactaccagaaggccctgctgtacctgtgtggaggagatgactag

SEQ ID NO: 314493 - DNA, 246 bp, Artificial Sequence
  derived and/or modified sequence
atgagcacagtgcatgagatcctgtgcaagctgagcctggagggggaccacagcaccccacccagcgcctacggctctgtgaaggcctacaccaactttgatgctgagagagatgccctgaacatcgagacagccatcaagaccaagggcgtggatgaggtgaccatcgtgaacatcctgaccaacagaagcaatgcccagaggcaggacatcgcctttgcctaccagaggaggaccaagaagtag

SEQ ID NO: 314494 - DNA, 531 bp, Artificial Sequence
  derived and/or modified sequence
atgagcacagtgcatgagatcctgtgcaagctgagcctggagggggaccacagcaccccacccagcgcctacggctctgtgaaggcctacaccaactttgatgctgagagagatgccctgaacatcgagacagccatcaagaccaagggcgtggatgaggtgaccatcgtgaacatcctgaccaacagaagcaatgcccagaggcaggacatcgcctttgcctaccagaggaggaccaagaaggagctggccagcgccctgaagagcgccctgagcggccacctggagaccgtcatcctgggcctgctgaagaccccagcccagtatgatgccagcgagctgaaggcctccatgaagggcctgggcacagatgaggacagcctgattgagatcatctgcagcaggaccaaccaggagctgcaggagatcaacagagtgtacaaggagatgtacaagacagacctggagaaggacatcatcagtgacaccagcggggacttcaggaagctgatggtggccctggccaagtag

SEQ ID NO: 314495 - DNA, 144 bp, Artificial Sequence
  derived and/or modified sequence
atgagcacagtgcatgagatcctgtgcaagctgagcctggagggggaccacagcaccccacccagcgcctacggctctgtgaaggcctacaccaactttgatgctgagagagatgccctgaacatcgagacagccatcaagtag

SEQ ID NO: 314496 - DNA, 405 bp, Artificial Sequence
  derived and/or modified sequence
atgagcacagtgcatgagatcctgtgcaagctgagcctggagggggaccacagcaccccacccagcgcctacggctctgtgaaggcctacaccaactttgatgctgagagagatgccctgaacatcgagacagccatcaagaccaagggcgtggatgaggtgaccatcgtgaacatcctgaccaacagaagcaatgcccagaggcaggacatcgcctttgcctaccagaggaggaccaagaaggagctggccagcgccctgaagagcgccctgagcggccacctggagaccgtcatcctgggcctgctgaagaccccagcccagtatgatgccagcgagctgaaggcctccatgaagggcctgggcacagatgaggacagcctgattgagatcatctgcagctag

SEQ ID NO: 314497 - DNA, 402 bp, Artificial Sequence
  derived and/or modified sequence
atgagcacagtgcatgagatcctgtgcaagctgagcctggagggggaccacagcaccccacccagcgcctacggctctgtgaaggcctacaccaactttgatgctgagagagatgccctgaacatcgagacagccatcaagaccaagggcgtggatgaggtgaccatcgtgaacatcctgaccaacagaagcaatgcccagaggcaggacatcgcctttgcctaccagaggaggaccaagaaggagctggccagcgccctgaagagcgccctgagcggccacctggagaccgtcatcctgggcctgctgaagaccccagcccagtatgatgccagcgagctgaaggcctccatgaagggcctgggcacagatgaggacagcctgattgagatcatctgctag

SEQ ID NO: 314498 - DNA, 450 bp, Artificial Sequence
  derived and/or modified sequence
atgagcacagtgcatgagatcctgtgcaagctgagcctggagggggaccacagcaccccacccagcgcctacggctctgtgaaggcctacaccaactttgatgctgagagagatgccctgaacatcgagacagccatcaagaccaagggcgtggatgaggtgaccatcgtgaacatcctgaccaacagaagcaatgcccagaggcaggacatcgcctttgcctaccagaggaggaccaagaaggagctggccagcgccctgaagagcgccctgagcggccacctggagaccgtcatcctgggcctgctgaagaccccagcccagtatgatgccagcgagctgaaggcctccatgaagggcctgggcacagatgaggacagcctgattgagatcatctgcagcaggaccaaccaggagctgcaggagatcaacagagtgtacaaggagtag

SEQ ID NO: 314499 - DNA, 198 bp, Artificial Sequence
  derived and/or modified sequence
atgagcacagtgcatgagatcctgtgcaagctgagcctggagggggaccacagcaccccacccagcgcctacggctctgtgaaggcctacaccaactttgatgctgagagagatgccctgaacatcgagacagccatcaagaccaagggcgtggatgaggtgaccatcgtgaacatcctgaccaacagaagcaactag

SEQ ID NO: 314500 - DNA, 360 bp, Artificial Sequence
  derived and/or modified sequence
atgagcacagtgcatgagatcctgtgcaagctgagcctggagggggaccacagcaccccacccagcgcctacggctctgtgaaggcctacaccaactttgatgctgagagagatgccctgaacatcgagacagccatcaagaccaagggcgtggatgaggtgaccatcgtgaacatcctgaccaacagaagcaatgcccagaggcaggacatcgcctttgcctaccagaggaggaccaagaaggagctggccagcgccctgaagagcgccctgagcggccacctggagaccgtcatcctgggcctgctgaagaccccagcccagtatgatgccagcgagctgaaggcctccatgaagtag

SEQ ID NO: 314501 - DNA, 771 bp, Artificial Sequence
  derived and/or modified sequence
atgagcacagtgcatgagatcctgtgcaagctgagcctggagggggaccacagcaccccacccagcgcctacggctctgtgaaggcctacaccaactttgatgctgagagagatgccctgaacatcgagacagccatcaagaccaagggcgtggatgaggtgaccatcgtgaacatcctgaccaacagaagcaatgcccagaggcaggacatcgcctttgcctaccagaggaggaccaagaaggagctggccagcgccctgaagagcgccctgagcggccacctggagaccgtcatcctgggcctgctgaagaccccagcccagtatgatgccagcgagctgaaggcctccatgaagggcctgggcacagatgaggacagcctgattgagatcatctgcagcaggaccaaccaggagctgcaggagatcaacagagtgtacaaggagatgtacaagacagacctggagaaggacatcatcagtgacaccagcggggacttcaggaagctgatggtggccctggccaagggccggcgggcagaagatggcagcgtcatcgactatgagctgattgaccaggatgcccgggacctgtatgatgctggggtgaagaggaagggcacagatgtgcccaagtggatcagcatcatgacagagaggtctgtgccccacctgcagaaggtgtttgaccgctacaagagctacagcccctatgacatgctggagagcatcaggaaggaggtgaagggggacctggagaatgccttctag

SEQ ID NO: 314502 - DNA, 684 bp, Artificial Sequence
  derived and/or modified sequence
atgagcacagtgcatgagatcctgtgcaagctgagcctggagggggaccacagcaccccacccagcgcctacggctctgtgaaggcctacaccaactttgatgctgagagagatgccctgaacatcgagacagccatcaagaccaagggcgtggatgaggtgaccatcgtgaacatcctgaccaacagaagcaatgcccagaggcaggacatcgcctttgcctaccagaggaggaccaagaaggagctggccagcgccctgaagagcgccctgagcggccacctggagaccgtcatcctgggcctgctgaagaccccagcccagtatgatgccagcgagctgaaggcctccatgaagggcctgggcacagatgaggacagcctgattgagatcatctgcagcaggaccaaccaggagctgcaggagatcaacagagtgtacaaggagatgtacaagacagacctggagaaggacatcatcagtgacaccagcggggacttcaggaagctgatggtggccctggccaagggccggcgggcagaagatggcagcgtcatcgactatgagctgattgaccaggatgcccgggacctgtatgatgctggggtgaagaggaagggcacagatgtgcccaagtggatcagcatcatgacagagaggtctgtgccccacctgcagaagtag

SEQ ID NO: 314503 - DNA, 333 bp, Artificial Sequence
  derived and/or modified sequence
atgagcacagtgcatgagatcctgtgcaagctgagcctggagggggaccacagcaccccacccagcgcctacggctctgtgaaggcctacaccaactttgatgctgagagagatgccctgaacatcgagacagccatcaagaccaagggcgtggatgaggtgaccatcgtgaacatcctgaccaacagaagcaatgcccagaggcaggacatcgcctttgcctaccagaggaggaccaagaaggagctggccagcgccctgaagagcgccctgagcggccacctggagaccgtcatcctgggcctgctgaagaccccagcccagtatgactag

SEQ ID NO: 314504 - DNA, 1020 bp, Artificial Sequence
  derived and/or modified sequence
atgagcaccgtgcacgagatcctgtgcaagctgagcctggagggcgatcactcaacccccccaagtgcatatggatcagtcaaagcctatacaaatttcgatgctgagcgggatgccctaaacattgagactgccattaagacaaagggggtggacgaggtgaccatagtgaacatactgacaaatcggtccaatgcccagcgccaagatatcgcctttgcctatcagcgtaggactaagaaggagctcgcttctgcactgaaatcagcactgtctggacatctggaaaccgtcatcctcgggctgctgaaaacacccgcacagtatgatgcttctgaactaaaggcttccatgaagggcttgggcactgatgaagactcactgattgagatcatttgtagcaggacaaatcaggagctccaggagattaacagggtttacaaggagatgtacaaaaccgatctggaaaaggacattatctcagacacatccggagatttcagaaagctcatggtggcgttggctaaggggaggagggccgaggacgggagcgtgattgactacgaattaatcgaccaagatgcacgcgatttgtatgatgccggcgttaaacggaagggcaccgatgtgccaaagtggattagcatcatgaccgagagaagcgtcccccacctccagaaggtgttcgaccgctataagagctactctccatatgatatgttggaatcaattcggaaagaagtgaagggagacctggaaaatgccttcttgaacctggttcagtgtattcagaacaaacccctgtacttcgccgatagactatatgactccatgaagggcaaaggcacaagagataaagtgttgatcagaattatggtgtcgagaagcgaggtggatatgttgaagatacggtcggagttcaagaggaagtacggcaagtctctgtattattatatccaacaggacacaaaaggagattatcaaaaggccttgctgtacttgtgtggtggcgacgattag

SEQ ID NO: 314505 - DNA, 1020 bp, Artificial Sequence
  derived and/or modified sequence
atgagcaccgtgcacgagatcctgtgcaagctgagcctggagggcgaccactcaacaccaccttccgcttacgggagcgttaaagcatatactaatttcgatgccgaaagagatgcactcaatattgagaccgcaattaagactaagggagtggacgaagtaacaatcgtgaacatcctgaccaaccgcagcaatgctcaacggcaagatattgcctttgcctatcaacggcggacaaagaaggaactggccagcgcactaaagtctgcactgagtggtcatctggaaactgtgatacttggattgctgaagaccccagcccagtacgatgctagcgaactgaaagccagtatgaaggggttgggaaccgacgaagactcactcatcgagattatttgctcacgcaccaaccaagaactgcaggagatcaaccgcgtctataaggagatgtacaagaccgacttggagaaagacattatttccgatacaagcggagactttagaaagcttatggtggcactggccaaaggacggagagcggaagatggcagcgtcatagactatgagcttattgatcaggatgctagagacctctacgatgcgggcgtgaaacggaaaggaactgatgtgccgaagtggatcagcatcatgaccgagaggtcagtgccccacttacagaaagttttcgataggtataaatcatactcaccctacgacatgctggaaagcataagaaaggaagtaaagggtgacttggagaacgcttttttgaacctagtgcagtgtatccaaaacaaacccctgtacttcgccgaccgcctgtacgactctatgaagggcaaagggacaagggacaaagtgctgatcaggatcatggtttcacgaagcgaagtcgatatgctcaagatccgcagcgaatttaagaggaaatatggaaagagcttgtattactacatacagcaggacaccaagggcgactatcagaaggccttactgtatctgtgtggaggcgatgattag

SEQ ID NO: 314506 - DNA, 1020 bp, Artificial Sequence
  derived and/or modified sequence
atgagcaccgtgcacgagatcctgtgcaagctgagcctggagggcgatcattctacgccaccctcagcctacggatccgttaaggcctacaccaactttgacgccgagcgcgatgccctgaacatcgagaccgctattaaaacaaaaggtgtcgacgaagtgacgattgtcaatattctaacaaatcggagcaacgcacagagacaggatattgcatttgcctaccagagacgaaccaaaaaggaactggctagcgccttgaaatcagcgctctctggccacctggagacagtcattctcggtcttctcaagacccccgcacaatacgatgcatccgagctaaaggcctccatgaaaggattagggactgacgaagattccctgatcgagatcatctgttcacgaacaaaccaggaacttcaagaaatcaatcgtgtctataaagaaatgtacaaaaccgacttggagaaggacattattagtgacacaagtggagatttcagaaagcttatggtggccttagcaaaaggtaggcgggccgaggacggcagcgtgatcgattatgagctgatcgatcaagacgctagggacttgtatgacgcgggggtgaagagaaaaggaaccgatgtgcccaaatggatctccatcatgaccgagcgcagtgtgcctcatcttcaaaaagtgtttgaccgctataaatcctacagtccttatgacatgctggagtctatcagaaaggaagtgaagggcgatttagaaaatgcctttctgaacctcgtgcagtgcatccaaaataagccactgtattttgctgaccggctgtacgactccatgaagggcaagggcactagggataaggtccttatcagaatcatggtgagtcgcagtgaagttgacatgttgaaaatcagatccgagttcaagagaaagtacggaaaaagcctttactactacatccaacaggacactaagggcgactaccagaaggccctgctgtatctgtgtgggggagacgactag

SEQ ID NO: 314507 - DNA, 246 bp, Artificial Sequence
  derived and/or modified sequence
atgagcaccgtgcacgagatcctgtgcaagctgagcctggagggcgatcacagtactccaccttccgcatatgggagcgtaaaggcatacactaacttcgacgcagagagagatgctttaaacatcgaaaccgcaattaagaccaagggcgtcgacgaggtgactatcgtaaatatcctgactaaccgatccaatgcacagcgccaagatatagcattcgcatatcaacgaagaacaaaaaagtag

SEQ ID NO: 314508 - DNA, 531 bp, Artificial Sequence
  derived and/or modified sequence
atgagcaccgtgcacgagatcctgtgcaagctgagcctggagggcgaccactcgactccaccttccgcctacggcagcgttaaagcatacactaactttgacgcagaaagagacgccttgaatatagagactgccatcaagaccaagggagttgacgaggtgactattgtgaacattctgacaaaccgaagtaacgcacagcgccaggatatcgcttttgcctaccagcggcgcacgaagaaggaactggcatctgccctaaagagtgcattgtctggacatctagaaacagtcatcttaggcctgcttaagacgcccgcccagtacgacgcttctgagcttaaggcctcaatgaaaggcttggggactgacgaggattccctgatagaaatcatttgcagtagaacgaatcaggaactgcaggaaatcaatcgggtctataaagagatgtacaagacggacctggaaaaggatatcataagcgacacgtcaggtgatttccggaagttgatggtggccctcgctaagtag

SEQ ID NO: 314509 - DNA, 144 bp, Artificial Sequence
  derived and/or modified sequence
atgagcaccgtgcacgagatcctgtgcaagctgagcctggagggcgaccatagtacacccccatctgcttacgggagcgtcaaggcctataccaacttcgacgccgagcgggatgcattgaacatcgaaaccgccattaaatag

SEQ ID NO: 314510 - DNA, 405 bp, Artificial Sequence
  derived and/or modified sequence
atgagcaccgtgcacgagatcctgtgcaagctgagcctggagggcgatcattccaccccacccagtgcatatgggagcgtgaaggcctatactaactttgatgcagagcgagacgctctaaatatagaaaccgctattaagaccaagggagtggatgaagtgacaattgttaatatcttgacaaaccgttctaatgctcagaggcaggacatagcgtttgcataccagagacgaactaaaaaggaactggctagtgcgctgaagtccgccctgagtggtcatctggagacggtgatcctgggccttttgaagactcccgctcagtatgacgcctcggagctgaaagctagcatgaaggggctcggaaccgatgaagattcactcattgaaattatctgctcctag

SEQ ID NO: 314511 - DNA, 402 bp, Artificial Sequence
  derived and/or modified sequence
atgagcaccgtgcacgagatcctgtgcaagctgagcctggagggcgatcactctaccccccctagcgcctacggcagtgtaaaggcttacaccaactttgacgctgaacgggatgccctgaacatcgagactgcaattaagacaaagggagttgatgaagtgacaatcgtgaacatcctcaccaataggagtaacgcccagagacaagacatagcgtttgcatatcagcgaaggaccaagaaggaactggcatccgcacttaagagcgccttatccgggcatttggaaaccgttatattaggacttcttaaaacgccggcacagtatgacgctagcgaattgaaggcctcaatgaagggactgggcactgacgaagatagcctgattgaaattatttgttag

SEQ ID NO: 314512 - DNA, 450 bp, Artificial Sequence
  derived and/or modified sequence
atgagcaccgtgcacgagatcctgtgcaagctgagcctggagggcgatcacagtacacccccaagcgcctacggtagcgttaaagcgtacactaattttgacgccgaaagagacgcgttaaacatagagaccgcaatcaagaccaaaggcgttgacgaggtgacaatagtgaatattctgaccaatcgttctaatgcgcagcgacaggacatcgctttcgcttaccagcgtcggaccaagaaagagctggcgtccgctctcaagagtgccttatcaggacatctagagacagtcattctcgggctgctcaagactccagcgcaatatgacgcaagtgagctgaaggcttccatgaaagggctgggcaccgacgaggatagtctcatcgaaattatctgctcccgaactaatcaggagcttcaagagataaacagagtgtataaggaatag

SEQ ID NO: 314513 - DNA, 198 bp, Artificial Sequence
  derived and/or modified sequence
atgagcaccgtgcacgagatcctgtgcaagctgagcctggagggcgatcattctacccctcccagtgcgtacggcagcgttaaagcctacaccaattttgatgccgaaagagacgctcttaatattgagactgccattaaaacaaagggagtggatgaagttaccatcgtaaacattctgacaaatcggtccaactag

SEQ ID NO: 314514 - DNA, 360 bp, Artificial Sequence
  derived and/or modified sequence
atgagcaccgtgcacgagatcctgtgcaagctgagcctggagggcgaccactctacgcctccatcggcctacggctcagtgaaagcttatacgaactttgatgcggagcgcgacgcgctcaatatcgagactgcaataaaaaccaaaggcgtggacgaagtgactattgttaatatcctgactaaccgcagcaatgcccagagacaggacatcgcatttgcctatcagcgcaggaccaagaaagagctcgcctctgcacttaagagcgccctttctgggcatttggagacagtgatcctggggcttttaaaaacccccgctcaatatgacgccagtgagctcaaggccagtatgaaatag

SEQ ID NO: 314515 - DNA, 771 bp, Artificial Sequence
  derived and/or modified sequence
atgagcaccgtgcacgagatcctgtgcaagctgagcctggagggcgaccactctaccccaccaagtgcgtacggttccgtaaaggcgtacacaaatttcgatgctgagagggatgctttgaacatcgaaaccgcgataaaaaccaaaggcgtcgatgaagtgacgatcgtaaatatactgacaaaccgttctaacgcacaacggcaggacatcgcctttgcttatcaaaggcgaacgaagaaagaactcgcctccgcattgaagagcgccctgtctggacacttggaaactgttatcctgggcctccttaagacccctgctcagtatgacgctagcgagttgaaggcttcgatgaaagggctggggactgacgaagacagcctcatcgagatcatatgcagtcgcaccaatcaggaacttcaggagatcaaccgcgtctacaaagagatgtacaaaactgacctggagaaagatatcatctcagatacaagtggtgatttccgcaagctgatggtggccctggccaaaggacgcagagctgaggatggcagtgtaatagattatgagctgattgaccaagatgctcgtgatttgtacgatgcgggcgtgaaacgtaagggaactgatgttccaaaatggatctctattatgacagagaggtctgtaccccacctgcaaaaggtgttcgatcgatacaagtcgtatagcccatatgacatgttggaaagtatacgcaaggaggtcaaaggagatttggagaatgcattttag

SEQ ID NO: 314516 - DNA, 360 bp, Artificial Sequence
  derived and/or modified sequence
atgagcaccgtgcacgagatcctgtgcaagctgagcctggagggcgatcactctacccctccaagcgcctatggcagtgtcaaagcgtacaccaacttcgacgctgaacgcgacgcactgaatatagagacagcaattaaaaccaagggtgtcgatgaagtcaccatcgtgaacatactgacaaatcgttccaacgcccagcgtcaagatatagcctttgcctatcagcgtaggactaagaaagagctggcctccgcactgaagtctgccttatcaggacatctggagactgtgatcctaggacttctcaaaacaccggcccagtacgatgccagcgagctgaaagctagtatgaagtag

SEQ ID NO: 314517 - DNA, 531 bp, Artificial Sequence
  derived and/or modified sequence
atgagcaccgtgcacgagatcctgtgcaagctgagcctggagggcgatcattctacaccaccttcggcctacggaagtgtgaaggcctacaccaacttcgacgctgaaagagatgctctgaatatcgaaaccgcaataaagactaagggagtggatgaggtgactatcgtgaacatcttaacgaatcgttccaatgcgcagcgacaggatattgcatttgcatatcagagaagaacgaagaaggaactggcttctgccctcaagagtgctctttcaggacatcttgaaaccgtcatcctgggtttgcttaagacacccgcccagtacgacgcgagcgagttaaaagcgtctatgaagggtctgggcactgatgaggacagcctgattgagatcatctgcagcaggactaaccaggagcttcaggaaattaatagggtgtacaaggagatgtataaaactgacctggaaaaagatattattagcgacacatctggggatttccgcaaactgatggttgccctggctaagtag

SEQ ID NO: 314518 - DNA, 684 bp, Artificial Sequence
  derived and/or modified sequence
atgagcaccgtgcacgagatcctgtgcaagctgagcctggagggcgaccactccacacctccctctgcttatggcagcgtaaaggcatacacaaacttcgatgccgaaagagatgccctcaatatcgagacagccattaaaaccaagggagtggacgaggtcaccatagttaacatccttacgaatcgctcaaacgcccagcgacaagacatcgcatttgcgtatcaacgcagaacaaagaaggagctggcctccgcccttaaatccgccctaagcggccatctggaaactgtgattcttggtcttctgaagacccccgctcagtatgacgcatccgaacttaaggccagcatgaaaggcctcggcacggatgaggactcactcattgagatcatatgcagtcggaccaatcaagagctacaggagatcaatcgggtttacaaagaaatgtataaaaccgatctggaaaaggatattatttctgatacctccggtgactttagaaagctcatggtggccttggcgaaaggccgcagagccgaagacggatctgtgattgactatgaactcatcgatcaggacgcacgagatctgtacgacgcgggggtgaaacggaaggggacagatgtacctaagtggatctccatcatgaccgagcggtctgtgccacatctgcagaagtag

SEQ ID NO: 314519 - DNA, 531 bp, Artificial Sequence
  derived and/or modified sequence
atgagcaccgtgcacgagatcctgtgcaagctgagcctggagggcgaccacagcacccccccatctgcctacgggagtgtcaaggcctataccaattttgacgctgaacgtgacgccttaaatatcgaaacagccataaagacaaagggagtggacgaagtgacgatagtgaatatcctgacgaacagatccaatgcccaaaggcaggacattgcattcgcgtaccagagacggaccaagaaagagctagcctcagccctgaagagcgcactttcagggcacctggagacagtgattctgggactgctgaagacacctgcccaatatgatgcatctgagttaaaagcatcaatgaaggggctcgggactgatgaggactccctgattgagatcatttgctccaggacaaatcaagagctgcaagagattaatcgggtgtataaagagatgtataagacggatctggagaaggacattatcagtgacacttccggcgatttccggaagcttatggtggcacttgccaagtag

SEQ ID NO: 314520 - DNA, 333 bp, Artificial Sequence
  derived and/or modified sequence
atgagcaccgtgcacgagatcctgtgcaagctgagcctggagggcgaccactctaccccgccaagcgcctacggcagcgtcaaggcatatactaatttcgatgccgagagagatgccctcaatatcgagaccgcgattaagaccaagggagtggatgaggttacgattgtgaatatcctgacgaatcggtcaaatgcccagcgccaggatattgccttcgcctatcagcggcggactaagaaggaattggcatcggccctgaagtcggctctgagcggacatctcgaaaccgtgatcttaggcttgctgaagacacctgctcagtacgattag

SEQ ID NO: 314521 - DNA, 1020 bp, Artificial Sequence
  derived and/or modified sequence
atgagcacggtgcacgagatactgtgcaagttgagcctcgagggagatcactcgacccctccttccgcctacggaagcgtcaaggcatatactaacttcgacgccgagagagatgctctgaatatcgaaaccgccatcaagacaaaaggagtcgatgaagtaaccattgtgaacattctgacaaaccgttctaatgctcagcgccaagacattgcgttcgcctatcaaagacggacgaagaaggagctggcctctgccctgaagagcgcattaagcgggcatctcgaaacggtcatcctgggcctattgaaaactcccgctcagtacgacgcgtccgaattgaaggcttcgatgaagggcctcggtacagacgaagattccctcatcgaaatcatctgcagtcgcaccaatcaggaattgcaggaaattaaccgcgtgtacaaggagatgtataaaaccgacctcgagaaggacatcattagcgacacttcaggcgactttaggaagctcatggtggccctggcaaaggggaggcgagccgaagatgggtccgttatcgactatgagcttattgaccaggatgcccgagacctgtacgatgcaggcgtgaagagaaagggcacggatgttcccaagtggatttcaatcatgaccgagcgttccgtgcctcacctgcagaaagtgttcgacagatataagtcttactctccatatgacatgctcgagtccatccgtaaggaggtgaagggggatctcgagaatgcatttctgaacctggtgcagtgcattcagaacaaacccttatacttcgccgacagactgtacgacagcatgaaaggaaagggaacaagggacaaggttctaatccggattatggtgagtcgatctgaggtggatatgttgaaaataaggagtgaattcaagagaaagtacggtaaatcgttatattattatattcagcaggataccaaaggggactaccaaaaagcacttctctacctctgcggcggtgatgattag

SEQ ID NO: 314522 - DNA, 1020 bp, Artificial Sequence
  derived and/or modified sequence
atgtcaacagtgcacgagattctgtgcaagctctccctggagggagaccacagtacaccaccatcagcgtatggcagcgttaaggcctataccaattttgacgcagagcgcgacgccctgaacatagaaaccgcaatcaaaaccaaaggagtggacgaagtgacgattgtaaatatcctgacgaacaggtctaatgcccaacgccaggacatcgccttcgcttaccagagacgcactaaaaaggaacttgctagcgccctcaaatcagctctgtcagggcacctggagaccgtaatactgggtcttcttaagacacccgctcagtatgatgccagcgaactcaaggcctccatgaaggggctcgggactgatgaggactcactcattgagattatctgctcgcgtactaaccaggaactacaggagatcaatagggtgtacaaggagatgtataagacggacctcgagaaagacatcattagtgatacgtctggggacttcagaaaacttatggtcgcactggctaagggcaggcgagccgaagatgggagcgtcatcgactacgagctgattgaccaggatgccagggacttgtacgatgctggggtaaaaagaaagggcaccgacgtgccaaagtggatatctatcatgaccgagaggtcagtgccacacctgcagaaagtgttcgatcgttataagagctatagtccatatgacatgttggagtctattcgcaaggaagttaaaggcgatttagagaacgccttcctaaatctcgtgcagtgtatacaaaacaagcctctctatttcgcggacaggctttatgatagcatgaaaggaaagggcacccgggataaggtgctgatccgcataatggtgtctcgttccgaagtcgacatgctcaagatacggtctgagtttaagcgtaagtatggcaagtccctgtactactacatacagcaggacactaaaggagactatcaaaaagccctgttgtatctgtgtggcggagatgattag

SEQ ID NO: 314523 - DNA, 1020 bp, Artificial Sequence
  derived and/or modified sequence
atgtcgactgtgcacgagattctctgtaagcttagcctggagggcgaccactcaacgccacctagcgcatatgggagcgttaaggcctatacaaacttcgacgctgaaagggacgccctaaacatcgaaactgcaataaaaacaaaaggggtcgacgaggtcacaatagtgaacatcctgacgaaccggagcaacgcccagcgtcaggatatcgcctttgcataccagcggaggacaaagaaggaactcgcaagcgctttaaaatcagccttgagtggccatctggagactgtcattttgggtcttctcaagacccctgcacagtatgacgcatccgagttgaaagcctctatgaagggattgggaaccgatgaagacagtctcatcgaaataatctgcagccgcacaaatcaggagctccaagagattaatcgcgtctataaagagatgtacaagactgatttggaaaaggatattatcagcgatacctccggagacttcaggaagctgatggttgccctggccaagggaagaagagccgaggatggaagcgtcatcgattatgaattaatcgatcaggacgccagggacctgtatgacgcgggagttaagaggaagggaactgatgtgccaaagtggattagtattatgaccgagcgcagcgttccgcatcttcagaaggtcttcgatagatacaagagctattcaccatacgacatgttggagagcatacgcaaagaagtcaaaggagacttggagaatgcatttctcaatctagtgcagtgtattcagaataagccactgtatttcgctgaccggttatacgatagcatgaaggggaagggtacaagggacaaagtgctcattagaatcatggtgagcaggtccgaggtggacatgctaaagatccggtccgaattcaagcggaagtatggcaagtcactatattactatattcagcaagatactaaaggggactatcagaaagcattgttgtatctctgcggtggagatgactag

SEQ ID NO: 314524 - DNA, 246 bp, Artificial Sequence
  derived and/or modified sequence
atgtctactgtgcacgagatcctttgcaagctgtccttggagggggatcattccactccaccttcagcctacggttccgtgaaagcgtacactaactttgacgccgaacgggatgccctcaatattgaaactgccataaaaaccaagggcgtggatgaggtgaccattgtaaacatcctgacaaacaggtccaacgcccagagacaggatatcgccttcgcatatcagaggcggaccaaaaaatag

SEQ ID NO: 314525 - DNA, 531 bp, Artificial Sequence
  derived and/or modified sequence
atgtcaactgtccacgaaatcctgtgcaaactaagtctcgagggcgaccactctacccctccttccgcttatggatctgttaaggcctatacaaacttcgacgccgaacgggacgcactcaacattgagaccgcgatcaagacaaaaggagtggacgaggtaaccatcgtcaacatcctgacaaatcgcagcaacgcacaacgccaagatattgcttttgcataccagagacgcaccaagaaagagctcgcctccgccctgaaaagtgccctcagtggtcatcttgaaacagtgattctcggactcctgaaaacaccagctcagtatgacgcatctgagctgaaagcctctatgaagggtctgggaaccgacgaagattcccttatagaaatcatctgttcacggacgaaccaggagttgcaggaaatcaaccgagtatacaaagagatgtataaaacagacctagaaaaggatatcattagtgatactagcggagactttcggaaacttatggtggctctcgccaaatag

SEQ ID NO: 314526 - DNA, 144 bp, Artificial Sequence
  derived and/or modified sequence
atgagcactgtccatgagatcttgtgtaaattgtccctggagggggatcacagcaccccaccatcagcctacggcagtgttaaagcttatacaaacttcgacgcagaaagggatgccttaaatatcgagactgctatcaaatag

SEQ ID NO: 314527 - DNA, 405 bp, Artificial Sequence
  derived and/or modified sequence
atgagcaccgtgcatgagatactttgtaagctgtctcttgagggagatcatagtacccctccaagtgcatatggctcggtaaaggcatacactaattttgatgccgagcgggatgctttgaatatagagacagcaatcaaaaccaaaggcgtggacgaagtgactatcgtcaacatactgaccaatagaagcaatgcacagaggcaggacatcgcttttgcttatcagcgcaggacaaagaaagaactcgctagcgctctcaagtctgccctgtcgggccacctcgagaccgtcatcctggggctgctcaagactcctgcacagtatgacgcttcagaactcaaggccagtatgaaagggctgggaaccgacgaagactcactgatagagatcatttgttcttag

SEQ ID NO: 314528 - DNA, 402 bp, Artificial Sequence
  derived and/or modified sequence
atgagcacagtgcacgaaatactctgtaagttgtctctcgaaggcgaccacagcacccctccgtcagcatacggatcagtcaaggcatataccaacttcgacgcagagagggacgccttaaacatcgagaccgcaatcaagactaagggcgtagatgaggtgaccattgtgaatatactgaccaaccgatccaatgcgcaaaggcaggatatagctttcgcctaccaacggaggactaagaaagaactggccagcgccctgaaatctgccctaagtggccacctcgagacggttattctcggtctcctgaagacacctgcacaatatgatgcgagtgagttgaaggccagcatgaaggggctgggaactgatgaggactcacttatcgagataatttgttag

SEQ ID NO: 314529 - DNA, 450 bp, Artificial Sequence
  derived and/or modified sequence
atgagtaccgtccacgagatcctgtgcaaactgtcacttgagggtgatcactcgacccccccttcggcctacgggagtgtcaaggcctatacaaactttgacgccgagagggacgcgttgaatatagagactgccattaagaccaaaggcgtcgacgaagttacaatcgtgaacattcttaccaacaggagcaatgctcagaggcaggatatcgcttttgcctaccagaggaggaccaaaaaagagttggctagtgccctgaaatctgctctgtcagggcatctggaaaccgtcattctcggtctcttaaagacccccgcacagtacgatgctagcgagctcaaggctagtatgaagggcctggggacagacgaagatagcctaattgaaataatttgttctagaacgaaccaagagttacaggagattaatcgtgtgtacaaggaatag

SEQ ID NO: 314530 - DNA, 198 bp, Artificial Sequence
  derived and/or modified sequence
atgagtacagtccatgagatactgtgtaagcttagcctcgagggggaccatagcacgcctccctctgcatatggctccgtgaaggcctataccaactttgacgcagaaagagacgcgctgaacattgagacagctatcaaaaccaagggcgtcgatgaggtcactatcgtgaatatccttaccaaccgcagcaactag

SEQ ID NO: 314531 - DNA, 360 bp, Artificial Sequence
  derived and/or modified sequence
atgagcactgtgcacgagatactctgtaaactctcactggaaggggaccactccacccccccatcagcgtacgggagcgtgaaagcctacacaaacttcgacgccgaaagagacgccttaaacatcgaaaccgctatcaaaactaaaggtgtggacgaggtgaccatcgtgaacatcctgactaaccgctccaatgctcagcgacaggatatagccttcgcatatcagaggcgtactaaaaaagagctggcgagcgccctaaagtctgctctctctgggcacctggagaccgtaattctcggcctgcttaagactcctgcacagtacgacgccagcgaactgaaggccagcatgaaatag

SEQ ID NO: 314532 - DNA, 771 bp, Artificial Sequence
  derived and/or modified sequence
atgagcaccgtccatgagatcttatgcaaactgagtctggaaggtgatcatagcacacctccctcggcctatggcagcgttaaagcttacacgaattttgacgcagagagggatgctctgaatatagagacagctataaaaaccaaaggagtggatgaggtgacaattgtcaacatccttacaaaccgctccaatgcccagagacaggatatcgctttcgcctaccaaaggaggactaaaaaagagttggcttccgcactcaagtcagcactgagcggccatctcgaaaccgtaatcctggggctccttaaaactcctgctcagtacgacgcctcagaacttaaggccagcatgaaaggactgggtacagacgaagactccctgatcgagattatctgctcccggaccaaccaagagctgcaggaaatcaatagagtctataaagaaatgtataaaacagatctggagaaggatatcataagcgacacttcaggcgattttagaaaactcatggttgctctcgcgaagggccgacgggctgaggatggcagcgttatcgattacgagctcatagaccaggacgcacgagacctgtacgatgcgggagtgaaacgaaaggggaccgacgtgcctaaatggatttctattatgaccgagagaagtgtccctcatttgcagaaagtgttcgatcggtacaaatcatactctccttacgacatgttggaaagcattagaaaggaagttaaaggtgaccttgagaacgctttctag

SEQ ID NO: 314533 - DNA, 360 bp, Artificial Sequence
  derived and/or modified sequence
atgagcaccgtacacgaaatcctgtgcaagctctctctagagggagatcacagcacaccaccctccgcatatgggagtgtgaaagcttacacaaatttcgacgcagagcgggatgccctaaatatcgagactgcaatcaaaaccaaaggtgttgacgaagtgacaatcgtcaatatcctgactaatcgcagtaatgcgcagcggcaggacattgcatttgcatatcagcggaggacgaagaaggagctcgcctctgctctgaagtctgcccttagtggccacctggagacagtgatactgggtcttcttaagactcccgctcagtacgacgcaagcgaattgaaggcctccatgaaatag

SEQ ID NO: 314534 - DNA, 531 bp, Artificial Sequence
  derived and/or modified sequence
atgagcacagtgcacgaaattctgtgcaagctgtccctggagggcgaccactccactcccccttccgcgtatggctcagtaaaagcttacacaaacttcgatgccgagagggatgctctcaatatcgagactgctattaaaaccaaaggtgtggatgaggtgaccattgttaatatccttaccaaccgttctaacgcacaaagacaggatatagcgttcgcgtatcagaggcgtacgaaaaaggaactcgcttccgccctcaaaagcgccttgtccggacacctagagaccgtcatcctcgggttgctgaaaactcccgctcagtacgacgcgtctgagctcaaggccagtatgaaggggctggggaccgacgaggactctctgattgaaataatctgcagccgcacgaatcaggagcttcaggaaatcaatagggtgtataaggaaatgtataagaccgaccttgaaaaagacatcatttctgacaccagtggtgattttcgcaaactgatggtggcgctagccaagtag

SEQ ID NO: 314535 - DNA, 684 bp, Artificial Sequence
  derived and/or modified sequence
atgtccaccgtgcacgaaatcctgtgcaaactaagtctcgagggagatcatagcaccccaccaagtgcctacggatctgtgaaggcctataccaatttcgacgccgagagggacgccttaaacatcgagaccgccattaaaactaaaggcgttgatgaagttacaatagtgaatatcctgacgaacaggtctaacgctcagcggcaggacatcgctttcgcctatcagaggcgcacaaagaaggagctcgcttccgccttaaaatccgcactaagtggacacttagaaaccgtaattcttggcctgctgaagactccagcacaatatgatgccagcgagctgaaggcgtctatgaaaggcctggggaccgatgaagactcgctaattgaaatcatttgctccagaacaaaccaggagctccaggaaattaaccgcgtttacaaggaaatgtataagaccgatctcgaaaaggatatcatctcggataccagtggggattttcggaaactcatggtggctctcgccaaggggcgaagggcagaggacggctccgtcatcgactacgaactgattgaccaggatgctcgcgacctatacgatgccggtgtgaaacgtaagggcacagacgtgccaaagtggatttcgataatgaccgagaggtccgtcccccaccttcagaaatag

SEQ ID NO: 314536 - DNA, 531 bp, Artificial Sequence
  derived and/or modified sequence
atgtcgactgtgcacgagattctgtgtaagttgtctctggagggcgaccatagcactccaccatcggcatacggaagcgtgaaagcctacactaacttcgacgcggagagagacgctctgaacatcgagaccgccatcaagacaaagggcgtcgacgaagtgacaattgtcaatatcctgaccaacagaagcaatgcacagaggcaagatattgccttcgcctatcaaaggcgaacgaagaaggaattggcttctgccttaaaatccgcactgagcggccacctggagacggtgattctgggacttctaaagaccccagctcagtatgacgcctctgaattaaaagccagtatgaaagggctcgggacggatgaggattctctcatcgagatcatttgcagtcgtacaaaccaagaactgcaggagataaacagagtttataaagaaatgtacaagacggatttggagaaggacataatctcagacacgagcggagacttccgaaaattgatggttgcattagctaaatag

SEQ ID NO: 314537 - DNA, 333 bp, Artificial Sequence
  derived and/or modified sequence
atgagcacagtgcatgagatcttatgcaagttgtccctggagggggaccatagcacccctcccagtgcctatgggagcgtgaaagcgtacaccaatttcgacgctgagcgggatgcgctgaacatcgaaactgccatcaagaccaagggtgtggatgaggttaccatcgtgaacatcctgaccaacagaagcaacgcccagagacaagatatagctttcgcatatcaaaggcggactaagaaggagctcgcctccgctttaaagagcgccctctcggggcatcttgaaactgtgattctaggtctgctgaagaccccagctcagtacgactag

SEQ ID NO: 314538 - DNA, 1020 bp, Artificial Sequence
  derived and/or modified sequence
atgagcaccgtgcacgagatcctgtgcaagctgagcctggagggcgaccacagcaccccccccagcgcctacggcagcgtgaaggcctacaccaacttcgacgccgagagagacgccctgaacatcgagaccgccatcaagaccaagggcgtggacgaggtgaccatcgtgaacatcctgaccaacagaagcaacgcccagagacaggacatcgccttcgcctaccagagaagaaccaagaaggagctggccagcgccctgaagagcgccctgagcggccacctggagaccgtgatcctgggcctgctgaagacccccgcccagtacgacgccagcgagctgaaggccagcatgaagggcctgggcaccgacgaggacagcctgatcgagatcatctgcagcagaaccaaccaggagctgcaggagatcaacagagtgtacaaggagatgtacaagaccgacctggagaaggacatcatcagcgacaccagcggcgacttcagaaagctgatggtggccctggccaagggcagaagagccgaggacggcagcgtgatcgactacgagctgatcgaccaggacgccagagacctgtacgacgccggcgtgaagagaaagggcaccgacgtgcccaagtggatcagcatcatgaccgagagaagcgtgccccacctgcagaaggtgttcgacagatacaagagctacagcccctacgacatgctggagagcatcagaaaggaggtgaagggcgacctggagaacgccttcctgaacctggtgcagtgcatccagaacaagcccctgtacttcgccgacagactgtacgacagcatgaagggcaagggcaccagagacaaggtgctgatcagaatcatggtgagcagaagcgaggtggacatgctgaagatcagaagcgagttcaagagaaagtacggcaagagcctgtactactacatccagcaggacaccaagggcgactaccagaaggccctgctgtacctgtgcggcggcgacgactag

SEQ ID NO: 314539 - DNA, 246 bp, Artificial Sequence
  derived and/or modified sequence
atgagcaccgtgcacgagatcctgtgcaagctgagcctggagggcgaccacagcaccccccccagcgcctacggcagcgtgaaggcctacaccaacttcgacgccgagagagacgccctgaacatcgagaccgccatcaagaccaagggcgtggacgaggtgaccatcgtgaacatcctgaccaacagaagcaacgcccagagacaggacatcgccttcgcctaccagagaagaaccaagaagtag

SEQ ID NO: 314540 - DNA, 531 bp, Artificial Sequence
  derived and/or modified sequence
atgagcaccgtgcacgagatcctgtgcaagctgagcctggagggcgaccacagcaccccccccagcgcctacggcagcgtgaaggcctacaccaacttcgacgccgagagagacgccctgaacatcgagaccgccatcaagaccaagggcgtggacgaggtgaccatcgtgaacatcctgaccaacagaagcaacgcccagagacaggacatcgccttcgcctaccagagaagaaccaagaaggagctggccagcgccctgaagagcgccctgagcggccacctggagaccgtgatcctgggcctgctgaagacccccgcccagtacgacgccagcgagctgaaggccagcatgaagggcctgggcaccgacgaggacagcctgatcgagatcatctgcagcagaaccaaccaggagctgcaggagatcaacagagtgtacaaggagatgtacaagaccgacctggagaaggacatcatcagcgacaccagcggcgacttcagaaagctgatggtggccctggccaagtag

SEQ ID NO: 314541 - DNA, 144 bp, Artificial Sequence
  derived and/or modified sequence
atgagcaccgtgcacgagatcctgtgcaagctgagcctggagggcgaccacagcaccccccccagcgcctacggcagcgtgaaggcctacaccaacttcgacgccgagagagacgccctgaacatcgagaccgccatcaagtag

SEQ ID NO: 314542 - DNA, 405 bp, Artificial Sequence
  derived and/or modified sequence
atgagcaccgtgcacgagatcctgtgcaagctgagcctggagggcgaccacagcaccccccccagcgcctacggcagcgtgaaggcctacaccaacttcgacgccgagagagacgccctgaacatcgagaccgccatcaagaccaagggcgtggacgaggtgaccatcgtgaacatcctgaccaacagaagcaacgcccagagacaggacatcgccttcgcctaccagagaagaaccaagaaggagctggccagcgccctgaagagcgccctgagcggccacctggagaccgtgatcctgggcctgctgaagacccccgcccagtacgacgccagcgagctgaaggccagcatgaagggcctgggcaccgacgaggacagcctgatcgagatcatctgcagctag

SEQ ID NO: 314543 - DNA, 402 bp, Artificial Sequence
  derived and/or modified sequence
atgagcaccgtgcacgagatcctgtgcaagctgagcctggagggcgaccacagcaccccccccagcgcctacggcagcgtgaaggcctacaccaacttcgacgccgagagagacgccctgaacatcgagaccgccatcaagaccaagggcgtggacgaggtgaccatcgtgaacatcctgaccaacagaagcaacgcccagagacaggacatcgccttcgcctaccagagaagaaccaagaaggagctggccagcgccctgaagagcgccctgagcggccacctggagaccgtgatcctgggcctgctgaagacccccgcccagtacgacgccagcgagctgaaggccagcatgaagggcctgggcaccgacgaggacagcctgatcgagatcatctgctag

SEQ ID NO: 314544 - DNA, 450 bp, Artificial Sequence
  derived and/or modified sequence
atgagcaccgtgcacgagatcctgtgcaagctgagcctggagggcgaccacagcaccccccccagcgcctacggcagcgtgaaggcctacaccaacttcgacgccgagagagacgccctgaacatcgagaccgccatcaagaccaagggcgtggacgaggtgaccatcgtgaacatcctgaccaacagaagcaacgcccagagacaggacatcgccttcgcctaccagagaagaaccaagaaggagctggccagcgccctgaagagcgccctgagcggccacctggagaccgtgatcctgggcctgctgaagacccccgcccagtacgacgccagcgagctgaaggccagcatgaagggcctgggcaccgacgaggacagcctgatcgagatcatctgcagcagaaccaaccaggagctgcaggagatcaacagagtgtacaaggagtag

SEQ ID NO: 314545 - DNA, 198 bp, Artificial Sequence
  derived and/or modified sequence
atgagcaccgtgcacgagatcctgtgcaagctgagcctggagggcgaccacagcaccccccccagcgcctacggcagcgtgaaggcctacaccaacttcgacgccgagagagacgccctgaacatcgagaccgccatcaagaccaagggcgtggacgaggtgaccatcgtgaacatcctgaccaacagaagcaactag

SEQ ID NO: 314546 - DNA, 360 bp, Artificial Sequence
  derived and/or modified sequence
atgagcaccgtgcacgagatcctgtgcaagctgagcctggagggcgaccacagcaccccccccagcgcctacggcagcgtgaaggcctacaccaacttcgacgccgagagagacgccctgaacatcgagaccgccatcaagaccaagggcgtggacgaggtgaccatcgtgaacatcctgaccaacagaagcaacgcccagagacaggacatcgccttcgcctaccagagaagaaccaagaaggagctggccagcgccctgaagagcgccctgagcggccacctggagaccgtgatcctgggcctgctgaagacccccgcccagtacgacgccagcgagctgaaggccagcatgaagtag

SEQ ID NO: 314547 - DNA, 771 bp, Artificial Sequence
  derived and/or modified sequence
atgagcaccgtgcacgagatcctgtgcaagctgagcctggagggcgaccacagcaccccccccagcgcctacggcagcgtgaaggcctacaccaacttcgacgccgagagagacgccctgaacatcgagaccgccatcaagaccaagggcgtggacgaggtgaccatcgtgaacatcctgaccaacagaagcaacgcccagagacaggacatcgccttcgcctaccagagaagaaccaagaaggagctggccagcgccctgaagagcgccctgagcggccacctggagaccgtgatcctgggcctgctgaagacccccgcccagtacgacgccagcgagctgaaggccagcatgaagggcctgggcaccgacgaggacagcctgatcgagatcatctgcagcagaaccaaccaggagctgcaggagatcaacagagtgtacaaggagatgtacaagaccgacctggagaaggacatcatcagcgacaccagcggcgacttcagaaagctgatggtggccctggccaagggcagaagagccgaggacggcagcgtgatcgactacgagctgatcgaccaggacgccagagacctgtacgacgccggcgtgaagagaaagggcaccgacgtgcccaagtggatcagcatcatgaccgagagaagcgtgccccacctgcagaaggtgttcgacagatacaagagctacagcccctacgacatgctggagagcatcagaaaggaggtgaagggcgacctggagaacgccttctag

SEQ ID NO: 314548 - DNA, 684 bp, Artificial Sequence
  derived and/or modified sequence
atgagcaccgtgcacgagatcctgtgcaagctgagcctggagggcgaccacagcaccccccccagcgcctacggcagcgtgaaggcctacaccaacttcgacgccgagagagacgccctgaacatcgagaccgccatcaagaccaagggcgtggacgaggtgaccatcgtgaacatcctgaccaacagaagcaacgcccagagacaggacatcgccttcgcctaccagagaagaaccaagaaggagctggccagcgccctgaagagcgccctgagcggccacctggagaccgtgatcctgggcctgctgaagacccccgcccagtacgacgccagcgagctgaaggccagcatgaagggcctgggcaccgacgaggacagcctgatcgagatcatctgcagcagaaccaaccaggagctgcaggagatcaacagagtgtacaaggagatgtacaagaccgacctggagaaggacatcatcagcgacaccagcggcgacttcagaaagctgatggtggccctggccaagggcagaagagccgaggacggcagcgtgatcgactacgagctgatcgaccaggacgccagagacctgtacgacgccggcgtgaagagaaagggcaccgacgtgcccaagtggatcagcatcatgaccgagagaagcgtgccccacctgcagaagtag

SEQ ID NO: 314549 - DNA, 333 bp, Artificial Sequence
  derived and/or modified sequence
atgagcaccgtgcacgagatcctgtgcaagctgagcctggagggcgaccacagcaccccccccagcgcctacggcagcgtgaaggcctacaccaacttcgacgccgagagagacgccctgaacatcgagaccgccatcaagaccaagggcgtggacgaggtgaccatcgtgaacatcctgaccaacagaagcaacgcccagagacaggacatcgccttcgcctaccagagaagaaccaagaaggagctggccagcgccctgaagagcgccctgagcggccacctggagaccgtgatcctgggcctgctgaagacccccgcccagtacgactag

SEQ ID NO: 314550 - DNA, 1284 bp, Artificial Sequence
  derived and/or modified sequence
atggtggacctgtgcaattcaaccaagggtatctgccttacaggcccgtcgggaccgcctgggcctcccggtgccggtggacttccaggccataacggtctggatgggcagccaggtccacaaggtcccaaaggggagaagggagctaatggcaagcgcgggaaaatggggattccgggagccgctggaaaccccggggagagaggagaaaagggggaccacggtgagctgggactacaggggaatgaaggcccccctggacagaagggagagaaaggggacaagggcgacgtgtcaaatgacgtcctgctcgctggagctaaaggcgaccagggaccacccggacctcccggacctcccgggcctcccgggccccctggcccccccggatctcgaagggctaaggggccacgacagccctctatgttcaacgggcagtgcccaggcgaaacctgcgccatcccaaacgacgatacactggtgggcaaggcagatgaaaaagcttcagaacatcatagccctcaggctgagtccatgattactagcattggcaaccctgttcaggtcctgaaggttacggaaactttcggaacctggatccgggaaagcgcgaataagagtgacgatcggatctgggtgacggaacacttcagcggaataatggttaaggagttcaaggatcagccctcactgctgaatgggtcctacacctttatccacctaccctactatttccacggctgcggccatgtggtatacaacaattctctttattatcacaaagggggaagcaatactttagtgcggttcgaatttggacaggagacatcacaaacgctgaagcttgagaatgcactctattttgacagaaaatatttgttcgccaactccaagacatactttaacctcgcggtggatgaaaaaggcctgtggattatttacgccagttccgtggatggatccagtattctggtcgctcagctggatgagcgaacgttctccgtggttcaacatgtcaacactacgtaccccaagtcaaaagctgggaatgctttcatcgcacgggggattctctacgtgacagatacaaaagacatgagggtaacgttcgcgtttgacctcctcggtggcaagcagatcaacgccaactttgaccttagaacctctcagagcgtacttgctatgctggcttacaatatgagagatcaacatctgtattcttgggaggatggccacttaatgctttaccccgtgcagtttctaagcactacccttaaccagtag

SEQ ID NO: 314551 - DNA, 1284 bp, Artificial Sequence
  derived and/or modified sequence
atggtggacctctgtaattcaaccaaagggatttgcttaacagggccaagtggtccccccggccctcctggcgccggaggcctaccgggccataacggcctggatggtcaaccgggccctcagggtcccaagggcgaaaaaggcgccaatggaaaacggggcaagatgggaatacccggcgccgccggcaaccccggggaacgaggcgagaagggtgaccatggggagttgggtttgcaggggaatgagggacctcccgggcagaaaggcgagaaaggagacaagggagacgtgagtaatgatgtactactcgctggagcaaagggcgatcagggcccccctgggccacccggcccccccgggcctcccggtccccctggacctcccggaagcagacgggcaaagggtccccggcagccatctatgttcaatggccagtgtccgggggaaacctgtgcgatccccaatgatgatacccttgtggggaaggctgatgagaaggcatctgaacaccactcacctcaggcagagtccatgattacaagcattgggaaccctgtacaggtgctcaaagttaccgagacctttgggacatggatacgggagtcagccaacaagtcagacgacagaatttgggtgacggaacatttctcaggtatcatggtaaaggaattcaaggaccagccctctttacttaacggttcatacacattcatccatctcccatactatttccatgggtgcggccatgtggtctataacaattccttatattatcacaagggaggaagtaatactctcgtgaggttcgaattcggtcaggagacgtcccaaactcttaaactggagaatgctttgtactttgataggaagtatttgtttgccaactcaaagacctattttaatctcgctgtagacgaaaaaggtttgtggataatttatgcctcctcagtggacggcagttccatcctggtcgcacagctcgacgagcgcaccttttctgttgttcagcacgtgaataccacatatcctaagagtaaggccggcaacgctttcatcgctagaggaatcctatacgtcacagatacaaaggatatgcgagtcaccttcgcttttgacctgctgggaggaaagcagatcaatgccaactttgacctgcggacctctcagtctgtcttagcaatgttagcatacaacatgagggaccagcatctgtacagctgggaagatgggcacctaatgctgtacccggtacaatttctgagcactacgctgaatcagtag

SEQ ID NO: 314552 - DNA, 4584 bp, Artificial Sequence
  derived and/or modified sequence
accattgtgtatgattcgttgttgactgcagcatcactagatccgagtgatggtggacctgtgcaacagcaccaagggcatctgcctcacaggaccttctggaccaccaggacctccgggagccggcgggttgccaggacacaacggattggatggacagcctggtcctcagggcccaaaaggagaaaaaggagcaaatggaaaaagaggaaaaatggggatacctggagctgcaggaaatccaggggaaaggggagaaaagggagaccatggtgaactgggcctgcagggaaatgagggcccaccagggcagaagggagaaaagggtgacaaaggagatgtgtccaacgacgtgctcctggcaggtgccaaaggtgaccaaggcccacccggtccacctgggcccccaggccctccaggtcctccagggccccctggaagcagaagagccaaaggccctcggcagccaagcatgttcaacggccagtgcccaggtgagacttgtgccataccaaatgatgataccttggttggaaaagctgatgagaaagccagtgaacaccattccccacaagcagaatccatgatcacttccattggaaacccagtgcaagtactgaaagtgacagagacatttgggacttggataagagagtctgctaacaagagtgatgaccggatttgggtgacagagcatttttcaggcatcatggttaaggaattcaaggatcagccctcacttctgaatggcagttacacgttcatccaccttccatactatttccatggctgtgggcacgttgtttacaacaactctctctactaccacaaagggggttctaataccctagtgagatttgaatttggccaggaaacatcccaaactctgaagcttgaaaatgccttgtattttgatcgaaaatacctttttgcaaattccaaaacttacttcaatctagctgtagatgaaaagggcctttggattatctatgcgtcaagtgtggacggctcgagcattcttgtagcacaactggatgagaggacattctcagtggtgcaacacgtcaataccacgtaccctaaatccaaggctggcaacgccttcattgcccgaggaatcctctatgtcacagacaccaaagatatgagggtcacatttgcctttgatttgttaggagggaaacagatcaatgcaaactttgatttaagaacttcccagtctgttcttgccatgttagcatacaacatgagagatcagcatttatattcatgggaagatggccatttaatgctttatcctgtgcagtttttgtcaactaccttaaatcagtgatgtgctgcattcggctcccttcagcaaatttcaggggttttctgggaccagttctcccccaacaggaaacttgtttttttaacgtcagccagatatttagaaaataacctcaaaagtgtttatatggtcagtgagccccgcttagtgaaatagcaacagattggaagttgaaatggctgagatttggtgatctccccacagctggctctgcaagttacctctttctccttgggccttagtttccccattggtaatctgaattggctaagatgattggggagattttctgtacctgtaggtaatttggtgattcttggtggctgctcttctcacaacttttatgtatctgcttctgtcgtttagcttttttagccacatgctgaccaaatttacctttgagttgataagtccagtggcttgagtagtgaatccctcagtgctgacttatatcttgttctttgaaaaaatgcattgactctttaagacatctaaagtatcacattatccataatttattgcttttctttgcatctgcacctgccaccacagaataaccattaccctcagctgctgattgggcagctctgagattagcaaaagccagggacagctacatgttcaggtttttttttttttttttttttcaataagctattttttttcttttcttattttaaatagagagagagtcttgctatgtttcccaggctggtcttgaactcctggggctcaagtgatcctcctgccttggcctcccaaaatgctggattacaggcatgtgtgcctggcccaggtttcttaataaaacagaatcatgatcttccaggttccccccagtttctgatcatgttgatttgtagctgtggatcatgaacactgaatcctcagatcactctgacttcttatgcttctcctgtggatccactatcaaagtactaaatgctgtgtaagtagacgttaatctggctggaaccatgggaagcactttgcagtgttcagaagagaggctccatttgtggctattatgtagaactgggccagagccagtccattgcctgtttttttaaataaggttttactgagcacagccacactcatttgtttatgcagtacggcctgacattgcttttgctctgcaacagcagagtcgagtcattgcaacaaagagcatatggccccacagtgcctaaaatattgaccagctacccctttatggaaaaagattgctgactcctgataaagaatataaagtgagcctgattcttgaaaaaatcagaaccagagcctgttttgttttgttctaaactaagaagccgcataggatgtgacttgcgttttgagtagaggggaaggctgataacggcgtaagatgaagtggccctccacaaaggctggttaggggacagttctttctctaacatagttttaaaggatgtgatctggtccccttggatgccaggagagaatccagttgaacttgctcctaaatgctcttaaatatgcatattttctgccaactcacttctttaaacatctttcagcccagcgctgcggccccgggaagggccactgcgaatagagaggaagctggaaaagttcctggggctctgcagccaggaaggggaaccagggcaaatcttatgtaaagatttttcagcaacttgtcccaatttgtgtgtattctgaaactttctctttgggaccaaattcattctcaatggccctgagttcaatatattattaacagcagtattttaaaacttagggttgaactgggcatggtggcacataactgcaatcccagctactttggaggcagggatgggaggatcacttgaggccaggatctcaggaccagcctagagagatcccatctctaaaaaataaaatataagaaaataaaacttaggggatatacagatttaaatattcaaatctccctgctcccctgaaagtccccaggcagctgtcaatgacttgtttgttgtgttctcaatatgatggctatttgaaacttcacctacttttcattagattggttgtaccatgtcaccttagcttttaaaaatactcttttcagattcacgttctctaacaaagagtctcatgttcaagatcaatatgtctaataagtgctggtgtccttttaaagtatttaaatatatatgttgctgttgctgaatacaggagaccaggttaggaatatagtttcataataatagtacatacaatactaattgtatataaggtagcaaccaaaagaggttgttaattagcacatattccttttagaaaaatgtttcagaaacctcagtcttgatatctgagctatctgggctcccttacttgtgagtaagggatcatgctcaccactggagaagcttacaccgggactttttttcttttttcttttttttttgctatgacagagtaatgctaacgtaaggacaactgagtttgatcagtgtttaatcgcagtgggtaatcttatctgattgtctttaaaagtgaaaaggattaagattttattctttcttgtaaacattacttgattttttaaagaagttttgggctcactgctaaaatagagtatacaactgaatgtttttaagtcaagatactgttttaggagtttaccctctcatttataaccaaagttgctctaaaacactttccaaatatctgcacttctgatgtcagaatcaaaccagataattctctaattcttctttaatctaaagtagatagcttcccactggaaagtaaacaaaaccatccctcccaacctcaaagctaggccacactctatttcaaggcattttctttcagctgataaggtgtcctcctgaagccaagtaggtggttctggtctccaagtatcgttaagcacaggtgctatgacagaaaaagttctggggtggaagttttaagatgaggagttctgatcttaggcatcttaacagtcacaaggtgaaaagtcaaatgaaacagtacaattcttgatgagtgaggtgtcatcttccaaccacacagaggacgttttggctatgatcatctgatggcaagtgaaggagaaatgagtgatagggctttgcgttttcatccagatgctgtggccctgtgtttcacagcattaagagccataatttccaacctgcacagatcctgaacaacaaatgaataacgatgaatgtctttttggttgtaatttaacaagtcaaataaaataatcattgctgagcacaatcaca

SEQ ID NO: 314553 - DNA, 1676 bp, Artificial Sequence
  derived and/or modified sequence
tgatggtggacctgtgcaacagcaccaagggcatctgcctcacaggaccttctggaccaccaggacctccgggagccggcgggttgccaggacacaacggattggatggacagcctggtcctcagggcccaaaaggagaaaaaggagcaaatggaaaaagaggaaaaatggggatacctggagctgcaggaaatccaggggaaaggggagaaaagggagaccatggtgaactgggcctgcagggaaatgagggcccaccagggcagaagggagaaaagggtgacaaaggagatgtgtccaacgacgtgctcctggcaggtgccaaaggtgaccaaggcccacccggtccacctgggcccccaggccctccaggtcctccagggccccctggaagcagaagagccaaaggccctcggcagccaagcatgttcaacggccagtgcccaggtgagacttgtgccataccaaatgatgataccttggttggaaaagctgatgagaaagccagtgaacaccattccccacaagcagaatccatgatcacttccattggaaacccagtgcaagtactgaaagtgacagagacatttgggacttggataagagagtctgctaacaagagtgatgaccggatttgggtgacagagcatttttcaggcatcatggttaaggaattcaaggatcagccctcacttctgaatggcagttacacgttcatccaccttccatactatttccatggctgtgggcacgttgtttacaacaactctctctactaccacaaagggggttctaataccctagtgagatttgaatttggccaggaaacatcccaaactctgaagcttgaaaatgccttgtattttgatcgaaaatacctttttgcaaattccaaaacttacttcaatctagctgtagatgaaaagggcctttggattatctatgcgtcaagtgtggacggctcgagcattcttgtagcacaactggatgagaggacattctcagtggtgcaacacgtcaataccacgtaccctaaatccaaggctggcaacgccttcattgcccgaggaatcctctatgtcacagacaccaaagatatgagggtcacatttgcctttgatttgttaggagggaaacagatcaatgcaaactttgatttaagaacttcccagtctgttcttgccatgttagcatacaacatgagagatcagcatttatattcatgggaagatggccatttaatgctttatcctgtgcagtttttgtcaactaccttaaatcagtgatgtgctgcattcggctcccttcagcaaatttcaggggttttctgggaccagttctcccccaacaggaaacttgtttttttaacgtcagccagatatttagaaaataacctcaaaagtgtttatatggtcagtgagccccgcttagtgaaatagcaacagattggaagttgaaatggctgagattttctgtacctgtaggtaatttggtgattcttggtggctgctcttctcacaacttttatgtatctgcttctgtcgtttagcttttttagccacatgctgaccaaatttacctttgagttgataagtccagtggcttgagtagtgaatccctcagtgctgacttatatcttgttctttgaaaaaatgcattgactctttaagacatct

SEQ ID NO: 314554 - DNA, 1284 bp, Artificial Sequence
  derived and/or modified sequence
atggtggacctgtgcaacagcaccaagggcatctgcctgaccggccccagcggccccccaggccccccaggagctgggggcctgcccggccacaacggcctggatggccagcccggcccccagggccccaagggggagaagggggccaacgggaagaggggcaagatgggcatccctggagctgctggcaaccctggagagcggggggagaagggggaccacggggagctgggcctgcagggcaatgaaggacctcctggccagaagggggagaagggggacaagggagatgtgtccaatgatgtgctgctggccggggccaagggggaccagggccccccaggccccccaggccccccaggccccccaggccccccaggccccccaggcagccggcgggccaagggcccccggcagcccagcatgttcaacggccagtgccctggagagacctgtgccatccccaatgatgacaccctggtgggcaaggcagatgagaaggccagcgagcaccacagcccccaggccgagagcatgatcaccagcatcggcaaccctgtgcaggtgctgaaggtgacagagaccttcggcacctggatccgggagagcgccaacaagagtgatgaccgcatctgggtgacagagcacttcagcggcatcatggtgaaggagttcaaggaccagcccagcctgctgaatggcagctacaccttcatccacctgccctactacttccacggctgcggccacgtggtgtacaacaacagcctgtactaccacaagggcggcagcaacaccctggtgcgctttgaatttggccaggagaccagccagaccctgaagctggagaatgccctgtactttgacaggaagtacctgtttgccaacagcaagacctacttcaacctggccgtggatgagaagggcctgtggatcatctatgccagctctgtggatggcagcagcatcctggtggcccagctggatgagaggaccttctctgtggtgcagcacgtgaacaccacctaccccaagagcaaggctggaaatgccttcatcgcccggggcatcctgtatgtgacagacaccaaggacatgagggtgacctttgcctttgacctgctgggcggcaagcagatcaatgccaactttgacctgcggaccagccagagcgtgctggccatgctggcctacaacatgagggaccagcacctgtacagctgggaggatggccacctgatgctgtaccctgtgcagttcctgagcaccaccctgaaccagtag

SEQ ID NO: 314555 - DNA, 1284 bp, Artificial Sequence
  derived and/or modified sequence
atggtggacctgtgcaacagcaccaagggcatctgcctgaccggcccaagcgggcctcctggtccacccggtgccggcgggctaccagggcataacgggctagacggccagcccggcccacagggtcctaaaggcgagaaaggcgccaacggcaagcgcgggaagatggggataccaggcgccgcaggcaaccccggtgaacgaggcgagaaaggagaccacggcgaactgggacttcagggtaacgagggcccgcctggacaaaagggagagaaaggtgataagggagatgtgtccaatgatgtgctcctggccggtgccaagggtgatcaaggtcctccaggcccccctggcccccctggtccccctggtcccccagggccacccggctcacgaagagccaagggtccaaggcagccatcaatgtttaatgggcagtgccctggcgagacatgcgccattcctaacgatgatactctggtgggcaaggcagatgaaaaagcatctgagcaccacagccctcaggctgagagcatgataactagcatcggaaacccagttcaggttctcaaggtaacagagacgttcggcacttggattcgcgaatcagctaacaaatccgatgatagaatctgggtgacagaacactttagcgggatcatggttaaagaatttaaggaccaaccctcccttctaaatgggagctacacctttatccatttaccttattattttcatggatgcgggcatgtcgtctacaacaattccctgtactatcataagggtgggtccaatacgctggtgaggtttgaattcgggcaggagacatcccagactttaaagctcgaaaacgccctatatttcgatcggaagtacctgtttgcgaattctaagacctactttaacctcgcggtggacgagaagggactatggataatttacgcatcatccgttgatggttccagcatcctggtggcacaactggacgagcgtacctttagtgtggtgcagcatgttaacacgacctatccaaaatccaaagctgggaatgcttttattgcgaggggcatcctgtacgtaacagacaccaaggatatgcgcgtgacgttcgccttcgacctgctcgggggcaaacaaatcaatgcaaatttcgatcttcggacttctcagtcagtgctggcgatgctagcatataacatgcgtgaccagcatctctattcttgggaggatggacacttgatgctgtatcccgtgcagttcctgagcacgacacttaaccagtag

SEQ ID NO: 314556 - DNA, 1284 bp, Artificial Sequence
  derived and/or modified sequence
atggtggacctgtgcaacagcaccaagggcatctgcctgaccggcccatctggcccaccaggacctcccggagcaggaggccttccaggccacaacggcctggacggtcagcctgggccacaaggcccaaaaggcgagaagggtgcaaacgggaaaagaggcaaaatgggtatcccaggtgccgctggtaaccccggggaacgaggagagaagggcgaccacggcgagctgggtttacaagggaatgagggtccccctgggcagaagggggagaaaggcgataagggtgacgtgtccaacgatgtgctgctggccggcgccaagggcgatcagggcccacccggccctcccggtccacctggtccgccgggacccccaggaccacctgggagccgcagagcaaagggtccacgtcaaccatccatgtttaatgggcagtgtccaggagagacctgcgccatacccaatgacgacactctagtgggtaaggcagacgagaaggccagtgagcaccacagtccccaagcagagtctatgattactagtataggcaacccagtgcaggtgctgaaggttacagagaccttcgggacctggattcgtgagagcgctaacaaatccgacgacagaatatgggttacagagcatttttctggaattatggtcaaggagtttaaggaccagcccagcctcctgaacggttcttatacctttatccatctgccctactatttccacggatgtggccatgtggtttataacaactccctgtactatcataaggggggctcaaacaccttggttcggtttgagttcgggcaagagacctcgcagacactgaagctagagaacgccctgtacttcgatagaaaatatttgtttgccaactccaaaacttacttcaacctagcggtggatgaaaaggggctctggataatctatgcctcctctgtcgacggatccagtattttagtcgctcagttagatgagcgtaccttcagtgttgtgcaacacgtgaacactacttatccgaaatctaaggccgggaatgcgtttatcgctagggggatcctctatgttaccgacaccaaagacatgcgtgtcacattcgcatttgacctcttgggtggcaagcaaattaacgctaacttcgatttgcggacatcgcagtcagtcttagccatgttggcctataacatgcgagatcaacatctgtactcatgggaagatggacacctgatgctttatcccgtgcaatttctgtcaactacattaaaccagtag

SEQ ID NO: 314557 - DNA, 1284 bp, Artificial Sequence
  derived and/or modified sequence
atggtcgacctgtgtaactccacaaaggggatttgtctcactggacccagtggtccaccaggccctccgggagcgggtgggttgccaggccacaacgggttggacggtcagcctgggccacaaggacctaaaggagagaaaggcgcaaatggcaagagagggaagatgggcattcccggagcagctgggaaccccggtgaacgcggagagaagggagaccatggagagctgggcctgcagggtaacgaaggccctcctggacaaaaaggggagaagggtgataagggggacgtgtctaacgacgtgttactagcaggggcaaagggcgaccaggggcctcccggaccgccaggcccaccaggtccgccaggaccgcctggccctcccggatctaggcgagctaagggccctagacagccatccatgttcaacggtcagtgccccggagaaacatgtgcaatccccaacgacgataccctggtggggaaagcagatgagaaagccagcgagcaccactctcctcaggcagagtcaatgattactagtatagggaatcctgtgcaggtcttgaaagttacagagacatttgggacttggattagggagtctgctaataaatccgacgaccgcatctgggtcacggaacatttttcagggataatggtgaaagagtttaaagatcagccgtcgctacttaacggtagctatacgtttatccacctgccttactactttcacggatgtgggcacgtggtgtacaataactctctgtattaccataagggtggctcgaacactctggtgagatttgagttcggccaggaaactagccagacactgaagctggaaaacgcactttacttcgataggaaatatttattcgccaactctaagacttacttcaatctggccgtcgacgagaaaggactgtggatcatctatgccagcagcgtcgacggatcatctatactggtggcccagctcgacgaaaggaccttctctgtggtccagcatgttaacacaacctacccaaagtccaaagccggtaacgcctttatcgccaggggtatcctgtacgttaccgatacgaaagacatgagggtgactttcgcatttgacctgcttggtgggaagcaaattaacgctaactttgacttgcgcacatcccagtcagtgctcgctatgttggcatataacatgagagaccagcacttatacagttgggaagatggtcaccttatgttatatcccgtccagtttctgagcaccaccctgaatcaatag

SEQ ID NO: 314558 - DNA, 1284 bp, Artificial Sequence
  derived and/or modified sequence
atggtcgatctgtgcaattccaccaagggaatttgcctgactggccctagcgggccaccaggtccccctggcgcaggtggcctgccaggccataacgggctggatggccagccgggaccccagggtcccaaaggagaaaaaggagccaacggcaaaagaggaaagatgggtatacctggagcagcaggcaatcctggggagcgcggagaaaagggagaccacggggagctgggactccaaggcaatgaagggccaccagggcagaagggcgagaagggcgacaagggagatgtcagtaatgacgtgttgctggccggtgccaagggcgaccagggcccaccgggaccccctgggcctccaggtccaccaggccctccagggccacccggttcacgtagggcaaaaggacctcggcagccttctatgttcaacggtcagtgtccaggggagacatgtgccattccgaacgatgacactctggtggggaaggcagacgaaaaggcttccgagcaccatagcccccaggctgaatctatgattacctccatcggtaaccctgtgcaggtgctgaaggtgaccgagacatttggtacttggattagagagtctgccaacaagagtgatgataggatctgggtgacagagcacttctctggaatcatggttaaagagtttaaggatcagccaagcctcctcaacgggtcttatactttcattcaccttccctactacttccacggttgtggacacgtcgtgtacaataactccctgtattatcataagggaggcagcaatacactggtgcggtttgaattcggacaggagacatcacaaacactaaagctcgagaacgcactgtatttcgatcggaagtatctgttcgccaattccaaaacctactttaatctggcagtggatgagaagggcctgtggattatatacgctagcagcgtggatggatccagcattcttgtggctcagttagatgaacgaacctttagtgttgtgcagcatgtcaacacaacatacccaaaaagtaaggccggtaatgcctttattgccagaggcatcctctacgtgacagataccaaagatatgagggtaacttttgcctttgacctcctcggcggaaagcagattaacgctaattttgatcttaggacatctcagtctgttcttgccatgctcgcttacaacatgcgagaccagcacctgtactcctgggaagatggtcacttgatgctctaccccgtgcagttcctgagcacgacattgaaccaatag

SEQ ID NO: 314559 - DNA, 1284 bp, Artificial Sequence
  derived and/or modified sequence
atggtggacctgtgcaacagcaccaagggcatctgcctgaccggccccagcggcccccccggcccccccggcgccggcggcctgcccggccacaacggcctggacggccagcccggcccccagggccccaagggcgagaagggcgccaacggcaagagaggcaagatgggcatccccggcgccgccggcaaccccggcgagagaggcgagaagggcgaccacggcgagctgggcctgcagggcaacgagggcccccccggccagaagggcgagaagggcgacaagggcgacgtgagcaacgacgtgctgctggccggcgccaagggcgaccagggcccccccggcccccccggcccccccggcccccccggcccccccggcccccccggcagcagaagagccaagggccccagacagcccagcatgttcaacggccagtgccccggcgagacctgcgccatccccaacgacgacaccctggtgggcaaggccgacgagaaggccagcgagcaccacagcccccaggccgagagcatgatcaccagcatcggcaaccccgtgcaggtgctgaaggtgaccgagaccttcggcacctggatcagagagagcgccaacaagagcgacgacagaatctgggtgaccgagcacttcagcggcatcatggtgaaggagttcaaggaccagcccagcctgctgaacggcagctacaccttcatccacctgccctactacttccacggctgcggccacgtggtgtacaacaacagcctgtactaccacaagggcggcagcaacaccctggtgagattcgagttcggccaggagaccagccagaccctgaagctggagaacgccctgtacttcgacagaaagtacctgttcgccaacagcaagacctacttcaacctggccgtggacgagaagggcctgtggatcatctacgccagcagcgtggacggcagcagcatcctggtggcccagctggacgagagaaccttcagcgtggtgcagcacgtgaacaccacctaccccaagagcaaggccggcaacgccttcatcgccagaggcatcctgtacgtgaccgacaccaaggacatgagagtgaccttcgccttcgacctgctgggcggcaagcagatcaacgccaacttcgacctgagaaccagccagagcgtgctggccatgctggcctacaacatgagagaccagcacctgtacagctgggaggacggccacctgatgctgtaccccgtgcagttcctgagcaccaccctgaaccagtag

SEQ ID NO: 314560 - protein, 454 aa, Artificial Sequence
  derived and/or modified sequence
MESHSRAGKSRKSAKFRSISRSLMLCNAKTSDDGSSPDEKYPDPFEISLAQGKEGIFHSSVQLADTSEAGPSSVPDLALASEAAQLQAAGNDRGKTCRRIFFMKESSTASSREKPGKLEAQSSNFLFPKACHQRARSNSTSVNPYCTREIDFPMTKKSAAPTDRQPYSLCSNRKSLSQQLDCPAGKAAGTSRPTRSLSTAQLVQPSGGLQASVISNIVLMKGQAKGLGFSIVGGKDSIYGPIGIYVKTIFAGGAAAADGRLQEGDEILELNGESMAGLTHQDALQKFKQAKKGLLTLTVRTRLTAPPSLCSHLSPPLCRSLSSSTCITKDSSSFALESPSAPISTAKPNYRIMVEVSLQKEAGVGLGIGLCSVPYFQCISGIFVHTLSPGSVAHLDGRLRCGDEIVEISDSPVHCLTLNEVYTILSHCDPGPVPIIVSRHPDPQKEEMEAQEVK

SEQ ID NO: 314561 - DNA, 729 bp, Artificial Sequence
  derived and/or modified sequence
ttggccaggcctgaccctcttggacctttcttctttgccgacaaccactgcccagcagcctctgggacctcggggtcccagggaacccagtccagcctcctggctgttgacttcccattgctcttggagccaccaatcaaagagattcaaagagattcctgcaggccagaggcggaacacacctttatggctggggctctccgtggtgttctggacccagcccctggagacaccattcacttttactgctttgtagtgactcgtgctctccaacctgtcttcctgaaaaaccaaggcccccttcccccacctcttccatggggtgagacttgagcagaacaggggcttccccaagttgcccagaaagactgtctgggtgagaagccatggccagagcttctcccaggcacaggtgttgcaccagggacttctgcttcaagttttggggtaaagacacctggatcagactccaagggctgccctgagtctgggacttctgcctccatggctggtcatgagagcaaaccgtagtcccctggagacagcgactccagagaacctcttgggagacagaagaggcatctgtgcacagctcgatcttctacttgcctgtggggaggggagtgacaggtccacacaccacactgggtcaccctgtcctggatgcctctgaagagagggacagaccgtcagaaactggagagtttctattaaaggtcatttaaacca

SEQ ID NO: 314562 - DNA, 1365 bp, Artificial Sequence
  derived and/or modified sequence
atggagagccacagcagagccggcaagagcagaaagagcgccaagttcagaagcatcagcagaagcctgatgctgtgcaacgccaagaccagcgacgacggcagcagccccgacgagaagtaccccgaccccttcgagatcagcctggcccagggcaaggagggcatcttccacagcagcgtgcagctggccgacaccagcgaggccggccccagcagcgtgcccgacctggccctggccagcgaggccgcccagctgcaggccgccggcaacgacagaggcaagacctgcagaagaatcttcttcatgaaggagagcagcaccgccagcagcagagagaagcccggcaagctggaggcccagagcagcaacttcctgttccccaaggcctgccaccagagagccagaagcaacagcaccagcgtgaacccctactgcaccagagagatcgacttccccatgaccaagaagagcgccgcccccaccgacagacagccctacagcctgtgcagcaacagaaagagcctgagccagcagctggactgccccgccggcaaggccgccggcaccagcagacccaccagaagcctgagcaccgcccagctggtgcagcccagcggcggcctgcaggccagcgtgatcagcaacatcgtgctgatgaagggccaggccaagggcctgggcttcagcatcgtgggcggcaaggacagcatctacggccccatcggcatctacgtgaagaccatcttcgccggcggcgccgccgccgccgacggcagactgcaggagggcgacgagatcctggagctgaacggcgagagcatggccggcctgacccaccaggacgccctgcagaagttcaagcaggccaagaagggcctgctgaccctgaccgtgagaaccagactgaccgccccccccagcctgtgcagccacctgagcccccccctgtgcagaagcctgagcagcagcacctgcatcaccaaggacagcagcagcttcgccctggagagccccagcgcccccatcagcaccgccaagcccaactacagaatcatggtggaggtgagcctgcagaaggaggccggcgtgggcctgggcatcggcctgtgcagcgtgccctacttccagtgcatcagcggcatcttcgtgcacaccctgagccccggcagcgtggcccacctggacggcagactgagatgcggcgacgagatcgtggagatcagcgacagccccgtgcactgcctgaccctgaacgaggtgtacaccatcctgagccactgcgaccccggccccgtgcccatcatcgtgagcagacaccccgacccccagaaggaggagatggaggcccaggaggtgaagtag

SEQ ID NO: 314563 - DNA, 1365 bp, Artificial Sequence
  derived and/or modified sequence
atggagtcacacagccgcgccggtaaaagtcggaagagcgcaaaattcaggtcgatctctcggtcacttatgctttgcaacgctaagacctccgatgatggcagctcaccagatgaaaagtaccctgatcctttcgaaatatctctggctcaaggcaaagaagggattttccattcgagcgtacaactcgctgataccagtgaggccggtccaagcagtgtgcccgatctcgctctggccagcgaggctgcccaattacaggcggctggtaacgaccggggcaaaacttgtcgccgaatcttttttatgaaggaaagctcaacagcgtcttcaagagaaaagccaggaaaacttgaggctcagtcttctaacttcctgttccctaaggcatgtcatcagagggctagatctaactctacgtcagttaatccttattgcacaagggaaatagatttcccaatgactaaaaagtccgcagccccaactgacaggcaaccttattccttgtgcagcaatcgcaaatcgttgtcccaacagctggattgcccagcaggcaaggctgctggaaccagcaggccaacccggtccttaagtactgcgcagttagtacagccgtcaggtgggctccaagcatccgtcataagtaacatcgtcttgatgaagggacaggcaaaggggctgggtttttcgatagtcggcggaaaagactcgatctacggtcctattggtatatacgtgaagaccattttcgccggcggagccgccgctgctgacggccgattgcaggaaggagacgagatactcgagctgaatggcgaaagcatggccggcttgacccaccaggacgccctccagaaatttaaacaggcgaagaaggggctgctcaccctcacggtgagaacaagacttactgcaccgcccagcttgtgcagccacctgtctccacctctgtgtcggagtctgagctcaagcacttgcattacaaaagattctagctccttcgcattggagagtcctagcgcccccatttctaccgctaagccgaactaccgcatcatggtcgaggtctcactccaaaaagaagctggggtgggcctcgggattggactttgctccgtcccatacttccagtgcattagcggaatttttgtgcacacactgtctcctgggtctgtcgcccacctagatggccgattacggtgtggggacgagattgttgaaatttctgactctcctgtacactgcttaactctgaacgaggtgtacactatcctgtcccactgcgaccctggacctgtcccaatcatcgtgagcagacatccggaccctcaaaaggaggaaatggaggcacaggaggtgaagtag

SEQ ID NO: 314564 - DNA, 1365 bp, Artificial Sequence
  derived and/or modified sequence
atggagagccacagcagagctgggaagagcaggaagagcgccaagttccgcagcatcagccgcagcctgatgctgtgcaatgccaagaccagtgatgatggcagcagcccagatgagaagtacccagacccctttgagatcagcctggcccagggcaaggagggcatcttccacagctctgtgcagctggccgacaccagcgaggccggccccagctctgtgcctgacctggccctggccagcgaggccgcccagctgcaggccgctggaaatgaccggggcaagacctgccgccgcatcttcttcatgaaggagagcagcacagccagcagccgggagaagccaggcaagctggaggcccagagcagcaacttcctgttccccaaggcctgccaccagagggcccggagcaacagcacctctgtgaacccctactgcacccgggagattgacttccccatgaccaagaagtctgctgcccccacagaccggcagccctacagcctgtgcagcaacaggaagagcctgagccagcagctggactgcccagctgggaaggccgccggcaccagccggcccaccaggagcctgagcacagcccagctggtgcagcccagcggcggcctgcaggccagcgtcatcagcaacatcgtgctgatgaagggccaggccaagggcctgggcttcagcatcgtgggcggcaaggacagcatctacggccccatcggcatctacgtgaagaccatctttgctggaggagctgctgctgctgatggccgcctgcaggagggagatgagatcctggagctgaatggagagagcatggccggcctgacccaccaggatgccctgcagaagttcaagcaggccaagaagggcctgctgaccctgactgtgaggacccggctgacagccccacccagcctgtgcagccacctgagcccccccctgtgccgcagcctgagcagcagcacctgcatcaccaaggacagcagcagctttgccctggagagccccagcgcccccatcagcacagccaagcccaactaccgcatcatggtggaggtgtccctgcagaaggaggccggcgtgggcctgggcatcggcctgtgcagcgtgccctacttccagtgcatcagcggcatctttgtgcacaccctgagccctggctctgtggcccacctggatggccgcctgcgctgtggagatgaaattgtggagatcagtgacagccctgtgcactgcctgaccctgaatgaggtgtacaccatcctgagccactgtgaccccggccctgtgcccatcatcgtgagccgccacccagacccccagaaggaggagatggaggcccaggaggtgaagtag

SEQ ID NO: 314565 - DNA, 1365 bp, Artificial Sequence
  derived and/or modified sequence
atggagagccacagccgggccggcaagagccggaagagcgccaagttccggtcaatttcaaggtccttgatgctctgtaatgcaaaaacgtcagacgatggtagctcaccagatgagaaataccccgacccgttcgagatcagcctcgcccaggggaaggaaggaattttccactccagcgtccagttagccgacacatcagaggcaggacctagtagcgtacccgaccttgcgctcgcttccgaggccgcacaactacaggcagccggcaacgatagaggtaagacctgccgacgaatctttttcatgaaagagtcaagcaccgctagttcccgggaaaagcctgggaagttggaggcccaatcctcaaattttctctttccaaaggcctgccaccagagggcaagaagcaacagcacctccgtcaacccatactgtacccgcgaaatagattttccaatgactaagaaatcggccgctcctactgacaggcagccatattctctatgctcaaaccgcaagtccctttcacaacaacttgactgccccgccgggaaggccgctggcacgagccgccctactcgctccctctccaccgcacagttggtacagcccagtgggggacttcaggccagcgtaatatctaacatcgtgctcatgaaagggcaagcaaaaggtttgggcttctctatagtcggagggaaggactctatatacggccctatcgggatctacgtaaaaacaatctttgctggaggtgccgctgccgcagacggacggctacaggagggcgacgaaattctcgaactcaatggggagtccatggcagggctgacccatcaggatgccttgcaaaagttcaaacaggctaagaagggcttgctgaccctcacagtccgaacgcggctgaccgctccaccttcgctgtgttcccacttgtcaccaccactgtgcagatccttaagcagctccacctgtatcacaaaggactcctcaagttttgcacttgaaagtccttcagcacccatttcaacagcaaagcctaattaccgcataatggtagaagtttctctgcagaaagaggcgggcgtggggctcgggataggcctctgttcagtaccttacttccagtgtatctctggaatattcgtgcatacgctgagtcccggcagcgttgcacaccttgatggacgtttgcgctgtggtgacgagattgtagaaatctccgattcacctgtacactgtctgaccttaaatgaagtgtatactatcttaagccactgcgatccaggcccagtgcctataattgtatcgagacaccctgatcctcagaaagaagagatggaagcacaagaggtgaagtag

SEQ ID NO: 314566 - DNA, 1365 bp, Artificial Sequence
  derived and/or modified sequence
atggaatcccattcaagggcgggaaagtctcggaagtcagccaaattccgtagtatttctcgaagcctcatgctttgcaacgccaagacatctgacgatggttccagtccagatgagaaatacccagacccctttgaaatctccctggcccaaggcaaggagggtatattccactccagtgtacaacttgccgatacaagtgaggcaggccctagctcagtgcctgaccttgcactcgcatctgaggccgctcagcttcaggcagctggtaacgacaggggaaagacttgcagaaggatattcttcatgaaggaaagttccacagccagctctagggagaagcccggaaagctggaagctcagagcagcaacttcctgttccctaaagcttgtcaccagcgagcgaggagtaactctacgtccgttaacccgtactgcactagagagatagactttccgatgaccaagaaaagtgctgctcctactgaccgccagccctattcattgtgcagcaataggaaaagcctttcacagcagctggattgtcctgccggaaaggctgcaggcaccagcagaccaactcgatcactcagcacagcgcagttggtgcaaccttccggtggtttacaggcctcggtgatctcaaacattgttctcatgaagggtcaggccaaagggctcggtttttctattgtggggggaaaagatagtatatatggcccaatcgggatatacgtcaagacaatattcgccggtggagcagctgccgctgatggcaggctccaggagggggacgagatacttgaactaaatggcgagtcgatggccggtcttacacatcaagacgctctgcagaagtttaagcaggcaaagaaaggactcctcactcttactgtccgcacgaggctgactgctccaccttccctctgctcacatttgtcacctccactatgcagatctctctcttcctctacctgcattactaaagactcgagtagtttcgcactcgaaagcccgagtgcacccatcagcaccgctaagcctaactatagaatcatggtggaggtgagtctacaaaaggaggctggagtaggtcttggaatcggtctgtgtagtgtcccatatttccaatgcatctctggcatctttgtacacactttatccccgggaagtgtggcacatttagacgggcgtctcagatgcggagacgagatagttgagatctccgatagtccagtgcattgtctcacgctgaatgaggtctacaccattctaagtcactgtgacccaggtcctgtgcctatcattgtcagccgtcatccagacccccaaaaagaagaaatggaggcccaggaggtcaagtag

SEQ ID NO: 314567 - protein, 1332 aa, Artificial Sequence
  derived and/or modified sequence
MESHSRAGKSRKSAKFRSISRSLMLCNAKTSDDGSSPDEKYPDPFEISLAQGKEGIFHSSVQLADTSEAGPSSVPDLALASEAAQLQAAGNDRGKTCRRIFFMKESSTASSREKPGKLEAQSSNFLFPKACHQRARSNSTSVNPYCTREIDFPMTKKSAAPTDRQPYSLCSNRKSLSQQLDCPAGKAAGTSRPTRSLSTAQLVQPSGGLQASVISNIVLMKGQAKGLGFSIVGGKDSIYGPIGIYVKTIFAGGAAAADGRLQEGDEILELNGESMAGLTHQDALQKFKQAKKGLLTLTVRTRLTAPPSLCSHLSPPLCRSLSSSTCITKDSSSFALESPSAPISTAKPNYRIMVEVSLQKEAGVGLGIGLCSVPYFQCISGIFVHTLSPGSVAHLDGRLRCGDEIVEISDSPVHCLTLNEVYTILSHCDPGPVPIIVSRHPDPQVSEQQLKEAVAQAVENTKFGKERHQWSLEGVKRLESSWHGRPTLEKEREKNSAPPHRRAQKVMIRSSSDSSYMSGSPGGSPGSGSAEKPSSDVDISTHSPSLPLAREPVVLSIASSRLPQESPPLPESRDSHPPLRLKKSFEILVRKPMSSKPKPPPRKYFKSDSDPQKSLEERENSSCSSGHTPPTCGQEARELLPLLLPQEDTAGRSPSASAGCPGPGIGPQTKSSTEGEPGWRRASPVTQTSPIKHPLLKRQARMDYSFDTTAEDPWVRISDCIKNLFSPIMSENHGHMPLQPNASLNEEEGTQGHPDGTPPKLDTANGTPKVYKSADSSTVKKGPPVAPKPAWFRQSLKGLRNRASDPRGLPDPALSTQPAPASREHLGSHIRASSSSSSIRQRISSFETFGSSQLPDKGAQRLSLQPSSGEAAKPLGKHEEGRFSGLLGRGAAPTLVPQQPEQVLSSGSPAASEARDPGVSESPPPGRQPNQKTLPPGPDPLLRLLSTQAEESQGPVLKMPSQRARSFPLTRSQSCETKLLDEKTSKLYSISSQVSSAVMKSLLCLPSSISCAQTPCIPKEGASPTSSSNEDSAANGSAETSALDTGFSLNLSELREYTEGLTEAKEDDDGDHSSLQSGQSVISLLSSEELKKLIEEVKVLDEATLKQLDGIHVTILHKEEGAGLGFSLAGGADLENKVITVHRVFPNGLASQEGTIQKGNEVLSINGKSLKGTTHHDALAILRQAREPRQAVIVTRKLTPEAMPDLNSSTDSAASASAASDVSVESTAEATVCTVTLEKMSAGLGFSLEGGKGSLHGDKPLTINRIFKGAASEQSETVQPGDEILQLGGTAMQGLTRFEAWNIIKALPDGPVTIVIRRKSLQSKETTAAGDS

SEQ ID NO: 314568 - DNA, 3999 bp, Artificial Sequence
  derived and/or modified sequence
atggagagccacagcagagccggcaagagcagaaagagcgccaagttcagaagcatcagcagaagcctgatgctgtgcaacgccaagaccagcgacgacggcagcagccccgacgagaagtaccccgaccccttcgagatcagcctggcccagggcaaggagggcatcttccacagcagcgtgcagctggccgacaccagcgaggccggccccagcagcgtgcccgacctggccctggccagcgaggccgcccagctgcaggccgccggcaacgacagaggcaagacctgcagaagaatcttcttcatgaaggagagcagcaccgccagcagcagagagaagcccggcaagctggaggcccagagcagcaacttcctgttccccaaggcctgccaccagagagccagaagcaacagcaccagcgtgaacccctactgcaccagagagatcgacttccccatgaccaagaagagcgccgcccccaccgacagacagccctacagcctgtgcagcaacagaaagagcctgagccagcagctggactgccccgccggcaaggccgccggcaccagcagacccaccagaagcctgagcaccgcccagctggtgcagcccagcggcggcctgcaggccagcgtgatcagcaacatcgtgctgatgaagggccaggccaagggcctgggcttcagcatcgtgggcggcaaggacagcatctacggccccatcggcatctacgtgaagaccatcttcgccggcggcgccgccgccgccgacggcagactgcaggagggcgacgagatcctggagctgaacggcgagagcatggccggcctgacccaccaggacgccctgcagaagttcaagcaggccaagaagggcctgctgaccctgaccgtgagaaccagactgaccgccccccccagcctgtgcagccacctgagcccccccctgtgcagaagcctgagcagcagcacctgcatcaccaaggacagcagcagcttcgccctggagagccccagcgcccccatcagcaccgccaagcccaactacagaatcatggtggaggtgagcctgcagaaggaggccggcgtgggcctgggcatcggcctgtgcagcgtgccctacttccagtgcatcagcggcatcttcgtgcacaccctgagccccggcagcgtggcccacctggacggcagactgagatgcggcgacgagatcgtggagatcagcgacagccccgtgcactgcctgaccctgaacgaggtgtacaccatcctgagccactgcgaccccggccccgtgcccatcatcgtgagcagacaccccgacccccaggtgagcgagcagcagctgaaggaggccgtggcccaggccgtggagaacaccaagttcggcaaggagagacaccagtggagcctggagggcgtgaagagactggagagcagctggcacggcagacccaccctggagaaggagagagagaagaacagcgcccccccccacagaagagcccagaaggtgatgatcagaagcagcagcgacagcagctacatgagcggcagccccggcggcagccccggcagcggcagcgccgagaagcccagcagcgacgtggacatcagcacccacagccccagcctgcccctggccagagagcccgtggtgctgagcatcgccagcagcagactgccccaggagagcccccccctgcccgagagcagagacagccacccccccctgagactgaagaagagcttcgagatcctggtgagaaagcccatgagcagcaagcccaagcccccccccagaaagtacttcaagagcgacagcgacccccagaagagcctggaggagagagagaacagcagctgcagcagcggccacaccccccccacctgcggccaggaggccagagagctgctgcccctgctgctgccccaggaggacaccgccggcagaagccccagcgccagcgccggctgccccggccccggcatcggcccccagaccaagagcagcaccgagggcgagcccggctggagaagagccagccccgtgacccagaccagccccatcaagcaccccctgctgaagagacaggccagaatggactacagcttcgacaccaccgccgaggacccctgggtgagaatcagcgactgcatcaagaacctgttcagccccatcatgagcgagaaccacggccacatgcccctgcagcccaacgccagcctgaacgaggaggagggcacccagggccaccccgacggcaccccccccaagctggacaccgccaacggcacccccaaggtgtacaagagcgccgacagcagcaccgtgaagaagggcccccccgtggcccccaagcccgcctggttcagacagagcctgaagggcctgagaaacagagccagcgaccccagaggcctgcccgaccccgccctgagcacccagcccgcccccgccagcagagagcacctgggcagccacatcagagccagcagcagcagcagcagcatcagacagagaatcagcagcttcgagaccttcggcagcagccagctgcccgacaagggcgcccagagactgagcctgcagcccagcagcggcgaggccgccaagcccctgggcaagcacgaggagggcagattcagcggcctgctgggcagaggcgccgcccccaccctggtgccccagcagcccgagcaggtgctgagcagcggcagccccgccgccagcgaggccagagaccccggcgtgagcgagagccccccccccggcagacagcccaaccagaagaccctgccccccggccccgaccccctgctgagactgctgagcacccaggccgaggagagccagggccccgtgctgaagatgcccagccagagagccagaagcttccccctgaccagaagccagagctgcgagaccaagctgctggacgagaagaccagcaagctgtacagcatcagcagccaggtgagcagcgccgtgatgaagagcctgctgtgcctgcccagcagcatcagctgcgcccagaccccctgcatccccaaggagggcgccagccccaccagcagcagcaacgaggacagcgccgccaacggcagcgccgagaccagcgccctggacaccggcttcagcctgaacctgagcgagctgagagagtacaccgagggcctgaccgaggccaaggaggacgacgacggcgaccacagcagcctgcagagcggccagagcgtgatcagcctgctgagcagcgaggagctgaagaagctgatcgaggaggtgaaggtgctggacgaggccaccctgaagcagctggacggcatccacgtgaccatcctgcacaaggaggagggcgccggcctgggcttcagcctggccggcggcgccgacctggagaacaaggtgatcaccgtgcacagagtgttccccaacggcctggccagccaggagggcaccatccagaagggcaacgaggtgctgagcatcaacggcaagagcctgaagggcaccacccaccacgacgccctggccatcctgagacaggccagagagcccagacaggccgtgatcgtgaccagaaagctgacccccgaggccatgcccgacctgaacagcagcaccgacagcgccgccagcgccagcgccgccagcgacgtgagcgtggagagcaccgccgaggccaccgtgtgcaccgtgaccctggagaagatgagcgccggcctgggcttcagcctggagggcggcaagggcagcctgcacggcgacaagcccctgaccatcaacagaatcttcaagggcgccgccagcgagcagagcgagaccgtgcagcccggcgacgagatcctgcagctgggcggcaccgccatgcagggcctgaccagattcgaggcctggaacatcatcaaggccctgcccgacggccccgtgaccatcgtgatcagaagaaagagcctgcagagcaaggagaccaccgccgccggcgacagctag

SEQ ID NO: 314569 - DNA, 3999 bp, Artificial Sequence
  derived and/or modified sequence
atggagtcacactctcgggcaggcaagtcacggaaaagcgctaagtttcggagcatctcacgaagcctgatgttatgtaacgcgaagactagtgatgatgggagctcaccagatgaaaaatatccagatccatttgagatttccctggcccaaggcaaggaggggatctttcattctagcgtccagctggcagacacaagcgaagctggtccgagctccgtacccgacctggctctcgcatctgaggcggcacagctccaggccgccggcaatgacagagggaaaacctgcagacgtatttttttcatgaaagaaagctctactgctagctcgagggaaaaaccgggaaaactggaagcccaaagttcaaatttccttttcccaaaagcttgtcaccaacgagccagatctaatagcacatccgtaaacccgtactgcactcgtgaaattgattttccaatgacaaagaaatccgcagctccaaccgacaggcagccatacagcctgtgttccaatcgtaagtcactgagtcaacagcttgactgtcccgcgggcaaagctgcgggcacttccagacctacaaggagcctgtctacagctcaactggtacagccctcagggggattgcaggcttccgtaatctcaaacatcgttctaatgaaggggcaggctaagggtcttggcttcagtatcgtcggtgggaaggacagtatctacgggcccattggtatctacgtcaagacaatcttcgcaggtggggctgcagcagcggacggaagactccaggagggcgatgagatcttggagctcaatggtgagtccatggcagggctgacacaccaggacgcgttgcagaagtttaagcaagccaaaaagggcctgctaacactcaccgtgcgaacccggctcaccgcacctcccagcttgtgctcacacctcagtccccctttgtgccgctcattgagctcatcaacctgtatcactaaagatagttcctcgtttgccctggaatcgccttcagcaccgatatccactgcaaagcctaactaccgtattatggtggaagtgtccctccagaaagaggccggcgttgggcttgggataggcttatgttctgttccgtactttcaatgcatctctggcatttttgttcacacattgagcccaggaagcgtagcccaccttgacgggcgcctgcggtgcggcgatgagatcgttgagatctctgacagcccagtgcactgcctgaccttgaacgaggtgtatacaattctgtcccattgcgatcccggaccagtgccaattattgtgagccgacatccggatccccaggtatctgagcagcagctcaaagaggccgtggcccaggccgttgaaaataccaaatttggcaaggagcggcatcagtggagtctggagggggtgaagcgtctcgagagttcctggcacggcaggccaacattagagaaggagagggaaaagaactctgcccccccccaccgccgtgctcagaaggtgatgattaggtccagctctgactcttcgtacatgagcggttcgcctggcgggagtcccggctctggatcagccgagaaaccatcaagcgacgttgatatctctacccactcacccagccttccactcgccagggagccagtcgtgctcagtatcgcttcaagccgcttgccccaggaatccccccccctacccgagagtcgagactctcatcctccactgcggttaaagaaatccttcgaaatcctcgtgaggaagcccatgtccagtaaacccaagccacctccacgcaaatactttaaaagtgactccgatcctcagaaatctctcgaggagagagagaactcctcctgctccagcggccacaccccgccgacctgcgggcaggaagcaagggaactgctccctctcctcttgcctcaggaggatacggccggacgtagcccatcggcctctgccggctgtcctggtccaggtataggccctcaaacaaaatcgtctacggagggagagcccggttggcgacgagcgtccccagtcacacagaccagccccattaaacaccccctgttaaaaagacaggctcggatggactattcatttgacacaacagccgaggacccttgggttaggatcagcgattgtataaagaatctgttctctccaataatgtccgagaatcatggacatatgccgctgcaacctaatgcgagtctgaatgaggaggagggaacacagggtcatcctgatggaacaccacccaaactggatactgcaaatgggacccctaaggtatataaaagtgccgatagctccaccgtgaagaaaggaccccctgttgccccaaaacctgcatggtttagacaatccctgaagggcctgcgcaaccgggcatctgacccacgcggactccccgatcccgcgttatctacccagcccgccccagcttctagggagcacctcggcagccatatcagggcctcgtctagctcctcctctatccggcagagaatctctagcttcgaaaccttcggctcgtcacagctccctgataagggcgctcagcgactctcactgcagcccagtagcggagaagccgccaagcctcttggaaagcacgaggaaggtagattcagtggcctgttggggcggggtgctgccccaacccttgtgccgcagcaacccgaacaggtactgagcagcggatcccctgccgcttccgaggcccgggacccgggcgtgagcgagtccccccctccaggtcgccagccaaatcaaaagaccttgccaccaggacccgatccgctattgcgactcctgtcgacacaggctgaagagtctcagggtccggtactcaagatgccgagccagagggcacgtagtttcccactcacacgcagccagagctgcgagacaaaacttctggacgagaagaccagtaagttgtactctatctcttcacaggtgagctcagctgtcatgaaaagcttattgtgcctgccgagctccatcagctgtgcccagacgccgtgtatacccaaggagggggcgtcgccaacttccagttccaacgaggacagcgctgcgaacggttctgccgagacttcagcgctggacacgggcttcagcctcaacctgtcagaactgagggaatacacagagggcctcaccgaagcaaaagaggatgatgatggcgaccactccagcttgcaaagcggccaaagcgtgatatccttgctgagttccgaggagttgaagaagctgatcgaagaggttaaggtcctggatgaagcaactctaaagcagctcgacggcatccatgtgacaatcctgcataaagaagagggagcaggcctgggtttctcattggccggcggcgctgacctagaaaataaggtcatcacagtgcacagggttttccccaacggcctggcctcacaagaaggcaccattcagaagggaaatgaggtgctgagtattaatggcaaatccctgaagggtacgacacatcacgatgctttagcaatcttgaggcaagccagggagcctcggcaggccgttattgtgacccggaagctcacccccgaggctatgcccgacctaaacagttccaccgatagtgccgcctctgccagcgcagcctccgatgtgagcgtggagagcactgcggaagccaccgtttgcacagtgacactagaaaagatgtccgcaggtctcgggtttagcctggaggggggtaagggatccctgcatggcgacaagcccctgaccatcaatcgcatctttaaaggcgccgcttctgaacaaagtgaaactgttcaaccaggagatgaaatcttacaactgggtggcaccgcgatgcaagggttgacgcggttcgaagcttggaacatcattaaggctttaccggatggtccagtgacgatcgtgatccgacgaaagtccttgcagtctaaagagacaacagccgccggagattcctag

SEQ ID NO: 314570 - DNA, 3999 bp, Artificial Sequence
  derived and/or modified sequence
atggagagccacagcagagctgggaagagcaggaagagcgccaagttccgcagcatcagccgcagcctgatgctgtgcaatgccaagaccagtgatgatggcagcagcccagatgagaagtacccagacccctttgagatcagcctggcccagggcaaggagggcatcttccacagctctgtgcagctggccgacaccagcgaggccggccccagctctgtgcctgacctggccctggccagcgaggccgcccagctgcaggccgctggaaatgaccggggcaagacctgccgccgcatcttcttcatgaaggagagcagcacagccagcagccgggagaagccaggcaagctggaggcccagagcagcaacttcctgttccccaaggcctgccaccagagggcccggagcaacagcacctctgtgaacccctactgcacccgggagattgacttccccatgaccaagaagtctgctgcccccacagaccggcagccctacagcctgtgcagcaacaggaagagcctgagccagcagctggactgcccagctgggaaggccgccggcaccagccggcccaccaggagcctgagcacagcccagctggtgcagcccagcggcggcctgcaggccagcgtcatcagcaacatcgtgctgatgaagggccaggccaagggcctgggcttcagcatcgtgggcggcaaggacagcatctacggccccatcggcatctacgtgaagaccatctttgctggaggagctgctgctgctgatggccgcctgcaggagggagatgagatcctggagctgaatggagagagcatggccggcctgacccaccaggatgccctgcagaagttcaagcaggccaagaagggcctgctgaccctgactgtgaggacccggctgacagccccacccagcctgtgcagccacctgagcccccccctgtgccgcagcctgagcagcagcacctgcatcaccaaggacagcagcagctttgccctggagagccccagcgcccccatcagcacagccaagcccaactaccgcatcatggtggaggtgtccctgcagaaggaggccggcgtgggcctgggcatcggcctgtgcagcgtgccctacttccagtgcatcagcggcatctttgtgcacaccctgagccctggctctgtggcccacctggatggccgcctgcgctgtggagatgaaattgtggagatcagtgacagccctgtgcactgcctgaccctgaatgaggtgtacaccatcctgagccactgtgaccccggccctgtgcccatcatcgtgagccgccacccagacccccaggtgtctgagcagcagctgaaggaggccgtggcccaggccgtggagaacaccaagtttgggaaggagcggcaccagtggagcctggagggcgtgaagaggctggagagctcctggcacggccggcccaccctggagaaggagcgggagaagaacagcgccccaccccacagaagagcccagaaggtgatgatccgcagcagcagtgacagcagctacatgagcggcagccctgggggcagccctggcagcggcagcgctgagaagcccagcagtgatgtggacatcagcacccacagccccagcctgcccctggcccgggagcctgtggtgctgagcatcgccagcagccggctgccccaggagagcccccccctgcctgagagccgggacagccacccccccctgcggctgaagaagagctttgagatcctggtgaggaagcccatgagcagcaagcccaagcccccacccaggaagtacttcaagagtgacagcgacccccagaagagcctggaggagcgggagaacagcagctgcagcagcggccacaccccacccacctgtggccaggaggcccgggagctgctgcccctgctgctgccccaggaggacacagctggccgcagccccagcgccagcgctggctgccccggccctggcatcggcccccagaccaagagcagcacagaaggagagcccggctggaggcgggccagccctgtgacccagaccagccccatcaagcaccccctgctgaagaggcaggccaggatggactacagctttgacaccacagctgaggacccctgggtgcgcatcagtgactgcatcaagaacctcttcagccccatcatgtctgaaaatcatggccacatgcccctgcagcccaatgccagcctgaatgaggaggagggcacccagggccacccagatggcaccccacccaagctggacacagccaacggcacccccaaggtgtacaagtctgctgacagcagcacagtgaagaagggcccccctgtggcccccaagccagcctggttccggcagagcctgaagggcctgaggaacagagccagtgacccccggggcctgcctgaccctgccctgagcacccagcctgccccagccagccgggagcacctgggcagccacatccgggccagcagcagcagcagcagcatccggcagaggatcagcagctttgagaccttcggcagcagccagctgcctgacaagggggcccagaggctgagcctgcagcccagcagcggggaggccgccaagcccctgggcaagcatgaggagggccgcttcagcggcctgctgggcagaggagctgcccccaccctggtgccccagcagcctgagcaggtgctgagcagcggcagccctgctgccagcgaggcccgggaccccggggtgtctgagagccccccacctggccggcagcccaaccagaagaccctgcccccaggccctgaccccctgctgcggctgctgagcacccaggccgaggagagccagggccctgtgctgaagatgcccagccagagggcccggagcttccccctgaccaggagccagagctgtgagaccaagctgctggatgagaagaccagcaagctgtacagcatcagcagccaggtgagcagcgctgtgatgaagagcctgctgtgcctgcccagcagcatcagctgtgcccagaccccctgcatccccaaggagggcgccagccccaccagcagcagcaatgaagacagcgctgccaatggatctgctgagaccagcgccctggacaccggcttcagcctgaacctgtctgagctgcgggagtacacagagggcctgacagaggccaaggaggatgatgatggagaccacagcagcctgcagagcggccagagcgtcatcagcctgctgagcagcgaggagctgaagaagctgattgaggaggtgaaggtgctggatgaggccaccctgaagcagctggatggcatccacgtgaccatcctgcacaaggaggagggcgccggcctgggcttcagcctggccggcggcgctgacctggagaacaaggtgatcaccgtgcacagggtcttccccaacggcctggccagccaggagggcaccatccagaagggaaatgaggtgctgagcatcaacgggaagagcctgaagggcaccacccaccatgatgccctggccatcctgcggcaggcccgggagccccggcaggccgtgattgtgaccaggaagctgaccccagaggccatgccagacctgaacagcagcacagacagcgctgccagcgccagcgctgccagtgatgtgtctgtggagagcacagctgaggccaccgtgtgcaccgtgaccctggagaagatgtctgctggcctgggcttcagcctggagggcggcaagggcagcctgcacggggacaagcccctgaccatcaaccgcatcttcaagggggccgccagcgagcagagcgagaccgtgcagcctggagatgagatcctgcagctgggcggcacagccatgcagggcctgaccaggtttgaggcctggaacatcatcaaggccctgcctgatggccctgtgaccatcgtcatccggaggaagagcctgcagagcaaggagaccacagctgctggggacagctag

SEQ ID NO: 314571 - DNA, 3999 bp, Artificial Sequence
  derived and/or modified sequence
atggagagccacagccgggccggcaagagccggaagagcgccaagttcagatcgatttcccgctcactgatgttgtgcaacgctaagacgtccgatgacgggtcctctcccgacgagaagtatcctgatccattcgagatctccttagcccagggcaaagagggaattttccactccagcgtgcagctcgccgatacatccgaagcaggaccctctagcgtgcccgacctagccttggcctctgaggctgctcaacttcaggcagccggaaatgacaggggaaagacctgtagacgcatcttttttatgaaagagtcgtcaaccgccagttccagagagaaaccaggaaaactcgaggcccagtcctctaatttcctcttccctaaagcatgtcaccagcgggctcgcagtaactccacatcagtaaatccgtactgcacccgggagattgatttccccatgaccaaaaagtctgccgctcctacggatcgtcagccatatagtttatgcagtaatcggaagtcattgtctcagcaactcgattgccctgcagggaaagccgctgggaccagcagacctaccaggtctctgtctacagcccaattggtgcagccaagtggagggctgcaggcaagtgtgattagtaatattgtcctcatgaagggtcaggcaaagggcctgggtttctctatcgtggggggaaaagacagcatctatggaccgattggaatctatgtgaagacgattttcgccgggggagccgcagctgcggacggtcggctgcaggaaggagacgagatcctagaactcaatggcgaatctatggccggcctcacacatcaggatgctctgcaaaagttcaagcaggccaagaagggactattaaccctgacggttaggacaagactgaccgccccaccttccctgtgcagtcatctatccccccccctgtgccgctctcttagctcttctacctgtatcacaaaagattcttccagcttcgcacttgaatccccatcggcccccatcagtacagccaagcctaattatcgaatcatggtggaggttagtctgcagaaagaagccggcgtgggattgggcattggattatgcagtgtgccttattttcagtgcatatccggtatctttgtccatactttgtctcccggatctgtggcacatctggacggcaggcttcgatgtggggatgagattgtcgagatcagcgatagccccgtccactgcttgactctgaacgaagtttacaccatcctttcacattgtgatcctgggccagtgccaataatagtttcccgccacccggacccccaagtgagcgagcagcaactgaaagaggcagtggcccaggctgtcgagaataccaagtttggtaaggagagacaccagtggagcttagagggtgtgaaaaggcttgagtcaagttggcacggccgaccaaccctcgagaaggagcgtgaaaagaacagtgcaccgcctcaccgtcgagcccagaaggttatgatcaggtcctcctcggatagcagctatatgtctggcagcccagggggcagccctggctcaggttcagcagagaaaccaagctcggatgtagatattagcacacactcaccaagcctccctcttgcgcgcgagcctgtggtactgtcaattgcatcctccagactcccccaagagtcaccccctctgcccgaatcacgggacagtcatccccccctccggctcaagaagagttttgagatcctagtacggaagcctatgagctcaaagccgaaacctccccctagaaaatacttcaagagtgattccgacccacagaaaagcttggaagaacgagaaaactcctcttgtagcagcgggcatacaccacccacgtgtgggcaggaagctcgcgaattactccctctcttgctgccccaggaagacacagctggtaggagcccttccgcatctgcgggctgtccaggcccaggtatcggaccccagacaaaatcttctacagagggtgagccggggtggcgaagggcctcacccgttacacagacaagtccaattaaacacccactgctgaaacgccaagcccgcatggactattcctttgataccaccgcagaagacccatgggtcaggatctccgactgtatcaagaacctgttttccccaatcatgtccgagaatcatggccacatgcccctgcagccgaacgcctccctcaatgaggaggagggtactcagggtcacccggacggtacccctcctaaactggacacagctaacggtacccccaaggtctacaagtctgccgattcaagcacggtaaagaagggtccacccgtggctccaaaacccgcatggtttcgacagtccctgaaagggctacgaaatagagcaagtgaccctagagggctccctgatcctgccctgagtacgcaacccgcacccgccagtcgagaacatctggggagccacattagagcttcctcctcctcctcctcaatcagacagcggatctcctccttcgagacgtttggtagctcacaacttccagataagggggcccaaaggttgtcgctccagcctagtagtggggaggccgctaaacctctgggcaaacacgaagagggccgattctccggacttctgggccggggcgccgcacccactctggtgccacagcagccggaacaggtgttaagttctggatctcctgcagcatcggaggcaagagaccccggtgtcagtgagtccccaccaccaggccgtcagccgaatcaaaaaacactgccaccagggccagatcctctgcttcggctcctgtctacgcaggcagaagaatctcagggtcccgtgcttaagatgccaagccagcgtgcccggtccttcccactgacgagatcacaatcttgcgagaccaagctgcttgatgaaaagacatcaaagctgtattccatatcctctcaggtttcctctgccgtgatgaagtccctgctttgtctacccagtagtatcagctgtgcccaaaccccatgcatccctaaagaaggggcttcacccacgagctcgtcaaatgaggactctgccgccaatgggtctgccgagacatcggccctggacacaggctttagccttaacctgtcagaactgcgtgaatacaccgaaggactgaccgaggccaaggaagatgatgacggcgatcatagttctttacagtctggacagagcgttatcagtctactctctagcgaagagctgaaaaaattaatcgaggaggtcaaggtgctggatgaggcgaccctaaagcagctggacggtattcatgtgacaatcttgcataaagaggaaggcgctggccttggttttagcctcgccggtggcgccgatctggagaacaaggtgattactgtgcaccgggtctttccaaacggcctggcttcacaggaaggaacaattcagaaaggaaatgaggtgctttctatcaatggcaagagccttaaagggacaacccaccacgacgcgctggccatcctgagacaagccagagaaccacgccaggcggtgatcgttacccgaaagctgactcccgaggctatgcctgacctgaatagttcgaccgattccgccgctagcgcatcagctgcttcggatgtttcagtcgagtccacagccgaggccactgtttgcactgtcacactcgagaagatgtccgccggcctgggcttttctctcgaaggcgggaagggctcattgcacggtgacaagcccctaaccataaacagaatctttaaaggcgctgccagtgaacagtccgagaccgttcaacccggcgacgagattctgcagttagggggaaccgccatgcagggactcacacggtttgaggcgtggaatattatcaaggcgctgcctgacggacccgtgacaatcgtgatcagacggaagtccctgcaaagcaaggaaaccactgccgcaggtgactcctag

SEQ ID NO: 314572 - DNA, 3999 bp, Artificial Sequence
  derived and/or modified sequence
atggagagtcattctagggcgggaaaatctcggaagtctgccaaatttagatcaatatcgcgatcgttgatgctttgcaatgccaaaacaagcgatgacggttcctcccctgacgagaagtacccggatcccttcgagatttctttagcacagggaaaagaaggcatcttccactcttcagtacagctggccgacacaagcgaggctggcccatcctctgtgcctgatttggcgctggccagcgaggcagcccagctccaggcagctgggaatgaccgagggaagacatgccgacggattttttttatgaaagagtcctcaacagccagctctagggagaaacccggaaaactcgaagcccagtcgagcaactttctttttcccaaagcctgccaccaacgggctcgctccaacagcacatctgtcaatccctactgtacccgggagatagatttccccatgacgaagaagtctgccgcaccgacagaccgacagccctatagcttatgtagtaatagaaagtctctgagccagcagctggattgcccagcaggtaaggctgccggaacgagtcggcctacaaggtcactgtccaccgctcagttagtgcaaccgagcggtgggctccaggcatccgtcatcagcaatattgttctcatgaaaggccaggccaagggcttaggcttttctattgtgggagggaaggactcaatttacggacctattggcatatatgtaaaaacaatttttgccggaggagccgctgcagccgacggacggctgcaggaaggcgacgagattctcgaactaaacggggaatccatggctgggctaactcatcaagacgctctgcagaagttcaagcaagccaaaaagggcctcttgaccctgaccgtgcggaccaggctgaccgccccaccttccctgtgtagtcaccttagcccccctctctgtaggtcactttccagctcaacgtgtatcactaaggattctagtagctttgcactcgaatcccctagtgccccaataagcacagctaaaccaaactaccgcattatggtagaggtttcacttcagaaggaagccggagttggtctcgggattggactgtgttcagtgccatacttccagtgtatctcaggcatcttcgttcacaccctgtcccccggtagcgtagcacacctcgacggcagactacggtgcggggacgagatcgtggaaattagtgattccccagtgcactgcttgacactgaacgaggtatatacgatacttagccactgtgacccaggtccggtgcccatcattgtaagtagacatcctgatccgcaggtgtccgaacagcagctgaaggaagcggtcgctcaggccgtcgaaaacacaaagttcggcaaagaacgacaccagtggagcttagagggagtgaaaagactcgagtcctcttggcatggcaggcctactctggagaaagaaagagagaagaacagtgctccaccacatcgtcgggctcagaaggtgatgatccgttcaagctcggacagttcttacatgagtggttctcccggaggatctcccggaagcgggtctgcagagaagcctagctccgatgtcgacatttctacacatagtcctagcttgcccctcgccagagagccagttgtactgtccattgcctcaagccgcctcccccaagaaagcccaccactgccagagtcgagggatagccacccccctcttaggctgaaaaagagcttcgagatcttggtacggaagcccatgtctagcaaacccaaacctcccccacgcaaatatttcaagtcagattccgatcctcagaagagcctcgaggaacgggaaaatagctcatgcagttctgggcatacgccaccgacatgtggacaggaagcccgagagctgttgccactgcttttgccccaggaggatacggctggacgtagtccttcagcctcagccggttgccccggacctgggattgggcctcaaaccaagtcttcaaccgagggcgagcctggctggaggcgggcatctccagtgactcagacatcaccaattaagcacccccttctcaagcgacaagcccgaatggactactcctttgatactaccgcggaggacccttgggtacgtatctctgactgcatcaaaaacctcttctctccgattatgagcgagaaccacgggcacatgccactgcagccgaatgcttccctgaacgaagaggaggggacacagggccatccggacggtacaccgccaaaattggatacggccaacggcactccgaaggtgtacaagagcgccgacagctccactgtcaaaaagggtcctccagttgcgccaaaaccagcttggtttaggcagagcttaaaaggcctccggaatagggcatccgaccctcggggtctgcccgaccctgccctttccacgcagcccgcaccggctagtcgtgaacatctcggctctcacatccgcgcaagttcaagttcttcctcaatcagacagcggatctcaagctttgaaacgttcggatccagtcaactgcctgacaaaggagctcagcgactcagcctccagccttccagtggagaagccgctaagccactgggaaaacacgaagaaggacgattctccggactgttgggtcgcggagcggctccaaccctcgttccacaacagccagaacaagttctcagttctggttccccagccgcttctgaagctagggaccccggagttagcgagagcccacccccaggtcggcaacctaatcagaaaactctgccgcctggaccagatccccttctcaggctgcttagcactcaagccgaagaaagtcagggacccgtccttaagatgccctcgcagcgggcacgctcctttccattgacaagaagtcagtcctgcgagacaaaacttttagacgagaagacatcaaagctgtatagcatctcgtcgcaggtttcttccgccgtcatgaaaagcctgctttgcttgccttcctcaatctcatgcgcccaaaccccgtgcatccccaaggaaggtgctagccccacttcaagctcgaacgaagactctgccgctaatgggtccgcagagacttctgccctggacaccggcttctcactgaatctcagcgaacttagagagtataccgaagggttaacagaagccaaggaagatgacgacggcgaccatagctcactgcagtcagggcagtctgtgatctctctgctgtctagcgaagagttgaaaaagctgatagaggaagtgaaggtgcttgatgaggccaccctaaaacagctagacgggatccatgttaccattctgcacaaggaggagggtgcaggtttggggttttctctggcaggaggcgctgacctggagaataaggtgattacagtacaccgtgtttttccaaacggtcttgccagccaggaagggacaatccagaagggtaacgaggtgctgtcaatcaatgggaagtccctgaagggtacaactcatcatgatgctctggcgattttaaggcaagcaagggaaccaagacaggccgtgatagttaccaggaagcttaccccagaggcaatgcccgacctaaacagcagcacagacagcgccgcatctgcttccgccgcatccgacgtcagcgtggagtccaccgccgaggccacagtctgtacagtcacacttgagaaaatgtcagcaggtttaggctttagtctggaaggtggcaagggcagtctccacggagataaacctctcacgatcaacaggattttcaagggagctgcttccgagcaatccgaaaccgtgcagcccggtgatgagatccttcagctcgggggaaccgcaatgcaggggctaacaagattcgaggcttggaatattataaaggcgctccctgatgggccagttaccatcgtgattcggagaaaatctcttcagagcaaagagacgaccgccgctggggattcctag

SEQ ID NO: 314573 - DNA, 3999 bp, Artificial Sequence
  derived and/or modified sequence
atggagtcgcacagccgcgctggaaagagcagaaaatctgcaaaatttcggtccatctccaggtccctgatgctctgtaatgctaagaccagtgatgatggctctagccctgatgagaaatatcctgatccctttgagatttccttggcccagggcaaggagggaattttccactcatctgtgcagctggcagacacatcggaggctgggcccagcagtgttcctgatctagcactggcctcggaggctgctcaactccaagcagctgggaatgatcgaggcaagacctgtaggaggatattcttcatgaaggaatcttccacagcttcctctcgagaaaagcctggaaaactagaagcacaaagtagtaacttcctgtttcctaaagcctgccaccaaagggcacgcagcaactcaaccagtgttaatccctattgcacaagagaaattgattttccaatgaccaagaaatctgcagcgcccacggacaggcagccttactctctctgcagtaacaggaagtccctctctcaacaattggactgtccagcaggaaaggctgcgggaacttcgagaccaacacggtccctgagcacagctcagctcgtgcagccatctgggggcctccaggcttcagtcatctccaacatcgtgctgatgaagggccaggctaagggtctgggcttcagcatcgttgggggaaaagacagcatttatggccccattgggatttacgtcaaaaccatttttgcagggggagcagcagcagccgatggaaggctacaggaaggtgatgaaattctggagctcaatggtgaatcaatggctggactaacacatcaggatgctttgcagaagttcaagcaagccaaaaaggggctcctcaccctcaccgtgagaacccgcctgacggcgcctccttccctgtgcagccacctgtctcccccactgtgccgctccctgagctccagcacttgtatcaccaaggacagcagctccttcgccttggaaagcccctcggctcccatcagcaccgccaagcccaattacagaatcatggtggaggtttctctgcagaaagaggccggcgtgggcctgggcatcggcctgtgcagcgttccctacttccaatgcatctctggcattttcgtccacacgctgtcaccaggatccgtggcgcacctggacggacgtctccggtgtggggacgagattgtggaaatcagtgattcccctgtgcactgcctgacgctcaatgaagtctacacgatcctgagtcactgtgatcccggtccagtccccatcattgttagccgacatccagacccacaggtctctgaacagcaactcaaagaagctgtggcccaggctgtggaaaacaccaagtttggaaaggagaggcatcagtggagtctggaaggtgtcaaaaggctggaaagcagttggcacgggcggcccaccttggagaaggaacgagagaagaactcagcacccccgcatcgcagggctcagaaggtcatgatccgctccagcagtgacagcagctacatgtctgggtccccagggggaagtcctgggagtggcagtgctgagaagccgtcctctgacgtggacatcagcacacacagccccagcttgcctctggcacgggagccagtggtgctttctatagcatcctccaggctgccccaggagagcccacccctcccagagagccgggacagccacccgccgctgagactgaagaaatcctttgagattttggtgagaaagcctatgtcctccaagcccaagcctccacccagaaaatactttaaaagtgacagtgaccctcagaagagtctggaagagagagagaactcctcatgctcttctgggcacaccccacccacctgtggccaggaagcgagagagctgctgccactgctgctaccacaggaagacacagcagggagaagccctagtgcctctgccggctgcccaggacctggtatcggcccacagaccaagtcctccacagagggcgagccagggtggagaagagccagcccagtgacccaaacatccccgataaaacacccactgcttaagaggcaggctcggatggactatagctttgataccacagccgaagacccttgggttaggatttctgactgcatcaaaaacttatttagccccatcatgagtgagaaccatggccacatgcctctacagcccaatgccagcctgaatgaagaagaagggacacagggccacccagatgggaccccaccaaagctggacaccgccaatggcactcccaaagtttacaagtcagcagacagcagcactgtgaagaaaggtcctcctgtggctcccaagccagcctggtttcgccaaagcttgaaaggtttgaggaatcgtgcttcagacccaagagggctccctgatcctgccttgtccacccagccagcacctgcttccagggagcacctaggatcacacatccgggcctcctcctcctcctcctccatcaggcagagaatcagctcctttgaaacctttggctcctctcaactgcctgacaaaggagcccagagactgagcctccagccctcctctggggaggcagcaaaacctcttgggaagcatgaggaaggacggttttctggactcttggggcgaggggctgcacccactcttgtgccccagcagcctgagcaagtactgtcctcggggtcccctgcagcctccgaggccagagacccaggtgtgtctgagtcccctcccccagggcggcagcccaatcagaaaactctcccccctggcccggacccgctcctaaggctgctgtcaacacaggctgaggaatctcaaggcccagtgctcaagatgcctagccagcgagcacggagcttccccctgaccaggtcccagtcctgtgagacgaagctacttgacgaaaagaccagcaaactctattctatcagcagccaagtgtcatcggctgtcatgaaatccttgctgtgccttccatcttctatctcctgtgcccagactccctgcatccccaaggaaggggcatctccaacatcatcatccaacgaagactcagctgcaaatggttctgctgaaacatctgccttggacacagggttctcgctcaacctttcagagctgagagaatatacagagggtctcacggaagccaaggaagacgatgatggggaccacagttcccttcagtctggtcagtccgttatctccctgctgagctcagaagaattaaaaaaactcatcgaggaggtgaaggttctggatgaagcaacattaaagcaattagacggcatccatgtcaccatcttacacaaggaggaaggtgctggtcttgggttcagcttggcaggaggagcagatctagaaaacaaggtgattacggttcacagagtgtttccaaatgggctggcctcccaggaagggactattcagaagggcaatgaggttctttccatcaacggcaagtctctcaaggggaccacgcaccatgatgccttggccatcctccgccaagctcgagagcccaggcaagctgtgattgtcacaaggaagctgactccagaggccatgcccgacctcaactcctccactgactctgcagcctcagcctctgcagccagtgatgtttctgtagaatctacagcagaggccacagtctgcacggtgacactggagaagatgtcggcagggctgggcttcagcctggaaggagggaagggctccctacacggagacaagcctctcaccattaacaggattttcaaaggagcagcctcagaacaaagtgagacagtccagcctggagatgaaatcttacagctgggtggcactgccatgcagggcctcacacggtttgaagcctggaacatcatcaaggcactgcctgatggacctgtcacgattgtcatcaggagaaaaagcctccagtccaaggaaaccacagctgctggagactcctag

SEQ ID NO: 314574 - DNA, 2397 bp, Artificial Sequence
  derived and/or modified sequence
ctgtttacaccacaggaagcgagagagctgctgccactgctgctaccacaggaagacacagcagggagaagccctagtgcctctgccggctgcccaggacctggtatcggcccacagaccaagtcctccacagagggcgagccagggtggagaagagccagcccagtgacccaaacatccccgataaaacacccactgcttaagaggcaggctcggatggactatagctttgataccacagccgaagacccttgggttaggatttctgactgcatcaaaaacttatttagccccatcatgagtgagaaccatggccacatgcctctacagcccaatgccagcctgaatgaagaagaagggacacagggccacccagatgggaccccaccaaagctggacaccgccaatggcactcccaaagtttacaagtcagcagacagcagcactgtgaagaaaggtcctcctgtggctcccaagccagcctggtttcgccaaagcttgaaaggtttgaggaatcgtgcttcagacccaagagggctccctgatcctgccttgtccacccagccagcacctgcttccagggagcacctaggatcacacatccgggcctcctcctcctcctcctccatcaggcagagaatcagctcctttgaaacctttggctcctctcaactgcctgacaaaggagcccagagactgagcctccagccctcctctggggaggcagcaaaacctcttgggaagcatgaggaaggacggttttctggactcttggggcgaggggctgcacccactcttgtgccccagcagcctgagcaagtactgtcctcggggtcccctgcagcctccgaggccagagacccaggtgtgtctgagtcccctcccccagggcggcagcccaatcagaaaactctcccccctggcccggacccgctcctaaggctgctgtcaacacaggctgaggaatctcaaggcccagtgctcaagatgcctagccagcgagcacggagcttccccctgaccaggtcccagtcctgtgagacgaagctacttgacgaaaagaccagcaaactctattctatcagcagccaagtgtcatcggctgtcatgaaatccttgctgtgccttccatcttctatctcctgtgcccagactccctgcatccccaaggaaggggcatctccaacatcatcatccaacgaagactcagctgcaaatggttctgctgaaacatctgccttggacacagggttctcgctcaacctttcagagctgagagaatatacagagggtctcacggaagccaaggaagacgatgatggggaccacagttcccttcagtctggtcagtccgttatctccctgctgagctcagaagaattaaaaaaactcatcgaggaggtgaaggttctggatgaagcaacattaaagcaattagacggcatccatgtcaccatcttacacaaggaggaaggtgctggtcttgggttcagcttggcaggaggagcagatctagaaaacaaggtgattacggttcacagagtgtttccaaatgggctggcctcccaggaagggactattcagaagggcaatgaggttctttccatcaacggcaagtctctcaaggggaccacgcaccatgatgccttggccatcctccgccaagctcgagagcccaggcaagctgtgattgtcacaaggaagctgactccagaggccatgcccgacctcaactcctccactgactctgcagcctcagcctctgcagccagtgatgtttctgtagaatctacagcagaggccacagtctgcacggtgacactggagaagatgtcggcagggctgggcttcagcctggaaggagggaagggctccctacacggagacaagcctctcaccattaacaggattttcaaaggagcagcctcagaacaaagtgagacagtccagcctggagatgaaatcttacagctgggtggcactgccatgcagggcctcacacggtttgaagcctggaacatcatcaaggcactgcctgatggacctgtcacgattgtcatcaggagaaaaagcctccagtccaaggaaaccacagctgctggagactcctaggcaggacatgctgaagccaaagccaataacacacagctaacacacagctcccataaccgctgattctcagggtctctgctgccgccccacccagatgggggaaagcacaggtgggcttcccagtggctgctgcccaggcccagaccttctaggacgccacccagcaaaaggttgttcctaaaataagggcagagtcacacgggggcagctgatacaaattgcagactgtgtaaaaagagagcttaatgataatattgtggtgccacaaataaaatggatttatta

SEQ ID NO: 314575 - DNA, 4551 bp, Artificial Sequence
  derived and/or modified sequence
ctggggatggaaacctgactgcctggcccgggacggcgcttgcagccaggcagggcccagagcagtcctccctcggcatggggctggaggctcagaggctgccaggggctgaggaggccccagtgcgggttgccctgcgagttcgaccactgctgcccaaggagctgctgcacgggcatcagagctgcctgcaggtggagccagggcttggccgcgtcactctgggccgtgaccgacactttggcttccacgtggtgctggccgaggatgcggggcaggaggccgtgtaccaggcctgcgttcagcccctccttgaggccttcttcgagggcttcaatgccactgtctttgcctatggtcagacgggctcagggaagacatacaccatgggggaggccagtgtggcctccctccttgaggatgagcagggcattgtcccgagggccatggccgaggccttcaagctcatcgatgagaacgacctgcttgactgtctggtacatgtgtcctacctggaagtgtacaaggaggagttccgagacctgctcgaggtgggcactgccagccgtgacatccagctccgggaagatgagcgcgggaatgttgtgctgtgcggggtgaaggaggtcgacgtggagggcctggatgaggtgctgagcctcctggagatgggcaacgcggcgcggcacacgggagccacgcacctcaaccacctgtctagccgctcacacacggtcttcaccgtgaccctggagcagcgggggcgcgcccccagccgcctaccccgccccgccccgggccagctgctcgtctccaagttccacttcgtggacctggcgggctcagagagggtgctcaagacgggcagcaccggcgagcggctcaaggagagcatccagatcaacagcagcctcctggcgctgggcaacgtcatcagcgccctgggggaccctcagcgccggggcagccacataccctaccgcgactccaagatcacccggatcctcaaagactcgctgggcgggaacgccaagacggtgatgatcgcctgcgtcagcccttcctcctccgacttcgacgagaccctcaacaccctcaactacgccagccgcgcccagaacatccgcaaccgcgccacggtcaactggcggcccgaggccgagcggccacccgaagagacggcgagcggcgcgcggggtccgccacggcaccgctccgagacccgcatcatccaccgcggccggcgcgccccaggcccagccaccgcctccgcggcggccgccatgcgcctgggcgccgagtgcgcgcgctaccgggcctgcaccgacgccgcctacagcctcttgcgcgagctgcaggccgagcccgggctgcccggcgccgccgcccgcaaggtgcgcgactggctgtgcgccgtcgagggcgagcgcagcgccctgagctccgcctccgggcccgatagcggcatcgagagcgcctccgtcgaggaccaggcggcgcagggggccggcgggcgaaaggaggatgagggggcgcagcagctgctgaccctgcagaaccaggtggcgcggctggaggaggagaaccgagactttctggctgcgctggaggacgccatggagcagtacaaactgcagagcgaccggctgcgtgagcagcaggaggagatggtggaactgcggctgcggttagagctggtgcggccaggctgggggggcccgcggctcctgaatggcctgcctcccgggtcctttgtgcctcgacctcatacagcccccctggggggtgcccacgcccatgtgctgggcatggtgccgcctgcctgcctccctggagatgaagttggctctgagcagaggggagagcaggtgacaaatggcagggaggctggagctgagttgctgactgaggtgaacaggctgggaagtggctcttcagctgcttcagaggaggaagaggaggaggaggagccgcccaggcggaccttacacctgcgcagaaataggatcagcaactgcagtcagagggcgggggcacgcccagggagtctgccagagaggaagggcccagagctttgccttgaggagttggatgcagccattccagggtccagagcagttggtgggagcaaggcccgagttcaggcccgccaggtcccccctgccacagcctcagagtggcggctggcccaggcccagcagaagatccgggagctggctatcaacatccgcatgaaggaggagcttattggcgagctggtccgcacaggaaaggcagctcaggccctgaaccgccagcacagccagcgtatccgggagctggagcaggaggcagagcaggtgcgggccgagctgagtgaaggccagaggcagctgcgggagctcgagggcaaggagctccaggatgctggcgagcggtctcggctccaggagttccgcaggagggtcgctgcggcccagagccaggtgcaggtgctgaaggagaagaagcaggctacggagcggctggtgtcactgtcggcccagagtgagaagcgactgcaggagctcgagcggaacgtgcagctcatgcggcagcagcagggacagctgcagaggcggcttcgcgaggagacggagcagaagcggcgcctggaggcagaaatgagcaagcggcagcaccgcgtcaaggagctggagctgaagcatgagcaacagcagaagatcctgaagattaagacggaagagatcgcggcattccagaggaagaggcgcagtggcagcaacggctctgtggtcagcctggaacagcagcagaagattgaggagcagaagaagtggctggaccaggagatggagaaggtgctacagcagcggcgggcgctggaggagctgggggaggagctccacaagcgggaggccatcctggccaagaaggaggccctgatgcaggagaagacggggctggagagcaagcgcctgagatccagccaggccctcaacgaggacatcgtgcgagtgtccagccggctggagcacctggagaaggagctgtccgagaagagcgggcagctgcggcagggcagcgcccagagccagcagcagatccgcggggagatcgacagcctgcgccaggagaaggactcgctgctcaagcagcgcctggagatcgacggcaagctgaggcaggggagtctgctgtcccccgaggaggagcggacgctgttccagttggatgaggccatcgaggccctggatgctgccattgagtataagaatgaggccatcacatgccgccagcgggtgcttcgggcctcagcctcgttgctgtcccagtgcgagatgaacctcatggccaagctcagctacctctcatcctcagagaccagagccctcctctgcaagtattttgacaaggtggtgacgctccgagaggagcagcaccagcagcagattgccttctcggaactggagatgcagctggaggagcagcagaggctggtgtactggctggaggtggccctggagcggcagcgcctggagatggaccgccagctgaccctgcagcagaaggagcacgagcagaacatgcagctgctcctgcagcagagtcgagaccacctcggtgaagggttagcagacagcaggaggcagtatgaggcccggattcaagctctggagaaggaactgggccgttacatgtggataaaccaggaactgaaacagaagctcggcggtgtgaacgctgtaggccacagcaggggtggggagaagaggagcctgtgctcggagggcagacaggctcctggaaatgaagatgagctccacctggcacccgagcttctctggctgtcccccctcactgagggggccccccgcacccgggaggagacgcgggacttggtccacgctccgttacccttgacctggaaacgctcgagcctgtgtggtgaggagcaggggtcccccgaggaactgaggcagcgggaggcggctgagcccctggtggggcgggtgcttcctgtgggtgaggcaggcctgccctggaactttgggcctttgtccaagccccggcgggaactgcgacgagccagcccggggatgattgatgtccggaaaaaccccctgtaagccctcggggcagaccctgccttggagggagactccgagcctgctgaaaggggcagctgcctgttttgcttctgtgaagggcagtccttaccgcacaccctaaatccaggccctcatctgtaccctcactgggatcaacaaatttgggccatggcccaaaagaactggaccctcatttaacaaaataatatgcaaattcccaccacttacttccatgaagctgtggtacccaattgccgccttgtgtcttgctcgaatctcaggacaattctggtttcaggcgtaaatggatgtgcttgtagttcaggggtttggccaagaatcatcacgaaagggtcggtggtaaccaggttgtggtttaaatggtcttatgtatataggggaaactgggagactttaggatcttaaaaaaccatttaataaaaaaaaatctttgaaggga

SEQ ID NO: 314576 - DNA, 84 bp, Artificial Sequence
  derived and/or modified sequence
atgatcctgaacaaggccctgctgctgggcgccctggccctgacagctgtgatgagcccctgtggcggggaggacatcgtgtag

SEQ ID NO: 314577 - protein, 965 aa, Artificial Sequence
  derived and/or modified sequence
MALLCGLGQVTLRIWVSLPSQSENGIGFLAARAFLRSGGMEALTTQLGPGREGSSSPNSKQELQPYSGSSALKPNQVGETSLYGVPIVSLVIDGQERLCLAQISNTLLKNYSYNEIHNRRVALGITCVQCTPVQLEILRRAGAMPISSRRCGMITKREAERLCKSFLGEHKPPKLPENFAFDVVHECAWGSRGSFIPARYNSSRAKCIKCGYCSMYFSPNKFIFHSHRTPDAKYTQPDAANFNSWRRHLKLSDKSATDELSHAWEDVKAMFNGGTRKRTFSLQGGGGGGANGGSGGQGKGGAGGGGGGGPGCGAEMAPGPPPHKSLRCGEDEAAGPPGPPPPHPQRGLGLATGASGPAGPGGPGGGAGVRSYPVIPVPSKGFGLLQKLPPPLFPHPYGFPTAFGLCPKKDDPVLGAGEPKGGPGTGSGGGGAGTGGGAGGPGASHLPPGAGAGPGGGAMFWGHQPSGAAKDAAAVAAAAAAATVYPTFPMFWPAAGSLPVPSYPAAQSQAKAVAAAVAAAAAAAAAAAGSGAPEPLDGAEPAKESGLGAEERCPSALSRGPLDEDGTDEALPPPLAPLPPPPPPPARKGSYVSAFRPVVKDTESIAKLYGSAREAYGAGPARGPGPGAGSGGYVSPDFLSEGSSSYNSASPDVDTADEPEVDVESNRFPDDEDAQEETEPSAPSAGGGPDGEQPTGPPSATSSGADGPANSPDGGSPRPRRRLGPPPAGRPAFGDLAAEDLVRRPERSPPSGGGGYELREPCGPLGGPAPAKVFAPERDEHVKSAAVALGPAASYVCTPEAHEPDKEDNHSPADDLETRKSYPDQRSISQPSPANTDRGEDGLTLDVTGTHLVEKDIENLAREELQKLLLEQMELRKKLEREFQSLKDNFQDQMKRELAYREEMVQQLQIVRDTLCNELDQERKARYAIQQKLKEAHDALHHFSCKMLTPRHCTGNCSFKPPLLP

SEQ ID NO: 314578 - protein, 921 aa, Artificial Sequence
  derived and/or modified sequence
MALLCGLGQVTLRIWVSLPSQSENGIGSGGMEALTTQLGPGREGSSSPNSKQELQPYSGSSALKPNQVGETSLYGVPIVSLVIDGQERLCLAQISNTLLKNYSYNEIHNRRVALGITCVQCTPVQLEILRRAGAMPISSRRCGMITKREAERLCKSFLGEHKPPKLPENFAFDVVHECAWGSRGSFIPARYNSSRAKCIKCGYCSMYFSPNKFIFHSHRTPDAKYTQPDAANFNSWRRHLKLSDKSATDELSHAWEDVKAMFNGGTRCGAEMAPGPPPHKSLRCGEDEAAGPPGPPPPHPQRGLGLATGASGPAGPGGPGGGAGVRSYPVIPVPSKGFGLLQKLPPPLFPHPYGFPTAFGLCPKKDDPVLGAGEPKGGPGTGSGGGGAGTGGGAGGPGASHLPPGAGAGPGGGAMFWGHQPSGAAKDAAAVAAAAAAATVYPTFPMFWPAAGSLPVPSYPAAQSQAKAVAAAVAAAAAAAAAAAGSGAPEPLDGAEPAKESGLGAEERCPSALSRGPLDEDGTDEALPPPLAPLPPPPPPPARKGSYVSAFRPVVKDTESIAKLYGSAREAYGAGPARGPGPGAGSGGYVSPDFLSEGSSSYNSASPDVDTADEPEVDVESNRFPDDEDAQEETEPSAPSAGGGPDGEQPTGPPSATSSGADGPANSPDGGSPRPRRRLGPPPAGRPAFGDLAAEDLVRRPERSPPSGGGGYELREPCGPLGGPAPAKVFAPERDEHVKSAAVALGPAASYVCTPEAHEPDKEDNHSPADDLETRKSYPDQRSISQPSPANTDRGEDGLTLDVTGTHLVEKDIENLAREELQKLLLEQMELRKKLEREFQSLKDNFQDQMKRELAYREEMVQQLQIVRDTLCNELDQERKARYAIQQKLKEAHDALHHFSCKMLTPRHCTGNCSFKPPLLP

SEQ ID NO: 314579 - DNA, 2898 bp, Artificial Sequence
  derived and/or modified sequence
atggccctgctgtgcggcctgggccaggtgaccctgagaatctgggtgagcctgcccagccagagcgagaacggcatcggcttcctggccgccagagccttcctgagaagcggcggcatggaggccctgaccacccagctgggccccggcagagagggcagcagcagccccaacagcaagcaggagctgcagccctacagcggcagcagcgccctgaagcccaaccaggtgggcgagaccagcctgtacggcgtgcccatcgtgagcctggtgatcgacggccaggagagactgtgcctggcccagatcagcaacaccctgctgaagaactacagctacaacgagatccacaacagaagagtggccctgggcatcacctgcgtgcagtgcacccccgtgcagctggagatcctgagaagagccggcgccatgcccatcagcagcagaagatgcggcatgatcaccaagagagaggccgagagactgtgcaagagcttcctgggcgagcacaagccccccaagctgcccgagaacttcgccttcgacgtggtgcacgagtgcgcctggggcagcagaggcagcttcatccccgccagatacaacagcagcagagccaagtgcatcaagtgcggctactgcagcatgtacttcagccccaacaagttcatcttccacagccacagaacccccgacgccaagtacacccagcccgacgccgccaacttcaacagctggagaagacacctgaagctgagcgacaagagcgccaccgacgagctgagccacgcctgggaggacgtgaaggccatgttcaacggcggcaccagaaagagaaccttcagcctgcagggcggcggcggcggcggcgccaacggcggcagcggcggccagggcaagggcggcgccggcggcggcggcggcggcggccccggctgcggcgccgagatggcccccggcccccccccccacaagagcctgagatgcggcgaggacgaggccgccggcccccccggccccccccccccccacccccagagaggcctgggcctggccaccggcgccagcggccccgccggccccggcggccccggcggcggcgccggcgtgagaagctaccccgtgatccccgtgcccagcaagggcttcggcctgctgcagaagctgcccccccccctgttcccccacccctacggcttccccaccgccttcggcctgtgccccaagaaggacgaccccgtgctgggcgccggcgagcccaagggcggccccggcaccggcagcggcggcggcggcgccggcaccggcggcggcgccggcggccccggcgccagccacctgccccccggcgccggcgccggccccggcggcggcgccatgttctggggccaccagcccagcggcgccgccaaggacgccgccgccgtggccgccgccgccgccgccgccaccgtgtaccccaccttccccatgttctggcccgccgccggcagcctgcccgtgcccagctaccccgccgcccagagccaggccaaggccgtggccgccgccgtggccgccgccgccgccgccgccgccgccgccgccggcagcggcgcccccgagcccctggacggcgccgagcccgccaaggagagcggcctgggcgccgaggagagatgccccagcgccctgagcagaggccccctggacgaggacggcaccgacgaggccctgcccccccccctggcccccctgcccccccccccccccccccccgccagaaagggcagctacgtgagcgccttcagacccgtggtgaaggacaccgagagcatcgccaagctgtacggcagcgccagagaggcctacggcgccggccccgccagaggccccggccccggcgccggcagcggcggctacgtgagccccgacttcctgagcgagggcagcagcagctacaacagcgccagccccgacgtggacaccgccgacgagcccgaggtggacgtggagagcaacagattccccgacgacgaggacgcccaggaggagaccgagcccagcgcccccagcgccggcggcggccccgacggcgagcagcccaccggcccccccagcgccaccagcagcggcgccgacggccccgccaacagccccgacggcggcagccccagacccagaagaagactgggccccccccccgccggcagacccgccttcggcgacctggccgccgaggacctggtgagaagacccgagagaagcccccccagcggcggcggcggctacgagctgagagagccctgcggccccctgggcggccccgcccccgccaaggtgttcgcccccgagagagacgagcacgtgaagagcgccgccgtggccctgggccccgccgccagctacgtgtgcacccccgaggcccacgagcccgacaaggaggacaaccacagccccgccgacgacctggagaccagaaagagctaccccgaccagagaagcatcagccagcccagccccgccaacaccgacagaggcgaggacggcctgaccctggacgtgaccggcacccacctggtggagaaggacatcgagaacctggccagagaggagctgcagaagctgctgctggagcagatggagctgagaaagaagctggagagagagttccagagcctgaaggacaacttccaggaccagatgaagagagagctggcctacagagaggagatggtgcagcagctgcagatcgtgagagacaccctgtgcaacgagctggaccaggagagaaaggccagatacgccatccagcagaagctgaaggaggcccacgacgccctgcaccacttcagctgcaagatgctgacccccagacactgcaccggcaactgcagcttcaagccccccctgctgccctag

SEQ ID NO: 314580 - DNA, 2766 bp, Artificial Sequence
  derived and/or modified sequence
atggccctgctgtgcggcctgggccaggtgaccctgagaatctgggtgagcctgcccagccagagcgagaacggcatcggcagcggcggcatggaggccctgaccacccagctgggccccggcagagagggcagcagcagccccaacagcaagcaggagctgcagccctacagcggcagcagcgccctgaagcccaaccaggtgggcgagaccagcctgtacggcgtgcccatcgtgagcctggtgatcgacggccaggagagactgtgcctggcccagatcagcaacaccctgctgaagaactacagctacaacgagatccacaacagaagagtggccctgggcatcacctgcgtgcagtgcacccccgtgcagctggagatcctgagaagagccggcgccatgcccatcagcagcagaagatgcggcatgatcaccaagagagaggccgagagactgtgcaagagcttcctgggcgagcacaagccccccaagctgcccgagaacttcgccttcgacgtggtgcacgagtgcgcctggggcagcagaggcagcttcatccccgccagatacaacagcagcagagccaagtgcatcaagtgcggctactgcagcatgtacttcagccccaacaagttcatcttccacagccacagaacccccgacgccaagtacacccagcccgacgccgccaacttcaacagctggagaagacacctgaagctgagcgacaagagcgccaccgacgagctgagccacgcctgggaggacgtgaaggccatgttcaacggcggcaccagatgcggcgccgagatggcccccggcccccccccccacaagagcctgagatgcggcgaggacgaggccgccggcccccccggccccccccccccccacccccagagaggcctgggcctggccaccggcgccagcggccccgccggccccggcggccccggcggcggcgccggcgtgagaagctaccccgtgatccccgtgcccagcaagggcttcggcctgctgcagaagctgcccccccccctgttcccccacccctacggcttccccaccgccttcggcctgtgccccaagaaggacgaccccgtgctgggcgccggcgagcccaagggcggccccggcaccggcagcggcggcggcggcgccggcaccggcggcggcgccggcggccccggcgccagccacctgccccccggcgccggcgccggccccggcggcggcgccatgttctggggccaccagcccagcggcgccgccaaggacgccgccgccgtggccgccgccgccgccgccgccaccgtgtaccccaccttccccatgttctggcccgccgccggcagcctgcccgtgcccagctaccccgccgcccagagccaggccaaggccgtggccgccgccgtggccgccgccgccgccgccgccgccgccgccgccggcagcggcgcccccgagcccctggacggcgccgagcccgccaaggagagcggcctgggcgccgaggagagatgccccagcgccctgagcagaggccccctggacgaggacggcaccgacgaggccctgcccccccccctggcccccctgcccccccccccccccccccccgccagaaagggcagctacgtgagcgccttcagacccgtggtgaaggacaccgagagcatcgccaagctgtacggcagcgccagagaggcctacggcgccggccccgccagaggccccggccccggcgccggcagcggcggctacgtgagccccgacttcctgagcgagggcagcagcagctacaacagcgccagccccgacgtggacaccgccgacgagcccgaggtggacgtggagagcaacagattccccgacgacgaggacgcccaggaggagaccgagcccagcgcccccagcgccggcggcggccccgacggcgagcagcccaccggcccccccagcgccaccagcagcggcgccgacggccccgccaacagccccgacggcggcagccccagacccagaagaagactgggccccccccccgccggcagacccgccttcggcgacctggccgccgaggacctggtgagaagacccgagagaagcccccccagcggcggcggcggctacgagctgagagagccctgcggccccctgggcggccccgcccccgccaaggtgttcgcccccgagagagacgagcacgtgaagagcgccgccgtggccctgggccccgccgccagctacgtgtgcacccccgaggcccacgagcccgacaaggaggacaaccacagccccgccgacgacctggagaccagaaagagctaccccgaccagagaagcatcagccagcccagccccgccaacaccgacagaggcgaggacggcctgaccctggacgtgaccggcacccacctggtggagaaggacatcgagaacctggccagagaggagctgcagaagctgctgctggagcagatggagctgagaaagaagctggagagagagttccagagcctgaaggacaacttccaggaccagatgaagagagagctggcctacagagaggagatggtgcagcagctgcagatcgtgagagacaccctgtgcaacgagctggaccaggagagaaaggccagatacgccatccagcagaagctgaaggaggcccacgacgccctgcaccacttcagctgcaagatgctgacccccagacactgcaccggcaactgcagcttcaagccccccctgctgccctag

SEQ ID NO: 314581 - DNA, 2898 bp, Artificial Sequence
  derived and/or modified sequence
atggcgttactgtgcggactcggccaggtgaccctccggatttgggtatcactcccatcccaatctgagaatgggatcggcttcctcgcagccagagcgttccttcggtccggagggatggaagcgttgactacccagctcggacccggacgagagggatcctctagccctaacagcaaacaggagctgcaaccctacagtggttccagtgctcttaagcccaaccaggtgggtgaaacaagtttgtatggagttccaatagtctcactggtcattgacggacaggagagactctgcctggcccagataagtaacaccctgcttaagaactacagttacaatgaaatccataaccgacgggtggcactgggtattacatgtgttcaatgcacacctgtccagttggagatactgcgcagggctggcgccatgccgattagctcaagacgctgtggaatgattactaagagagaggccgaacggctttgtaagagcttcttgggagagcacaagccccccaaactgccagagaattttgcttttgacgttgttcacgagtgcgcttggggatcaaggggtagctttattcctgcaagatacaactcaagtagggccaagtgcataaaatgtggctactgtagtatgtatttttcccccaataagttcatatttcacagccacaggacacctgacgcaaaatatacacagcctgatgcagcgaatttcaacagttggcgccggcacttgaaactctccgacaaaagcgctactgatgagctctctcatgcatgggaggacgtcaaggccatgttcaatggcggcacacgaaaacgtactttttccttgcaggggggcggcgggggcggcgccaatggtggcagtggcggtcagggaaaaggcggcgctggcggcggcggggggggggggccagggtgcggggcagaaatggctccgggaccaccccctcacaaatctttgcgttgcggggaagacgaagctgcgggacctcctgggccacccccacctcaccctcagcggggccttgggctggccaccggagcttctggccccgctgggccaggcggccctggaggtggcgctggggttaggagttacccagtgatacccgttccctccaaaggatttggattgctgcagaagctgccacctccattgtttccccacccctacggattccctacagcctttggattatgcccgaagaaagacgaccctgtcctgggcgccggggagcccaagggtggacccggaaccgggtccggcggaggtggagcaggcacaggtggcggagctggggggcctggcgcctcccaccttccccctggcgccggcgcaggccccgggggaggtgctatgttctgggggcatcagccgagcggggccgcaaaagacgctgctgccgtagcagcagcagccgctgccgcaaccgtctacccaacttttccgatgttttggcctgctgctggatcactgcctgtcccttcctaccccgcagcccagagtcaggcaaaggcagtggccgcagcggtggcagccgctgcagctgccgcagctgctgccgcaggctctggggctcccgagccattagacggcgcagagcccgccaaggagtcaggcctaggtgctgaggagcgatgtcctagcgccctctcgcgcggcccactagatgaggacggcaccgacgaggcgttacccccccctcttgcccccctgcccccacccccgcctccaccggcacgaaaggggtcctacgtgagcgcctttcgccctgtagtaaaggataccgagtctattgcaaagctgtacggctccgcgcgcgaggcgtatggtgcagggccagcacggggacctgggcccggtgccggcagcgggggctatgtgagtcctgacttcttgtccgagggaagctcctcatataattcagcctcgccagacgtcgacacagccgacgagcctgaggtggacgttgagagcaacagattccccgacgacgaggacgctcaggaggagaccgaaccttctgctcccagcgccggcggcgggcccgatggtgagcaacctactggccccccgtcagctaccagttccggagcagatggacctgccaactcacctgacggggggtcccccaggcccagacggcggctcgggcctccccctgccggaagacccgctttcggcgacctcgctgctgaggacctcgttaggaggccagagagatcacctccatctgggggaggaggatatgagttgcgcgagccgtgtggtccgctcggtggtccagcccctgccaaggtgtttgcacctgaacgcgatgagcacgtcaaaagtgccgctgttgccttaggccccgctgcctcttacgtgtgtactccagaagctcacgagcctgacaaagaagataatcacagtcctgctgacgacctggaaacccggaagagttacccagaccagaggagtatctctcagccctccccagctaacaccgacaggggcgaagacggattaactcttgatgtcactggcactcatttggtggagaaagatattgaaaacttggctagagaagagctacaaaaactattactggagcaaatggaattgcggaagaaactcgagcgcgagtttcagagcctcaaagataacttccaagaccaaatgaagcgcgagctggcgtaccgcgaagagatggtgcagcagctccagatcgtgcgcgacacattatgcaatgagctggaccaggaaaggaaggcccgatacgccattcagcagaagctcaaagaagcacatgatgctttacatcacttcagttgtaaaatgttaactcccagacactgtacaggaaattgttccttcaagccgccattgctcccatag

SEQ ID NO: 314582 - DNA, 2766 bp, Artificial Sequence
  derived and/or modified sequence
atggcactgctgtgcggactggggcaggtgactctcaggatctgggtaagcttgccctctcagagcgagaacgggatcgggtccggtggaatggaggcattgaccacccagctcggccctggccgcgaagggtctagcagcccgaatagcaagcaggagcttcagccatatagcggctcttccgcgctgaagcctaaccaggtgggagagacctctttatatggagttcctattgtcagcttggtcatcgacggacaggaaaggctatgcctggctcaaattagcaacacgctgttgaaaaattatagctataatgagatccacaatagaagagtagcgctgggcattacatgcgtccaatgcaccccagtgcaactggaaatcctgaggagggctggagccatgccaatctcttctagacggtgcggcatgattacaaagagagaagccgagcggctctgcaagagctttctgggggaacacaaaccccccaagctgccggagaactttgcattcgacgtcgttcatgagtgtgcttggggaagtagagggtcattcattcccgctagatacaacagctcacgggcaaagtgtataaaatgcggttactgcagtatgtacttttctcctaataagtttatcttccacagtcatcggacgccagacgcaaaatacactcagccagatgctgctaatttcaacagctggcgcagacatttgaagttgtccgacaaaagcgctaccgacgagctgtcccatgcgtgggaggacgtcaaagctatgttcaatggaggaacgagatgcggagccgaaatggcccctggacctcccccccataaatcccttaggtgcggcgaggacgaagccgcaggaccccctggcccacctcctccccacccccagcggggtctgggcctggccactggcgcctctggaccggccggcccaggtggtcctggaggcggggccggggtacggagctaccccgtgatacctgtaccaagcaaggggtttggactgctccagaaactgccaccacccctctttcctcacccgtacggtttcccaaccgccttcgggctatgccctaagaaagacgatcctgtccttggagccggcgagccaaaggggggcccaggaaccggcagcggtggaggaggggctggtacaggagggggtgcaggagggcccggggccagtcatctccctccaggcgccggggccggacctgggggaggtgcaatgttctggggacatcagcccagcggggccgccaaggacgccgcggccgtggcagccgccgcagctgctgccacagtgtaccctacttttccaatgttctggccagcagctgggtccctgccagtgccatcctaccccgcggctcagtctcaggcaaaagccgtggccgctgcagtggccgctgccgcggcggccgcggccgcagctgccggtagtggagcccccgaacccctggatggagctgagcctgcgaaggaatccggcctcggagctgaggaaagatgcccgagcgccctgagtcgtgggcctctggatgaggatggcactgatgaagctctgccccctcccctggcgcctctaccccccccgcctccccccccggcccgcaaaggcagttatgtcagcgcttttcggcccgtcgtgaaggacactgagtctatcgccaagctgtacggtagcgcacgcgaggcatacggggcgggccctgcaagagggcccgggcctggagctggctctgggggttacgtcagccccgatttcttaagtgaaggatcctcatcttacaactccgcttcgcccgatgtggacaccgctgacgaacctgaagtggatgttgagtcaaaccggttccccgatgatgaagacgcacaagaagagactgaaccctccgctccctcagccggggggggccccgacggcgagcaaccgactgggccaccctcagcaacctcatcgggagctgatggtccggccaacagtcctgacggcggtagtccccgccctagaaggaggttggggcccccacctgccggccgaccagcttttggggacctcgcagccgaggacctagtcaggcgccccgaaagatcccctccttcaggaggcggtgggtatgaacttagagaaccttgcggaccccttgggggaccagcccccgcgaaggtctttgcgcctgagcgcgacgaacacgtgaagagcgccgctgtggcgttgggaccagctgcaagctacgtctgtactcccgaggcccatgagcccgacaaggaagataatcactccccagccgatgatctggagactcgcaagtcatacccagatcaacgatcgatctctcagccttccccagccaatacagataggggtgaggatgggcttaccctcgatgtgaccggtacccacctggtagagaaggacatcgagaacctagcccgagaggaactacagaagctcctactggaacaaatggagttgcgcaaaaagctggaaagagaatttcagtcactgaaggataattttcaggatcaaatgaagcgcgagctggcctatagagaagagatggtgcagcagttgcagattgtaagagacaccttgtgtaatgaattagatcaagagcggaaagcaagatatgcgattcagcaaaagttaaaggaggcgcatgatgctctgcatcacttctcttgcaaaatgttgactcctaggcactgtacaggcaactgctctttcaagccaccgctgctgccgtag

SEQ ID NO: 314583 - DNA, 2898 bp, Artificial Sequence
  derived and/or modified sequence
atggccctgctgtgtggcctgggccaggtgaccctgcgcatctgggtgtccctgcccagccagagtgaaaatggcatcggcttcctggccgcccgggccttcctgcggagcggcggcatggaggccctgaccacccagctgggccctggccgggagggcagcagcagccccaacagcaagcaggagctgcagccctacagcggcagcagcgccctgaagcccaaccaggtgggggagaccagcctgtatggagtgcccatcgtgtccctggtgattgatggccaggagcggctgtgcctggcccagatcagcaacaccctgctgaagaactacagctacaatgagatccacaacagaagagtggccctgggcatcacctgtgtgcagtgcacccctgtgcagctggagatcctgcggcgggccggggccatgcccatcagcagcagaagatgtggcatgatcaccaagcgggaggccgagcggctgtgcaagagcttcctgggggagcacaagccacccaagctgcctgaaaattttgcctttgatgtggtgcatgaatgtgcctggggcagccggggcagcttcatcccagcccgctacaacagcagccgggccaagtgcatcaagtgtggctactgcagcatgtacttcagccccaacaagttcatcttccacagccacaggaccccagatgccaagtacacccagccagatgctgccaacttcaacagctggaggaggcacctgaagctgagtgacaagagcgccacagatgagctgagccacgcctgggaggatgtgaaggccatgttcaacggcggcaccaggaagaggaccttcagcctgcagggcggcggcggcggcggggccaatggaggcagcggcggccagggcaaaggaggagctgggggcggcggcggcggcggccctggctgtggggctgagatggcccctggccccccaccccacaagagcctgcgctgtggggaggatgaagctgctggccccccaggccccccaccaccccacccccagaggggcctgggcctggccaccggggccagcggccctgctggccctgggggccctgggggcggggccggcgtgcgcagctaccctgtgattcctgtgcccagcaagggcttcggcctgctgcagaagctgcccccacccctcttcccccacccctacggcttccccacagccttcggcctgtgccccaagaaggatgatcctgtgctgggcgctggggagcccaagggcggccctggcactggaagtggcggcggcggggccggcaccggcggcggggccggcggccctggggccagccacctgcccccaggggccggggccggccctgggggcggggccatgttctggggccaccagcccagcggggccgccaaggatgctgctgctgtggccgctgctgctgctgctgccaccgtgtaccccaccttccccatgttctggccagctgctggcagcctgcctgtgcccagctacccagctgcccagagccaggccaaggctgtggccgctgctgtggccgctgctgctgctgctgctgctgctgctgctggcagcggggcccctgagcccctggatggagctgagcccgccaaggagagcggcctgggcgctgaggagcgctgccccagcgccctgagccggggccccctggatgaagatggaacagatgaggccctgcccccacccctggcccccctgcccccacctcctcctcctccagccaggaagggcagctatgtgtctgccttccggcctgtggtgaaggacacagagagcatcgccaagctgtatggcagcgcccgggaggcctacggggccggccctgcccggggccctggccctggggccggcagcggcggctacgtgtccccagacttcctgtctgagggcagcagcagctacaacagcgccagcccagatgtggacacagcagatgagcctgaggtggatgtggagagcaaccgcttcccagatgatgaagatgcccaggaggagacagagcccagcgcccccagcgctgggggcggcccagatggagagcagcccactggacctccttctgccaccagcagtggagcagatggccctgccaacagcccagatggcggcagcccccggccccggcggcggctgggccccccacctgctggccgcccagcctttggagacctggccgctgaggacctggtgagaagacctgagaggagccccccatctgggggcggcggctatgagctgcgggagccctgtggccccctgggcggccctgccccagccaaggtgtttgcccctgagagagatgaacatgtgaagtctgctgctgtggccctgggccctgctgccagctatgtgtgcaccccagaggcccacgagccagacaaggaggacaaccacagccctgcagatgacctggagaccaggaagagctacccagaccagaggagcatcagccagcccagccctgccaacacagacagaggagaagatggcctgaccctggatgtgacaggcacccacctggtggagaaggacatcgagaacctggcccgggaggagctgcagaagctgctgctggagcagatggagctgaggaagaagctggagcgggagttccagagcctgaaggacaacttccaggaccagatgaagcgggagctggcctaccgggaggagatggtgcagcagctgcagatcgtgcgggacaccctgtgcaatgagctggaccaggagaggaaggcccgctatgccatccagcagaagctgaaggaggcccatgatgccctgcaccacttcagctgcaagatgctgacccccaggcactgcaccggcaactgcagcttcaagccacccctgctgccctag

SEQ ID NO: 314584 - DNA, 2766 bp, Artificial Sequence
  derived and/or modified sequence
atggccctgctgtgtggcctgggccaggtgaccctgcgcatctgggtgtccctgcccagccagagtgaaaatggcatcggcagcggcggcatggaggccctgaccacccagctgggccctggccgggagggcagcagcagccccaacagcaagcaggagctgcagccctacagcggcagcagcgccctgaagcccaaccaggtgggggagaccagcctgtatggagtgcccatcgtgtccctggtgattgatggccaggagcggctgtgcctggcccagatcagcaacaccctgctgaagaactacagctacaatgagatccacaacagaagagtggccctgggcatcacctgtgtgcagtgcacccctgtgcagctggagatcctgcggcgggccggggccatgcccatcagcagccgccgctgtggcatgatcaccaagcgggaggccgagcggctgtgcaagagcttcctgggggagcacaagccacccaagctgcctgagaactttgcctttgatgtggtgcatgaatgtgcctggggcagccggggcagcttcatcccagcccgctacaacagcagccgggccaagtgcatcaagtgtggctactgcagcatgtacttcagccccaacaagttcatcttccacagccacaggaccccagatgccaagtacacccagccagatgctgccaacttcaacagctggaggaggcacctgaagctgagtgacaagagcgccacagatgagctgagccacgcctgggaggatgtgaaggccatgtttaatggaggcacccgctgtggggctgagatggcccctggccccccaccccacaagagcctgcgctgtggggaggatgaagctgctggccccccaggccccccaccaccccacccccagaggggcctgggcctggccaccggggccagcggccctgctggccctgggggccctgggggcggggccggcgtgcgcagctaccctgtgattcctgtgcccagcaagggcttcggcctgctgcagaagctgcccccacccctcttcccccacccctacggcttccccacagccttcggcctgtgccccaagaaggatgatcctgtgctgggcgctggggagcccaagggcggccctggcactggaagtggcggcggcggggccggcaccggcggcggggccggcggccctggggccagccacctgcccccaggggccggggccggccctgggggcggggccatgttctggggccaccagcccagcggggccgccaaggatgctgctgctgtggccgctgctgctgctgctgccaccgtgtaccccaccttccccatgttctggccagctgctggcagcctgcctgtgcccagctacccagctgcccagagccaggccaaggctgtggccgctgctgtggccgctgctgctgctgctgctgctgctgctgctggcagcggggcccctgagcccctggatggagctgagcccgccaaggagagcggcctgggcgctgaggagcgctgccccagcgccctgagccggggccccctggatgaagatggaacagatgaggccctgcccccacccctggcccccctgcccccacctcctcctcctccagccaggaagggcagctatgtgtctgccttccggcctgtggtgaaggacacagagagcatcgccaagctgtatggcagcgcccgggaggcctacggggccggccctgcccggggccctggccctggggccggcagcggcggctacgtgtccccagacttcctgtctgagggcagcagcagctacaacagcgccagcccagatgtggacacagcagatgagcctgaggtggatgtggagagcaaccgcttcccagatgatgaagatgcccaggaggagacagagcccagcgcccccagcgctgggggcggcccagatggagagcagcccactggacctccttctgccaccagcagtggagcagatggccctgccaacagcccagatggcggcagcccccggccccggcggcggctgggccccccacctgctggccgcccagcctttggagacctggccgctgaggacctggtgagaagacctgagaggagccccccatctgggggcggcggctatgagctgcgggagccctgtggccccctgggcggccctgccccagccaaggtgtttgcccctgagagagatgaacatgtgaagtctgctgctgtggccctgggccctgctgccagctatgtgtgcaccccagaggcccacgagccagacaaggaggacaaccacagccctgcagatgacctggagaccaggaagagctacccagaccagaggagcatcagccagcccagccctgccaacacagacagaggagaagatggcctgaccctggatgtgacaggcacccacctggtggagaaggacatcgagaacctggcccgggaggagctgcagaagctgctgctggagcagatggagctgaggaagaagctggagcgggagttccagagcctgaaggacaacttccaggaccagatgaagcgggagctggcctaccgggaggagatggtgcagcagctgcagatcgtgcgggacaccctgtgcaatgagctggaccaggagaggaaggcccgctatgccatccagcagaagctgaaggaggcccatgatgccctgcaccacttcagctgcaagatgctgacccccaggcactgcaccggcaactgcagcttcaagccacccctgctgccctag

SEQ ID NO: 314585 - DNA, 3675 bp, Artificial Sequence
  derived and/or modified sequence
gctgcgagggttgccgaaggcgcacggatctgggcgctgaaaaagccaggatttggcaatggctttgctgtgtggccttgggcaagtcactctgcgtatctgggtttcacttccttcccaatccgaaaacgggattgggttccttgcagcccgggcattcctgaggagcggcggcatggaggctctcaccactcagctggggccggggcgcgagggcagttcctcgcccaactccaagcaggagctgcagccgtactcgggctccagcgctctcaaacccaaccaggtgggcgagacgtcgctgtacggggtgcccattgtgtcgctggtcatcgacggccaggagcgcctatgcctggcgcagatctccaacaccctcctcaagaactacagctataatgagatccacaaccgccgcgtggccctgggcatcacgtgcgtgcagtgcacgccggtacagctggagattctgcgtcgggccggggccatgcccatctcgtcgcgccgctgcggcatgatcactaagcgagaggccgaacgcctgtgcaagtcgttcctgggcgagcacaaaccacccaagctgcccgagaacttcgccttcgatgtggtgcacgagtgcgcgtggggctcgcgtggtagcttcatccctgcgcgttacaacagctctcgtgccaagtgcatcaagtgcggctactgcagcatgtacttctcgcccaacaagttcatcttccactcgcaccgaacacccgacgccaagtacacgcagcccgatgccgccaacttcaactcctggcgtcgtcacctcaaactcagtgacaagtcggccacagacgaactgagccatgcttgggaggacgtcaaggccatgtttaatggcggcacgcgcaagcggaccttctccctacaaggaggcggcggaggcggtgccaatggcgggtcgggtgggcaggggaagggtggtgctggcggcggtggcggcggtggcccagggtgcggtgcagagatggccccaggcccgccgccccacaaaagcctgcgctgtggcgaagatgaggctgccgggcctccggggccacctccaccccacccgcagcgcggacttggcctggcgactggagctagtggcccggcgggcccaggagggcccggtggcggcgccggcgtacgaagctacccggtgatcccggtgcccagcaaaggctttgggctcctgcaaaagctgcccccaccacttttcccccatccttacggcttccctacggccttcggcctatgccccaaaaaggacgacccggttttaggcgcgggcgagccaaagggcggtcctggcactgggagcggcggcggcggcgcggggacaggcgggggtgcggggggcccgggagccagccacttgcccccgggggcaggggcgggcccgggcggcggcgccatgttctgggggcatcaaccctccggggcagccaaggacgcagcggcagtggctgcagcggccgccgccgccactgtgtacccgacgtttcccatgttctggccagcagcaggcagcctcccggtaccgtcctaccccgctgctcagagccaagccaaggccgtggcggcagccgtggcggcggcagcggcggcggcagcggcagctgctggcagcggtgccccagagcccctggacggtgccgagccagccaaagagagtggcctcggcgcggaggagcgctgcccgagcgctctgtcccgcgggcccctggacgaagacggcacggacgaggcgctgccaccgcccctggccccgttgcccccgccgcccccgccgcccgcacgcaaaggctcctacgtgtcggccttccggccggtggtcaaggacaccgagagcatcgctaagctctacgggagcgcccgggaggcgtacggcgcggggcctgctcgggggccgggacccggcgctgggagcggcggctacgtgagcccggactttctgagcgagggcagctccagctacaattccgcctcgcccgacgtggacaccgcggacgagcccgaggtggacgtggaatccaaccgcttccccgacgacgaggacgcccaagaggagaccgagcccagcgcacccagcgcagggggcggcccagacggtgaacagcccactggacccccttccgccacctcctctggcgcggacggtcccgcaaactctcccgacggcggcagcccccgcccccggcgccgcctcgggccacccccagctggccggcccgcatttggggacttggcagccgaagacttggtgcggagacctgagaggagcccgccaagcggcggcggcggctacgagctgcgagagccttgcgggcccctaggaggccccgcgccggccaaggtgttcgcgcccgagagggatgagcacgtgaagagcgcggcggtggcgctggggcccgcggcctcctacgtctgcacccccgaggcccacgagccagataaggaagacaatcactcgcccgccgatgatttggaaacgaggaaatcctatccagaccaaaggagtatctcccagccaagtcctgcaaatacagacagaggcgaagatgggcttaccttggatgtcacaggaactcatttggtggagaaagatatcgagaacctggccagagaggaattgcaaaaactgctcctggaacaaatggagctccgcaagaagctggaacgggaatttcagagtctcaaagataattttcaggatcaaatgaagagggaattggcttatcgagaagaaatggtgcaacagctgcaaattgtcagagataccctgtgtaacgaactcgaccaggagcggaaggcgcgctatgccatccagcagaaattgaaagaagcccacgacgccctgcaccatttctcctgcaagatgctgacgccccgccactgcactggcaactgctccttcaagccaccgctgttgccctagggccggcctggccgcacccctgcgccctcaagccatgctgctccttgtaaatacccgctgctgcggtggccctgagcgaggaacaagccattcggacccgaccgatgtaaatacagccgcccgtccgcccgccttcctcccgggctccccggccttgcccgccccctcccgggcgtccctgtccagggccccggcttggtttccaagtgtaaataccgcctcgcgcctcaaatccccctaccccgtgtgaactctagggcatcggacctcaaggggttaactggacagacggggggcgggaggggagagcgccccctcccattgtatagccttgaacccgattgtgaatacaatgtagcaacttcgctggcgcctgccccgcactccccgtcccgtccacttctgaaactcctgttcctaatgacaaagtggctatgtgcaatggatataaatgtactgtgagtctctcggttcagtattaggttcactttaatttatttatgctgtaagttatttttgcttccttctcctggacccacttccagtcccgttttgcattcccctttggattttgctttggctattttttgttgtaacctcttgatgtaacagcactttaaaagggcgacaactgactcacgagatggcaaccacctggagcctgtttggggagaccaccctgtacccgtgactttcgtttttaataataataataataa

SEQ ID NO: 314586 - DNA, 2766 bp, Artificial Sequence
  derived and/or modified sequence
atggctttgctgtgtggccttgggcaagtcactctgcgtatctgggtttcacttccttcccaatccgaaaacgggattgggagcggcggcatggaggctctcaccactcagctggggccggggcgcgagggcagttcctcgcccaactccaagcaggagctgcagccgtactcgggctccagcgctctcaaacccaaccaggtgggcgagacgtcgctgtacggggtgcccattgtgtcgctggtcatcgacggccaggagcgcctatgcctggcgcagatctccaacaccctcctcaagaactacagctataatgagatccacaaccgccgcgtggccctgggcatcacgtgcgtgcagtgcacgccggtacagctggagattctgcgtcgggccggggccatgcccatctcgtcgcgccgctgcggcatgatcactaagcgagaggccgaacgcctgtgcaagtcgttcctgggcgagcacaaaccacccaagctgcccgagaacttcgccttcgatgtggtgcacgagtgcgcgtggggctcgcgtggtagcttcatccctgcgcgttacaacagctctcgtgccaagtgcatcaagtgcggctactgcagcatgtacttctcgcccaacaagttcatcttccactcgcaccgaacacccgacgccaagtacacgcagcccgatgccgccaacttcaactcctggcgtcgtcacctcaaactcagtgacaagtcggccacagacgaactgagccatgcttgggaggacgtcaaggccatgtttaatggcggcacgcggtgcggtgcagagatggccccaggcccgccgccccacaaaagcctgcgctgtggcgaagatgaggctgccgggcctccggggccacctccaccccacccgcagcgcggacttggcctggcgactggagctagtggcccggcgggcccaggagggcccggtggcggcgccggcgtacgaagctacccggtgatcccggtgcccagcaaaggctttgggctcctgcaaaagctgcccccaccacttttcccccatccttacggcttccctacggccttcggcctatgccccaaaaaggacgacccggttttaggcgcgggcgagccaaagggcggtcctggcactgggagcggcggcggcggcgcggggacaggcgggggtgcggggggcccgggagccagccacttgcccccgggggcaggggcgggcccgggcggcggcgccatgttctgggggcatcaaccctccggggcagccaaggacgcagcggcagtggctgcagcggccgccgccgccactgtgtacccgacgtttcccatgttctggccagcagcaggcagcctcccggtaccgtcctaccccgctgctcagagccaagccaaggccgtggcggcagccgtggcggcggcagcggcggcggcagcggcagctgctggcagcggtgccccagagcccctggacggtgccgagccagccaaagagagtggcctcggcgcggaggagcgctgcccgagcgctctgtcccgcgggcccctggacgaagacggcacggacgaggcgctgccaccgcccctggccccgttgcccccgccgcccccgccgcccgcacgcaaaggctcctacgtgtcggccttccggccggtggtcaaggacaccgagagcatcgctaagctctacgggagcgcccgggaggcgtacggcgcggggcctgctcgggggccgggacccggcgctgggagcggcggctacgtgagcccggactttctgagcgagggcagctccagctacaattccgcctcgcccgacgtggacaccgcggacgagcccgaggtggacgtggaatccaaccgcttccccgacgacgaggacgcccaagaggagaccgagcccagcgcacccagcgcagggggcggcccagacggtgaacagcccactggacccccttccgccacctcctctggcgcggacggtcccgcaaactctcccgacggcggcagcccccgcccccggcgccgcctcgggccacccccagctggccggcccgcatttggggacttggcagccgaagacttggtgcggagacctgagaggagcccgccaagcggcggcggcggctacgagctgcgagagccttgcgggcccctaggaggccccgcgccggccaaggtgttcgcgcccgagagggatgagcacgtgaagagcgcggcggtggcgctggggcccgcggcctcctacgtctgcacccccgaggcccacgagccagataaggaagacaatcactcgcccgccgatgatttggaaacgaggaaatcctatccagaccaaaggagtatctcccagccaagtcctgcaaatacagacagaggcgaagatgggcttaccttggatgtcacaggaactcatttggtggagaaagatatcgagaacctggccagagaggaattgcaaaaactgctcctggaacaaatggagctccgcaagaagctggaacgggaatttcagagtctcaaagataattttcaggatcaaatgaagagggaattggcttatcgagaagaaatggtgcaacagctgcaaattgtcagagataccctgtgtaacgaactcgaccaggagcggaaggcgcgctatgccatccagcagaaattgaaagaagcccacgacgccctgcaccatttctcctgcaagatgctgacgccccgccactgcactggcaactgctccttcaagccaccgctgttgccctag

SEQ ID NO: 314587 - DNA, 2898 bp, Artificial Sequence
  derived and/or modified sequence
atggccctgctgtgcggcctgggccaggtgaccctgcggatctgggtgagtctccctagccaatctgaaaatggcattggttttttggcggcccgcgctttccttaggagcggaggcatggaagccctgaccacccagcttggacccggcagggaaggctcatcctctccaaacagcaaacaggaattacagccatatagtgggtcttccgccttgaagcctaatcaggtgggggaaacctccctctacggggttccaattgttagtttggttattgatgggcaggagcggctgtgtcttgcacaaatcagcaacacgctgctgaagaattattcctataatgagatacacaatcggagggtggcactaggcataacttgcgtgcagtgcactcctgtacagctggagattcttagaagggccggggctatgcctatttccagccgaagatgcggtatgatcacgaaacgggaagcagagcgcctctgcaaatcttttctgggagagcacaaacctcccaaactgccggagaattttgccttcgatgttgtgcacgaatgcgcttggggaagcagaggcagcttcatccctgccaggtacaattccagtcgtgccaagtgtattaaatgtgggtactgctctatgtatttcagtcccaataagttcatcttccacagtcacaggactcctgatgcaaaatacacccagcccgacgcggcaaattttaatagctggcgccggcacctgaagctgagtgacaaatccgccactgatgaactgtcacatgcatgggaggacgtgaaagccatgttcaacggcggcacaaggaaacgcacattttccctgcaagggggaggcggagggggggcaaatgggggaagcggggggcaagggaagggcggagccggcggggggggcggcggggggccagggtgtggcgcagagatggcacctggaccccccccacataagagcctccgttgtggcgaggatgaagctgccggaccgccaggaccacctcctcctcatccacaacgagggttaggactcgctactggagcgtccggtcctgcgggccctggtggaccggggggcggagcaggtgtgcggtcatatcccgttatacctgtccctagcaaaggctttgggctcctccagaagctgcccccaccgctttttcctcatccctatggcttccccaccgcattcgggctttgccctaaaaaggatgatccggtactgggcgcaggcgaaccgaagggtggtcccggaacaggctcaggtggggggggagcagggaccggtggtggggccggaggaccaggagcatcgcaccttccaccaggcgcaggggccggacccggcggaggggcaatgttttggggtcatcaacccagtggtgccgccaaagatgcagccgccgtggccgccgccgcagccgctgcgaccgtatatcctactttccccatgttttggcccgcggccgggtctttaccagtgcctagctatcccgccgcacaaagtcaggcgaaagctgtggccgctgcagtagccgctgcagcagcggcggcagccgctgccgctgggagcggcgcgcccgagcctttggatggcgcggaaccggccaaagagtccggcttgggagccgaggagcggtgtccctccgccctttcacgtgggccacttgacgaggacggaacagatgaggccttacctccgcccctcgcaccactaccccccccacccccacctccagctaggaaaggcagctatgtcagtgcctttcgcccggtcgtgaaggatactgagtctattgccaaattgtacggatccgcccgggaggcttatggggccggccccgctcgtggcccaggtcctggagccggctcaggagggtacgtatcccctgacttcctatctgaaggctcctcaagttataactccgccagccccgatgttgataccgcagacgaaccagaagttgacgtagagagcaataggttccctgatgacgaggatgcgcaagaggagacagaaccatcggcacccagcgccggaggcggacccgacggcgagcaacccaccgggccgccatcagccacgtcatccggagcagacggtcctgctaactctccggacggcggatccccacgcccccggagaagacttggacccccgcccgccggacgaccagcctttggtgacttggctgcggaggatctcgtgaggcgccccgaacgctccccgccgtcgggcggggggggctatgaattgcgcgagccatgtggccccttaggaggcccagcgccagccaaagtgtttgctcccgagcgagacgaacatgtcaagagcgcggctgtggccttgggaccagcggcctcctacgtgtgtaccccagaagctcacgagcctgataaggaagataatcactcccctgccgacgatctggaaactaggaaatcctaccccgatcagagaagcattagtcagccctcccccgccaataccgaccgaggagaggatggcctcaccctggacgtcacaggcactcatctggtcgagaaagacatcgagaatttggcccgggaagagctgcagaaactactgctggagcagatggagctgcgcaagaagctggaacgagagtttcagtccctgaaggacaattttcaggaccagatgaaacgtgaactggcctatcgcgaggagatggtgcaacagttgcagatcgttagagatacactctgtaatgagctggaccaagaacggaaagcaaggtatgctatccaacaaaagctcaaggaggcccacgacgctctccaccatttcagttgtaaaatgttgactccaagacactgtacagggaattgctcattcaagccgcccctcctgccttag

SEQ ID NO: 314588 - DNA, 2766 bp, Artificial Sequence
  derived and/or modified sequence
atggccctgctgtgcggcctgggccaggtgaccctgcggatctgggtgtcactcccatctcagagcgaaaatggcatcggctccggcggcatggaagccctaacaactcagttggggccgggccgggagggcagttccagtccaaatagtaaacaggagctgcagccatattccggatccagcgcgctcaagcccaaccaggtgggagaaacttccctgtatggcgtgcccatcgtatcacttgtgatcgatggacaggagcgactgtgcctggcccagatttccaatacgttattgaagaactatagttacaatgagatacacaacaggcgggttgccctaggcattacatgcgttcagtgtaccccagtgcagctggagattctgagaagggccggcgctatgcctatttcttccagaagatgtggtatgatcactaaacgggaggcggagcgcctgtgcaagtccttccttggcgaacacaagccccctaaactgcccgagaacttcgctttcgatgtagtccacgaatgtgcctggggatcaagagggtctttcatcccagctagatacaatagttcaagggccaagtgtataaaatgtgggtattgcagcatgtactttagccctaataagttcattttccactcccatagaactcccgatgctaaatatactcagcccgacgctgctaacttcaatagctggcgcagacacctcaagctgtctgacaagtctgccacggacgaacttagccacgcttgggaggatgtcaaggccatgtttaacggcggcactagatgcggagcagagatggcacctggcccaccacctcacaagagcctcaggtgtggcgaagacgaggcagctgggccacccggacctcccccaccgcatccacaacgaggcctcggcttggcaacaggcgccagcggccccgctggccctggcggccctgggggcggggccggcgtgcgatcctaccctgtgattccggtgccctccaaaggtttcggccttctacagaaactccctcccccattgttcccccatccatatggtttcccaactgccttcgggctgtgccccaagaaggacgaccctgtgctaggtgcgggagaacccaaagggggcccagggacagggtctggaggcggtggtgccgggactggcggaggagcgggcggaccaggagcttcccatttgccacccggtgcaggagcgggcccgggtggtggcgctatgttctggggtcaccagcctagcggagccgccaaagacgctgccgctgtggcagccgcagcagccgcagctactgtctacccgacatttcccatgttctggcctgccgccggtagcctgcccgtgccttcttatccagctgcgcagtcccaggcaaaagctgtggccgccgctgtggcagccgccgccgcggcggctgccgcagcagccgggtccggcgccccagaaccacttgacggggccgagccagccaaagaatccggtttgggagcagaagaacgatgcccctccgccctgagccggggccctttagacgaggatggcaccgacgaggccctgccaccccccctagctcccttgcctccaccgccacccccaccagccaggaagggatcttacgtctctgcttttagacccgtggtgaaggacacagaaagcatagccaagctgtacggttcagcacgggaggcgtacggggctggtcctgctcgggggccgggacctggcgctggttctggaggatacgtttcccccgacttcctgtccgaaggtagttcttcgtacaattcagcaagcccagacgtcgatacggcagatgagcccgaagtcgacgtagagagcaaccgcttcccagatgatgaagacgcccaagaagaaacagagcctagcgccccttccgctggcggaggccccgacggcgagcagcctactgggccccccagcgcgacctcctcaggggccgacggcccggccaattcaccagatggcgggtcccctcggccgaggagacggctcggccctcctcctgcgggaaggcctgctttcggtgatctagccgctgaggatctggtgagacggccagagaggtcgcctccaagcggagggggcggctatgaactgagggagccttgtggccctcttggtggcccagctcccgcaaaggtgttcgctcccgagcgagatgaacacgtgaaatcagccgctgtggcgttagggcctgccgcctcctacgtgtgcacccctgaagcccatgaacctgacaaggaagataatcactctccagcggacgatctggagacacgcaagtcttatcctgaccagcgcagtatctcccagccatctcctgcaaacactgatagaggcgaagatgggttaacactcgacgttaccggcacacaccttgtggaaaaggatattgagaatttggcaagggaggagctccaaaaattactgctcgagcagatggaactgcgtaagaaattagagcgcgagtttcagtcgctgaaagataacttccaggatcagatgaagcgagagctagcctacagggaggaaatggtccagcaacttcagatcgttagggacaccctatgcaacgagcttgatcaggagcgcaaggctcgctacgctatccagcaaaaattgaaagaggctcatgatgccctacatcacttctcatgcaaaatgctaacgcctcggcattgcacaggaaactgctccttcaaacccccactgctcccttag

SEQ ID NO: 314589 - DNA, 2898 bp, Artificial Sequence
  derived and/or modified sequence
atggcactgctgtgcggcctggggcaggtcactttgcgcatctgggttagtctgcccagccagagtgagaacggtatcgggttcctcgcagccagagcgtttttgcggtctggaggtatggaagccctgacgacccagctgggccctggcagagaaggctctagtagcccaaattcgaagcaagagctacagccttactctgggtcttcggccctcaagcccaatcaagtcggcgaaacttccctgtacggagtccctattgtgagtctggtgatcgacggacaggagaggttgtgcttggcgcagattagcaatacattgctgaagaactattcctataacgagatccacaaccgccgtgtggccttaggtattacatgcgtgcagtgcactcctgtacagctggaaatattgcggcgagccggagctatgcccatttcaagcaggagatgcggcatgatcacaaaaagggaggctgagaggctttgcaagagtttcctgggggagcataagccgccaaagttacccgaaaactttgcttttgacgtggtgcacgagtgtgcttggggcagccggggatcattcatacccgcacggtacaacagttcccgcgctaaatgcattaagtgcggttactgtagcatgtacttctctccaaacaagtttatctttcatagccataggactcctgacgcaaagtatacccagcctgatgcagcgaattttaatagctggcggaggcatcttaagctcagcgacaaatccgccactgacgaattatcacatgcgtgggaggacgtgaaggcaatgttcaacggagggacacggaagagaacgttctctttacaagggggaggcggtggaggcgcaaatggcggttctggaggacagggtaagggcggagcgggtggcggaggtgggggtggccctgggtgtggagcagaaatggcccctggcccacccccacacaaatccctgcggtgcggcgaggacgaagccgctggcccacctggacctccaccccctcatccacagcgagggctagggttggccacaggtgcgtcaggacccgctggacctggcggacctggaggcggtgcaggagtccggtcttatcccgtaattcccgtcccctctaaaggattcggcctcctgcaaaagctgccacctcccttgttcccccacccatacggcttccccacagccttcgggctgtgccctaagaaggatgacccagtgttgggtgctggcgagcccaagggtgggcctgggactggatcaggtgggggtggcgctggcacagggggaggggctggaggccctggcgcaagccacctcccacctggcgctggggcaggtccaggcggtggcgctatgttttggggccatcagccctccggcgcagccaaagatgccgctgcagtggccgcagctgcagctgcagccaccgtttatcccacgtttccaatgttctggccagccgctggatccctgcctgtgccaagctacccagcagcccagtcccaggccaaggcagtagctgctgccgtggcagccgcagcggcagcggcagctgctgcagcaggatctggcgctccagaaccactggatggagccgaacccgcaaaggagtctggactgggagccgaagaaagatgccccagcgcacttagccggggaccattggacgaggacggtactgacgaagctctaccaccaccgctggcccctctgccaccccctccaccaccacccgctaggaaggggagttatgtgagcgcttttagacccgttgtaaaagataccgagagtattgccaagttatatggatctgcgagggaagcttatggggcaggacctgcacgcggtcccggacccggagctggctcgggtgggtatgtctcccctgactttctctctgagggctccagttcctataacagcgcctcaccagatgtggatacagccgacgagccagaagttgacgttgagtctaacagatttccagacgatgaagacgcccaagaggagacagagcctagtgcgccttcggccggtggcggtccggatggtgaacagccgactggaccaccatctgctacttcctccggcgctgatgggcctgctaacagtccagacggcggatcacctaggccccgacggaggctgggaccccctccggcagggcgaccagctttcggcgacctggccgctgaggatctggtgaggaggccggaacgcagccccccaagcggagggggaggatacgaactgcgcgagccatgtggaccccttggcggtccagccccagccaaggtttttgctcccgagagagacgaacacgtgaagtcagcagccgtggccctaggacctgctgcgagttacgtttgcacgccggaggcccacgaacccgacaaagaagataatcattctcctgctgacgacctggaaactaggaagagctatccagaccagaggtccatatcacagccttcccctgcaaatactgaccgcggagaggatggactgacactagacgtgaccggtacacacctggtggaaaaggatatcgaaaatcttgcgcgtgaagagctgcaaaaacttctgttggagcagatggaactgaggaaaaagctcgaacgggagtttcagtctctgaaggacaactttcaggaccagatgaaacgcgagctcgcctacagagaagaaatggttcagcaattgcagattgttagggataccctgtgcaatgagctggatcaggagagaaaggctagatacgccattcagcagaagctgaaggaggctcacgacgcactgcatcacttctcatgtaagatgctaacccccaggcactgtacaggcaattgtagcttcaaaccacccctgcttccgtag

SEQ ID NO: 314590 - DNA, 2766 bp, Artificial Sequence
  derived and/or modified sequence
atggcacttctgtgcggactggggcaggtcacattgcggatctgggtgtccctacccagtcaaagcgaaaatgggataggaagcggcggtatggaggcgctgaccacccaactcgggcctgggagagagggtagctccagtccgaactcaaaacaggagctgcagccgtactcaggcagcagcgctcttaaaccaaaccaggtgggtgaaacctccctctatggcgtgcccattgtctctctggtgatagacggccaagaacgactgtgcctcgctcaaatttctaacaccttactcaagaattactcctacaacgagatccacaatcggagggtggccttaggcatcacttgtgtgcagtgtacccccgtgcagctggagattctgcgtcgggctggagccatgccaataagctccagaagatgtggaatgattacaaaacgagaggcggagagactttgtaagagtttcttaggggagcataagcccccaaagttacctgaaaactttgcctttgatgtggtgcatgaatgcgcttggggctccagaggatcgttcattccagcacggtataattcgtctcgcgctaaatgcattaaatgcggttattgctccatgtacttctcgccaaacaagtttatatttcacagtcaccggacacctgacgctaaatacacccagcccgatgcagccaacttcaatagctggaggaggcacctcaagttaagcgacaagagcgcgactgacgagttgtctcatgcatgggaggatgtcaaagcaatgttcaatggcggaacccgatgcggagccgaaatggcgcctggaccccctccccacaaatccctgcggtgtggggaggacgaggccgctggtcctcccggtccacccccaccacacccacagaggggtctcggactggccaccggcgcatcaggcccagctggacctggtggaccagggggaggcgcaggagtacgctcatatcccgtgattcctgtcccgtcaaagggcttcggcctgctgcagaagctcccaccacctctgtttccccacccatatgggttccccacggccttcggcctgtgtcccaaaaaggacgaccctgtgctcggcgcaggggagcccaagggcggacctgggacgggctccggcggtggaggcgcaggtactggtggtggggctgggggacctggcgcttcccacctgccaccaggcgcaggggctggcccagggggaggggctatgttctgggggcaccagccatctggagccgctaaagacgcagctgcagtggcggcagcagccgcagccgctaccgtctatcctactttcccaatgttctggcccgctgccggatctctgccagttccctcgtatccagctgctcaaagccaggcaaaggcggttgctgcagccgttgccgctgctgccgctgctgcagccgctgcagctggaagcggcgctcccgaacccctggacggtgcagagccagccaaggaaagtggactgggtgccgaggagcgctgcccctccgcactgtcccggggaccgctcgacgaggatgggactgatgaagccctaccccctccgttggcaccactgccaccccctccccctcctccagcgaggaaggggtcctacgtgtccgcatttcgaccagtggtgaaggataccgagtccattgccaaactgtatggctctgctagagaagcatacggcgctggacccgctcggggacctggccctggagccggttcggggggttatgtgtctcccgatttccttagtgaggggtccagctcatataactctgccagccctgatgtggacactgccgacgaacctgaggtggatgtggaaagcaatcggtttcccgacgatgaggatgctcaggaggaaactgagccttccgcgccatccgcaggcggaggacctgacggtgaacaacctacaggccctccttccgccacttcttctggcgctgatggccctgcaaacagtccagacgggggtagccccagaccaaggcgcagactgggtcctccccctgctggcagacctgcattcggagatctggcggctgaggatttagtgcgacgacctgagcgctccccaccaagtggtggcggtggatacgaactgcgggagccctgcggcccactcgggggtccagcccctgccaaggtgtttgctccagaacgggacgaacacgtaaagtccgctgctgtggccttaggacccgctgcaagctacgtttgtacccctgaggcccatgagcctgataaggaggacaatcactcaccagctgacgaccttgagaccagaaagtcctatccggaccagaggagtatcagccaaccttctcccgctaacactgatcgtggcgaggacggactgactcttgatgtgactggaacccacctggtggaaaaggacatcgagaacctcgcacgcgaagagctgcaaaaactgctgctggagcagatggagctgaggaaaaagctggagcgggaatttcagtctctaaaggataacttccaggaccaaatgaagcgtgagctggcatacagggaggagatggtgcagcagctccagatcgtgagagacaccctctgcaacgagctcgatcaagagcgcaaggctcgttacgcaatccaacaaaagttgaaagaggctcacgacgccctgcatcattttagttgtaagatgctcactcccaggcattgtactggaaactgttctttcaagccacccctactgccttag

SEQ ID NO: 314591 - protein, 387 aa, Artificial Sequence
  derived and/or modified sequence
MLPALEHWIPKFFSFRTRTGSPLSLACRQPIVGPCDHIIANHHMQSISFASGGDPDTTDYVAYVAKDPVNQRACHILECHNGMAQDVISTIGQAFELRFKQYLKNPSLNTSCESEEVHIDSHAEEREDHEYYNEIPGKQPPVGGVSDMRIKVQATEQMAYCPIQCEKLCYLPGNSKCSSVYENCLEQSRAIGNVHPRGVQSQRDTSLLKHTCRVDLFDDPCYINTQALQSTPGSAGNQRSAQPLGSPWHCGKAPETVQPGATAQPASSHSLPHIKQQLWSEECYHGKLSRKAAESLLVKDGDFLVRESATSPGQYVLSGLQGGQAKHLLLVDPEGKVRTKDHVFDNVGHLIRYHMDNSLPIISSGSEVSLKQPVRKDNNPALLHSNK

SEQ ID NO: 314592 - DNA, 1164 bp, Artificial Sequence
  derived and/or modified sequence
atgctgcccgccctggagcactggatccccaagttcttcagcttcagaaccagaaccggcagccccctgagcctggcctgcagacagcccatcgtgggcccctgcgaccacatcatcgccaaccaccacatgcagagcatcagcttcgccagcggcggcgaccccgacaccaccgactacgtggcctacgtggccaaggaccccgtgaaccagagagcctgccacatcctggagtgccacaacggcatggcccaggacgtgatcagcaccatcggccaggccttcgagctgagattcaagcagtacctgaagaaccccagcctgaacaccagctgcgagagcgaggaggtgcacatcgacagccacgccgaggagagagaggaccacgagtactacaacgagatccccggcaagcagccccccgtgggcggcgtgagcgacatgagaatcaaggtgcaggccaccgagcagatggcctactgccccatccagtgcgagaagctgtgctacctgcccggcaacagcaagtgcagcagcgtgtacgagaactgcctggagcagagcagagccatcggcaacgtgcaccccagaggcgtgcagagccagagagacaccagcctgctgaagcacacctgcagagtggacctgttcgacgacccctgctacatcaacacccaggccctgcagagcacccccggcagcgccggcaaccagagaagcgcccagcccctgggcagcccctggcactgcggcaaggcccccgagaccgtgcagcccggcgccaccgcccagcccgccagcagccacagcctgccccacatcaagcagcagctgtggagcgaggagtgctaccacggcaagctgagcagaaaggccgccgagagcctgctggtgaaggacggcgacttcctggtgagagagagcgccaccagccccggccagtacgtgctgagcggcctgcagggcggccaggccaagcacctgctgctggtggaccccgagggcaaggtgagaaccaaggaccacgtgttcgacaacgtgggccacctgatcagataccacatggacaacagcctgcccatcatcagcagcggcagcgaggtgagcctgaagcagcccgtgagaaaggacaacaaccccgccctgctgcacagcaacaagtag

SEQ ID NO: 314593 - DNA, 1164 bp, Artificial Sequence
  derived and/or modified sequence
atgctccccgcactggaacactggatcccaaagtttttctcttttaggacccggacagggtccccactctccctggcctgccggcagccaatcgttggtccctgcgaccacatcattgcaaaccaccatatgcagtccattagtttcgcatctggcggggatcccgacaccacggattatgtggcctacgtcgctaaggacccagtcaaccagcgcgcatgtcacatcctggaatgccacaatggaatggcgcaggacgtgatttcgaccatcgggcaggcctttgagctccgcttcaagcaatatctcaaaaacccatctttgaacacctcttgcgaatccgaagaggtgcacatcgacagccacgccgaagaacgggaggatcatgaatactataacgagattcctggaaagcagcccccagtcgggggggtctctgatatgcgaattaaagtgcaggcaacagagcagatggcttactgccccatccaatgcgagaagctctgttacttgcccggcaattctaagtgttcctccgtctacgagaactgcctggaacagtctagagctattggcaatgttcaccctcgaggcgtacaatcccagcgggatacatccttgctgaaacacacatgtagggtggatctcttcgacgatccgtgctacattaacactcaagccctgcaatcaacgcctggatcggccgggaaccagaggtccgctcaacctctgggctcgccctggcactgcgggaaggccccagagactgttcagccaggtgcgacagcccagccagcaagttcgcactcgctgccccacatcaagcagcagctgtggagtgaggagtgttatcacggcaagctctcgcggaaggccgccgagtctctgctggtgaaagatggggattttttggtacgcgagagcgccacatctccaggccaatatgtgctgtcgggcttgcagggtggtcaggctaagcacttgcttctcgtggatccagagggaaaggtcaggacgaaagaccacgttttcgacaacgtgggccacctgatacgataccacatggataatagtctccccataatcagtagcggcagcgaggtgtctctcaaacaacccgtccggaaagacaacaacccagctctcttgcactctaataagtag

SEQ ID NO: 314594 - DNA, 1164 bp, Artificial Sequence
  derived and/or modified sequence
atgctgcctgccctggagcactggatccccaagttcttctccttccgcaccaggacaggcagccccctgagcctggcctgccggcagcccatcgtgggcccctgtgaccacatcatcgccaaccaccacatgcagagcatcagctttgccagcggcggggaccctgacaccacagattatgtggcctacgtggccaaggaccctgtgaaccagagggcctgccacatcctggagtgccacaacggcatggcccaggacgtcatcagcaccatcggccaggcctttgagctgcgcttcaagcagtacctgaagaaccccagcctgaacaccagctgtgagagcgaggaggtgcacatcgacagccatgctgaggagagagaagatcatgagtactacaatgagatccctgggaagcagccccctgtgggcggcgtgtctgacatgaggatcaaggtgcaggccacagagcagatggcctactgccccatccagtgtgagaagctgtgctacctgcccggcaacagcaagtgcagctctgtgtatgagaactgcctggagcagagccgggccatcggaaatgtgcacccccggggcgtgcagagccagagggacaccagcctgctgaagcacacctgccgggtggacctgtttgatgacccctgctacatcaacacccaggccctgcagagcaccccaggcagcgctggcaaccagaggtctgcccagcccctgggcagcccctggcactgtgggaaggcccctgagaccgtgcagcccggggccacagcccagcctgccagcagccacagcctgccccacatcaagcagcagctgtggagcgaggagtgctaccacggcaagctgagcaggaaggctgctgagagcctgctggtgaaggatggagacttcctggtgcgggagagcgccaccagccctggccagtatgtgctgagcggcctgcagggcggccaggccaagcacctgctgctggtggaccctgagggcaaggtgaggaccaaggaccacgtgtttgacaacgtgggccacctgatccgctaccacatggacaacagcctgcccatcatcagcagcggcagcgaggtgtccctgaagcagcctgtgaggaaggacaacaacccagccctgctgcacagcaacaagtag

SEQ ID NO: 314595 - DNA, 1164 bp, Artificial Sequence
  derived and/or modified sequence
atgctgcccgccctggagcactggatccccaagttcttcagcttcagaacaaggaccgggagtcccctgagcctcgcatgcagacagccaatcgttggtccatgcgaccatatcattgccaatcaccacatgcagtccatctctttcgcttcgggcggtgaccccgatacgacagactacgtggcctatgttgcgaaagacccagtgaatcagcgggcctgccacattctagaatgccataacggaatggcacaggatgtgatatctacgattggacaggcgttcgagttgaggtttaaacaatatctgaagaacccatctctgaatacttcatgcgagtctgaggaagtgcacatcgactcccatgcagaggaacgcgaagatcacgagtattacaacgagattccgggaaaacaaccgcctgtggggggcgtcagcgatatgcgtattaaggtccaggctaccgaacaaatggcatattgccctatacagtgcgaaaagctgtgctatttgcccggtaatagtaagtgtagtagtgtctatgaaaactgcctcgagcaatcccgggcaatcggaaacgtccaccctcgcggcgtacagtcccaaagagacacgtccctgctgaaacatacttgccgtgtggacctgttcgacgacccttgctacatcaacactcaggccctgcaatctacccctggaagcgctggaaatcagcggagtgctcagcctctgggcagtccttggcattgcgggaaggcccccgaaacggtccagcctggcgctacagcccaacccgctagcagtcactctctccctcacattaaacagcagctgtggtctgaggagtgttaccacggaaagctttcccggaaagccgctgagagcctgctggtcaaagatggcgattttctggtgcgggagtctgccaccagccctggacagtacgtattgtcaggactgcaaggtggccaggccaaacacctgctgcttgtggaccccgaggggaaggtaaggaccaaagatcacgtcttcgataatgtgggccatttaatccgataccacatggataactccctgcccattatctccagcggcagcgaggtcagcttgaaacagccagtgcgcaaggacaataaccccgccttactgcactcgaacaaatag

SEQ ID NO: 314596 - DNA, 1164 bp, Artificial Sequence
  derived and/or modified sequence
atgctgccagctctggagcactggatcccgaaattttttagctttagaacaaggactggatcccctctaagtctcgcctgccgacagccaattgtgggaccttgcgaccacatcatcgccaatcatcacatgcaatctatctcgttcgcctcggggggagaccctgacacaacagattacgtggcatacgtcgcaaaggacccggtgaaccagagagcgtgccatattctagaatgccacaatggaatggcccaagacgtgatttccacgatcggtcaggcgttcgaattaagattcaagcagtatctcaaaaatccttccttgaacactagttgcgagagcgaagaggtgcacatcgatagccacgcggaggagcgggaggatcacgagtactacaacgagatccctggaaagcagccacccgtgggcggagtgtcagacatgcgcattaaggtacaggcaaccgaacagatggcctactgtcccatccaatgtgaaaagctttgctatctcccaggcaattcaaaatgttccagcgtgtacgaaaactgccttgaacagtcccgtgctatagggaacgtgcatcctaggggtgtacaatctcagcgtgacaccagtcttctgaaacacacttgccgggtagatttattcgatgatccctgctacatcaatacccaagctctgcaatccacacctggctctgccggaaatcaaagaagcgcccagcccctcgggtcaccttggcactgtggaaaagcaccagagacagtgcaacctggtgccacagcacagcctgcaagtagccatagcttgccacacattaaacagcagctgtggtctgaggagtgctatcatgggaagctcagcaggaaggcagctgagtctctgctggtgaaagacggcgatttcttagtgagagaatccgccaccagtcctggccagtacgttctatccgggctccaggggggacaggccaaacacctgctgcttgtggatccggaggggaaggttcgaactaaggatcacgttttcgataatgtgggacacctcattcggtaccatatggacaacagtctcccaataatctctagcggttccgaggtttcattaaagcagccagtgaggaaagacaacaatcctgcccttctgcactcgaataagtag

SEQ ID NO: 314597 - DNA, 2799 bp, Artificial Sequence
  derived and/or modified sequence
tttttaaaaacatgttttacctgtttttaccttcaacttaaaagcctcaggttttaagttgtatatacttatatgaattatatgactgtgtatacttacaggattcaagcacatttcatttattctgcactttatttctattattattacattatagttatgtagaattatacaactcaccataatgtagaatcaatgggagccctgagcttgttttcctgcaactagatggtcccatctgggggtgatgagacacagtgacacccgaggtgtgttccttatgtccggtctattctgtaatctcattttggttgctgttactgtggaaaatcctgcctcacaaagataggatgttgaaaatggaaggaggcttttcagtacttttgtggcaatctcaggatgttccgccttgactttaatcgagaacgtatggagatttgaagttgtctcaaacatacttttaaggccaccgtcatttgcaatatcaagcagttgatcctcttctagcgtggacaaagtggattcacctggcttattcacaaatgggtcacagatccattccgtcttttgtggatgagaagtgtgatggttaatactgagtgtcaacttgattggattgaaggatacaagtattgatcattggtgtgtctgtgagggtgttgccaaaggagattaacatttgagtcagtgggctgcgaaaggcagacccacccttaatctggttgggcacaatctaatcagctgccagcttggctagaatataagcaggcagaaaaatgtgaaaagagagactggcctagcctcccagcctaaatctttctcctgtgttggatgcttcctgccctcgaacattggattcccaagttcttcagtttcagaactcggactggctctcctctctccttagcctgcagacagcctattgtaggaccttgtgatcatattattgcaaatcatcatatgcagtctatttcatttgcctctggaggggatcctgatactacagactatgttgcctacgtagctaaagatccagttaatcaacgagcctgtcacatattggaatgccacaatggaatggcccaagacgtcataagtaccatagggcaggcttttgaactccggtttaaacagtacttgaaaaatccttctttgaatacttcttgtgaaagtgaggaggtgcatattgatagccatgccgaggagagagaagatcatgaatattacaatgaaattccagggaagcagccaccagtaggtggtgtttcagatatgcggatcaaagttcaagccacggaacaaatggcttactgccccatacagtgtgaaaagttgtgctatttgcctggaaactccaagtgcagcagtgtatatgagaactgtttagaacaaagcagggcaataggtaatgtccatccaagaggggtgcagtcccagcgagatacctcattattgaagcacacgtgccgagtggatctctttgatgacccctgctacattaatacacaggctcttcaaagtacacctggctctgctggaaatcaaaggtcagcccaaccactggggagcccatggcactgcggaaaggcaccagaaactgttcagccgggtgccacagcccagcctgccagctcacattctttgccacacattaagcagcagctgtggagcgaagaatgctatcatggcaagctgagcaggaaggcggcagagagcctcttggtaaaggatggggactttttggttcgagagagtgcaacatcccctggccaatatgtgctgagtggactacagggaggccaagcaaaacatcttctcctggtggatcctgaaggcaaggtgaggaccaaggatcatgtatttgataatgtcggccaccttatcagataccatatggataacagtttgccaatcatctcctctggaagcgaagtaagccttaaacaaccagtgagaaaagataataatccagcacttttgcattccaacaaatgacagtattgaagcaccatcacactgatatttcaagaaaccccattttgtattaggacacaaagataatttaaactttgtttgtagataaaatagagcacaaactgtgaagtgcatctttccaagaccatcatggaccaggtcctctataaaatgaagaactaacaaaaattagtcttcagaaatgaaaatcagaaaagaggaagagggttggtcattttaaaagaaattatatgtatgcacggatgtcactttttaaggccatattgcattgataacaagctaaaagcacaactaaaatttcacatgctaacgacaacttgaatgaactgctggggcagtggtatgtgcctttcaacttgataatttgggggacattttcatattgggagattaattctaagtatcttcatgttctatgactatagaaccatttgccaaaaaaaaaagcttttcttgctacaaaaaataagcaattttcttgagccttattgactttattacattttctgtttagcagcatttttcactgcaatgttaaaataaatatgacattgaattcgaactgtgtgtatgtcagtggaatcaaatcaaaagccactaacatggctgtctgtttcattggactgtcccatttgctggttaaaaggattggggcccaaatcctctggcctagcatttctcagtgtttgctattcagactgtctaaatacagcatgtgacaagctgaagaagccaaatctatcagtcatttctgatttcattatattctccccctcttcctgctaaaaagacaaaaaacaaaaa

SEQ ID NO: 314598 - protein, 478 aa, Artificial Sequence
  derived and/or modified sequence
MGCWGQLLVWFGAAGAILCSSPGSQETFLRSSPLPLASPSPRDPKVSAPPSILEPASPLNSPGTEGSWLFSTCGASGRHGPTQTQCDGAYAGTSVVVTVGAAGQLRGVQLWRVPGPGQYLISAYGAAGGKGAKNHLSRAHGVFVSAIFSLGLGESLYILVGQQGEDACPGGSPESQLVCLGESRAVEEHAAMDGSEGVPGSRRWAGGGGGGGGATYVFRVRAGELEPLLVAAGGGGRAYLRPRDRGRTQASPEKLENRSEAPGSGGRGGAAGGGGGWTSRAPSPQAGRSLQEGAEGGQGCSEAWATLGWAAAGGFGGGGGACTAGGGGGGYRGGDASETDNLWADGEDGVSFIHPSSELFLQPLAVTENHGEVEIRRHLNCSHCPLRDCQWQAELQLAECLCPEGMELAVDNVTCMDLHKPPGPLVLMVAVVATSTLSLLMVCGVLILGTKRLAGTVDSRLLLSSELGWVSAGGGRRR

SEQ ID NO: 314599 - DNA, 1437 bp, Artificial Sequence
  derived and/or modified sequence
atggggtgctggggtcagctgcttgtctggtttggagcggccggggccatcctgtgtagctcacccgggagccaggagacctttttgaggtcttctccactacccctcgcttctccttccccccgtgaccccaaggtttcggcacccccgtccatcctcgagccagcaagccccctcaattctccgggaacggaggggtcatggctcttctcaacctgcggagccagcggccgacacggtcctacccagactcagtgcgatggcgcttacgccggtacttctgtggtggtgaccgtcggcgccgctggacagttaaggggcgtgcagctatggcgtgtgccaggacccggccagtatttgataagcgcttatggagctgcaggcggcaaaggggccaagaatcatctctccagggcccacggcgtgttcgtaagtgccatcttctccctcggactgggtgagagtctctatatccttgtggggcagcagggtgaggacgcctgccccgggggttcaccagaatcccagctcgtctgtcttggcgagagtagggctgtcgaggaacatgcagccatggacggctcggaaggggtcccagggagcaggcggtgggcaggtggcgggggtggaggcgggggcgccacgtacgtgttcagggttagagcaggcgaactggagcccttactggttgccgccggaggcggagggagagcctacctgcgtcctcgtgatcgggggcgcacacaagcttcccccgagaaattggagaatcggagtgaagcccccgggtctggtggcaggggaggggcagccgggggcggcggcggctggacgagtcgcgccccatcccctcaggcagggaggtccctgcaggagggtgctgagggcgggcaagggtgctccgaggcctgggccacactggggtgggctgctgcaggggggttcggaggcgggggcggcgcctgtacagcaggcggcggtgggggtggatataggggtggtgacgcctctgagaccgataacctctgggccgacggtgaggatggcgtctcttttatccatccaagcagcgagttattcttacaaccactcgctgtgactgagaaccacggcgaagtagagatcaggaggcatctgaactgttctcactgtcccctgcgggattgtcagtggcaggccgagttgcagctggcagagtgtctgtgtcccgaggggatggagctggcagtcgacaatgtgacctgcatggatctgcataagccacctgggcctttggtcttaatggtcgcagttgtagctacctctaccttatcactcctgatggtatgcggggtgttaatcctcggaacaaagcgcctagctgggaccgttgactcaaggctgctcctgtctagcgagttgggctgggtgagcgctggtggcggaagaaggaggtag

SEQ ID NO: 314600 - DNA, 1437 bp, Artificial Sequence
  derived and/or modified sequence
atgggctgctggggccagctgctggtgtggtttggagctgctggggccatcctgtgcagcagccctggcagccaggagaccttcctgcggagcagccccctgcccctggccagccccagcccccgggaccccaaggtgtctgcccctccttccatcctggagcccgccagccccctgaacagccctggaacagagggctcctggctgttcagcacctgtggggccagcggcagacatggccccacccagacccagtgtgatggagcctatgccggcacctctgtggtggtgacagtgggcgccgccggccagctgcggggcgtgcagctgtggagggtgcccggccctggccagtacctgatcagcgcctacggggctgctgggggcaagggggccaagaaccacctgagccgggcccacggcgtgtttgtgtctgccatcttcagcctgggcctgggggagagcctgtacatcctggtgggccagcagggagaagatgcctgccctgggggcagccctgagagccagctggtgtgcctgggggagagcagagctgtggaggagcacgccgccatggatggcagcgagggcgtgcccggcagccgccgctgggccggcggcggcggcggcggcggcggggccacctacgtgttccgggtgcgggccggggagctggagcccctgctggtggccgccggcggcggcggccgggcctacctgcggccccgggaccggggccgcacccaggccagccctgagaagctggagaacagaagtgaggcccctggcagcggcggccggggcggcgctgctgggggcggcggcggctggaccagccgggcccccagcccccaggccggccgcagcctgcaggagggcgctgagggcggccagggctgcagcgaggcctgggccaccctgggctgggccgccgccggcggctttggaggcggcggcggggcctgcacagctgggggcggcggcggcggctacagaggaggagatgccagcgagacagacaacctgtgggcagatggagaagatggagtgtccttcatccaccccagcagcgagctgttcctgcagcccctggccgtgacagagaaccacggggaggtggagatccgccgccacctgaactgcagccactgccccctgcgggactgccagtggcaggccgagctgcagctggctgaatgtctgtgcccagagggcatggagctggccgtggacaacgtgacctgcatggacctgcacaagcccccaggccccctggtgctgatggtggccgtggtggccaccagcaccctgagcctgctgatggtgtgtggggtgctgatcctgggcaccaagaggctggccggcaccgtggacagccggctgctgctgagcagcgagctgggctgggtgtctgctgggggcggcagaagaagatag

SEQ ID NO: 314601 - DNA, 1612 bp, Artificial Sequence
  derived and/or modified sequence
ggggtctgaggtgggcgtggccagaccagctttaggtccggggagtgtctcgccagcggcagcacacccctgtaagtggtggccagggctgccgtggcaaaatgagctgtcaactttaggttgacaggggtgtggccgcgaccgcaagggcttttgttgccgggtggacccaacagggatgggctgctggggacagctgctggtgtggttcggagccgcgggcgccattctctgctctagcccggggtcccaggagacttttctgcggtcctcgcccctgccgctggcaagtcccagcccccgggacccgaaagtcagcgccccgcctagtatcttggagccagcctccccgctgaattctccgggcaccgaggggtcttggctgttttctacctgcggggccagcggccggcatgggcccacacagacacaatgtgacggggcgtacgcggggaccagcgtggtggtgaccgtgggggccgccgggcagctgagaggcgtgcagctgtggcgcgtgccgggccctggccagtatctgatctcagcctacggagccgcgggcggcaaaggcgccaagaaccacctgtcgcgggcgcatggcgtcttcgtctcagcaatcttctccctcggtctcggggagtcgctgtacatcctggtggggcagcagggagaggacgcctgtcccggaggtagcccggagagccagctcgtctgcctcggggagtctcgagccgttgaagagcacgcggcgatggatgggagcgaaggggtcccggggtcgcggcgctgggcgggaggtggcgggggtggcgggggcgccacctacgttttccgggtgcgcgctggcgagctggaaccgttgctggtggcggccggaggcggcggtcgggcctacctgaggccgcgggaccgaggccggactcaggcctcccccgagaaactggagaaccgctcggaggcgcccgggagcggcgggagaggcggggcggcaggtggtgggggcggctggacgtcgcgggctccctctccgcaggccggccgctcactgcaggagggggcggagggcggccagggctgctccgaggcttgggcgacccttggctgggccgcggccggcggcttcgggggcggcggcggggcctgcactgcgggcggaggcggcggcggctacagggggggcgacgcttcagagactgacaacctctgggctgatggggaagatggagtatccttcatacaccccagcagcgagctcttcctgcagcctctggcagtcaccgagaaccacggagaggtagagatccgaaggcacctcaactgcagtcactgccctttgagagactgccaatggcaggcagagctccagctggctgaatgcctgtgcccagaaggcatggagctagctgtggataacgtcacctgcatggacctgcacaagcccccaggccctctggttctgatggtggctgtggtggcaacctcaacactgagcctccttatggtgtgtggggtcctgattctgggtacgaagcgtctagcaggcacagttgattcaaggctgctcctctccagtgagctgggatgggtttctgcgggagggggccggaggagg

SEQ ID NO: 314602 - DNA, 1437 bp, Artificial Sequence
  derived and/or modified sequence
atgggctgctggggccagctgctggtgtggttcggcgccgccggcgctattttgtgcagctccccaggctcacaggagacctttctccggagtagccctctcccactcgctagtccctctccccgagatcctaaggtgtctgcccccccgtctatcctggagccggcatctcccctgaattccccagggacggaaggatcatggcttttttcaacgtgcggggcgagcggccgacacggaccaacacagacacaatgcgatggggcctatgcgggcactagcgtagtggttaccgtgggagctgcaggccagttacggggggtccagctgtggcgggtcccaggcccgggacagtacttaatttccgcgtacggtgccgccggcgggaaaggagcaaagaaccatctatcccgcgcacatggagtctttgtgtctgcaatattctctctaggactgggtgagagcttgtacatattggtgggccagcagggcgaggacgcctgccccggggggagcccggagagccagctcgtgtgcctgggagaaagtagggcagtggaggagcatgcagcaatggacggatcagagggagttccggggagtagacggtgggctggtggcggcggaggcggcggaggggctacatatgtttttagggttcgcgctggtgagctagagccgctgctggttgccgctgggggggggggacgggcctatctgaggcccagagacaggggccggacgcaggcctctccagagaagttagaaaatcgaagtgaagcccctggttcgggaggcaggggaggagccgccggtggggggggaggctggacatctcgagctccaagtcctcaggcaggcagaagtctgcaggagggtgcggaaggtggtcaaggatgctcagaggcttgggccacactcgggtgggccgccgctggagggtttggaggcggtggcggcgcatgtactgctggaggtggtggtgggggttacagggggggggatgcaagcgagactgacaacctctgggctgacggcgaagacggtgtttcctttattcacccctcttctgagctcttcctccagcccctcgccgtcacagagaatcacggggaagtcgagatccgaaggcatctgaattgctctcattgtccactgagagactgccagtggcaggcagaattgcagctggctgaatgtctatgcccagagggcatggaactcgccgtggacaacgtgacatgtatggaccttcacaaaccaccagggcctctggtgctcatggttgctgtggtcgcgacctccacactgtctctgctgatggtatgcggcgtcttgattctgggaacaaaacggctggcaggtaccgtcgatagtcggctcctgctatctagtgagctggggtgggtctccgccggtgggggacgccgccggtag

SEQ ID NO: 314603 - DNA, 1437 bp, Artificial Sequence
  derived and/or modified sequence
atgggatgttggggccagctgttggtgtggttcggcgctgccggagctattttgtgctcaagcccgggatcacaggagacattcctcagatccagccctcttccgctggcgtccccatcccctcgggacccaaaggtgagcgcccctccaagtatccttgagcccgcttcacccctaaactcacctggtaccgaaggatcatggctgttttccacatgtggtgccagcgggaggcacggcccaacccagacacagtgcgacggagcctatgccggaacttccgttgtggttaccgtgggtgctgccggtcaactcaggggtgtacaactttggagagtcccaggcccaggacagtatttgatcagcgcttacggtgctgcaggcggaaaaggcgcaaagaaccacctctcccgggcacatggcgtcttcgtcagcgcaattttctctcttggtctgggagaatccttgtacattttggtggggcaacaaggagaggatgcctgcccgggaggcagtccggagtctcagctggtgtgcctgggagaaagccgggcagtggaagagcatgctgccatggatggaagcgagggcgtgcccggatccagacgttgggcgggtggcggaggaggcggtggcggtgccacctatgtgttccgagtgcgcgctggggaacttgagcctctgttggtcgctgctggtgggggaggacgcgcttatctgaggcctagagatcggggtagaacccaggcatctccggaaaagctcgagaacagaagtgaggccccagggtctggtgggagaggcggagccgctggaggtggcggtggctggaccagccgggcaccgtctcctcaggctggccgtagtcttcaggaaggcgctgagggaggccaaggatgttctgaggcttgggccacattggggtgggccgctgcaggagggttcgggggagggggtggcgcttgtaccgctggaggtggagggggtggctacagggggggagacgcgtccgaaacggacaacctctgggccgacggggaggacggggtgtcattcatccacccctcaagtgagttatttctccagcctttagctgtcaccgagaatcacggagaagtggagatacgtcggcacctaaattgctcacattgtccactccgggactgccagtggcaggccgagttgcagcttgctgaatgcctttgtcctgagggaatggaactggctgtagataacgtcacatgtatggatctccacaaacccccagggccactcgttctgatggtggcggtggtggccacttctaccttgagtctgcttatggtctgcggcgtgctaatcctcggaaccaagcgcttggctggtaccgtggatagtcgccttctcttgagctccgagctgggttgggtgtctgccggaggaggcagaaggcgttag

SEQ ID NO: 314604 - DNA, 1437 bp, Artificial Sequence
  derived and/or modified sequence
atgggctgctggggccagctgctggtgtggttcggcgccgccggcgccatcctgtgcagcagccccggcagccaggagaccttcctgagaagcagccccctgcccctggccagccccagccccagagaccccaaggtgagcgccccccccagcatcctggagcccgccagccccctgaacagccccggcaccgagggcagctggctgttcagcacctgcggcgccagcggcagacacggccccacccagacccagtgcgacggcgcctacgccggcaccagcgtggtggtgaccgtgggcgccgccggccagctgagaggcgtgcagctgtggagagtgcccggccccggccagtacctgatcagcgcctacggcgccgccggcggcaagggcgccaagaaccacctgagcagagcccacggcgtgttcgtgagcgccatcttcagcctgggcctgggcgagagcctgtacatcctggtgggccagcagggcgaggacgcctgccccggcggcagccccgagagccagctggtgtgcctgggcgagagcagagccgtggaggagcacgccgccatggacggcagcgagggcgtgcccggcagcagaagatgggccggcggcggcggcggcggcggcggcgccacctacgtgttcagagtgagagccggcgagctggagcccctgctggtggccgccggcggcggcggcagagcctacctgagacccagagacagaggcagaacccaggccagccccgagaagctggagaacagaagcgaggcccccggcagcggcggcagaggcggcgccgccggcggcggcggcggctggaccagcagagcccccagcccccaggccggcagaagcctgcaggagggcgccgagggcggccagggctgcagcgaggcctgggccaccctgggctgggccgccgccggcggcttcggcggcggcggcggcgcctgcaccgccggcggcggcggcggcggctacagaggcggcgacgccagcgagaccgacaacctgtgggccgacggcgaggacggcgtgagcttcatccaccccagcagcgagctgttcctgcagcccctggccgtgaccgagaaccacggcgaggtggagatcagaagacacctgaactgcagccactgccccctgagagactgccagtggcaggccgagctgcagctggccgagtgcctgtgccccgagggcatggagctggccgtggacaacgtgacctgcatggacctgcacaagccccccggccccctggtgctgatggtggccgtggtggccaccagcaccctgagcctgctgatggtgtgcggcgtgctgatcctgggcaccaagagactggccggcaccgtggacagcagactgctgctgagcagcgagctgggctgggtgagcgccggcggcggcagaagaagatag

SEQ ID NO: 314605 - protein, 230 aa, Artificial Sequence
  derived and/or modified sequence
MNHSMDAGSPNLSPNPMSPAHNNLDLQPVTYCEPAFWCSISYYELNQRVGETFHASQPSMTVDGFTDPSNSERFCLGLLSNVNRNAAVELTRRHIGRGVRLYYIGGEVFAECLSDSAIFVQSPNCNQRYGWHPATVCKIPPGCNLKIFNNQEFAALLAQSVNQGFEAVYQLTRMCTIRMSFVKGWGAEYRRQTVTSTPCWIELHLNGPLQWLDKVLTQMGSPSIRCSSVS

SEQ ID NO: 314606 - DNA, 1567 bp, Artificial Sequence
  derived and/or modified sequence
aaatatgagcttgtgcttgctggaggaggatgacagaggagcctgctgctgagttcactggtgctggggttaggtcactgctgggctgaagcgcactgaccataagagcaacatgtgggcaagagccgcggcactggggtaatttattgccgccgctcgcttcaccaggaaccccacacgctgggttcccacaggatgcgacattcccacaggatgggacaactgcatggaaacccacactcgggcctgtgttgagcaaccacgtttgagtccctggatggccggttgcaggtgtcccatcggaaggggctccctcatgtcatctactgccgcctgtggcgatggccagacctgcacagccaccacgagctacgggccatggagctgtgtgagttcgccttcaatatgaagaaggacgaggtctgcgtgaatccctaccactaccagagagtagagacaccagttctacctcctgtgttggtgccacgccacacagagatcccggccgagttccccccactggacgactacagccattccatccccgaaaacactaacttccccgcaggcatcgagccccagagcaatattccagagaccccaccccctggctacctgagtgaagatggagaaaccagtgaccaccagatgaaccacagcatggacgcaggttctccaaacctatccccgaatccgatgtccccagcacataataacttggacctgcagccagttacctactgcgagccggccttctggtgctccatctcctactacgagctgaaccagcgcgtcggggagacattccacgcctcgcagccatccatgactgtggatggcttcaccgacccctccaattcggagcgcttctgcctagggctgctctccaatgtcaacaggaatgcagcagtggagctgacacggagacacatcggaagaggcgtgcggctctactacatcggaggggaggtcttcgcagagtgcctcagtgacagcgctatttttgtccagtctcccaactgtaaccagcgctatggctggcacccggccaccgtctgcaagatcccaccaggatgcaacctgaagatcttcaacaaccaggagttcgctgccctcctggcccagtcggtcaaccagggctttgaggctgtctaccagttgacccgaatgtgcaccatccgcatgagcttcgtcaaaggctggggagcggagtacaggagacagactgtgaccagtaccccctgctggattgagctgcacctgaatgggcctttgcagtggcttgacaaggtcctcacccagatgggctccccaagcatccgctgttccagtgtgtcttagagacatcaagtatggtaggggagggcaggcttggggaaaatggccatgcaggaggtggagaaaattggaactctactcaacccattgttgtcaaggaagaagaaatctttctccctcaactgaaggggtgcacccacctgttttctgaaacacacgagcaaacccagaggtggatgttatgaacagctgtgtctgccaaacacatttaccctttggccccactttg

SEQ ID NO: 314607 - protein, 235 aa, Artificial Sequence
  derived and/or modified sequence
MSRMGKPIETQKSPPPPYSRLSPRDEYKPLDLSDSTLSYTETEATNSLITAPGEFSDASMSPDATKPSHWCSVAYWEHRTRVGRLYAVYDQAVSIFYDLPQGSGFCLGQLNLEQRSESVRRTRSKIGFGILLSKEPDGVWAYNRGEHPIFVNSPTLDAPGGRALVVRKVPPGYSIKVFDFERSGLQHAPEPDAADGPYDPNSVRISFAKGWGPCYSRQFITSCPCWLEILLNNPR

SEQ ID NO: 314608 - DNA, 708 bp, Artificial Sequence
  derived and/or modified sequence
atgagtagaatgggaaaaccaatcgaaacacagaaatctccaccccccccctactcacgattatccccccgggatgagtataagcctttggacttatccgattcaaccctcagttacaccgagactgaagccactaactctctcattaccgcacctggtgagtttagtgacgcttctatgtctcccgatgctactaagccgagccactggtgctctgtggcctactgggagcacagaacccgcgtggggagactctacgcggtgtacgaccaggccgtttccatattctacgatctccctcagggtagtggattttgcctgggacagctgaacctggagcagcgaagtgagagcgtacggagaactcgttccaaaatcggctttgggattctacttagcaaagaacccgacggggtctgggcttacaatcggggggaacaccctattttcgtgaacagccctaccctcgacgcacccgggggacgcgcacttgtcgtgcggaaggttcccccaggctatagtattaaggtgttcgatttcgaacggtctggcctccaacacgctcctgagccagatgccgcagatggtccttacgaccccaatagcgtgcgcattagtttcgctaagggctggggcccgtgttactccagacagtttataacaagttgcccttgctggttggaaatactgctgaacaacccacggtag

SEQ ID NO: 314609 - DNA, 708 bp, Artificial Sequence
  derived and/or modified sequence
atgagcaggatgggcaagcccatcgagacccagaagagccccccaccaccctacagccggctgagccccagagatgagtacaagcccctggacctgagtgacagcaccctgagctacacagaaacagaggccaccaacagcctcatcacagcccctggagagttcagtgatgcctccatgagcccagatgccaccaagcccagccactggtgcagcgtggcctactgggagcacaggaccagggtgggccgcctgtatgctgtgtatgaccaggccgtgtccatcttctatgacctgccccagggcagcggcttctgcctgggccagctgaacctggagcagaggtctgagagcgtgcggaggaccaggagcaagattggcttcggcatcctgctgagcaaggagccagatggagtgtgggcctacaacagaggagagcaccccatctttgtgaacagccccaccctggatgcccctgggggccgggccctggtggtgaggaaggtgcccccaggctacagcatcaaggtgtttgattttgagaggagcggcctgcagcacgcccctgagccagatgctgctgatggcccctatgaccccaacagcgtgcgcatcagctttgccaagggctggggcccctgctacagccggcagttcatcaccagctgcccctgctggctggagatcctgctgaacaaccccaggtag

SEQ ID NO: 314610 - DNA, 708 bp, Artificial Sequence
  derived and/or modified sequence
atgagccggatgggcaagcccatcgagacccagaagagccccccccccccatatagtcgcctgagtcctcgggatgagtataaaccactggacctgtctgacagcaccctgtcctacacagagaccgaagcaaccaattcgcttatcaccgctcccggcgaattctccgacgcttctatgtccccagatgccacgaaaccatctcactggtgttcagtggcctattgggagcatcgtacccgagtggggaggctttatgctgtctatgaccaggccgtgagcatattctatgacctaccccagggcagtggtttctgcctgggacaattgaatctggagcaacgatctgagtccgtacgccgcacacgatctaaaattggttttggcatcctgttgtccaaggagcctgacggggtgtgggcctataatcgaggagaacaccctatcttcgtcaatagcccaactttggacgcacccgggggacgggctcttgtggttcgcaaagtgcctcctgggtatagcattaaggtgttcgactttgaaagatcaggcctgcagcatgcacccgaacccgacgctgccgacggaccctacgaccccaattctgtcaggatctcttttgctaagggatggggtccctgctactcgagacaatttatcaccagctgtccctgttggttagagatcctgctaaataacccccggtag

SEQ ID NO: 314611 - DNA, 708 bp, Artificial Sequence
  derived and/or modified sequence
atgtcgcgcatgggcaagccaattgagacccaaaagtccccgccacctccatattcgagattgagtcccagagacgaatacaagcctctggacctgtcggattcaactctaagctacactgaaaccgaagctactaatagcctcattaccgcaccaggggaatttagtgatgcttctatgtcaccagatgcaacgaagccatctcactggtgctcagtagcctactgggaacaccggacgcgagtaggccgactctatgccgtttatgaccaggcagtgtctatcttttacgacctgccacaaggaagcggcttttgccttgggcagttaaatttggagcaacggagcgagtcagtcagaaggactagatctaagattgggttcggcatacttctgtcaaaggaaccggacggcgtgtgggcttacaaccgaggcgagcacccaattttcgtcaattcaccaacacttgacgccccaggcggtcgcgctctggtagtgaggaaggtacctcctggctactccattaaagttttcgactttgagagaagcggacttcagcatgcccctgagcctgacgcggctgatggcccttatgatcccaactccgttcgcatctcgtttgcaaaaggctgggggccatgttatagtcgacagtttataaccagttgcccatgctggttggagatcctactaaacaacccaaggtag

SEQ ID NO: 314612 - DNA, 1283 bp, Artificial Sequence
  derived and/or modified sequence
aaaagaacgaagtccagcaccaaaacgtgctacaacatggatgaacttcgatgactttgtgccacatgaaagaagaagccagccacaaaaggccatatattgtatgaaatgaaatgtccagaatgggcaaacccatagagacacaaaaatctccgccacctccctactctcggctgtctcctcgcgacgagtacaagccactggatctgtccgattccacattgtcttacactgaaacggaggctaccaactccctcatcactgctccgggtgaattctcagacgccagcatgtctccggacgccaccaagccgagccactggtgcagcgtggcgtactgggagcaccggacgcgcgtgggccgcctctatgcggtgtacgaccaggccgtcagcatcttctacgacctacctcagggcagcggcttctgcctgggccagctcaacctggagcagcgcagcgagtcggtgcggcgaacgcgcagcaagatcggcttcggcatcctgctcagcaaggagcccgacggcgtgtgggcctacaaccgcggcgagcaccccatcttcgtcaactccccgacgctggacgcgcccggcggccgcgccctggtcgtgcgcaaggtgccccccggctactccatcaaggtgttcgacttcgagcgctcgggcctgcagcacgcgcccgagcccgacgccgccgacggcccctacgaccccaacagcgtccgcatcagcttcgccaagggctgggggccctgctactcccggcagttcatcacctcctgcccctgctggctggagatcctcctcaacaaccccagatagtggcggccccggcgggaggggcgggtgggaggccgcggccaccgccacctgccggcctcgagaggggccgatgcccagagacacagcccccacggacaaaaccccccagatatcatctacctagatttaatataaagttttatatattatatggaaatatatattatacttgtaattatggagtcatttttacaatgtaattatttatgtatggtgcaatgtgtgtatatggacaaaacaagaaagacgcactttggcttataattctttcaatacagatatattttctttctcttcctccttcctcttccttactttttatatatatatataaagaaaatgatacagcagagctaggtggaaaagcctgggtttggtgtatggtttttgagatattaatgcccagacaaaaagctaataccagtcactcgataataaagtattcgcattatagtttttttt

SEQ ID NO: 314613 - DNA, 708 bp, Artificial Sequence
  derived and/or modified sequence
atgagcagaatgggcaagcccatcgagacccagaagagccccccccccccctacagcagactgagccccagagacgagtacaagcccctggacctgagcgacagcaccctgagctacaccgagaccgaggccaccaacagcctgatcaccgcccccggcgagttcagcgacgccagcatgagccccgacgccaccaagcccagccactggtgcagcgtggcctactgggagcacagaaccagagtgggcagactgtacgccgtgtacgaccaggccgtgagcatcttctacgacctgccccagggcagcggcttctgcctgggccagctgaacctggagcagagaagcgagagcgtgagaagaaccagaagcaagatcggcttcggcatcctgctgagcaaggagcccgacggcgtgtgggcctacaacagaggcgagcaccccatcttcgtgaacagccccaccctggacgcccccggcggcagagccctggtggtgagaaaggtgccccccggctacagcatcaaggtgttcgacttcgagagaagcggcctgcagcacgcccccgagcccgacgccgccgacggcccctacgaccccaacagcgtgagaatcagcttcgccaagggctggggcccctgctacagcagacagttcatcaccagctgcccctgctggctggagatcctgctgaacaaccccagatag

SEQ ID NO: 314614 - protein, 50 aa, Artificial Sequence
  derived and/or modified sequence
MKLKKQVTVCGAAIFCVAVFSLYLMLDRVQHDPTRHQNGGNFPRSQISVL

SEQ ID NO: 314615 - DNA, 219 bp, Artificial Sequence
  derived and/or modified sequence
atgaagctcaaaaagcaggtcaccgtatgtggagccgccatcttctgtgtcgctgtcttctctctgtacttgatgctcgatcgggtgcagcatgatcccacccgacaccagaatggaggaaacttccctcgaagccagatctccgtgctgcagaaccggattgaacaactggaacagctgctggaagagaatcacgagattatcagccacatcaaatag

SEQ ID NO: 314616 - DNA, 231 bp, Artificial Sequence
  derived and/or modified sequence
atgaaacttaagaaacaggttaccgtctgtggcgccgccatattctgcgtagcagtttttagtctttacctcatgttggaccgcgtgcaacacgacccgacccgccaccagaacggcggaaatttccctcggtcccagatcagtgtgctgcagaatagaattgagcagctggagcagctgctggaagagaaccatgagattatctcacacatcaaggacagcgtcctctag

SEQ ID NO: 314617 - DNA, 363 bp, Artificial Sequence
  derived and/or modified sequence
atgaagctgaaaaaacaggtgactgtgtgcggcgcggctattttctgcgtagcagtcttttctctttatctaatgctagaccgggtgcagcacgaccccacaagacaccagaatggaggcaacttcccccggtctcagatctcagtgctgcaaaaccgcattgagcaactggagcaactgcttgaggagaatcatgagatcattagccacattaaggactcggtgctcgaactgactgcaaacgcggaaggccctccagccatgctgccctactacactgtcaacggctcttgggttgtgcctccagagccacgcccctcatttttcagcattagtccgcaggactgccagttcgctctatag

SEQ ID NO: 314618 - DNA, 219 bp, Artificial Sequence
  derived and/or modified sequence
atgaagctgaagaagcaggtgacagtgtgtggggccgccatcttctgtgtggccgtgttcagcctgtacctgatgctggacagagtgcagcacgaccccaccaggcaccagaatggaggcaacttccccaggagccagatctctgtgctgcagaaccgcatcgagcagctggagcagctgctggaggagaaccacgagatcatcagccacatcaagtag

SEQ ID NO: 314619 - DNA, 231 bp, Artificial Sequence
  derived and/or modified sequence
atgaagctgaagaagcaggtgacagtgtgtggggccgccatcttctgtgtggccgtgttcagcctgtacctgatgctggacagagtgcagcacgaccccaccaggcaccagaatggaggcaacttccccaggagccagatctctgtgctgcagaaccgcatcgagcagctggagcagctgctggaggagaaccacgagatcatcagccacatcaaggacagcgtgctgtag

SEQ ID NO: 314620 - DNA, 363 bp, Artificial Sequence
  derived and/or modified sequence
atgaagctgaagaagcaggtgacagtgtgtggggccgccatcttctgtgtggccgtgttcagcctgtacctgatgctggacagagtgcagcacgaccccaccaggcaccagaatggaggcaacttccccaggagccagatctctgtgctgcagaaccgcatcgagcagctggagcagctgctggaggagaaccacgagatcatcagccacatcaaggacagcgtgctggagctgacagccaatgctgagggccccccagccatgctgccctactacacagtgaatggctcctgggtggtgcccccagagccccggcccagcttcttcagcatcagcccccaggactgccagtttgccctgtag

SEQ ID NO: 314621 - DNA, 1049 bp, Artificial Sequence
  derived and/or modified sequence
attgcagtatggattacactgaaaaactgtaaacaacctagatgcccagtaaaagggaaacagccaagaaaagtctgtgtcttgttcactcgctggcaggaaacatagagcaggcacggaaaggaaagggactcgaggaatgcgctgtaccgacaggaggcagcacccctttgcccgaggggcgcaacgacagagacctaaggctacctgggccggagccgggtgaggccgcggagaacgcaccccgctacgcgtctgccgagacggaggcgggcgtttcgaccactgcccgatcatgcgcttactcaactccacccacattggcctagacccagtctctaagggctgaaaatattgcccggaagctcccgagcagaatcagatcgcgctaagtagggcacaacgcagaggcgacaaagctcctcggccccagggcccgcggagcagactccggagcgcggtcccgcccacgctcggctccgcagttagcgtcctccttcctcctgagcaggcaagcggagcccgagggcggtggcggcggggggcacgggtcccctgaagttgcctcgcagctgagcactgggccccgtctctcccttcccagggggccttcggcgtcactgcaggcttcctaggggtcccctaagtgctctgcaaaccgcggctggaagtttcccactgcagtgaacagtagagaaacagggagaacacacagggcttgctttatgctagaaacacaagcatctttcttctttattagaaagaaactcattctgtgtttctgagaaaggatcgtgccaggcactgtttctggtgtgtgtggaggccagtatgaagctgaaaaagcaggtgacagtgtgtggggctgccatcttctgtgtggcagtcttctcgctctacctcatgctggaccgagtgcaacacgatcccacccgacaccagaatggtgggaacttcccccggagccaaatttctgtgctgcagaaccgcattgagcagctggagcagcttttggaggagaaccatgagattatcagccatatcaagga

SEQ ID NO: 314622 - DNA, 624 bp, Artificial Sequence
  derived and/or modified sequence
aaacagccaagaaaagtctgtgtcttgttcactcgctggcaggaaacatagagcaggcacggaaaggaaagggactcgaggaatgcgctgtaccgacaggaggcagcacccctttgcccgaggggcgcaacgacagagacctaaggctacctgggccggagccgggtgaggccgcggagaacgcaccccgctacgcgtctgccgagacggaggcgggcgtttcgaccactgcccgatcatgcgcttactcaactccacccacattggcctagacccagtctctaagggctgaaaatattgcccggaagctcccgagcagaatcagatcgcgctaagtagggcacaacgcagaggcgacaaagctcctcggccccagggcccgcggagcagactccggagcgcggtcccgcccacgctcggctccgcagttagcgtcctccttcctcctgagcaggtgtgtgtggaggccagtatgaagctgaaaaagcaggtgacagtgtgtggggctgccatcttctgtgtggcagtcttctcgctctacctcatgctggaccgagtgcaacacgatcccacccgacaccagaatggtgggaacttcccccggagccaaatttctgtgctgca

SEQ ID NO: 314623 - DNA, 537 bp, Artificial Sequence
  derived and/or modified sequence
agtttgacccgaaagggcactgagaaaggctttcctatcagtctctttgggttctggctaaacttttaaatcaaacaaaatagagactagcttattcacctgaaactagaagcacatggccgaggagcctgaacaggcacctcctatctaggcagggaagctgtgtaatcaggagcttgtgtggtgcgctccagtcggagctgggactcttatcctgggcccgtttttcatagcaccagccaaaggagagcgtcctctccaccctagcggcagagctgctaccaggaccaggtgtgtgtggaggccagtatgaagctgaaaaagcaggtgacagtgtgtggggctgccatcttctgtgtggcagtcttctcgctctacctcatgctggaccgagtgcaacacgatcccacccgacaccagaatggtgggaacttcccccggagccaaatttctgtgctgcagaaccgcattgagcagctggagcagcttttggaggagaaccatgagattatcagccatatcaaggactccgtgctg

SEQ ID NO: 314624 - DNA, 529 bp, Artificial Sequence
  derived and/or modified sequence
gcagcacccctttgcccgaggggcgcaacgacagagacctaaggctacctgggccggagccgggtgaggccgcggagaacgcaccccgctacgcgtctgccgagacggaggcgggcgtttcgaccactgcccgatcatgcgcttactcaagtgtgtgtggaggccagtatgaagctgaaaaagcaggtgacagtgtgtggggctgccatcttctgtgtggcagtcttctcgctctacctcatgctggaccgagtgcaacacgatcccacccgacaccagaatggtgggaacttcccccggagccaaatttctgtgctgcagaaccgcattgagcagctggagcagcttttggaggagaaccatgagattatcagccatatcaaggactccgtgctggagctgacagccaacgcagagggcccgcccgccatgctgccctactacacggtcaatggctcctgggtggtgccaccggagccccggcccagcttcttctccatctccccgcaggactgccagtttgctttgg

SEQ ID NO: 314625 - DNA, 219 bp, Artificial Sequence
  derived and/or modified sequence
atgaagctgaagaagcaggtgaccgtgtgcggcgccgccatcttctgcgtggcagtttttagcctgtatctaatgcttgaccgtgtgcagcatgaccccacgcgacaccagaacggtggtaatttcccacggagtcagatctccgttttacaaaacagaattgagcaactggaacagcttctggaagaaaaccacgaaattatctcgcatataaaatag

SEQ ID NO: 314626 - DNA, 231 bp, Artificial Sequence
  derived and/or modified sequence
atgaagctgaagaagcaggtgaccgtgtgcggcgccgccatcttctgcgttgctgtctttagcctctatctcatgctggatagggttcagcacgaccctacgagacaccagaacggtggaaactttccacgctcgcaaatcagcgtgctccagaatagaattgaacagctggagcagctgctggaggaaaatcacgaaattattagccatatcaaagacagcgtcctttag

SEQ ID NO: 314627 - DNA, 363 bp, Artificial Sequence
  derived and/or modified sequence
atgaagctgaagaagcaggtgaccgtgtgcggcgccgccatcttctgtgtggccgtgtttagtttatatcttatgctggacagagtgcagcacgaccccacccgtcatcaaaacgggggcaatttcccccggagccagataagcgtgctccagaacaggattgagcagttggaacaattactggaggagaaccatgagataattagtcacatcaaagacagcgtcctggaactcaccgctaacgcagagggccccccagctatgctgccttattatacagttaacggaagctgggtagtgccgcctgaacctagaccttcctttttcagcatatccccacaggactgtcagttcgctctatag

SEQ ID NO: 314628 - DNA, 219 bp, Artificial Sequence
  derived and/or modified sequence
atgaaattaaagaaacaggtaaccgtctgcggcgctgcaatcttctgcgtcgctgtgttcagtctctatctgatgcttgatagagtgcagcatgatccgaccagacatcagaacggcggaaattttcccagaagtcagatctctgtgcttcagaatcggatcgagcagctggagcagttgctggaagaaaaccatgaaataatatcccacataaagtag

SEQ ID NO: 314629 - DNA, 231 bp, Artificial Sequence
  derived and/or modified sequence
atgaaactgaagaaacaggtgactgtctgcggggctgccatcttctgtgtggccgtgttcagcttatacctcatgctggatcgggtccaacacgaccctacgcgtcaccagaatgggggtaactttccgagatcccaaatttctgtcctgcagaatcggattgagcagttggagcagcttctcgaggagaaccatgagattatctcacacatcaaggactccgtactatag

SEQ ID NO: 314630 - DNA, 363 bp, Artificial Sequence
  derived and/or modified sequence
atgaagctgaagaagcaggtgaccgtttgcggcgcagccattttctgcgtcgcagtgttttccttgtatctgatgctggaccgcgtccagcacgaccccactaggcatcagaacggcggtaacttccctaggtcccagatctccgtcctgcagaataggatcgagcaactggaacaacttctcgaagagaatcacgagataattagccatatcaaagattccgtgctggaactgactgcgaacgcagaaggaccgcctgccatgctgccttactatacagtgaacggctcttgggtcgtcccaccggaacctcgaccctctttttttagcatctcgccacaggattgccagtttgctctgtag

SEQ ID NO: 314631 - DNA, 219 bp, Artificial Sequence
  derived and/or modified sequence
atgaagctgaagaagcaggtgaccgtgtgcggcgccgccatcttctgcgtggccgtgttcagcctgtacctgatgctggacagagtgcagcacgaccccaccagacaccagaacggcggcaacttccccagaagccagatcagcgtgctgcagaacagaatcgagcagctggagcagctgctggaggagaaccacgagatcatcagccacatcaagtag

SEQ ID NO: 314632 - DNA, 231 bp, Artificial Sequence
  derived and/or modified sequence
atgaagctgaagaagcaggtgaccgtgtgcggcgccgccatcttctgcgtggccgtgttcagcctgtacctgatgctggacagagtgcagcacgaccccaccagacaccagaacggcggcaacttccccagaagccagatcagcgtgctgcagaacagaatcgagcagctggagcagctgctggaggagaaccacgagatcatcagccacatcaaggacagcgtgctgtag

SEQ ID NO: 314633 - DNA, 363 bp, Artificial Sequence
  derived and/or modified sequence
atgaagctgaagaagcaggtgaccgtgtgcggcgccgccatcttctgcgtggccgtgttcagcctgtacctgatgctggacagagtgcagcacgaccccaccagacaccagaacggcggcaacttccccagaagccagatcagcgtgctgcagaacagaatcgagcagctggagcagctgctggaggagaaccacgagatcatcagccacatcaaggacagcgtgctggagctgaccgccaacgccgagggcccccccgccatgctgccctactacaccgtgaacggcagctgggtggtgccccccgagcccagacccagcttcttcagcatcagcccccaggactgccagttcgccctgtag

SEQ ID NO: 314634 - protein, 340 aa, Artificial Sequence
  derived and/or modified sequence
MQVWFSGLTGLLKPYVPKEPPVLRVTEGPFFSEVVAYYEHIHQAVRLYNLPGVEGLSLDISSLVDIRDYVNKELALHIHTDIDSQGIFFTDLNGFQVQPRRYLKKLPLQANFYPMPVMAYIQDAQKRLTLHTAQALGVSSLKDGQLEVILDRRLMQDDNRGLGQGLKDNKRTCNRFRLLLERRTVGSEVQDSHSTSYPSLLSHLTSMYLNAPALALPVARMQLPGPGLRSFHPLASSLPCDFHLLNLRTLQAEEDTLPSAETALILHRKGFDCGLEAKNLGFNCTTSQGKVALGSLFHGLDVVFLQPTSLTLLYPLASPSNSTDVYLEPMEIATFRLRLG

SEQ ID NO: 314635 - protein, 658 aa, Artificial Sequence
  derived and/or modified sequence
MTSDMTSPRSGMPSSSTTNGSLTSSTAGLTSMCRGAEVLYSLAAAHARRSGLAGRYPLSDFTLLTEARRTLGLFQHHDAITGTAKEAVVVDYGVRLLRSLVNLKQVIIHAAHYLVLGDKETYHFDPEAPFLQVDDTRLSHDALPERTVIQLDSSPRFVVLFNPLEQERFSMVSLLVNSPRVRVLSEEGQPLAVQISAHWSSATEAVPDVYQVSVPVRLPALGLGVLQLQLGLDGHRTLPSSVRIYLHGRQLSVSRHEAFPLRVIDSGTSDFALSNRYMQVWFSGLTGLLKSIRRVDEEHEQQVDMQVLVYGTRTSKDKSGAYLFLPDGEAKPYVPKEPPVLRVTEGPFFSEVVAYYEHIHQAVRLYNLPGVEGLSLDISSLVDIRDYVNKELALHIHTDIDSQGIFFTDLNGFQVQPRRYLKKLPLQANFYPMPVMAYIQDAQKRLTLHTAQALGVSSLKDGQLEVILDRRLMQDDNRGLGQGLKDNKRTCNRFRLLLERRTVGSEVQDSHSTSYPSLLSHLTSMYLNAPALALPVARMQLPGPGLRSFHPLASSLPCDFHLLNLRTLQAEEDTLPSAETALILHRKGFDCGLEAKNLGFNCTTSQGKVALGSLFHGLDVVFLQPTSLTLLYPLASPSNSTDVYLEPMEIATFRLRLG

SEQ ID NO: 314636 - DNA, 477 bp, Artificial Sequence
  derived and/or modified sequence
atggaccttgccagtgagataacctctgcaactcagacttcctccttgtgttcgagcggaagagggcatgccggatacccagctcctggcatcgtggctcatggttttgagacacatggaacagccagagtggcgcagggtcatctactgcctccttgtcttctcccccctcctcaaatgccagtgctagcagccttaagggacttgagtcggaggggatccacatctagtagtagaagtccgtccagaccggtttcgaccagcgcatcaaagccatgtctgccagcatcctgtctcggagagacttggtccatatcaatcaatctggttgggagctctggccacctgcagtcgcccggagcacaacgcgacgctcagcgagaaacagggtgcctggggccatcctggctccctcatcaccaggggcgagacgaagagctcagtctctcacattctgcacagggcgaggaattctag

SEQ ID NO: 314637 - DNA, 1023 bp, Artificial Sequence
  derived and/or modified sequence
atgcaggtgtggttttctggactcaccggactcctcaagccttacgtgcccaaagaacctcccgtgttgcgcgtgaccgaggggccattcttctctgaagttgtcgcatactatgagcacatacatcaagcggtcagactttataacctgccaggagtcgaagggctctccctcgatatcagctccctcgtggacatcagagactatgtgaacaaagagttggccctccatatccataccgacattgatagccagggtattttcttcactgacctgaacgggttccaagtgcagccaaggcggtacctgaagaagttgcccctgcaggctaacttctaccctatgcctgtgatggcctacatccaggacgcccaaaagcgtttgacgctccatactgcccaggccctgggcgtgtcttcactcaaagatggccagttggaagtgatactcgaccgccgcttgatgcaggatgataatcggggcctgggccagggcctgaaggataacaaacggacatgcaaccggtttagattgcttttggaaaggcgcactgtggggagtgaggtccaggactcccactcaacgtcgtacccaagtctactgagtcaccttacttcaatgtacctaaacgccccagcactggccctccctgtcgcccgaatgcagttacccggcccagggctgcggtcattccatcccctggcctcttcactcccctgtgatttccatctgctcaatctccgaaccctgcaggccgaagaagacacgttgccttctgccgagacggctctgatattacataggaagggatttgattgcggtttggaagcaaaaaacctcggatttaactgtactacatcacagggaaaggttgccctcggatctctgttccacgggcttgacgtggtcttcctccagcccacctccctaaccctgctctacccgcttgccagtcctagcaactcaacggacgtgtatcttgaacctatggagatcgctacctttcggctcagactcggctag

SEQ ID NO: 314638 - DNA, 1977 bp, Artificial Sequence
  derived and/or modified sequence
atgacctccgacatgacaagccctagatcgggcatgccctcctcctccacaacaaatgggtctttaacctcctcgactgctggcctcacgtctatgtgtcggggcgccgaagtgctgtacagcttggcagccgcccacgccaggcgctctggtctggccgggagatacccactgtctgacttcaccctattaacggaggcaagacggaccctagggctgttccagcaccatgacgcaatcactgggactgcaaaagaggccgttgtggtggattacggtgtacgacttctccggtctctggttaacctgaaacaagttatcatccacgcggcacactaccttgtcctcggggacaaagaaacttatcacttcgacccagaagcaccattcttgcaggttgatgatacgaggttgagccacgacgcactgcctgagcgtactgtgatccagctggacagcagtcccagatttgtcgtgttattcaaccctttggaacaggaacgcttcagtatggtttcgctgctggtgaacagccctagagtgcgagttttgtccgaagagggtcaaccattggctgtccagatatccgcccattggagtagcgcaacagaggccgtcccggatgtgtatcaggtttccgtaccagtgcggctccctgcccttggactaggggtgctgcagctccagctcggactagatggtcaccgaacgcttcctagtagtgtgcgaatatatctgcacgggcgccagctcagcgtgagtcgccatgaggcatttccattgagggttattgattctggcacctccgatttcgctctgtctaaccgatacatgcaggtatggttctctggcctgacaggcttactgaagagtataagacgggtcgatgaggagcatgaacaacaagtggatatgcaggttctggtgtatgggacccgtaccagcaaagacaagtcaggtgcttacttgttccttccagatggcgaggcgaagccgtatgtcccaaaagagccccctgtactgagagtgacagagggcccattcttctctgaggttgtggcctactacgagcatattcaccaagcagtccgcctgtacaatcttccaggcgttgagggactgtcgctggatatctcttccctggtagacatccgggactatgtgaataaagagctggccctgcacatccatactgatatcgatagtcagggcatcttcttcaccgacctgaacggctttcaggttcagccccgacggtatctgaaaaaactacccctgcaggccaatttttatccaatgccagtgatggcatatatacaggatgctcagaagcgcctaacactgcacaccgcacaggctctcggggtgtctagtctcaaggacggacaattagaggtgatcctcgatcgtaggctgatgcaggacgacaacagaggccttggacagggattgaaggacaacaaaaggacgtgcaaccgcttccggctgctcctggagcggaggactgtgggatccgaggtgcaggacagccatagcaccagttacccatcactactctcccacctaacctctatgtacctgaacgcacctgctcttgcactgcctgtagcccgcatgcaattgcctgggcccggcttgcgttctttccaccctctagcatcctctctaccctgcgattttcacctgttgaatttgagaacccttcaagctgaggaggacactctgccttctgctgagacagccctgatcttgcacaggaaaggattcgactgtgggcttgaggctaagaatctagggttcaactgtacaactagccaaggcaaagtcgccttaggaagcctgtttcatgggctggacgttgtatttctccagccaacttcgctcacattactctatccactggcctctcccagtaactcaactgacgtgtacctggagcctatggagattgcgacctttcgcctcagattaggatag

SEQ ID NO: 314639 - DNA, 1023 bp, Artificial Sequence
  derived and/or modified sequence
atgcaggtgtggttcagcggcctgaccggcctgctgaagccctacgtgcccaaggagccccctgtgctgcgggtgacagagggccccttcttcagcgaggtggtggcctactatgagcacatccaccaggccgtgcggctgtacaacctgcccggggtggagggcctgagcctggacatcagcagcctggtggacatccgggactatgtgaacaaggagctggccctgcacatccacacagacatcgacagccagggcatcttcttcacagacctgaatggcttccaggtgcagccccggcgctacctgaagaagctgcccctgcaggccaacttctaccccatgcctgtgatggcctacatccaggatgcccagaagaggctgaccctgcacacagcccaggccctgggcgtgagcagcctgaaggatggccagctggaggtgatcctggaccggcggctgatgcaggatgacaacagaggcctgggccagggcctgaaggacaacaagaggacctgcaaccgcttccggctgctgctggagaggagaacagtgggcagcgaggtgcaggacagccacagcaccagctaccccagcctgctgagccacctgacctccatgtacctgaatgccccagccctggccctgcctgtggccaggatgcagctgcccggccctggcctgcggagcttccaccccctggccagcagcctgccctgtgacttccacctgctgaacctgcggaccctgcaggccgaggaggacaccctgcccagcgctgagacagccctgatcctgcacaggaaaggatttgactgtggcctggaggccaagaacctgggcttcaactgcaccaccagccagggcaaggtggccctgggcagcctcttccacggcctggatgtggtgttcctgcagcccaccagcctgaccctgctgtaccccctggccagccccagcaacagcacagatgtgtacctggagcccatggagatcgccaccttccggctgcggctgggctag

SEQ ID NO: 314640 - DNA, 1977 bp, Artificial Sequence
  derived and/or modified sequence
atgaccagtgacatgaccagccccaggagcggcatgcccagcagcagcaccaccaacggcagcctgaccagcagcacagctggcctgacctccatgtgccgcggggctgaggtgctgtacagcctggccgccgcccacgcccggcgcagcggcctggccggccgctaccccctgagtgacttcaccctgctgacagaggcccggaggaccctgggcctcttccagcaccatgatgccatcactggaacagccaaggaggccgtggtggtggactatggagtgcggctgctgcggagcctggtgaacctgaagcaggtgatcatccacgccgcccactacctggtgctgggggacaaggagacctaccactttgatcctgaggcccccttcctgcaggtggatgacacccggctgagccatgatgccctgcctgagaggacagtcatccagctggacagcagccccaggtttgtggtgctcttcaaccccctggagcaggagcgcttctccatggtgtccctgctggtgaacagcccccgggtgcgggtgctgtctgaggagggccagcccctggccgtgcagatcagcgcccactggagcagcgccacagaagctgtgcctgatgtgtaccaggtgtctgtgcctgtgcggctgcctgccctgggcctgggcgtgctgcagctgcagctgggcctggatggccacaggaccctgcccagctctgtgcgcatctacctgcacggccggcagctgtctgtgtccagacatgaggccttccccctgcgggtcatcgacagcggcaccagtgactttgccctgagcaaccgctacatgcaggtgtggttcagcggcctgaccggcctgctgaagagcatcagaagagtggatgaggagcacgagcagcaggtggacatgcaggtgctggtgtatggcaccaggaccagcaaggacaagagcggggcctacctgttcctgcctgatggagaggccaagccctacgtgcccaaggagccccctgtgctgcgggtgacagagggccccttcttcagcgaggtggtggcctactatgagcacatccaccaggccgtgcggctgtacaacctgcccggggtggagggcctgagcctggacatcagcagcctggtggacatccgggactatgtgaacaaggagctggccctgcacatccacacagacatcgacagccagggcatcttcttcacagacctgaatggcttccaggtgcagccccggcgctacctgaagaagctgcccctgcaggccaacttctaccccatgcctgtgatggcctacatccaggatgcccagaagaggctgaccctgcacacagcccaggccctgggcgtgagcagcctgaaggatggccagctggaggtgatcctggaccggcggctgatgcaggatgacaacagaggcctgggccagggcctgaaggacaacaagaggacctgcaaccgcttccggctgctgctggagaggagaacagtgggcagcgaggtgcaggacagccacagcaccagctaccccagcctgctgagccacctgacctccatgtacctgaatgccccagccctggccctgcctgtggccaggatgcagctgcccggccctggcctgcggagcttccaccccctggccagcagcctgccctgtgacttccacctgctgaacctgcggaccctgcaggccgaggaggacaccctgcccagcgctgagacagccctgatcctgcacaggaaaggatttgactgtggcctggaggccaagaacctgggcttcaactgcaccaccagccagggcaaggtggccctgggcagcctcttccacggcctggatgtggtgttcctgcagcccaccagcctgaccctgctgtaccccctggccagccccagcaacagcacagatgtgtacctggagcccatggagatcgccaccttccggctgcggctgggctag

SEQ ID NO: 314641 - DNA, 1443 bp, Artificial Sequence
  derived and/or modified sequence
gtttcctctccgtgtcattgactctggcaccagcgacttcgccctcagcaaccgctacatgcaggtctggttctcaggccttactgggctcctcaagccctacgtccccaaggagccccccgtgctgcgtgtcactgaaggccctttcttctcagaggtggttgcgtactatgagcacattcaccaggcggtccggctttacaatctgccaggggtggaggggctgtctctggacatatcatccctggtggacatccgggactacgtcaacaaggagctggccctgcacatccatacagacatcgacagccagggtatcttcttcacagacctcaatggctttcaggtgcagccccgacggtatctgaagaagctccccctccaggccaacttctaccccatgccagtcatggcctatatccaggacgcacagaagcgcctcacgctgcacactgcccaggccctgggtgtctctagcctcaaagatggccagctggaggtgatcttggaccggcggctgatgcaggatgacaaccggggcctaggccaagggctcaaggacaacaagagaacctgcaaccgtttccgcctcctgctagagcggcgaaccgtgggcagtgaggtccaagatagccactctaccagctacccatccctcctcagccacctgacctccatgtacctgaacgccccggcgctcgctctgcctgtagccaggatgcagctcccaggccctggtctgcgctcatttcatcctctggcttcctcactgccctgtgacttccacctgctcaacctacgtacgctccaggctgaggaggacaccctaccctcggcggagaccgcactcatcttacaccgcaagggttttgactgcggcctggaggccaagaacttgggcttcaactgcaccacaagccaaggcaaggtagccctgggcagccttttccatggcctggatgtggtattccttcagccaacctccttgacgttactgtaccctctggcctccccgtccaacagcactgacgtctatttggagcccatggagattgctacctttcgcctccgcttgggttagggcttcttgtggcctgaagagaaagttcattcacagagactgcctcttaacatgaagatcattggacaagccacacggggatatagaagtggtggaagcagacagaagaggtaagggaggctaagtgggtaacagcccagcatcagggtcactgtggcaacagcaggctctaggggaatcctgtggttatgtagagactccatgtcctggtgtgatgagcaggatcagagtgactctgggaggacaggggtggggacccagagttagcagtggggatggagcagtagaaggaatcactgtttctcctaggagtctgaaggcctcgctgctttctgtgatggctttgcagtaagtgccgcctg

SEQ ID NO: 314642 - DNA, 2461 bp, Artificial Sequence
  derived and/or modified sequence
tcccaagatctgctgccaatttgatttcaaacgcctgcctggtgggcgcatcaactgcccttggaaggtgccaccccgggccatcacagaggccaacgtggcagagagggcagccctgcttctggaccaataccggaagaagtcccagctgttccgaagcaacgtcctcctggtgcctcttggagatgacttccgatatgacaagccccaggagtgggatgcccagttcttcaactaccaacggctctttgacttcttcaacagcaggcctaacctccatgtgcaggggggcagaggttctgtacagcctggctgcagctcacgctcgccgctctggtctggctggccggtacccactgtctgatttcaccctcctgacggaagctcggcgcacattggggctcttccagcatcacgatgccatcactggcacggccaaggaggctgtggtggtggactatggggtcaggcttctgcgctcccttgtcaacctgaagcaggtcatcattcatgcagcccactatctggtgctgggggacaaggagacctaccactttgaccctgaggcgcccttcctccaagtggatgacactcgcttaagtcacgacgccctcccagagcgcacggtgatccagctggattcctcgcccaggtttgtggtcctattcaacccactggaacaggagcgattcagcatggtgtccctgctggtcaactctccccgcgtgcgtgtcctttcggaggagggtcagcccctggccgtgcagatcagcgcacactggagctctgccaccgaggcggtccctgacgtctaccaggtgtctgtgcctgtccgcctgccagccctgggcctgggcgtgctgcagctacagctgggcctggatgggcaccgcacgctgccctcctctgtgcgcatctacctgcacggccggcagctgtccgtcagcaggcacgaagcgtttcctctccgtgtcattgactctggcaccagcgacttcgccctcagcaaccgctacatgcaggtctggttctcaggccttactgggctcctcaagagcatccgaagggtggatgaggagcacgagcagcaggtggacatgcaggtccttgtctatggcacccgtacgtccaaagacaagagtggagcctacctcttcctgcccgatggcgaggccaagccctacgtccccaaggagccccccgtgctgcgtgtcactgaaggccctttcttctcagaggtggttgcgtactatgagcacattcaccaggcggtccggctttacaatctgccaggggtggaggggctgtctctggacatatcatccctggtggacatccgggactacgtcaacaaggagctggccctgcacatccatacagacatcgacagccagggtatcttcttcacagacctcaatggctttcaggtgcagccccgacggtatctgaagaagctccccctccaggccaacttctaccccatgccagtcatggcctatatccaggacgcacagaagcgcctcacgctgcacactgcccaggccctgggtgtctctagcctcaaagatggccagctggaggtgatcttggaccggcggctgatgcaggatgacaaccggggcctaggccaagggctcaaggacaacaagagaacctgcaaccgtttccgcctcctgctagagcggcgaaccgtgggcagtgaggtccaagatagccactctaccagctacccatccctcctcagccacctgacctccatgtacctgaacgccccggcgctcgctctgcctgtagccaggatgcagctcccaggccctggtctgcgctcatttcatcctctggcttcctcactgccctgtgacttccacctgctcaacctacgtacgctccaggctgaggaggacaccctaccctcggcggagaccgcactcatcttacaccgcaagggttttgactgcggcctggaggccaagaacttgggcttcaactgcaccacaagccaaggcaaggtagccctgggcagccttttccatggcctggatgtggtattccttcagccaacctccttgacgttactgtaccctctggcctccccgtccaacagcactgacgtctatttggagcccatggagattgctacctttcgcctccgcttgggttagggcttcttgtggcctgaagagaaagttcattcacagagactgcctcttaacatgaagatcattggacaagccacacgggtatcccatcccgatctgcctcccagaactgtgacacactgggctctgccctcattttctgtttattgctgctgctgtgttttcggcgcaacccacaaacccagtgatgggtaaatagggcagacgccagtgagatcagggagagaaggcccttggtcagagtgggcagtgccaggctctgctttgggttgtgagtggacacccaactgggcacaggctca

SEQ ID NO: 314643 - DNA, 1023 bp, Artificial Sequence
  derived and/or modified sequence
atgcaggtgtggttcagcggcctgaccggcctgctgaagccctacgtacctaaggaacctcctgttttgcgcgtgaccgagggcccctttttttctgaagttgtcgcttactatgaacatattcaccaagctgtgagactgtacaatctgcccggtgtcgagggcctgtctctggacatttccagtctggtggacataagagactacgtgaataaagaacttgctctgcacatacacaccgacattgattcacagggcatttttttcaccgatcttaacggtttccaggtgcagccccgacggtatctgaagaagctaccactgcaggccaatttctacccaatgcccgtcatggcctatattcaagacgctcagaaaaggttgactcttcataccgcccaggcactgggcgtgtccagcttgaaagacggccagctggaagtgatcctcgataggagattaatgcaggacgacaaccgcgggctggggcaggggttgaaggataataagaggacctgtaatagattccgcttgttgctggagcggcgcaccgtaggtagcgaggtacaggattctcactcaacgtcctatcctagcctgctctcacacctcacctccatgtatttgaatgccccggctctagcgctaccggtggccaggatgcagttgcctggaccagggttgcgctccttccacccattggcaagtagcctgccgtgtgactttcatttactcaatctgaggacactgcaggctgaggaggacacactgccctctgcagagacagctttgattctccacagaaagggtttcgattgtgggctcgaggctaagaacctcggttttaactgcacaacctcgcaggggaaagttgctttgggcagcctgttccacggcctcgatgttgtgttcctccagcctacttcattgaccttgctctaccctctcgcttctccttctaattcaacagatgtatatttagagcctatggaaatcgctacctttcgccttcggctgggttag

SEQ ID NO: 314644 - DNA, 1977 bp, Artificial Sequence
  derived and/or modified sequence
atgaccagcgacatgaccagcccccggagcggcatgcccagcagctcaaccactaacggctcactgacatcctctaccgctgggcttacgagcatgtgccgtggggccgaagtgctttacagcctggcagccgcccacgccaggagatcagggttggccggaaggtatcctctttccgattttacactcttgacagaagcccgccggactcttggtctcttccagcaccatgacgcaattaccggcaccgccaaagaggcagttgtggtggactacggtgtgcgactattaagatcactcgtcaacctgaaacaagtaataatccatgctgcccactatctagttctgggggataaggagacataccatttcgacccggaagctcctttcctgcaggtggatgacacgcgactttctcacgacgctctgcccgaacgtactgtgatccagctggattcctctccgcgatttgtcgtgttgtttaatccacttgaacaggaacggttcagtatggtttctctgttggtgaactctcccagagtgcgcgtcctgtcggaggaggggcagccacttgccgtgcagatcagtgcacactggagtagtgccaccgaagccgtacccgacgtctaccaggtgtccgttccggtcagacttccggccttagggttgggtgtgctccagctccaactgggcctagatgggcaccggactttgcccagcagtgtacggatctatctgcatggaaggcagttatctgtgtcccggcacgaggccttccccctgcgcgtgattgacagcggcacctctgactttgccctgagcaaccgctacatgcaagtctggttctctgggttgaccggcctgctcaagagcattcgtcgcgtggacgaggagcacgagcaacaggtggacatgcaggtgctggtgtacggcactcgaacgagtaaagacaagagcggcgcatatctgttcttgcccgatggagaagctaagccttacgtgcccaaagagcctcccgtcctgcgcgtgacagaaggtccgttcttctctgaggtggttgcatactacgagcatatccaccaggctgtcaggctctacaacttgcccggagtggaggggcttagccttgatatcagttccctcgtcgacattcgggattatgtgaacaaggagctggcacttcatatccacacagacatcgactcccaggggattttcttcacggacctgaatggcttccaggtgcagccacgcaggtaccttaagaaactgcctctgcaagcaaacttttatcccatgccagtaatggcctacatccaggatgcccagaagagactgaccttacacacagctcaggccctcggggtctccagtttaaaagacggacagcttgaggtcatcctggaccgccgactaatgcaggatgataacaggggactgggccaaggattaaaggacaacaaaagaacttgtaaccgtttcaggcttctcctagagcgcagaaccgttggttcggaagtgcaggattcacattccacctcgtatccctccctgctgtctcaccttacctcaatgtacctgaacgccccagcattggcacttcccgtagcccgcatgcagctacccgggccaggacttaggagcttccacccgcttgccagttcgctcccctgtgatttccatctcttgaatcttaggaccttacaggcagaggaggatactctgcccagcgccgagacggctctgattctgcaccgcaaggggtttgattgcggacttgaggctaagaatctcggatttaactgtaccacctctcagggcaaggtggcgctaggatccctgttccacgggctggacgtggtcttcttgcagcccacctccttaacactcttgtaccctctggcttccccatcaaatagcaccgacgtctatctggaaccaatggaaattgcaacattcagactgagactggggtag

SEQ ID NO: 314645 - DNA, 1023 bp, Artificial Sequence
  derived and/or modified sequence
atgcaggtctggtttagtggcctgacaggattgctgaaaccttatgtgcctaaagaaccacccgtcctcagagttactgagggtcccttcttttctgaggtcgtagcctattatgaacacattcatcaggcagttcgcttatacaacctccccggagtggagggcctaagcctcgacatctcttcgctcgtggacatccgcgactacgtgaataaggaactcgctctccacatccacactgacattgacagtcagggcattttttttaccgatctgaacggctttcaggtccagccgcgaagatacttgaagaaactgccactccaggccaacttctatcctatgcctgtaatggcttacattcaggacgcacagaaacgcctcacattgcacacagcccaggcgcttggggtgagtagtcttaaggacggacaactagaggttatcctggatagacgcttgatgcaggatgacaaccggggactgggccagggcttgaaggataacaagcggacttgcaacagatttagactgctcttggagcgcagaacagttgggagcgaagtccaagatagccactctacgtcttatccctccctcctgtcacacctcacatccatgtatctgaatgcacccgctcttgcgctgcccgtggccagaatgcaattgcctgggccaggcctcagaagcttccaccccttggcctcttctctgccttgtgacttccacttgctaaatctgaggacacttcaggctgaggaagataccctcccgtccgcggagactgcacttattcttcacagaaaaggcttcgactgtggcctcgaagccaagaatctggggttcaattgcactacaagccaaggcaaagtcgcattgggctccctgttccacggactggacgtcgtgtttctgcagcctacttcactcacactgctgtatcctctcgcatcccccagcaactcgactgacgtctatttggagcccatggaaattgccaccttccggttaaggctgggctag

SEQ ID NO: 314646 - DNA, 1977 bp, Artificial Sequence
  derived and/or modified sequence
atgacgagcgacatgacatcccctagatccgggatgccttccagctccacgacgaatggatccctgacatctagtactgcaggacttacatcaatgtgcaggggtgccgaggtgctctatagcctagcagccgcacacgcaagaagatctggcctagctgggcgttacccactttccgactttacgttgctaaccgaagcccgacggaccttaggcctgttccagcaccacgatgctatcaccggaacagccaaggaggcggtcgtggtggactacggagtcaggttgctgaggtctcttgtgaacttgaagcaagtgattatccacgctgcccactacctagttctgggggataaggagacttaccacttcgatcccgaagcgccttttctacaggttgatgataccagattaagccatgatgcactgccagagcgcaccgtcatacagcttgactctagtcccagattcgttgtgttgttcaatcccctggaacaggagcgcttctccatggtgagtctcttggtgaattcccctagggtgcgcgtgttgtccgaagagggacagcccctggccgtccagatctctgctcactggtccagtgccacagaggccgtacccgacgtctaccaggtttccgtgcccgtgagactgccggctctgggactgggagtgctgcagctacaactgggcctcgacgggcaccgaactctccctagcagcgtgcggatctatctacacgggcgtcagctgtccgtaagccgccacgaggctttcccacttagggtaatcgactccggtacctccgacttcgcactgagcaatcgttatatgcaagtttggtttagcggcctgactggtctattaaagtctatcagacgagtcgatgaggaacatgaacagcaggtggatatgcaagtcctagtgtacgggacacgtacaagtaaagataaaagtggtgcttatctctttttacccgatggagaagctaagccttacgtcccaaaagagccccctgttttgagggttacagaggggccttttttttctgaggtcgtggcatactatgaacacatccaccaggctgtgagactctacaaccttcccggtgtggaaggcctctcactggacattagcagcctggttgatattcgagattatgtcaataaggaactagccttgcatatccacacggatatcgactcacagggaatttttttcacagatctgaacggcttccaagtgcagcctcgaaggtatctaaagaaactgcctctccaggcgaacttttaccccatgcctgtgatggcgtacattcaagatgcccagaaaaggcttacactccatactgcgcaggccctgggtgtgagttccctgaaggacggccaactggaggtgattcttgacagacgcttgatgcaggacgacaacagaggactggggcagggcctgaaagacaacaaacggacttgcaacagattcaggctgctgctggaacgacgaactgtcggctctgaagtgcaagactctcatagtacttcctatccttcactgttaagtcatttaacctccatgtacttaaatgcaccagccctggccttgccagttgcgagaatgcagctccctggacctggcctgagaagtttccatccactggctagctctctcccctgcgatttccaccttctgaatctcagaacactacaggccgaggaggatacgttgcccagcgccgagaccgctctgatcctgcataggaagggatttgactgcgggctggaggctaaaaacctgggatttaactgcacgacctcccaagggaaggtggcattaggtagtctgttccacgggcttgacgtggtgtttttgcaaccaaccagtttaacactgctgtatcccttggcaagcccaagcaattctaccgatgtctatctggaacccatggaaatagcaacatttcggttgcgtctgggttag

SEQ ID NO: 314647 - DNA, 1023 bp, Artificial Sequence
  derived and/or modified sequence
atgcaggtgtggttcagcggcctgaccggcctgctgaagccctacgtgcccaaggagccccccgtgctgagagtgaccgagggccccttcttcagcgaggtggtggcctactacgagcacatccaccaggccgtgagactgtacaacctgcccggcgtggagggcctgagcctggacatcagcagcctggtggacatcagagactacgtgaacaaggagctggccctgcacatccacaccgacatcgacagccagggcatcttcttcaccgacctgaacggcttccaggtgcagcccagaagatacctgaagaagctgcccctgcaggccaacttctaccccatgcccgtgatggcctacatccaggacgcccagaagagactgaccctgcacaccgcccaggccctgggcgtgagcagcctgaaggacggccagctggaggtgatcctggacagaagactgatgcaggacgacaacagaggcctgggccagggcctgaaggacaacaagagaacctgcaacagattcagactgctgctggagagaagaaccgtgggcagcgaggtgcaggacagccacagcaccagctaccccagcctgctgagccacctgaccagcatgtacctgaacgcccccgccctggccctgcccgtggccagaatgcagctgcccggccccggcctgagaagcttccaccccctggccagcagcctgccctgcgacttccacctgctgaacctgagaaccctgcaggccgaggaggacaccctgcccagcgccgagaccgccctgatcctgcacagaaagggcttcgactgcggcctggaggccaagaacctgggcttcaactgcaccaccagccagggcaaggtggccctgggcagcctgttccacggcctggacgtggtgttcctgcagcccaccagcctgaccctgctgtaccccctggccagccccagcaacagcaccgacgtgtacctggagcccatggagatcgccaccttcagactgagactgggctag

SEQ ID NO: 314648 - DNA, 1977 bp, Artificial Sequence
  derived and/or modified sequence
atgaccagcgacatgaccagccccagaagcggcatgcccagcagcagcaccaccaacggcagcctgaccagcagcaccgccggcctgaccagcatgtgcagaggcgccgaggtgctgtacagcctggccgccgcccacgccagaagaagcggcctggccggcagataccccctgagcgacttcaccctgctgaccgaggccagaagaaccctgggcctgttccagcaccacgacgccatcaccggcaccgccaaggaggccgtggtggtggactacggcgtgagactgctgagaagcctggtgaacctgaagcaggtgatcatccacgccgcccactacctggtgctgggcgacaaggagacctaccacttcgaccccgaggcccccttcctgcaggtggacgacaccagactgagccacgacgccctgcccgagagaaccgtgatccagctggacagcagccccagattcgtggtgctgttcaaccccctggagcaggagagattcagcatggtgagcctgctggtgaacagccccagagtgagagtgctgagcgaggagggccagcccctggccgtgcagatcagcgcccactggagcagcgccaccgaggccgtgcccgacgtgtaccaggtgagcgtgcccgtgagactgcccgccctgggcctgggcgtgctgcagctgcagctgggcctggacggccacagaaccctgcccagcagcgtgagaatctacctgcacggcagacagctgagcgtgagcagacacgaggccttccccctgagagtgatcgacagcggcaccagcgacttcgccctgagcaacagatacatgcaggtgtggttcagcggcctgaccggcctgctgaagagcatcagaagagtggacgaggagcacgagcagcaggtggacatgcaggtgctggtgtacggcaccagaaccagcaaggacaagagcggcgcctacctgttcctgcccgacggcgaggccaagccctacgtgcccaaggagccccccgtgctgagagtgaccgagggccccttcttcagcgaggtggtggcctactacgagcacatccaccaggccgtgagactgtacaacctgcccggcgtggagggcctgagcctggacatcagcagcctggtggacatcagagactacgtgaacaaggagctggccctgcacatccacaccgacatcgacagccagggcatcttcttcaccgacctgaacggcttccaggtgcagcccagaagatacctgaagaagctgcccctgcaggccaacttctaccccatgcccgtgatggcctacatccaggacgcccagaagagactgaccctgcacaccgcccaggccctgggcgtgagcagcctgaaggacggccagctggaggtgatcctggacagaagactgatgcaggacgacaacagaggcctgggccagggcctgaaggacaacaagagaacctgcaacagattcagactgctgctggagagaagaaccgtgggcagcgaggtgcaggacagccacagcaccagctaccccagcctgctgagccacctgaccagcatgtacctgaacgcccccgccctggccctgcccgtggccagaatgcagctgcccggccccggcctgagaagcttccaccccctggccagcagcctgccctgcgacttccacctgctgaacctgagaaccctgcaggccgaggaggacaccctgcccagcgccgagaccgccctgatcctgcacagaaagggcttcgactgcggcctggaggccaagaacctgggcttcaactgcaccaccagccagggcaaggtggccctgggcagcctgttccacggcctggacgtggtgttcctgcagcccaccagcctgaccctgctgtaccccctggccagccccagcaacagcaccgacgtgtacctggagcccatggagatcgccaccttcagactgagactgggctag

SEQ ID NO: 314649 - DNA, 1111 bp, Artificial Sequence
  derived and/or modified sequence
aaagaggagcgagagcccggcgatggcggctgcgccggccttgaagcactggcgcaccacgctggagcgggtggagaagttcgtgtcgccgctctactttaccgactgtaacctccgcggcaggctttttggggccagctgccctgtggctgtgctctccagcttcctgacgccggagagacttccctaccaggaggcagtccagcgggacttccgccccgcgcaggtcggcgacagcttcggacccacatggtggacctgctggttccgggtggagctgaccatcccagaggcatgggtgggccaggaagttcacctttgctgggaaagtgatggagaaggtctggtgtggcgtgatggagaacctgtccagggtttaaccaaagagggtgagaagaccagctatgtcctgactgacaggctgggggaaagagacccccgaagcctcactctctatgtggaagtagcctgcaatgggctcctgggggccgggaagggaagcatgattgcagcccctgaccctgagaagatgttccagctgagccgggctgagctagctgtgttccaccgggatgtccacatgctcctggtggatctggagctgctgctgggcatagccaagcctggctttggcccttcaaagagactgtgaggaaatgtgcccggagctgggtgaccgccctgcagctcatggagcggaaccctgagttcatctttgcctgctcccaggcgcagcagctggaatgggtgaagagccgctaccctggcctgtactcccgcatccaggagtttgcgtgccgtgggcagtttgtgcctgtggggggcacctgggtggagatggatgggaacctgcccagtggagaggccatggtgaggcagtttttgcagggccagaacttctttctgcaggagtttgggaagatgtgctctgagttctggctgccggacacctttggctactcagcacagctcccccagatcatgcacggctgtggcatcaggcgctttctcacccagaaattgagctggaatttggtgaactccttcccacaccatacatttttctgggagggcctggatggctcccgtgtactggtccacttcccacctg

SEQ ID NO: 314650 - protein, 506 aa, Artificial Sequence
  derived and/or modified sequence
MGRKKIQITRIMDERNRQVTFTKRKFGLMKKAYELSVLCDCEIALIIFNSSNKLFQYASTDMDKVLLKYTEYNEPHESRTNSDIVETLRKKGLNGCESPDADDYFEHSPLSEDRFSKLNEDSDFIFKRGPPGLPPQNFSMSVTVPVTSPNALSYTNPGSSLVSPSLAASSTLTDSSMLSPPQTTLHRNVSPGAPQRPPSTGNAGGMLSTTDLTVPNGAGSSPVGNGFVNSRASPNLIGATGANSLGKVMPTKSPPPPGGGNLGMNSRKPDLRVVIPPSSKGMMPPLYLKRQLNTNNTQRISSSQATQPLATPVVSVTTPSLPPQGLVYSAMPTAYNTDYSLTSADLSALQGFNSPGMLSLGQVSAWQQHHLGQAALSSLVAGGQLSQGSNLSINTNQNISIKSEPISPPRDRMTPSGFQQQQQQQQQQQPPPPPQPQPQPPQPQPRQEMGRSPVDSLSSSSSSYDGSDREDPRGDFHSPIVLGRPPNTEDRESPSVKRMRMDAWVT

SEQ ID NO: 314651 - protein, 505 aa, Artificial Sequence
  derived and/or modified sequence
MGRKKIQITRIMDERNRQVTFTKRKFGLMKKAYELSVLCDCEIALIIFNSSNKLFQYASTDMDKVLLKYTEYNEPHESRTNSDIVETLRKKGLNGCESPDADDYFEHSPLSEDRFSKLNEDSDFIFKRGPPGLPPQNFSMSVTVPVTSPNALSYTNPGSSLVSPSLAASSTLTDSSMLSPPQTTLHRNVSPGAPQRPPSTGNAGGMLSTTDLTVPNGAGSSPVGNGFVNSRASPNLIGATGANSLGKVMPTKSPPPPGGGNLGMNSRKPDLRVVIPPSSKGMMPPLSEEEELELNTQRISSSQATQPLATPVVSVTTPSLPPQGLVYSAMPTAYNTDYSLTSADLSALQGFNSPGMLSLGQVSAWQQHHLGQAALSSLVAGGQLSQGSNLSINTNQNISIKSEPISPPRDRMTPSGFQQQQQQQQQQQPPPPPQPQPQPPQPQPRQEMGRSPVDSLSSSSSSYDGSDREDPRGDFHSPIVLGRPPNTEDRESPSVKRMRMDAWVT

SEQ ID NO: 314652 - DNA, 1521 bp, Artificial Sequence
  derived and/or modified sequence
atgggacggaagaaaatccaaatcactagaattatggatgagcgcaatcgacaagtcacatttaccaaaagaaaattcgggctgatgaagaaagcatatgagttatctgtgctttgcgactgcgagattgctcttattatcttcaactccagcaataagctgttccagtatgcgtccaccgatatggacaaagtgctactgaagtataccgagtacaatgaaccacacgaatcccggaccaactccgacatcgtcgaaacacttagaaagaaaggactaaatggatgtgagtctcccgacgccgatgattattttgagcactcacctctgagtgaagacaggttcagtaagttgaacgaagatagcgactttatcttcaagcggggtccgcccggactgcccccccagaatttctccatgtcagtgacagtccccgtgacaagcccaaacgcgctatcttataccaatccgggttcctctttggtgtccccgtcactggcggcctccagcaccctgacggatagttcaatgctgtctcctcctcagaccaccctgcacagaaacgtgagtccaggcgctccccaacgtccaccttcgactggcaatgccggcggcatgctttccaccacagacttgactgtccctaacggtgcaggttcatcccccgtgggaaatggcttcgttaactcacgtgccagcccgaatcttattggagccacaggggccaactccctgggcaaagtgatgcctaccaagtccccccccccaccaggcggtggcaacctgggaatgaactcccggaagccggatttgagggtggtaatccctccgtccagcaaaggtatgatgccaccactgtacttaaaacgtcagctcaatacaaacaacacccaaaggataagctctagtcaagctactcagcctctcgctacccccgtggtgagcgtaacaaccccttcactgcctccacaaggtttggtgtactccgccatgccgacagcctataatacggactactcattgactagcgcagacttaagcgcactgcagggatttaacagtcctgggatgctgtccctaggccaggtgagcgcctggcaacagcaccaccttggccaggctgcactgagctcccttgtggccggaggccagcttagccagggcagcaatttgtcaatcaacactaatcagaacattagtattaaatctgagcccataagcccccccagagacagaatgaccccgtctggattccagcagcagcaacagcagcagcagcaacagcaaccgccaccccctccccaaccccaaccacagccacctcagccacagcccagacaggagatgggaagatcaccggttgatagcctttccagttcctcctcctcctatgacgggtcggaccgagaggatccccgtggtgattttcactcccccattgtcctcggccgaccacctaacacggaagaccgagagagtcccagcgtgaagaggatgcgcatggacgcctgggtgacctag

SEQ ID NO: 314653 - DNA, 1518 bp, Artificial Sequence
  derived and/or modified sequence
atgggtagaaagaagattcagatcacgagaataatggatgagcgaaacagacaggtgaccttcacaaaacgtaagttcgggctgatgaagaaggcttatgaactttctgttctctgtgattgcgagatcgcgctgatcatattcaattcatctaacaaattgtttcaatatgcgtccaccgacatggacaaagttctgttgaagtacaccgagtataatgagccccacgaaagccgaacaaattctgacattgtggagactcttaggaaaaagggcctgaatggctgtgaaagcccggatgcagatgattacttcgagcacagcccgttaagcgaagatcgattcagcaaactgaatgaggacagcgactttatcttcaaacgaggtccccccggtcttcccccccaaaacttcagcatgtccgtcacagtgcccgttacttctcccaatgcccttagttacactaaccctgggtcatctcttgtgagtcctagcctcgcagcaagtagcactctcaccgacagctccatgctcagtcctccccagacaactttgcatcgaaacgtgagccccggcgccccacaacggccaccttcaacaggcaacgcagggggcatgctgtccacaacggatctgacggtgcctaacggagcaggctcctctcccgtaggtaatggattcgtgaattcacgagcctctccgaatctgattggagcaacaggggccaacagccttggcaaagtgatgccgaccaaatctccccctccccctggaggagggaacctcggcatgaactctagaaaacctgacctcagagtcgtgatcccccctagcagtaagggcatgatgccacctctttctgaggaggaggagttagaacttaacacacagcggatctcttcaagccaagccactcaaccactcgccacaccagtagtgtccgtgactaccccctccttgccacctcagggactggtgtattcagcgatgcccaccgcttataatactgactactccttaacttctgccgatctgtccgcactgcagggatttaatagccctgggatgctaagtctgggccaggtgagtgcctggcaacaacaccatctggggcaagccgctctttcgtcactagtcgccggcggccagttgtcacaggggagtaacctttccatcaatactaaccaaaacatatctatcaagtcagagccgatcagtccgcctcgggatagaatgacaccttcagggtttcaacagcagcagcagcagcagcagcagcagcagccacctcctcccccacaaccacagccccagccacctcagccccagcctcgccaggagatgggccggtccccggtcgactctctttcatctagctcatcttcctacgatggtagcgatagggaggatccccgtggagattttcactcacctatagtgctggggagaccccctaatacagaagatagagagtccccctccgtgaaaaggatgcggatggacgcctgggtaacatag

SEQ ID NO: 314654 - DNA, 1521 bp, Artificial Sequence
  derived and/or modified sequence
atgggcaggaagaagatccagatcacccgcatcatggatgaaagaaaccggcaggtgaccttcaccaagaggaagtttggcctgatgaagaaggcctatgagctgtctgtgctgtgtgactgtgaaattgccctgatcatcttcaacagcagcaacaagctgttccagtatgccagcacagacatggacaaggtgctgctgaagtacacagagtacaatgagccccatgagagcaggaccaacagcgacatcgtggagaccctgaggaagaagggcctgaatggctgtgagagcccagatgctgatgactactttgagcacagccccctgtctgaggaccgcttcagcaagctgaatgaagacagcgacttcatcttcaagaggggccccccaggcctgcccccccagaacttctccatgtctgtgacagtgcctgtgaccagccccaatgccctgagctacaccaaccctggcagcagcctggtgagccccagcctggccgccagcagcaccctgacagacagctccatgctgagccccccccagaccaccctgcacagaaatgtgtcccctggggccccccagaggcctcccagcactggaaatgccggcggcatgctgagcaccacagacctgactgtgcccaacggggccggcagcagccctgtgggcaatggatttgtgaacagccgggccagccccaacctgattggagccaccggggccaacagcctgggcaaggtgatgcccaccaagagccccccacctcctgggggcggcaacctgggcatgaacagcaggaagccagacctgcgggtggtgatcccccccagcagcaagggcatgatgccacccctgtacctgaagaggcagctgaacaccaacaacacccagaggatcagcagcagccaggccacccagcccctggccacccctgtggtgtctgtgaccacccccagcctgcccccccagggcctggtgtacagcgccatgcccacagcctacaacacagactacagcctgaccagcgctgacctgagcgccctgcagggcttcaacagccctggcatgctgagcctgggccaggtgtctgcctggcagcagcaccacctgggccaggccgccctgagcagcctggtggccggcggccagctgagccagggcagcaacctgagcatcaacaccaaccagaacatcagcatcaagtctgagcccatcagccccccccgggacaggatgacccccagcggcttccagcagcagcagcagcagcagcagcagcagcagcccccacctccaccccagccccagccccagcccccccagccccagccccggcaggagatgggccgcagccctgtggacagcctgagcagcagcagcagcagctatgatggcagtgaccgggaggaccccaggggggacttccacagccccatcgtgctgggccggccccccaacacagaagatcgggagagccccagcgtgaagaggatgaggatggatgcctgggtgacctag

SEQ ID NO: 314655 - DNA, 1518 bp, Artificial Sequence
  derived and/or modified sequence
atgggcaggaagaagatccagatcacccgcatcatggatgaaagaaaccggcaggtgaccttcaccaagaggaagtttggcctgatgaagaaggcctatgagctgtctgtgctgtgtgactgtgaaattgccctgatcatcttcaacagcagcaacaagctgttccagtatgccagcacagacatggacaaggtgctgctgaagtacacagagtacaatgagccccatgagagcaggaccaacagcgacatcgtggagaccctgaggaagaagggcctgaatggctgtgagagcccagatgctgatgactactttgagcacagccccctgtctgaggaccgcttcagcaagctgaatgaagacagcgacttcatcttcaagaggggccccccaggcctgcccccccagaacttctccatgtctgtgacagtgcctgtgaccagccccaatgccctgagctacaccaaccctggcagcagcctggtgagccccagcctggccgccagcagcaccctgacagacagctccatgctgagccccccccagaccaccctgcacagaaatgtgtcccctggggccccccagaggcctcccagcactggaaatgccggcggcatgctgagcaccacagacctgactgtgcccaacggggccggcagcagccctgtgggcaatggatttgtgaacagccgggccagccccaacctgattggagccaccggggccaacagcctgggcaaggtgatgcccaccaagagccccccacctcctgggggcggcaacctgggcatgaacagcaggaagccagacctgcgggtggtgatcccccccagcagcaagggcatgatgccacccctgtctgaggaggaggagctggagctgaacacccagaggatcagcagcagccaggccacccagcccctggccacccctgtggtgtctgtgaccacccccagcctgcccccccagggcctggtgtacagcgccatgcccacagcctacaacacagactacagcctgaccagcgctgacctgagcgccctgcagggcttcaacagccctggcatgctgagcctgggccaggtgtctgcctggcagcagcaccacctgggccaggccgccctgagcagcctggtggccggcggccagctgagccagggcagcaacctgagcatcaacaccaaccagaacatcagcatcaagtctgagcccatcagccccccccgggacaggatgaccccatctggcttccagcagcagcagcagcagcagcagcagcagcagcccccacctccaccccagccccagccccagcccccccagccccagccccggcaggagatgggccgcagccctgtggacagcctgagcagcagcagcagcagctatgatggcagtgaccgggaggaccccaggggggacttccacagccccatcgtgctgggccggccccccaacacagaggaccgggagagccccagcgtgaagaggatgaggatggatgcctgggtgacctag

SEQ ID NO: 314656 - DNA, 5491 bp, Artificial Sequence
  derived and/or modified sequence
agaacgagttccggtctggccgaggcttgtctcctaaaaatagccccggtgtggggatccgtgcgcggatgtcccggcgagtcccgggctgaaagaggcggctccgggcggcgcgaagcgctggtggcgggcccgggctgcggcgtgtgcgcgcccgccagctgctccggagatacgatcttgtagaaaatttcagctgtagcccttggactagaagctgaaataacagaagctgtgtacgatgcattagggtattgaagaaaattaacttttgaattaaatatttggaatataaggaaataaggaaagttgactgaaaatggggcggaagaaaatacaaatcacacgcataatggatgaaaggaaccgacaggtcacttttacaaagagaaagtttggattaatgaagaaagcctatgaacttagtgtgctctgtgactgtgaaatagcactcatcattttcaacagctctaacaaactgtttcaatatgctagcactgatatggacaaagttcttctcaagtatacagaatataatgaacctcatgaaagcagaaccaactcggatattgttgagactttaagaaagaaaggccttaatggttgtgagagccctgatgctgacgattactttgagcacagtccactctcggaggacagattcagcaaactaaatgaagatagtgattttattttcaaacgaggccctcctggtctgccacctcagaacttttcaatgtctgtcacagttccagtgaccagccccaatgctttgtcctacactaacccagggagttcactggtgtccccatctttggcagccagctcaacgttaacagattcaagcatgctctctccacctcaaaccacattacatagaaatgtgtctcctggagctcctcagagaccaccaagtactggcaatgcaggtgggatgttgagcactacagacctcacagtgccaaatggagctggaagcagtccagtggggaatggatttgtaaactcaagagcttctccaaatttgattggagctactggtgcaaatagcttaggcaaagtcatgcctacaaagtctccccctccaccaggtggtggtaatcttggaatgaacagtaggaaaccagatcttcgagttgtcatccccccttcaagcaagggcatgatgcctccactatatttgaagagacaactaaatacgaacaatacccagaggatcagtagttctcaagccactcaacctcttgctaccccagtcgtgtctgtgacaaccccaagcttgcctccgcaaggacttgtgtactcagcaatgccgactgcctacaacactgattattcactgaccagcgctgacctgtcagcccttcaaggcttcaactcgccaggaatgctgtcgctgggacaggtgtcggcctggcagcagcaccacctaggacaagcagccctcagctctcttgttgctggagggcagttatctcagggttccaatttatccattaataccaaccaaaacatcagcatcaagtccgaaccgatttcacctcctcgggatcgtatgaccccatcgggcttccagcagcagcagcagcagcagcagcagcagcagccgccgccaccaccgcagccccagccacaacccccgcagccccagccccgacaggaaatggggcgctcccctgtggacagtctgagcagctctagtagctcctatgatggcagtgatcgggaggatccacggggcgacttccattctccaattgtgcttggccgacccccaaacactgaggacagagaaagcccttctgtaaagcgaatgaggatggacgcgtgggtgacctaaggcttccaagctgatgtttgtacttttgtgttactgcagtgacctgccctacatatctaaatcggtaaataaggacatgagttaaatatatttatatgtacatacatatatatatccctttacatatatatgtatgtgggtgtgagtgtgtatgtgtgggtgtgtgttacatacacagaatcaggcacttacctgcaaactccttgtaggtctgcagatgtgtgtcccatggcagacaaagcaccctgtaggcacagacaagtctggcacttccttggactacttgtttcgtaaagataaccagtttttgcagagaaacgtgtacccatatataattctcccacactagcttgcagaaacctagagggccccctacttgttttatttaactgtgcagtgactgtagttacttaagagaaaatgctttgtagaacagagcagtagaaaagcaggaaccaagaaagcaatactgtacataaaatgtcatttatattttccaacctggcatgggtgtctgttgcaaaggggtgcatgggaaagggctgttgatattaaaaacaaacaaaacaaaaaagccccacacataactgttttgcacgtgcaaaaatgtattgggtcaagaagtgatctttagctaataaagaaagagaatagaaaacacgcatgagatattcagaaaatactagcctagaaatatagagcattaacaaagtaaaattaatatattaagttataattggaatatgtcagaagtttctttttacattcatatcttaaaaattaaagaaactgattttagctcatgtatattttatatgaaagaaaacacccttatgaattgatgactatatataaaattatattcactacttttgaacacattctgctatgaattatttatataagccaaagctatatgttgtaacttttttttagagaatagctttatcttggtttaactctttagttttattttaagaggggaaaacaaaaatatcttgcaagcagaaccttggaaaaaaaaagccatgaacacttattctaaatgtaaattaaaagttgagccaaactctttgtgtatatagcatcttaaatatattatcacctttgatgtaagtacctatgtattgtatggtcaccagattaaaaagtatatttttgtggattgccgccaatctggggggaaaaggcgaggtcctttattaagtattcactgtttaatatttactattttgttaaatatactgtactttggattttaattattagcccagttttttcagaggattgtataaaggggtttctcccctcactggtggtgaatgtgtgatgttacattgtaatctttgtgctgtatgggttgagcatcattatatattttgtatgtgtacataaatagcaaagtggcaaaaaaaattggtgttaagttcatcctgcataagtataaaatgtgttgtaacagattttgtaaggcattatttaaaacttgccttttgtgaggaaaaaatgtagtagaaaaagctgacctaatttaattaatattagagaaaatggcaaaatagtagatgagcacaaaggttttataagtggtaaatgattaggggaaaataatcatggggaaagggatcttttttccttgaccctctgaaaacagaacgatgcagctggttacaaaatcctaccgttatcagctcttctgcacattgcagtgatgctttggtatgcggggagaaacactcttagggtgctggtccttggcatgactcttgccattctaattggaattagtgccaccctcagcttggattttgaacaaggccttattctttcaggaagacaactaatggatgatagcaagttcatccacttactgggcttgtgccatgagcaaaattcaaagtcctgtatatctttcattgtagatttttaaatactccttttcctaaaaaactcaagggtttaaaaattgctattttatattttaaatgatattgagcagctacctacaatttctatgtacattttgttcccccccccccaccccccccccaaattacgttccttttgacattttcctcatctgctgtttgtgacaagtcatcagccagatttcctgactgacacataggtatgatcagtgcaggagagacctgcgcaccacaggctgcaaactggaggttctgttctcatggcagtttgggcagtaacttttgagagaggccaaaaaaaggaggatgacatgctgtctcctctcttcagtatagacattaggctcttattcagaaaggatttttctttaaaaatgtacttactttactgaactacttacaggcacatttcttcataaggccacacctaatccaaacaagacagtctcccaacactgaagttccaaaataatccttaccactttgtaaaccatttatagctttgaaagtgttaagtgattccttcgttattatttatgcatgttcatgaacttctgctgtacattggaataggagttaacacattcacatttactgtctattttcttgtgtgccttatgagatggcttttctgactgtatctcaatagtctttctttctatgcaggtttataatcagtacaactactgttttctaaaatactactactcaaggctcggagtttgtatttaaattacactgaccaagtaacaatgtattccatttcaggaactgaatatttgactgttaacctttttcccatacgtccagtgtggcatggagcatatggacttgacagacatctctcacccagacgcccacgtgtgaacacacccacatccacatctctgggtggaaaccagcctagagaggggacgacgctaatggtgttgctttagaaccgtcttttcttacccttttagactcgtgttttgtatgagacaccattgcaagaaaattttatccctccagaagtattttattactaaagaacaaaagcaaaaaaagcttaaattgcactggttaaagtacagtttccaacagctgtccttcctcagtactctaatggccactccaccgcgagtggaagtcactgttgtgtgtacacaggtggtcccaatcaaaactccatcttttgagcccaattatgtccattttgttatagactaaatcaggggtttgttctacaagaacaatacatgttttaccctttcctttaactagaaggataactagtaatgcatcaacataatttctgtattaaccatcatgcgcacaagaaatacatagtaaataaggaagctgaaaactcctggcattggatcttaagctagatgattagaatgtgaaaaagattttacaaatgtaaaacttctatttctctgtagaaactttcttcactttgctgtgcaagaagacactgctttgctatatttaaaatggcttttttaaaagagatttatgtatttggtaaatgtttgtagtcaacagttcacacaagaagctgtacacggtttgatcatgtaaaaccgtttggcggcacaagctggactttgttgccatccttgagatgaaccttttaagaaaaataagttaatctcaatttttccctgaatgtgttgtttttcttcattatacaataaatataatagtgaactttttatcaaatggtgaagacaatgct

SEQ ID NO: 314657 - DNA, 5413 bp, Artificial Sequence
  derived and/or modified sequence
agctgctccggagatacggaattgcattttgtgaaaaaagaacaagaattttctgcaaggatcatatctaagtgcactttttgctgatacttcatttctaatcttgtagaaaatttcagctgtagcccttggactagaagctgaaataacagaagctgtgtacgatgcattagggtattgaagaaaattaacttttgaattaaatatttggaatataaggaaataaggaaagttgactgaaaatggggcggaagaaaatacaaatcacacgcataatggatgaaaggaaccgacaggtcacttttacaaagagaaagtttggattaatgaagaaagcctatgaacttagtgtgctctgtgactgtgaaatagcactcatcattttcaacagctctaacaaactgtttcaatatgctagcactgatatggacaaagttcttctcaagtatacagaatataatgaacctcatgaaagcagaaccaactcggatattgttgagactttaagaaagaaaggccttaatggttgtgagagccctgatgctgacgattactttgagcacagtccactctcggaggacagattcagcaaactaaatgaagatagtgattttattttcaaacgaggccctcctggtctgccacctcagaacttttcaatgtctgtcacagttccagtgaccagccccaatgctttgtcctacactaacccagggagttcactggtgtccccatctttggcagccagctcaacgttaacagattcaagcatgctctctccacctcaaaccacattacatagaaatgtgtctcctggagctcctcagagaccaccaagtactggcaatgcaggtgggatgttgagcactacagacctcacagtgccaaatggagctggaagcagtccagtggggaatggatttgtaaactcaagagcttctccaaatttgattggagctactggtgcaaatagcttaggcaaagtcatgcctacaaagtctccccctccaccaggtggtggtaatcttggaatgaacagtaggaaaccagatcttcgagttgtcatccccccttcaagcaagggcatgatgcctccactatcggaggaagaggaattggagttgaatacccagaggatcagtagttctcaagccactcaacctcttgctaccccagtcgtgtctgtgacaaccccaagcttgcctccgcaaggacttgtgtactcagcaatgccgactgcctacaacactgattattcactgaccagcgctgacctgtcagcccttcaaggcttcaactcgccaggaatgctgtcgctgggacaggtgtcggcctggcagcagcaccacctaggacaagcagccctcagctctcttgttgctggagggcagttatctcagggttccaatttatccattaataccaaccaaaacatcagcatcaagtccgaaccgatttcacctcctcgggatcgtatgaccccatcgggcttccagcagcagcagcagcagcagcagcagcagcagccgccgccaccaccgcagccccagccacaacccccgcagccccagccccgacaggaaatggggcgctcccctgtggacagtctgagcagctctagtagctcctatgatggcagtgatcgggaggatccacggggcgacttccattctccaattgtgcttggccgacccccaaacactgaggacagagaaagcccttctgtaaagcgaatgaggatggacgcgtgggtgacctaaggcttccaagctgatgtttgtacttttgtgttactgcagtgacctgccctacatatctaaatcggtaaataaggacatgagttaaatatatttatatgtacatacatatatatatccctttacatatatatgtatgtgggtgtgagtgtgtatgtgtgggtgtgtgttacatacacagaatcaggcacttacctgcaaactccttgtaggtctgcagatgtgtgtcccatggcagacaaagcaccctgtaggcacagacaagtctggcacttccttggactacttgtttcgtaaagataaccagtttttgcagagaaacgtgtacccatatataattctcccacactagcttgcagaaacctagagggccccctacttgttttatttaactgtgcagtgactgtagttacttaagagaaaatgctttgtagaacagagcagtagaaaagcaggaaccaagaaagcaatactgtacataaaatgtcatttatattttccaacctggcatgggtgtctgttgcaaaggggtgcatgggaaagggctgttgatattaaaaacaaacaaaacaaaaaagccccacacataactgttttgcacgtgcaaaaatgtattgggtcaagaagtgatctttagctaataaagaaagagaatagaaaacacgcatgagatattcagaaaatactagcctagaaatatagagcattaacaaagtaaaattaatatattaagttataattggaatatgtcagaagtttctttttacattcatatcttaaaaattaaagaaactgattttagctcatgtatattttatatgaaagaaaacacccttatgaattgatgactatatataaaattatattcactacttttgaacacattctgctatgaattatttatataagccaaagctatatgttgtaacttttttttagagaatagctttatcttggtttaactctttagttttattttaagaggggaaaacaaaaatatcttgcaagcagaaccttggaaaaaaaaagccatgaacacttattctaaatgtaaattaaaagttgagccaaactctttgtgtatatagcatcttaaatatattatcacctttgatgtaagtacctatgtattgtatggtcaccagattaaaaagtatatttttgtggattgccgccaatctggggggaaaaggcgaggtcctttattaagtattcactgtttaatatttactattttgttaaatatactgtactttggattttaattattagcccagttttttcagaggattgtataaaggggtttctcccctcactggtggtgaatgtgtgatgttacattgtaatctttgtgctgtatgggttgagcatcattatatattttgtatgtgtacataaatagcaaagtggcaaaaaaaattggtgttaagttcatcctgcataagtataaaatgtgttgtaacagattttgtaaggcattatttaaaacttgccttttgtgaggaaaaaatgtagtagaaaaagctgacctaatttaattaatattagagaaaatggcaaaatagtagatgagcacaaaggttttataagtggtaaatgattaggggaaaataatcatggggaaagggatcttttttccttgaccctctgaaaacagaacgatgcagctggttacaaaatcctaccgttatcagctcttctgcacattgcagtgatgctttggtatgcggggagaaacactcttagggtgctggtccttggcatgactcttgccattctaattggaattagtgccaccctcagcttggattttgaacaaggccttattctttcaggaagacaactaatggatgatagcaagttcatccacttactgggcttgtgccatgagcaaaattcaaagtcctgtatatctttcattgtagatttttaaatactccttttcctaaaaaactcaagggtttaaaaattgctattttatattttaaatgatattgagcagctacctacaatttctatgtacattttgttcccccccccccaccccccccccaaattacgttccttttgacattttcctcatctgctgtttgtgacaagtcatcagccagatttcctgactgacacataggtatgatcagtgcaggagagacctgcgcaccacaggctgcaaactggaggttctgttctcatggcagtttgggcagtaacttttgagagaggccaaaaaaaggaggatgacatgctgtctcctctcttcagtatagacattaggctcttattcagaaaggatttttctttaaaaatgtacttactttactgaactacttacaggcacatttcttcataaggccacacctaatccaaacaagacagtctcccaacactgaagttccaaaataatccttaccactttgtaaaccatttatagctttgaaagtgttaagtgattccttcgttattatttatgcatgttcatgaacttctgctgtacattggaataggagttaacacattcacatttactgtctattttcttgtgtgccttatgagatggcttttctgactgtatctcaatagtctttctttctatgcaggtttataatcagtacaactactgttttctaaaatactactactcaaggctcggagtttgtatttaaattacactgaccaagtaacaatgtattccatttcaggaactgaatatttgactgttaacctttttcccatacgtccagtgtggcatggagcatatggacttgacagacatctctcacccagacgcccacgtgtgaacacacccacatccacatctctgggtggaaaccagcctagagaggggacgacgctaatggtgttgctttagaaccgtcttttcttacccttttagactcgtgttttgtatgagacaccattgcaagaaaattttatccctccagaagtattttattactaaagaacaaaagcaaaaaaagcttaaattgcactggttaaagtacagtttccaacagctgtccttcctcagtactctaatggccactccaccgcgagtggaagtcactgttgtgtgtacacaggtggtcccaatcaaaactccatcttttgagcccaattatgtccattttgttatagactaaatcaggggtttgttctacaagaacaatacatgttttaccctttcctttaactagaaggataactagtaatgcatcaacataatttctgtattaaccatcatgcgcacaagaaatacatagtaaataaggaagctgaaaactcctggcattggatcttaagctagatgattagaatgtgaaaaagattttacaaatgtaaaacttctatttctctgtagaaactttcttcactttgctgtgcaagaagacactgctttgctatatttaaaatggcttttttaaaagagatttatgtatttggtaaatgtttgtagtcaacagttcacacaagaagctgtacacggtttgatcatgtaaaaccgtttggcggcacaagctggactttgttgccatccttgagatgaaccttttaagaaaaataagttaatctcaatttttccctgaatgtgttgtttttcttcattatacaataaatataatagtgaactttttatcaaatggtgaagacaatgctaa

SEQ ID NO: 314658 - DNA, 1521 bp, Artificial Sequence
  derived and/or modified sequence
atgggccggaagaagatccagatcacccggatcatggacgagcggaacaggcaagtgacttttacaaagagaaaattcgggctgatgaaaaaagcctatgaactcagcgtgctctgcgattgcgagattgctctcatcatttttaacagctcaaacaagctcttccagtacgcctccacagacatggacaaggtattactgaaatacaccgaatataacgaacctcatgaatcccggaccaactccgatattgtggagacacttagaaaaaaggggttaaatggatgcgaatctcctgatgccgatgactacttcgaacacagtccattgtctgaagatagattcagcaagttgaacgaagactcggacttcatcttcaaacgtggacccccgggcctgcctcctcagaacttcagcatgagcgtcaccgtgcccgtaacttcacccaacgccctatcatacacaaatccgggttcgtcccttgtgagtccatcattagcagcgtcatccaccctcactgattcttcaatgcttagtcctccccagaccactctccatcgcaatgtttccccaggcgcccctcagcggccccctagcacgggcaacgctgggggcatgttgtcgacaaccgacctgacggtgcctaacggcgccggatccagtcccgtaggcaacggcttcgttaatagccgggcctctcctaaccttatcggcgctactggggccaactccctcggcaaagtgatgcccaccaagagcccccctccgcctggagggggaaatctcggcatgaacagccgcaagccagacctgcgggtagtaattcccccatcctccaaaggaatgatgccacccttgtatctcaaaaggcagctgaatacgaataatacccagaggatcagtagcagccaggcaacacaacctcttgctactcctgttgtctctgtgactaccccttcgttgccacctcaggggctggtctactctgcaatgcccacagcctacaatacagactactctctcacctcagcagatctgtctgcactgcaggggttcaatagccctggcatgctgtcgctaggccaagtctctgcctggcaacagcatcacttagggcaggccgccctctccagcctcgtcgcggggggacaactgtctcagggcagcaatctttctatcaatacaaatcaaaatatatccataaagagtgagcctataagcccgccaagggatcgcatgacaccctccggatttcagcagcagcagcagcagcaacagcaacaacagccaccccctcccccccagccacagccacaacctcctcagccccagccccggcaggaaatgggacgctcccctgtggacagcctctccagctcgtcctcttcctacgatggatccgacagagaggatcctagaggcgattttcacagtccaattgtcctgggccgccctcccaatactgaggaccgggaatcaccgagtgtcaagcggatgcgaatggatgcttgggtgacttag

SEQ ID NO: 314659 - DNA, 1518 bp, Artificial Sequence
  derived and/or modified sequence
atgggccggaagaagatccagatcacccggatcatggacgagcggaacagacaggtcacttttacaaaacggaagtttggtctgatgaaaaaggcatacgaattgtccgtcctgtgtgactgcgaaattgctctgatcattttcaatagctctaacaaactgttccagtatgcatcaacagacatggataaggttctcctaaaatacaccgaatacaacgagccgcacgagagccggactaacagtgatatcgtcgaaactctgcgtaaaaagggccttaatggctgcgagtccccggacgctgacgattactttgagcattccccattatcagaggatcgattttcaaagctcaatgaggacagcgactttatcttcaagcggggccctcctgggctgccaccacaaaatttcagtatgtctgtgaccgtacctgtgacttcccctaatgccctttcctacacgaaccctggaagctcattagtttccccatctcttgccgctagtagcactttgactgattcttcgatgctaagtcctccccagactactctgcatcgcaatgtcagtccaggtgccccccaacgtccgcctagcaccggcaacgccggcggcatgctaagcaccacagaccttactgttccaaacggggccggttcctcccctgttgggaacggcttcgtgaacagccgggcttcacccaaccttataggggccaccggagctaacagcctcgggaaggtgatgccgacaaaatccccgccccctccaggaggcggcaatctgggtatgaactctcgcaagccagacctgcgggtggttattccaccatcaagtaaaggcatgatgccgcccctgtctgaagaagaggagctggaactgaatactcagcggataagtagttcacaggcaacccagccattagccacgcccgtcgtttcggttacaacccccagcttgcctccgcaaggtttggtgtactcagcaatgccaaccgcctacaacactgattacagtctcacctctgcagacctgagcgcactgcaggggttcaactcaccggggatgctgtctctcggccaagtatcagcctggcagcagcaccacctgggccaagccgctctgtccagccttgtggccggcgggcagctgtcgcagggaagtaatcttagcattaatactaatcagaatatttccatcaaatctgaaccaatttctccccccagggacagaatgaccccctcagggtttcagcaacagcagcagcagcaacagcagcagcagcctccgcctccgccccagccccagccgcagcctcctcagccccaaccacgccaggagatgggcaggagccccgtcgattctctgagctcttccagctctagttatgacggctccgaccgtgaggaccctagaggggacttccatagcccaatcgtgctgggccgacccccaaacactgaggatcgagaatctccaagcgtgaagagaatgcgcatggatgcatgggtgacttag

SEQ ID NO: 314660 - DNA, 1521 bp, Artificial Sequence
  derived and/or modified sequence
atgggcaggaaaaagatacagataacccgcattatggatgaaaggaatagacaggttaccttcaccaaacgcaaatttgggctgatgaagaaggcctatgaacttagtgtcctgtgtgattgtgagatcgcattaattatcttcaacagctccaacaagctctttcagtacgcgtccacagatatggacaaggtcctgctgaaatacacagaatataacgaacctcacgagtcacggactaattccgacatcgtggagaccctgcgaaagaagggactaaatggatgtgagagtccagatgccgatgattacttcgagcacagccctctaagtgaggatcgcttctccaagctgaatgaggacagtgacttcattttcaagaggggacctcccggtctgccccctcagaatttcagcatgagcgtcactgtcccagttacatcccccaacgccctttcctacactaacccaggctccagcctggtgagccctagtctggcagcatcttcaaccctgactgacagttccatgttaagtccccctcagaccacactgcacaggaacgtgagcccaggggctccgcagcgaccaccatccacaggaaacgccggaggaatgttgagtaccactgacctcacggtaccaaacggggctggcagctccccagtgggaaacgggttcgttaactcgagagcgtccccgaacctcattggcgctacaggtgctaatagtctgggtaaggtgatgccgaccaaatcaccaccaccgcctggcggaggaaacttaggaatgaactctcgcaagcctgacctcagagtggtcattcctccttcttccaagggcatgatgccgccattatatttgaagcggcaactgaacactaacaatactcagcggatctctagctcccaggctacccagcccctcgccactccggtggtaagtgtgacaacaccttcccttcctccccagggtcttgtatactcggcgatgcccacagcctacaataccgattattctctgaccagcgcagacctttccgccctccagggatttaattctccgggaatgttgagcctgggccaggtttccgcatggcagcagcatcaccttggacaggccgcactgtcatccttggtggccggaggtcagctgtctcaagggagcaatctaagtataaacacgaatcaaaatatttccattaaaagcgaacctatctccccccctagagacagaatgacaccaagtggctttcagcaacagcagcagcagcagcagcaacagcagcctccccctcccccacagccccaacctcaaccaccccagccacagcccaggcaggaaatggggagatctcccgtcgattcccttagtagcagcagtagtagttacgatggttctgaccgtgaagatccgcgtggagatttccacagccccatcgtccttggtcggccacctaatacagaggatcgtgagtctcctagtgtcaaacgtatgagaatggacgcctgggtgacctag

SEQ ID NO: 314661 - DNA, 1518 bp, Artificial Sequence
  derived and/or modified sequence
atgggcagaaaaaaaattcaaataacccggataatggacgagagaaaccgccaggtgacatttaccaaaaggaagttcggcttaatgaagaaggcttacgagctcagcgtgctttgcgactgcgagattgcactgattatcttcaactcaagcaataaactgttccagtatgccagcaccgacatggacaaagtactgttgaagtacaccgaatataatgagccgcatgaatcccgcaccaactctgatatcgtagaaacattacggaaaaaggggttaaatgggtgtgagtcgcccgatgccgacgactacttcgaacactccccattgagtgaggacagattctcaaagctcaatgaggacagcgacttcatctttaaaaggggaccacctggcctgccccctcagaatttcagtatgtccgtcactgtgcctgtgacatctccaaatgctctgtcttacacgaacccgggttcttcactggttagcccaagccttgctgcttcgagcaccttgaccgactctagcatgctgtctccccctcagactaccttgcatcggaatgtgtcacccggtgccccacagagaccaccgagcaccgggaacgccggagggatgttgtccacaacagacctgacagtgcctaacggtgcagggtcatctcctgtgggaaatgggtttgtgaattcaagagcatctccaaatctcatcggtgccacaggagcaaattcccttggaaaggtgatgccaaccaaatctccccctccacctggtggcggtaatctcggcatgaattcaagaaagcctgacctgcgagtggtcattcctccgagctctaaaggcatgatgcccccattatccgaggaagaggaactggaactaaacacacagagaatttcttcatcccaagcaactcaaccactggccactcctgtggtgtccgtcaccacacccagcctgccccctcagggcctggtgtattctgccatgcccacagcttataatactgactattccctaacgtcagctgatttgtccgctttacaggggttcaactctcccggtatgttgagtctcggacaggtcagcgcctggcagcagcaccacctgggccaggctgccttaagcagcctagttgctggcggacagctctcacaagggtctaatttgagcatcaacactaaccaaaatatcagcataaaaagtgaacccatcagccccccacgcgatcgcatgacaccgtcgggtttccagcaacaacagcaacagcaacaacagcagcagccccctccaccaccacagccccagccacagccccctcagcctcagcccaggcaggagatgggtagaagccccgtcgatagcttatcatcgtctagtagctcttatgacgggtctgatcgggaggaccctcgaggtgattttcattctcccatcgtgctaggcagaccacccaataccgaggaccgcgaaagcccttccgtaaagcggatgcggatggatgcctgggtgacttag

SEQ ID NO: 314662 - DNA, 1521 bp, Artificial Sequence
  derived and/or modified sequence
atgggcagaaagaagatccagatcaccagaatcatggacgagagaaacagacaggtgaccttcaccaagagaaagttcggcctgatgaagaaggcctacgagctgagcgtgctgtgcgactgcgagatcgccctgatcatcttcaacagcagcaacaagctgttccagtacgccagcaccgacatggacaaggtgctgctgaagtacaccgagtacaacgagccccacgagagcagaaccaacagcgacatcgtggagaccctgagaaagaagggcctgaacggctgcgagagccccgacgccgacgactacttcgagcacagccccctgagcgaggacagattcagcaagctgaacgaggacagcgacttcatcttcaagagaggcccccccggcctgcccccccagaacttcagcatgagcgtgaccgtgcccgtgaccagccccaacgccctgagctacaccaaccccggcagcagcctggtgagccccagcctggccgccagcagcaccctgaccgacagcagcatgctgagccccccccagaccaccctgcacagaaacgtgagccccggcgccccccagagaccccccagcaccggcaacgccggcggcatgctgagcaccaccgacctgaccgtgcccaacggcgccggcagcagccccgtgggcaacggcttcgtgaacagcagagccagccccaacctgatcggcgccaccggcgccaacagcctgggcaaggtgatgcccaccaagagcccccccccccccggcggcggcaacctgggcatgaacagcagaaagcccgacctgagagtggtgatcccccccagcagcaagggcatgatgccccccctgtacctgaagagacagctgaacaccaacaacacccagagaatcagcagcagccaggccacccagcccctggccacccccgtggtgagcgtgaccacccccagcctgcccccccagggcctggtgtacagcgccatgcccaccgcctacaacaccgactacagcctgaccagcgccgacctgagcgccctgcagggcttcaacagccccggcatgctgagcctgggccaggtgagcgcctggcagcagcaccacctgggccaggccgccctgagcagcctggtggccggcggccagctgagccagggcagcaacctgagcatcaacaccaaccagaacatcagcatcaagagcgagcccatcagcccccccagagacagaatgacccccagcggcttccagcagcagcagcagcagcagcagcagcagcagccccccccccccccccagccccagccccagcccccccagccccagcccagacaggagatgggcagaagccccgtggacagcctgagcagcagcagcagcagctacgacggcagcgacagagaggaccccagaggcgacttccacagccccatcgtgctgggcagaccccccaacaccgaggacagagagagccccagcgtgaagagaatgagaatggacgcctgggtgacctag

SEQ ID NO: 314663 - DNA, 1518 bp, Artificial Sequence
  derived and/or modified sequence
atgggcagaaagaagatccagatcaccagaatcatggacgagagaaacagacaggtgaccttcaccaagagaaagttcggcctgatgaagaaggcctacgagctgagcgtgctgtgcgactgcgagatcgccctgatcatcttcaacagcagcaacaagctgttccagtacgccagcaccgacatggacaaggtgctgctgaagtacaccgagtacaacgagccccacgagagcagaaccaacagcgacatcgtggagaccctgagaaagaagggcctgaacggctgcgagagccccgacgccgacgactacttcgagcacagccccctgagcgaggacagattcagcaagctgaacgaggacagcgacttcatcttcaagagaggcccccccggcctgcccccccagaacttcagcatgagcgtgaccgtgcccgtgaccagccccaacgccctgagctacaccaaccccggcagcagcctggtgagccccagcctggccgccagcagcaccctgaccgacagcagcatgctgagccccccccagaccaccctgcacagaaacgtgagccccggcgccccccagagaccccccagcaccggcaacgccggcggcatgctgagcaccaccgacctgaccgtgcccaacggcgccggcagcagccccgtgggcaacggcttcgtgaacagcagagccagccccaacctgatcggcgccaccggcgccaacagcctgggcaaggtgatgcccaccaagagcccccccccccccggcggcggcaacctgggcatgaacagcagaaagcccgacctgagagtggtgatcccccccagcagcaagggcatgatgccccccctgagcgaggaggaggagctggagctgaacacccagagaatcagcagcagccaggccacccagcccctggccacccccgtggtgagcgtgaccacccccagcctgcccccccagggcctggtgtacagcgccatgcccaccgcctacaacaccgactacagcctgaccagcgccgacctgagcgccctgcagggcttcaacagccccggcatgctgagcctgggccaggtgagcgcctggcagcagcaccacctgggccaggccgccctgagcagcctggtggccggcggccagctgagccagggcagcaacctgagcatcaacaccaaccagaacatcagcatcaagagcgagcccatcagcccccccagagacagaatgacccccagcggcttccagcagcagcagcagcagcagcagcagcagcagccccccccccccccccagccccagccccagcccccccagccccagcccagacaggagatgggcagaagccccgtggacagcctgagcagcagcagcagcagctacgacggcagcgacagagaggaccccagaggcgacttccacagccccatcgtgctgggcagaccccccaacaccgaggacagagagagccccagcgtgaagagaatgagaatggacgcctgggtgacctag

SEQ ID NO: 314664 - protein, 437 aa, Artificial Sequence
  derived and/or modified sequence
MGRKKIQITRIMDERNRQTLRKKGLNGCESPDADDYFEHSPLSEDRFSKLNEDSDFIFKRGPPGLPPQNFSMSVTVPVTSPNALSYTNPGSSLVSPSLAASSTLTDSSMLSPPQTTLHRNVSPGAPQRPPSTGNAGGMLSTTDLTVPNGAGSSPVGNGFVNSRASPNLIGATGANSLGKVMPTKSPPPPGGGNLGMNSRKPDLRVVIPPSSKGMMPPLSEEEELELNTQRISSSQATQPLATPVVSVTTPSLPPQGLVYSAMPTAYNTDYSLTSADLSALQGFNSPGMLSLGQVSAWQQHHLGQAALSSLVAGGQLSQGSNLSINTNQNISIKSEPISPPRDRMTPSGFQQQQQQQQQQQPPPPPQPQPQPPQPQPRQEMGRSPVDSLSSSSSSYDGSDREDPRGDFHSPIVLGRPPNTEDRESPSVKRMRMDAWVT

SEQ ID NO: 314665 - DNA, 1314 bp, Artificial Sequence
  derived and/or modified sequence
atgggaaggaagaaaattcaaataacccggattatggacgagcgcaatcgccagacactgcgcaaaaaagggttgaatggatgtgaaagccctgatgccgacgattacttcgaacacagcccactttcagaagatcgtttttcaaaactcaatgaggattcagattttatatttaaaagggggccccctggcctccccccccaaaacttcagcatgtcagtgacagtgcctgttacatcgccgaacgccctgtcatataccaatcccggttcatcgcttgtgagcccttctctggccgcaagctctaccctgaccgatagcagcatgctatccccaccacaaacgaccttacatcgaaacgtcagccctggggcacctcagcggcctcccagtaccggcaacgctggtgggatgctgtctactacagatcttaccgttcccaatggagcaggcagctcaccagtggggaacggtttcgtgaatagcagagcatctccaaatctgataggggccaccggcgccaatagcctaggcaaagtgatgcccacaaaaagcccgcctcctcccggcggcggaaatctgggaatgaactccaggaagcctgacctccgcgttgtgatcccaccttccagcaagggtatgatgccccccctcagcgaagaagaagagcttgagctgaacacccagcggatttctagctctcaggcaacacagcccctggccaccccagtggtctctgttaccacaccctccttaccccctcagggattagtgtactctgcaatgcctaccgcctacaacactgattacagcctgacctccgctgatctatctgccttgcagggctttaattcccccggaatgctatccttaggccaagtgtcggcctggcagcagcatcacctcgggcaggctgccttgtcctccctggtagctggtgggcagctctcacagggaagtaatctgtccatcaacaccaaccagaacatctctataaaatccgagcccattagcccacctcgcgaccgaatgaccccctcagggttccaacagcagcagcagcagcagcaacagcagcagccccccccccctcctcagccccagcctcagccaccacagccccagccccgccaagagatgggcagaagcccagtcgattcgctctcgtcaagttcatcctcttacgacggttcagaccgcgaggacccccggggggatttccactcccctatagtcctgggacgcccacccaacacggaggatcgagagtcaccttctgtaaagaggatgcgcatggatgcctgggtcacatag

SEQ ID NO: 314666 - DNA, 1314 bp, Artificial Sequence
  derived and/or modified sequence
atgggcaggaagaagatccagatcacccgcatcatggatgaaagaaaccggcagaccctgaggaagaagggcctgaatggctgtgagagcccagatgctgatgactactttgagcacagccccctgtctgaggaccgcttcagcaagctgaatgaagacagcgacttcatcttcaagaggggccccccaggcctgcccccccagaacttctccatgtctgtgacagtgcctgtgaccagccccaatgccctgagctacaccaaccctggcagcagcctggtgagccccagcctggccgccagcagcaccctgacagacagctccatgctgagccccccccagaccaccctgcacagaaatgtgtcccctggggccccccagaggcctcccagcactggaaatgccggcggcatgctgagcaccacagacctgactgtgcccaacggggccggcagcagccctgtgggcaatggatttgtgaacagccgggccagccccaacctgattggagccaccggggccaacagcctgggcaaggtgatgcccaccaagagccccccacctcctgggggcggcaacctgggcatgaacagcaggaagccagacctgcgggtggtgatcccccccagcagcaagggcatgatgccacccctgtctgaggaggaggagctggagctgaacacccagaggatcagcagcagccaggccacccagcccctggccacccctgtggtgtctgtgaccacccccagcctgcccccccagggcctggtgtacagcgccatgcccacagcctacaacacagactacagcctgaccagcgctgacctgagcgccctgcagggcttcaacagccctggcatgctgagcctgggccaggtgtctgcctggcagcagcaccacctgggccaggccgccctgagcagcctggtggccggcggccagctgagccagggcagcaacctgagcatcaacaccaaccagaacatcagcatcaagtctgagcccatcagccccccccgggacaggatgaccccatctggcttccagcagcagcagcagcagcagcagcagcagcagcccccacctccaccccagccccagccccagcccccccagccccagccccggcaggagatgggccgcagccctgtggacagcctgagcagcagcagcagcagctatgatggcagtgaccgggaggaccccaggggggacttccacagccccatcgtgctgggccggccccccaacacagaggaccgggagagccccagcgtgaagaggatgaggatggatgcctgggtgacctag

SEQ ID NO: 314667 - DNA, 2186 bp, Artificial Sequence
  derived and/or modified sequence
agaacgagttccggtctggccgaggcttgtctcctaaaaatagccccggtgtggggatccgtgcgcggatgtcccggcgagtcccgggctgaaagaggcggctccgggcggcgcgaagcgctggtggcgggcccgggctgcggcgtgtgcgcgcccgccagctgctccggagatacgatcttgtagaaaatttcagctgtagcccttggactagaagctgaaataacagaagctgtgtacgatgcattagggtattgaagaaaattaacttttgaattaaatatttggaatataaggaaataaggaaagttgactgaaaatggggcggaagaaaatacaaatcacacgcataatggatgaaaggaaccgacagactttaagaaagaaaggccttaatggttgtgagagccctgatgctgacgattactttgagcacagtccactctcggaggacagattcagcaaactaaatgaagatagtgattttattttcaaacgaggccctcctggtctgccacctcagaacttttcaatgtctgtcacagttccagtgaccagccccaatgctttgtcctacactaacccagggagttcactggtgtccccatctttggcagccagctcaacgttaacagattcaagcatgctctctccacctcaaaccacattacatagaaatgtgtctcctggagctcctcagagaccaccaagtactggcaatgcaggtgggatgttgagcactacagacctcacagtgccaaatggagctggaagcagtccagtggggaatggatttgtaaactcaagagcttctccaaatttgattggagctactggtgcaaatagcttaggcaaagtcatgcctacaaagtctccccctccaccaggtggtggtaatcttggaatgaacagtaggaaaccagatcttcgagttgtcatccccccttcaagcaagggcatgatgcctccactatcggaggaagaggaattggagttgaatacccagaggatcagtagttctcaagccactcaacctcttgctaccccagtcgtgtctgtgacaaccccaagcttgcctccgcaaggacttgtgtactcagcaatgccgactgcctacaacactgattattcactgaccagcgctgacctgtcagcccttcaaggcttcaactcgccaggaatgctgtcgctgggacaggtgtcggcctggcagcagcaccacctaggacaagcagccctcagctctcttgttgctggagggcagttatctcagggttccaatttatccattaataccaaccaaaacatcagcatcaagtccgaaccgatttcacctcctcgggatcgtatgaccccatcgggcttccagcagcagcagcagcagcagcagcagcagcagccgccgccaccaccgcagccccagccacaacccccgcagccccagccccgacaggaaatggggcgctcccctgtggacagtctgagcagctctagtagctcctatgatggcagtgatcgggaggatccacggggcgacttccattctccaattgtgcttggccgacccccaaacactgaggacagagaaagcccttctgtaaagcgaatgaggatggacgcgtgggtgacctaaggcttccaagctgatgtttgtacttttgtgttactgcagtgacctgccctacatatctaaatcggtaaataaggacatgagttaaatatatttatatgtacatacatatatatatccctttacatatatatgtatgtgggtgtgagtgtgtatgtgtgggtgtgtgttacatacacagaatcaggcacttacctgcaaactccttgtaggtctgcagatgtgtgtcccatggcagacaaagcaccctgtaggcacagacaagtctggcacttccttggactacttgtttcgtaaagataaccagtttttgcagagaaacgtgtacccatatataattctcccacactagcttgcagaaacctagagggccccctacttgttttatttaactgtgcagtgactgtagttacttaagagaaaatgctttgtagaacagagcagtagaaaagcaggaaccaagaaagcaatactgtacataaaatgtcatttatattttccaacctggcatgggtgtctgttgcaaaggggtgcatgggaaagggctgttgatatt

SEQ ID NO: 314668 - DNA, 1314 bp, Artificial Sequence
  derived and/or modified sequence
atgggccggaagaagatccagatcacccggatcatggacgagcggaacaggcaaacgttgcgcaaaaaggggctcaacgggtgcgagtcccccgacgcagatgactatttcgagcactcacctctgtctgaagacaggttctccaaactgaacgaggactccgattttatctttaaacgtggcccaccagggctgccaccccaaaatttttcgatgtctgtgacggttccagttacttcgcccaatgcactgagctatacaaaccctggcagttctctggtgtctccatcgctggccgccagttctactctgacagactctagcatgttatcaccaccgcaaacaaccctccataggaatgtgagccccggcgcgccccagaggccaccttcaacaggtaatgctggtggtatgcttagtacgactgacctcacagtcccaaatggggccggctccagccctgttggcaacggtttcgtgaatagccgagctagccccaacctaataggggctacgggggctaactctctcggtaaggtcatgcccacaaaatcaccacccccacctggcggaggtaacctaggcatgaatagcaggaaaccagatctgagagttgttatcccacctagctctaagggtatgatgccacctctgtcagaagaagaagagcttgaattgaacacacagaggattagcagcagccaggcaacacagcccttagctacccctgtagtatccgtgactaccccatccctgccacctcagggactggtgtattctgctatgcccacagcctataataccgactatagcctgaccagtgccgacctttccgcccttcaaggattcaattctcctggtatgctcagtcttggtcaggtatccgcgtggcagcagcaccatctggggcaagctgcactctccagcttagtggcgggcggccagctctctcagggatcaaacctctccataaacaccaatcagaacatatccatcaagagcgagcccatttcccctccacgtgacaggatgacaccaagtggatttcagcagcagcagcagcagcagcagcagcagcaaccccctccccccccccagccccagccccagcccccacagccacaaccacggcaggagatggggaggtcacccgtcgacagtctgtcctccagcagctcttcctatgacggtagtgaccgtgaagaccccagaggcgacttccatagtcctattgtcttagggcgtcctcctaacactgaagaccgggaatcccctagcgtgaaaaggatgcggatggatgcatgggtgacttag

SEQ ID NO: 314669 - DNA, 1314 bp, Artificial Sequence
  derived and/or modified sequence
atgggacgcaaaaaaatccagattacgcgcattatggacgagcgaaatagacagacgttgcggaagaagggactgaacggctgtgaatcacccgacgctgatgactatttcgagcattcccctctgagcgaagatcggtttagcaagctcaatgaggattccgatttcatatttaaacgcggacccccaggcctaccccctcagaacttctccatgagcgtcacagtgccggttacttcacccaacgccctgagctatacaaatccaggtagctctctcgtgtcgccatctctcgctgcgtcatctacgcttacagacagttccatgttgagcccaccacagaccactctccacaggaatgtctccccaggggctccgcagcgcccaccgtctaccgggaatgccggtggaatgctgtcaaccacagatctgactgtgcccaatggcgctgggagcagcccggttggcaacggatttgtgaactcccgggcatcgcctaatttgatcggagctaccggggcaaacagcctgggcaaggtgatgccaaccaaatctccccctcccccaggcggaggaaatctgggaatgaacagcagaaagcctgacctccgagtcgttattcccccttcttctaaaggcatgatgcctcctctgagtgaagaggaggaacttgaacttaatacacagcgcatatcatcatcccaggctacacagcccttagccacccctgtggtgtcagtaaccactccctccctcccgccacaaggactcgtgtattccgccatgccaaccgcctataacacagattactcattgacttcagccgatctgtctgctctgcaggggttcaactcaccaggaatgctgtctctgggtcaggtgagcgcgtggcagcagcaccatcttggccaggctgcactaagttcccttgtcgctgggggacagttaagccagggctccaacctatccatcaatacaaaccagaacatcagcataaaatccgaaccaatctcacccccacgagacaggatgaccccatcgggttttcagcagcagcagcagcagcagcagcagcagcagccgcctcctccaccacagccacagccccagccaccacagccacaaccccgtcaggaaatgggacgctcgccagtcgacagcctctcatctagcagctccagctatgacggaagcgatagagaagaccccaggggcgacttccatagtcccatcgttctaggcaggcccccaaataccgaggaccgcgagtcgccctctgtgaaacgcatgcggatggacgcctgggtgacatag

SEQ ID NO: 314670 - DNA, 1314 bp, Artificial Sequence
  derived and/or modified sequence
atgggcagaaagaagatccagatcaccagaatcatggacgagagaaacagacagaccctgagaaagaagggcctgaacggctgcgagagccccgacgccgacgactacttcgagcacagccccctgagcgaggacagattcagcaagctgaacgaggacagcgacttcatcttcaagagaggcccccccggcctgcccccccagaacttcagcatgagcgtgaccgtgcccgtgaccagccccaacgccctgagctacaccaaccccggcagcagcctggtgagccccagcctggccgccagcagcaccctgaccgacagcagcatgctgagccccccccagaccaccctgcacagaaacgtgagccccggcgccccccagagaccccccagcaccggcaacgccggcggcatgctgagcaccaccgacctgaccgtgcccaacggcgccggcagcagccccgtgggcaacggcttcgtgaacagcagagccagccccaacctgatcggcgccaccggcgccaacagcctgggcaaggtgatgcccaccaagagcccccccccccccggcggcggcaacctgggcatgaacagcagaaagcccgacctgagagtggtgatcccccccagcagcaagggcatgatgccccccctgagcgaggaggaggagctggagctgaacacccagagaatcagcagcagccaggccacccagcccctggccacccccgtggtgagcgtgaccacccccagcctgcccccccagggcctggtgtacagcgccatgcccaccgcctacaacaccgactacagcctgaccagcgccgacctgagcgccctgcagggcttcaacagccccggcatgctgagcctgggccaggtgagcgcctggcagcagcaccacctgggccaggccgccctgagcagcctggtggccggcggccagctgagccagggcagcaacctgagcatcaacaccaaccagaacatcagcatcaagagcgagcccatcagcccccccagagacagaatgacccccagcggcttccagcagcagcagcagcagcagcagcagcagcagccccccccccccccccagccccagccccagcccccccagccccagcccagacaggagatgggcagaagccccgtggacagcctgagcagcagcagcagcagctacgacggcagcgacagagaggaccccagaggcgacttccacagccccatcgtgctgggcagaccccccaacaccgaggacagagagagccccagcgtgaagagaatgagaatggacgcctgggtgacctag

SEQ ID NO: 314671 - protein, 429 aa, Artificial Sequence
  derived and/or modified sequence
MGRKKIQITRIMDERNRQTLRKKGLNGCESPDADDYFEHSPLSEDRFSKLNEDSDFIFKRGPPGLPPQNFSMSVTVPVTSPNALSYTNPGSSLVSPSLAASSTLTDSSMLSPPQTTLHRNVSPGAPQRPPSTGNAGGMLSTTDLTVPNGAGSSPVGNGFVNSRASPNLIGATGANSLGKVMPTKSPPPPGGGNLGMNSRKPDLRVVIPPSSKGMMPPLNTQRISSSQATQPLATPVVSVTTPSLPPQGLVYSAMPTAYNTDYSLTSADLSALQGFNSPGMLSLGQVSAWQQHHLGQAALSSLVAGGQLSQGSNLSINTNQNISIKSEPISPPRDRMTPSGFQQQQQQQQQQQPPPPPQPQPQPPQPQPRQEMGRSPVDSLSSSSSSYDGSDREDPRGDFHSPIVLGRPPNTEDRESPSVKRMRMDAWVT

SEQ ID NO: 314672 - DNA, 1290 bp, Artificial Sequence
  derived and/or modified sequence
atgggccggaaaaaaattcagatcactagaattatggacgaacgcaatcggcaaacactaaggaaaaaaggacttaatggatgcgagtcacccgatgccgatgactactttgaacatagccccctgtcagaagaccgattctcaaagctcaacgaggatagcgacttcattttcaaacgcggaccccccggcttgccaccccagaatttttcaatgagtgtcacagtacccgtcacttcgcctaatgccttgtcatacactaaccccggatcgtcgctggtttctccgtctctggctgcctctagcacgctgactgattccagtatgctgtctccaccacagacaacacttcacaggaatgtcagccccggagctccgcagcggccaccaagtactggcaatgctggcgggatgctcagtacgactgatttgaccgtaccaaacggagctggaagctcacccgtgggtaatgggttcgtaaactcacgcgctagtcccaacctgatcggcgctacaggggccaatagtttgggaaaagtgatgcccactaagtctccacccccgcccggtggcggtaacctcggaatgaatagtcgtaagcctgacctgagagtcgttattccacctagctcgaaaggcatgatgcctccccttaacacacaacgtataagttcaagccaagccacacagccactggcaaccccagtagtttcagtgacaactccctccctgccaccccagggtcttgtctactcagccatgcccacagcttataatactgattatagtctgacatctgcagatctgagtgcacttcaaggcttcaacagtcccggcatgctgagtcttgggcaggtgagtgcctggcagcagcaccaccttggtcaagccgctctgagctccctcgtggcgggagggcaactgagccaaggaagtaacttgtcaatcaacaccaatcagaacatttcgatcaagagtgaaccgatttctcctcccagagaccggatgacccctagcgggttccaacaacagcagcagcagcagcaacagcagcagcctcctcctcctcctcagccccagccacaacctcctcagccccaaccacgtcaggaaatgggacggtctccagtcgactctttgtcttcatcgagcagctcgtatgatggcagtgatcgggaggatcccaggggcgattttcactcaccaatcgtcctgggccgcccgccaaacactgaggatcgggaaagtccctctgtaaagcgaatgaggatggatgcctgggtgacatag

SEQ ID NO: 314673 - DNA, 1290 bp, Artificial Sequence
  derived and/or modified sequence
atgggcaggaagaagatccagatcacccgcatcatggatgaaagaaaccggcagaccctgaggaagaagggcctgaatggctgtgagagcccagatgctgatgactactttgagcacagccccctgtctgaggaccgcttcagcaagctgaatgaagacagcgacttcatcttcaagaggggccccccaggcctgcccccccagaacttctccatgtctgtgacagtgcctgtgaccagccccaatgccctgagctacaccaaccctggcagcagcctggtgagccccagcctggccgccagcagcaccctgacagacagctccatgctgagccccccccagaccaccctgcacagaaatgtgtcccctggggccccccagaggcctcccagcactggaaatgccggcggcatgctgagcaccacagacctgactgtgcccaacggggccggcagcagccctgtgggcaatggatttgtgaacagccgggccagccccaacctgattggagccaccggggccaacagcctgggcaaggtgatgcccaccaagagccccccacctcctgggggcggcaacctgggcatgaacagcaggaagccagacctgcgggtggtgatcccccccagcagcaagggcatgatgccacccctgaacacccagaggatcagcagcagccaggccacccagcccctggccacccctgtggtgtctgtgaccacccccagcctgcccccccagggcctggtgtacagcgccatgcccacagcctacaacacagactacagcctgaccagcgctgacctgagcgccctgcagggcttcaacagccctggcatgctgagcctgggccaggtgtctgcctggcagcagcaccacctgggccaggccgccctgagcagcctggtggccggcggccagctgagccagggcagcaacctgagcatcaacaccaaccagaacatcagcatcaagtctgagcccatcagccccccccgggacaggatgaccccatctggcttccagcagcagcagcagcagcagcagcagcagcagcccccacctccaccccagccccagccccagcccccccagccccagccccggcaggagatgggccgcagccctgtggacagcctgagcagcagcagcagcagctatgatggcagtgaccgggaggaccccaggggggacttccacagccccatcgtgctgggccggccccccaacacagaggaccgggagagccccagcgtgaagaggatgaggatggatgcctgggtgacctag

SEQ ID NO: 314674 - DNA, 5182 bp, Artificial Sequence
  derived and/or modified sequence
gcgcggatgtcccggcgagtcccgggctgaaagaggcggctccgggcggcgcgaagcgctggtggcgggcccgggctgcggcgtgtgcgcgcccgccagctgctccggagatacgatcttgtagaaaatttcagctgtagcccttggactagaagctgaaataacagaagctgtgtacgatgcattagggtattgaagaaaattaacttttgaattaaatatttggaatataaggaaataaggaaagttgactgaaaatggggcggaagaaaatacaaatcacacgcataatggatgaaaggaaccgacagactttaagaaagaaaggccttaatggttgtgagagccctgatgctgacgattactttgagcacagtccactctcggaggacagattcagcaaactaaatgaagatagtgattttattttcaaacgaggccctcctggtctgccacctcagaacttttcaatgtctgtcacagttccagtgaccagccccaatgctttgtcctacactaacccagggagttcactggtgtccccatctttggcagccagctcaacgttaacagattcaagcatgctctctccacctcaaaccacattacatagaaatgtgtctcctggagctcctcagagaccaccaagtactggcaatgcaggtgggatgttgagcactacagacctcacagtgccaaatggagctggaagcagtccagtggggaatggatttgtaaactcaagagcttctccaaatttgattggagctactggtgcaaatagcttaggcaaagtcatgcctacaaagtctccccctccaccaggtggtggtaatcttggaatgaacagtaggaaaccagatcttcgagttgtcatccccccttcaagcaagggcatgatgcctccactaaatacccagaggatcagtagttctcaagccactcaacctcttgctaccccagtcgtgtctgtgacaaccccaagcttgcctccgcaaggacttgtgtactcagcaatgccgactgcctacaacactgattattcactgaccagcgctgacctgtcagcccttcaaggcttcaactcgccaggaatgctgtcgctgggacaggtgtcggcctggcagcagcaccacctaggacaagcagccctcagctctcttgttgctggagggcagttatctcagggttccaatttatccattaataccaaccaaaacatcagcatcaagtccgaaccgatttcacctcctcgggatcgtatgaccccatcgggcttccagcagcagcagcagcagcagcagcagcagcagccgccgccaccaccgcagccccagccacaacccccgcagccccagccccgacaggaaatggggcgctcccctgtggacagtctgagcagctctagtagctcctatgatggcagtgatcgggaggatccacggggcgacttccattctccaattgtgcttggccgacccccaaacactgaggacagagaaagcccttctgtaaagcgaatgaggatggacgcgtgggtgacctaaggcttccaagctgatgtttgtacttttgtgttactgcagtgacctgccctacatatctaaatcggtaaataaggacatgagttaaatatatttatatgtacatacatatatatatccctttacatatatatgtatgtgggtgtgagtgtgtatgtgtgggtgtgtgttacatacacagaatcaggcacttacctgcaaactccttgtaggtctgcagatgtgtgtcccatggcagacaaagcaccctgtaggcacagacaagtctggcacttccttggactacttgtttcgtaaagataaccagtttttgcagagaaacgtgtacccatatataattctcccacactagcttgcagaaacctagagggccccctacttgttttatttaactgtgcagtgactgtagttacttaagagaaaatgctttgtagaacagagcagtagaaaagcaggaaccaagaaagcaatactgtacataaaatgtcatttatattttccaacctggcatgggtgtctgttgcaaaggggtgcatgggaaagggctgttgatattaaaaacaaacaaaacaaaaaagccccacacataactgttttgcacgtgcaaaaatgtattgggtcaagaagtgatctttagctaataaagaaagagaatagaaaacacgcatgagatattcagaaaatactagcctagaaatatagagcattaacaaagtaaaattaatatattaagttataattggaatatgtcagaagtttctttttacattcatatcttaaaaattaaagaaactgattttagctcatgtatattttatatgaaagaaaacacccttatgaattgatgactatatataaaattatattcactacttttgaacacattctgctatgaattatttatataagccaaagctatatgttgtaacttttttttagagaatagctttatcttggtttaactctttagttttattttaagaggggaaaacaaaaatatcttgcaagcagaaccttggaaaaaaaaagccatgaacacttattctaaatgtaaattaaaagttgagccaaactctttgtgtatatagcatcttaaatatattatcacctttgatgtaagtacctatgtattgtatggtcaccagattaaaaagtatatttttgtggattgccgccaatctggggggaaaaggcgaggtcctttattaagtattcactgtttaatatttactattttgttaaatatactgtactttggattttaattattagcccagttttttcagaggattgtataaaggggtttctcccctcactggtggtgaatgtgtgatgttacattgtaatctttgtgctgtatgggttgagcatcattatatattttgtatgtgtacataaatagcaaagtggcaaaaaaaattggtgttaagttcatcctgcataagtataaaatgtgttgtaacagattttgtaaggcattatttaaaacttgccttttgtgaggaaaaaatgtagtagaaaaagctgacctaatttaattaatattagagaaaatggcaaaatagtagatgagcacaaaggttttataagtggtaaatgattaggggaaaataatcatggggaaagggatcttttttccttgaccctctgaaaacagaacgatgcagctggttacaaaatcctaccgttatcagctcttctgcacattgcagtgatgctttggtatgcggggagaaacactcttagggtgctggtccttggcatgactcttgccattctaattggaattagtgccaccctcagcttggattttgaacaaggccttattctttcaggaagacaactaatggatgatagcaagttcatccacttactgggcttgtgccatgagcaaaattcaaagtcctgtatatctttcattgtagatttttaaatactccttttcctaaaaaactcaagggtttaaaaattgctattttatattttaaatgatattgagcagctacctacaatttctatgtacattttgttcccccccccccaccccccccccaaattacgttccttttgacattttcctcatctgctgtttgtgacaagtcatcagccagatttcctgactgacacataggtatgatcagtgcaggagagacctgcgcaccacaggctgcaaactggaggttctgttctcatggcagtttgggcagtaacttttgagagaggccaaaaaaaggaggatgacatgctgtctcctctcttcagtatagacattaggctcttattcagaaaggatttttctttaaaaatgtacttactttactgaactacttacaggcacatttcttcataaggccacacctaatccaaacaagacagtctcccaacactgaagttccaaaataatccttaccactttgtaaaccatttatagctttgaaagtgttaagtgattccttcgttattatttatgcatgttcatgaacttctgctgtacattggaataggagttaacacattcacatttactgtctattttcttgtgtgccttatgagatggcttttctgactgtatctcaatagtctttctttctatgcaggtttataatcagtacaactactgttttctaaaatactactactcaaggctcggagtttgtatttaaattacactgaccaagtaacaatgtattccatttcaggaactgaatatttgactgttaacctttttcccatacgtccagtgtggcatggagcatatggacttgacagacatctctcacccagacgcccacgtgtgaacacacccacatccacatctctgggtggaaaccagcctagagaggggacgacgctaatggtgttgctttagaaccgtcttttcttacccttttagactcgtgttttgtatgagacaccattgcaagaaaattttatccctccagaagtattttattactaaagaacaaaagcaaaaaaagcttaaattgcactggttaaagtacagtttccaacagctgtccttcctcagtactctaatggccactccaccgcgagtggaagtcactgttgtgtgtacacaggtggtcccaatcaaaactccatcttttgagcccaattatgtccattttgttatagactaaatcaggggtttgttctacaagaacaatacatgttttaccctttcctttaactagaaggataactagtaatgcatcaacataatttctgtattaaccatcatgcgcacaagaaatacatagtaaataaggaagctgaaaactcctggcattggatcttaagctagatgattagaatgtgaaaaagattttacaaatgtaaaacttctatttctctgtagaaactttcttcactttgctgtgcaagaagacactgctttgctatatttaaaatggcttttttaaaagagatttatgtatttggtaaatgtttgtagtcaacagttcacacaagaagctgtacacggtttgatcatgtaaaaccgtttggcggcacaagctggactttgttgccatccttgagatgaaccttttaagaaaaataagttaatctcaatttttccctgaatgtgttgtttttcttcattatacaataaatataatagtgaactttttatcaaa

SEQ ID NO: 314675 - DNA, 1290 bp, Artificial Sequence
  derived and/or modified sequence
atgggccggaagaagatccagatcacccggatcatggacgagcggaaccgccagacactgcggaagaaaggactgaatggatgcgaatcacctgacgcagacgattacttcgagcacagccccctttcagaggaccgtttttcaaagctgaacgaagattccgactttatctttaaaaggggccccccaggcctccccccccagaattttagtatgtctgtcacagtcccagtgacatctccaaacgctttgtcctacaccaaccccgggtcaagcctcgtcagtccatctctggcagcgagctcgactctcacagacagttctatgctgtcaccccctcagacaacacttcaccgcaacgtaagtccaggggcgccacaaaggcctcctagcacagggaatgcaggagggatgctgtctactaccgatctcacagtgccaaacggggctgggtcatcgcctgtggggaatggtttcgtgaattctcgagcctctcccaatctgataggcgctaccggagctaatagtctgggcaaggttatgcccaccaaatccccacccccgcccggcggggggaacctgggcatgaatagcaggaagcctgaccttcgggttgtaatacccccctcaagtaaagggatgatgcctccattgaatacgcagaggatctcgtcttctcaggccacgcagccccttgccacacctgtggtcagtgtgaccacaccctcgcttcctcctcaggggttggtatacagcgctatgcccactgcctacaacaccgactactccctaacctccgctgatttgtccgcgttacagggcttcaactcaccggggatgctgtctcttggacaggtttcagcgtggcagcaacatcacctcgggcaagccgccctctcttccctagttgccggaggccagctgagccagggctctaacctcagcataaacacaaatcagaatatctcaataaagtccgagcctatttcccctcctcgggatcgcatgaccccaagcggctttcaacagcaacaacagcagcaacagcagcaacagccccctccaccaccccagccacagccccagcctccccagccgcaaccgaggcaggaaatggggcgcagccctgttgatagcctgagttcgtctagctcttcatatgatggctcagatcgagaagatcctagaggcgacttccatagccccattgtgctcgggcgcccccctaatacggaagaccgggaaagcccctcggtcaaacgtatgagaatggacgcctgggttacttag

SEQ ID NO: 314676 - DNA, 1290 bp, Artificial Sequence
  derived and/or modified sequence
atggggagaaagaagatccagattacacgtattatggacgagcgaaatcgccagactctccgcaaaaagggtctcaatggttgcgagtcacctgacgctgacgattacttcgagcacagtccgctgtctgaggatcgcttcagtaaactgaacgaagattccgacttcatcttcaaaagaggaccccctggcctgcctcctcaaaatttctcgatgagtgttaccgtcccggtcacttcccctaacgccctttcctacaccaacccgggttcttctttggtgtcccctagtttagccgctagctccacactcaccgatagctctatgttgagccccccacaaacaacactccatagaaatgtctcacccggagctccacagaggccgccaagtaccggaaacgctggagggatgttatcaaccaccgacctcacagtgccaaatggggctgggtcctcccccgtcggaaacggcttcgtcaatagtagggcctctcctaacctgattggtgctaccggagccaactccctgggtaaggtgatgcctacgaaaagccctccaccacccggtggcggtaatctcgggatgaatagtaggaaacctgacctcagagtcgtgataccacccagttcaaaaggcatgatgccacccttgaatactcagcggatttcatcatcccaggccacacagcccctcgctacccccgttgtttccgtaaccaccccctccctgccaccccagggattagtgtatagtgcaatgcctactgcatataacacggactacagtcttacatcagccgacttgtctgcgctccagggattcaattcccccggaatgttgagcctaggacaagtatccgcctggcaacaacaccacctgggccaggctgccctatcaagcctggttgcaggtggccaactttcccaggggagtaatctctctatcaatacaaaccagaatatctcgatcaaatcggaaccaattagcccgcctcgcgacagaatgactccctccggttttcagcagcagcaacagcaacagcaacaacagcagccacctccgccaccgcagccgcagccacagcctcctcaacctcagcccaggcaggaaatgggaaggagtcccgtcgatagtttaagtagttcttcatcaagctatgatgggagcgaccgggaggatcctaggggggacttccactcacccatcgtgttagggaggccacctaatactgaagatcgcgagtccccttccgtaaagcggatgagaatggacgcctgggtcacttag

SEQ ID NO: 314677 - DNA, 1290 bp, Artificial Sequence
  derived and/or modified sequence
atgggcagaaagaagatccagatcaccagaatcatggacgagagaaacagacagaccctgagaaagaagggcctgaacggctgcgagagccccgacgccgacgactacttcgagcacagccccctgagcgaggacagattcagcaagctgaacgaggacagcgacttcatcttcaagagaggcccccccggcctgcccccccagaacttcagcatgagcgtgaccgtgcccgtgaccagccccaacgccctgagctacaccaaccccggcagcagcctggtgagccccagcctggccgccagcagcaccctgaccgacagcagcatgctgagccccccccagaccaccctgcacagaaacgtgagccccggcgccccccagagaccccccagcaccggcaacgccggcggcatgctgagcaccaccgacctgaccgtgcccaacggcgccggcagcagccccgtgggcaacggcttcgtgaacagcagagccagccccaacctgatcggcgccaccggcgccaacagcctgggcaaggtgatgcccaccaagagcccccccccccccggcggcggcaacctgggcatgaacagcagaaagcccgacctgagagtggtgatcccccccagcagcaagggcatgatgccccccctgaacacccagagaatcagcagcagccaggccacccagcccctggccacccccgtggtgagcgtgaccacccccagcctgcccccccagggcctggtgtacagcgccatgcccaccgcctacaacaccgactacagcctgaccagcgccgacctgagcgccctgcagggcttcaacagccccggcatgctgagcctgggccaggtgagcgcctggcagcagcaccacctgggccaggccgccctgagcagcctggtggccggcggccagctgagccagggcagcaacctgagcatcaacaccaaccagaacatcagcatcaagagcgagcccatcagcccccccagagacagaatgacccccagcggcttccagcagcagcagcagcagcagcagcagcagcagccccccccccccccccagccccagccccagcccccccagccccagcccagacaggagatgggcagaagccccgtggacagcctgagcagcagcagcagcagctacgacggcagcgacagagaggaccccagaggcgacttccacagccccatcgtgctgggcagaccccccaacaccgaggacagagagagccccagcgtgaagagaatgagaatggacgcctgggtgacctag

SEQ ID NO: 314678 - protein, 77 aa, Artificial Sequence
  derived and/or modified sequence
MGRKKIQITRIMDERNRQVTFTKRKFGLMKKAYELSVLCDCEIALIIFNSSNKLFQYASTDMDKVLLKYTEYNEPHE

SEQ ID NO: 314679 - protein, 85 aa, Artificial Sequence
  derived and/or modified sequence
MGRKKIQITRIMDERNRQVTFTKRKFGLMKKAYELSVLCDCEIALIIFNSSNKLFQYASTDMDKVLLKYTEYNEPHESRTNSDIV

SEQ ID NO: 314680 - protein, 373 aa, Artificial Sequence
  derived and/or modified sequence
MGTHPRGDAKILDNRISQKTLSQWIAENQDSLGSKVKDTFNGNLPFLFKVLSVETPLSIQAHPNKELAEKLHLQAPQHYPDANHKPEMAIALTPFQGLCGFRPVEEIVTFLKKVPEFQFLIGDEAATHLKQTMSHDSQAVASSLQSCFSHLMKSEKKVVVEQLNLLVKRISQQAAAGNNMEDIFGELLLQLHQQYPGDIGCFAIYFLNLLTLKPGEAMFLEANVPHAYLKGDCVECMACSDNTVRAGLTPKFIDVPTLCEMLSYTPSSSKDRLFLPTRSQEDPYLSIYDPPVPDFTIMKTEVPGSVTEYKVLALDSASILLMVQGTVIASTPTTQTPIPLQRGGVLFIGANESVSLKLTEPKDLLIFRACCLL

SEQ ID NO: 314681 - DNA, 1523 bp, Artificial Sequence
  derived and/or modified sequence
atacgtgcttaatcctggtgcagggggcgagcatggccgctccgcgagttgtggatggggactcacccccgaggggatgccaagatccttgacaaccgcatctcacagaagaccctaagccagtggattgctgagaaccaggacagcttgggctcaaaggtcaaggacacctttaatggcaacctgcccttcctcttcaaagtgctctcagttgaaacacccctgtccatccaggcacaccctaacaaggagctggcagagaagctgcacctccaggctccgcagcactaccccgatgccaaccacaagccagagatggccattgccctcacccccttccagggcttgtgtggcttccggccagttgaggagattgtaacctttctaaagaaggtgcctgagtttcagttcctgattggagatgaggcagcaacacacctgaagcagaccatgagccatgactcccaggctgtggcctcctctctgcagagctgtttctcccacctgatgaagagtgagaagaaggtggtggtggaacagctcaacctgttggtgaagcggatctcccagcaagcggctgccggaaacaacatggaggacatctttggggagcttttgctacagctgcaccagcagtacccaggtgatatcggctgctttgccatctacttcctgaacctgcttaccctgaagcctggggaggccatgtttctggaggccaacgtaccccatgcctacctgaaaggagactgcgtggagtgcatggcgtgttcagacaacacagttcgtgctggcctgacacccaagttcattgatgtgccaaccctgtgtgaaatgctcagctatacccctagctccagcaaggacaggctctttctcccaacacggagtcaggaagacccctacctctcaatctatgacccccctgtaccagacttcaccattatgaagacggaggtccctggctctgtcactgaatacaaggtcttggcactggactctgccagcatcctcctgatggtacaggggacagtaatagccagcacacccacaacccagacaccaatccctctgcaacgtggtggcgtgctcttcattggggccaatgagagtgtctcactgaagcttactgagccgaaggacctgctgatattccgtgcctgctgtctgctgtaaaggctgcagcctccccagctctcctctgccagccaccctaaattccagccaacctcacctcctcgggcccagctcaagcccccttccttgctctggaccccttaggtataccctggaagagctggggtgggggaggagggagcgtgaaggtagtgactcctgaacacacccaggtggaaccatctttggggaggagaggcccgtgtgaggggtctgatactccctttgtcttccctctctactcctcgctacacctgagccaggctcttgccaactctgttccagcctatggctttaggctagctgttaaatatgtgacccagcattagctcagcatctgtcagagc

SEQ ID NO: 314682 - protein, 494 aa, Artificial Sequence
  derived and/or modified sequence
EKKANNEKQKAERELEGQIQRLNTEKKKLNTDLYHMKHSLRYFEEESKDLAGRLQRSSQRIGELEWSLCAVAATQKKKPDGFSSRSKALLKRQLEQSIREQILLKGHVTQLKESLKEVQLERDQYAEQIKGERAQWQQRMRKMSQEVCTLKEEKKHDTHRVEELERSLSRLKNQMAEPLPPDAPAVSSEVELQDLRKELERVAGELQAQVENNQCISLLNRGQKERLREQEERLQEQQERLREREKRLQQLAEPQSDLEELHENKSALQLEQQVKELQEKLGQVMETLTSAEKEPEAAVPASGTGGESSGLMDLLEEKADLREHVEKLELGFIQYRRERCHQKVHRLLTEPGDSAKDASPGGGHHQAGPGQGGEEGEAAGAAGDGVAACGSYSEGHGKFLAAARNPAAEPSPGAPAPQELGAADKHGDLCEASLTNSVEPAQGEAREGSSQDNPTAQPVLQLLGEMQDHQEHPGLGSNCCVPCFCWAWLPRRRR

SEQ ID NO: 314683 - DNA, 1485 bp, Artificial Sequence
  derived and/or modified sequence
gaaaagaaggcaaataacgagaagcagaaggcagagcgtgagttggaagggcaaatccagcgcctgaataccgaaaaaaaaaaactgaatactgatctatatcatatgaagcacagcttgaggtacttcgaggaagagagtaaagatctcgcaggtcgacttcagaggtcttcccagaggataggtgaactggagtggtccttgtgtgccgtggcggctactcagaagaaaaagcctgacggcttttcaagccgctccaaggctctgctcaaaagacaacttgaacagtccattcgggagcagattcttctgaaaggccatgtgacacagttgaaggaaagtctgaaagaagtgcagctcgagcgtgaccagtacgcagaacagattaaaggagagagggctcaatggcaacagcgaatgcgcaagatgagccaagaagtttgcactttgaaagaggagaagaagcacgatacccaccgagtcgaagagctagagagaagcttgtcccgcctcaaaaatcagatggctgagccactgccccctgatgcccctgccgtgtcctcagaagtagagctacaagatctaaggaaagagctcgagcgtgtggctggcgagctgcaggcccaagtcgagaataaccaatgtatcagtttgttaaaccggggccagaaggagagactgcgggagcaggaagagaggctacaggaacagcaggaaaggctcagagagcgagagaagcgattacagcagcttgcagagccacagagcgaccttgaggagcttcacgagaataaaagcgctctgcaactggaacaacaggtgaaagaactacaagaaaaactcgggcaggttatggagactctgacaagcgccgagaaggaaccagaagctgccgtcccagcctccggcaccggcggggaaagcagcggcctgatggatctgctggaagagaaagcggatttgcgagagcatgtggaaaagctcgaactgggctttattcagtatcggcgtgaacgctgccaccagaaggtccacaggctgctgaccgagcctggagactcagcgaaggatgcctccccaggcgggggccatcaccaggctggtcccggccagggcggcgaagaaggggaagccgcaggcgctgccggagatggcgtggctgcttgtggctcatactcggagggacacggaaaatttttggccgccgccagaaatcccgctgccgagccctctcctggagcacctgcacctcaggaacttggcgccgctgataagcatggagatctgtgtgaagcttccctaaccaattccgtcgagcctgctcagggagaggcacgcgaagggtcaagtcaggataacccaaccgcccagcctgttctccagctgctcggggaaatgcaagatcaccaggagcaccctgggctgggcagcaattgctgtgtgccgtgtttctgctgggcttggctgcctcgacgacgccgctag

SEQ ID NO: 314684 - DNA, 6516 bp, Artificial Sequence
  derived and/or modified sequence
ggcggctgcggggcgaggacggcggcggaccggggcagccccgcgccctggccaggaataattggtggggatggattgtgaaatggagctgcataaatatccagtttgccaactgagctaagaaatgctggataaaagtaaaagctctactgagatgaagaaagaaaaagaatacctgctcagctccagagacacgtaaagggacagagattgggggacagaaggaagtgcattaattccttccacgacccctgaagagcagcggtgggtctgagcatcctatctccaggaagcaggccagcaggcaagccagctgccacctcgtcctgtgcaaagcacaggcaccgtccccaaaagatttccaaagatgatgttaaacccagccacggttctgatctccaggaaagcaattgctgtggtacaaaaggacaagggttaaaagagaacagtgggagctctctttcccaactaactcacgcagtgtgacgcagaggctttcagcacagcccagggtgcccgggactgaaaactccttcaccagccccctccacaggatatagaagacttagatcactacgagatgaaagcagagcccattagtgggaaaaagttggaggatgaaggaattgaaaaagaaaatttggcaatattagagaaattaggaagactgaaagacaagagcatttaactgcaaactgttgtcgttgtcaactgggttgtcttcctgaagtatgaatccggtatgtattgtgtggaggagcattacgtactgaacttctcacaaaacagggctgaagcagtgcctactcgacagaaccggtcatcgtacaaagaaatgccacgtgactcaaaggcaaagccagagtgcagcttggagcaaagaagatgatgtctcactctgtcacccaagatggagtgcaatggcacgatctcagctcactgcaacctctgcctcccaggttcaagcaattatcctgcctcagccacccgagtagctgagattacaggcctctgccaccatgctcagctattttttgtatttttagtagagacggggtttcaccatgttgggcaggctagtcttggaactactgacctcaggtgatccgcccactttggcctcccgaaagtgctgggattacagtcatgagccaccatgcccagcctatttatttctgattctttaagggtgactggatgtgttgatcagcgctcgctgggatttggctgacgtggccccagccccgcctccctccccaccccacaatggcagaagaaactggacagagtaaattagctgcagccaagaaaaagttcaaagaatattggcagagaaaccgccctggtgttccagcagcagcgaagaggaacacgaaagcaaatggcagtagccctgagacggccgcttctggtggttgccactcatctgaggctgtgagtcttgcctggacaggcttttggggacagggggcccaaggagcagtagagggcaatcgttaagattgtggatggactgttgggtactggtgaaggattctggatttggccgggcacagtggctcacgcctgtaatccccacacttcgggagaccgaggcaggtggatcacaaggtcaggagatcgagaccatccaggcaaacacggtgaaatactaaaaaatacaaaaaaaaaagccgggcgtggtggcgggcgcctgcagtcccagctgctccggagtctgagggaggagaatggcgtgaacctaggaggcggagcttgcagtgagccaagatcacgccactgcactccagcctggaaggcagagagagactccgtttcaaaaaagaaaagaattctgggtttgaatcctgcctctccgtctgctagggatatgatttagggcaagttgcttgagctctttgggcctctgttttcacgtctgtatgatagaggtggtattgtttgacttgtatttgtgaagtttcaatgagattgataattgtcgattttatgttaatccctagtacatggcctgctgtcaacacccaggacacccaggatatggtctttgctgtttgattttcctcatccccagtctcaaggggaagccaggacaatgagaacagccacttcccatcaggagtcactgcaaggcccccagggtgggatggtggggagataagaaccgtgagagaagttggcacaaaggagttatgggacaaagggtccaagataggcagaaaagaaaatgttgccagttgatggggaagaaaggaagtcggagggctcagacactgagggggacagaacatctccatgtgcagtctcatctcttatagtcagcaacaggtatccacggggagggccctacatcatctgctaccctgaaggatctggaggtaggaggctctgggtggaggtgcagtgaccccgcaggccagccctccaacctcctcccgcagcggggactgggtgcccctctgccagctgagacagcccacacacaacccagccctaatgatcgttctctctacctctcccccaagtcctcctccgcctcctcctctctgcatgcgcgtcagagcccgtgccaagaacaagcagcagtcctgaactcgaggtccataaaaatcagtcgactgaatgacaccatcaaatctttgaaacaacagaagaaacaagtggaacatcagctggaagaagaaaagaaagcaaacaatgagaaacagaaagctgaaagggagctagagggtcaaatccagagattgaacacagagaaaaagaaactaaatacggacctgtatcacatgaaacattctctcagatactttgaagaagagtccaaggatctggccggccgcctgcaacgttcatcgcagcgtataggagagttagagtggtctctctgtgctgtcgccgccacacagaagaagaagccggatgggttctcgagccgcagtaaagcacttctcaagcggcagttagagcagtccatacgggagcagatactgctgaaaggacacgtgacacagttgaaggagtcgcttaaagaagtccagctggagagagatcaatatgctgaacaaataaaaggagagagggcccagtggcagcagaggatgaggaaaatgtcgcaggaggtttgcacattgaaggaggagaagaagcatgatacgcatcgggtagaggagctggagaggagcttgtccagactcaaaaaccagatggctgagccactgcccccggatgccccagcagtgtcctctgaggtggagctgcaagacctgaggaaggagctggagagagtggcaggagagctccaggctcaggtggaaaacaatcagtgcatcagtctcctgaaccgtgggcaaaaggagaggcttcgcgagcaggaggagaggcttcaggagcagcaggagaggcttcgggaacgggagaagaggcttcagcagctggccgagccacagagcgacttggaggagctgcacgagaacaagagcgcactgcagttggagcagcaagtaaaggagctgcaggagaagctgggccaggtgatggagacgctcacctcggccgagaaggagccagaggcagcagtcccagcctcagggactgggggcgagtctagcggccttatggacctcctggaggagaaggcggacctgagggagcatgtggagaaactggaacttggattcatccagtaccggagagagagatgccatcagaaagtacatcgccttctaacagagccaggggacagtgccaaagatgcgtcaccgggaggaggccatcatcaggctggcccaggacaaggaggagaggaaggtgaagctgctggagctgcaggagatggtgttgcggcttgtggcagctacagcgaggggcacggcaaattcctggccgctgcccggaaccctgctgctgaacccagtccaggagccccagccccccaggagctcggggctgccgacaagcatggtgatctttgtgaggcgagcctcaccaacagcgtggagcctgcacaaggagaagccagggagggttcttcccaggacaaccctactgcacagccagtcctgcagctccttggtgagatgcaggaccaccaggagcacccaggcttgggcagcaactgctgtgtgccatgcttttgctgggcttggctgccgagaagaaggagataaacaccaccatcatcaaagagctgctcaagaaatttttaaaaacgaaacaaagttatggggttaatctcctacacaattcatttacttcatttgaatgttagagctactcatgattatttgtgtttctaatttatagtttaagtttatttgtaaaaagttaaaagagagtgggtctctgtgcctctcactgatgttcactctggcatcctttagcatttttcttttttcatttcataattgtaggtcattagcatgcatatcgagtttgcccttacgtggtgggagttcaaacacacaaagacccactctttgcacaaaactgttctcgctggtttggaataggctcccgtgcttttttaatgttattgcagcatggatgttcattacagaattcagataaaatttgctaatgttctgctatgatgtttgatctcatcttaatcacagtgagctcttccatagctcaatatgcggtttgccctcaagtgtgcactgtttattactttgtaatatgccactatgagtactgacacttagagctgtttaaaggccgagaactggaaacagcctttcctccattttctgtgtattggtgatgggagtgataaccttttgggggagctttctaaatctcgcagaagaggaaagtggcctgctctggcaggtatgtgcaggatacagtgtgtttcatctgttccggtgccaagaatgagcactgtactgtggcagttccctttggatttgtatgtgctctgggctcatgaagatattgcatcgtgagctgcagcagttgcactctttttcagtgacctaaaaatggcttatttccgaggaatgaaaggctgccatcgttggctgtggatgtggaaaacctttcctagcttagagcatttgtatctacaatacattttaaagtcagagttcgtgttccctgttttaatcacatgactacctgtcccagtacacgaaagggcgctggttggcattcttcttaatgtatttagtaaagatcataagacatcctttaagagtttaaatgtctctgaaacaggcatacaggctctagtcaagaatgaattagagtgaaggaaagctgtgtgacacctggcattcctctctgttcatggagcttctttgaggcttgaagtttgattttactatctagacctctctggctaatacctattcttcaaccacctcggttactctgacataggaatttacttcttttccttgagtggaaaacactttagaaaataataacaaacattattataaactaatatatgtgagagtacttagttgaaacaaaaaggaattttagtagacagtattatattatctttgaaaatcaaggagaagtttatgcaactgaaaatgtttacacactgtgctgcaatctactgtttgtgaatgtcaatgtattatcaggaaacatgtctatacgatcgcagagttgtatttcctcacaaacttctttacgaagagtgaaatatgtttttgtacctctcagtttcagtcagggacatattttgtgcaatatttctgtgattgtgcctatgcgtgatgagtgaatgcatttcaatcatacattgcctaaatcataacttgatgatgcttgggaaagaatcaacagttaaaacttcatgaagttctaatgtctgtgttccaaaacacatcacattattaggttgtagggagatatgtatgtgtgctccctggggtggggagttttctagttactagaccatctccatttttagcacttggcagcctcatgatccttttataaataggagattaacaggagagcagcaatacgattttgccaatggaataacagatttgccggcattcactgaaagagggcagatattgggtccttgtgacttcaactgactcttccgaattgtatgaatttatcaatgtattagataaacccagtttcagaataataaagaaaaaatattagaccaaataatgtggctaatagtggtatgatttctagcccgtgggtttaaaactgtatcctaaagagtcattttaaaataatataaatatttaaaagtgtaactgctatctttatgttctgaaataagttaaaacattttaaaatatgaatactgtagtttaaaagaaagaaatggtgggaaggaaaagtagagaaagaaatgccaattccagtccaaagctttgtttgccaagttttcttagaatgaattttaccaatgtatgggttcttgttaacagaatgtgtaacagaaatactgaaagacttttgcctaaagtggcattattgactgctggtgtgatgctactgtaatgtgataaattattaaattgttgcaaa

SEQ ID NO: 314685 - DNA, 1485 bp, Artificial Sequence
  derived and/or modified sequence
gagaagaaggccaacaatgagaagcagaaggccgagcgggagctggagggccagatccagaggctgaacacagagaagaagaagctgaacacagacctgtaccacatgaagcacagcctgcgctactttgaggaggagagcaaggacctggccggccgcctgcagaggagcagccagagaattggagagctggagtggagcctgtgtgctgtggccgccacccagaagaagaagccagatggcttcagcagccgcagcaaggccctgctgaagaggcagctggagcagagcatccgggagcagatcctgctgaagggccacgtgacccagctgaaggagagcctgaaggaggtgcagctggagcgggaccagtatgcagagcagatcaagggggagcgggcccagtggcagcagaggatgaggaagatgagccaggaggtgtgcaccctgaaggaggagaagaagcatgacacccaccgggtggaggagctggagaggagcctgagccggctgaagaaccagatggccgagcccctgcccccagatgccccagctgtgagcagcgaggtggagctgcaggacctgaggaaggagctggagcgggtggccggggagctgcaggcccaggtggagaacaaccagtgcatcagcctgctgaacagaggccagaaggagcggctgcgggagcaggaggagcggctgcaggagcagcaggagcggctgcgggagcgggagaagaggctgcagcagctggccgagccccagagcgacctggaggagctgcacgagaacaagagcgccctgcagctggagcagcaggtgaaggagctgcaggagaagctgggccaggtgatggagaccctgaccagcgctgagaaggagcctgaggccgctgtgcctgccagcggcaccggcggggagagcagcggcctgatggacctgctggaggagaaggctgacctgcgggagcacgtggagaagctggagctgggcttcatccagtaccgccgggagcgctgccaccagaaggtgcaccggctgctgacagagcccggggacagcgccaaggatgccagccctgggggcggccaccaccaggccggccctggccagggcggggaggagggggaggccgccggggctgctggagatggagtggccgcctgtggcagctacagcgagggccacggcaagttcctggccgccgccaggaacccagctgctgagcccagccctggggccccagccccccaggagctgggcgctgctgacaagcacggggacctgtgtgaggccagcctgaccaacagcgtggagcccgcccagggcgaggcccgggagggcagcagccaggacaaccccacagcccagcctgtgctgcagctgctgggggagatgcaggaccaccaggagcaccctggcctgggcagcaactgctgcgtgccctgcttctgctgggcctggctgcccaggagaagaagatag

SEQ ID NO: 314686 - DNA, 1485 bp, Artificial Sequence
  derived and/or modified sequence
gagaagaaggccaacaacgagaagcagaaggccgagcgggagctggaaggccaaattcagagattaaatacagagaaaaagaagctcaacaccgatctgtaccacatgaagcactctctgcgctattttgaggaagaatcaaaagatctggccgggagacttcagcgcagctcacagagaattggagagcttgagtggtccctgtgcgctgttgcagcaactcagaagaaaaagccagatggattctcttcacgcagtaaagccctgctgaaacgccagttagagcaatcaattagggagcagatcttgctcaagggccacgtgacccagttgaaggaaagccttaaggaggttcagctggagcgagaccagtatgccgagcaaattaaaggtgagagggcccagtggcagcagaggatgcggaagatgtcccaggaggtctgcaccctgaaagaagaaaaaaagcacgacactcaccgtgtggaagagcttgagcgtagtcttagtaggctcaagaatcagatggccgagccgttgcccccggacgctccagctgtgagttccgaggtggagttacaggatttgcgaaaagaattagaacgcgttgccggtgaattacaggcacaagtcgagaacaatcaatgtatttccttgctgaatcgcgggcagaaggagagactgcgcgagcaggaagagcggttacaggagcagcaggaaaggctgcgcgagcgagaaaagcggctgcagcaattggccgagccacagagtgaccttgaagaactgcacgagaataagtcggcccttcagcttgaacaacaagtgaaggaactccaggagaaactcggtcaggttatggagacacttacatcagcagaaaaagagcccgaggctgcggtgcccgccagcggcactggcggtgaaagcagcggcttaatggacctcttggaagaaaaggccgacctgagggagcatgtggaaaaactggaacttgggtttatccaatatcgcagggagaggtgccaccaaaaggtacacagactgctgactgagcctggggatagcgccaaagacgcgagcccgggaggggggcatcaccaggccggacccggccagggaggagaagaaggggaagccgcaggggccgcaggggacggcgtggctgcatgcggctcttatagtgagggacacggaaaatttctggccgctgcccgcaatcctgccgcagaacccagtcctggagcacctgcgccacaggaactgggtgccgcagataagcatggagacctctgtgaggcatcgttaactaactctgtggagccggctcagggcgaggccagagagggaagcagccaggacaatccgaccgcacagcctgtgctccagcttctaggcgagatgcaggatcatcaggaacacccagggctgggatcgaactgctgtgttccttgtttttgctgggcatggctccccagaagaaggcgatag

SEQ ID NO: 314687 - DNA, 1485 bp, Artificial Sequence
  derived and/or modified sequence
gagaagaaggctaacaacgagaaacagaaggctgagcgggagcttgaaggccaaattcagcgcttaaacaccgagaagaaaaagctgaataccgacctgtatcatatgaagcactcgctccggtactttgaagaagagagtaaggacttggcgggacgcctgcagagatcctcacagagaatcggtgaattagagtggagcctatgtgctgtggcagccactcagaagaaaaaaccagatgggtttagttcccggagtaaagcgttgctgaagcggcagttagaacaatcaattcgagagcaaatcctcctaaagggtcacgtgacacagctgaaagagagccttaaggaagttcagcttgagagagaccaatatgccgagcaaattaagggagagagggcccaatggcagcagcgcatgaggaagatgagccaggaggtgtgcaccctcaaagaagaaaagaagcacgacactcacagagtcgaagagttggagcgatctctgagcaggctgaaaaaccagatggctgagcctctacctcctgatgctcccgcagttagctcagaggtggagctgcaggacttgcgtaaggaactggaaagagtggccggtgaactgcaagctcaagtggagaataatcagtgcatttcccttctgaaccgcggacagaaggagagactaagagaacaggaagagaggctccaagagcaacaagagcggttaagggaacgggagaagaggctgcagcaactggccgaacctcaatccgatttggaggaactgcatgagaacaagagcgccttgcagctggagcagcaggtcaaagagttacaggagaaactgggacaggtgatggagaccctgacctccgccgaaaaggagcctgaggcggctgtgcctgcaagcggcaccggcggagagagctccggtctgatggacctgctggaggaaaaggccgacctgagggaacacgtcgagaagcttgagctgggcttcatacagtacagacgagagagatgtcaccagaaagtccaccgactactcacagaacccggagacagcgccaaagacgccagccccggaggtggccatcaccaggcaggaccaggacaggggggtgaggaaggagaggcagccggtgccgctggcgatggggtggcagcatgcgggtcttactctgaggggcacgggaagtttctggctgctgctaggaatcccgcagcagaaccgagccccggagctcccgctcctcaggaattaggcgcagccgacaagcacggagatctgtgtgaagcatccctgaccaactccgtcgagccagcccagggcgaggctagagaggggtcgagccaggacaaccctactgcgcagccagtgctgcagctcctgggagaaatgcaagatcaccaagaacatcccggtttgggatcgaactgctgtgttccatgcttttgttgggcttggctccctaggcggcgaagatag

SEQ ID NO: 314688 - DNA, 1485 bp, Artificial Sequence
  derived and/or modified sequence
gagaagaaggccaacaacgagaagcagaaggccgagagagagctggagggccagatccagagactgaacaccgagaagaagaagctgaacaccgacctgtaccacatgaagcacagcctgagatacttcgaggaggagagcaaggacctggccggcagactgcagagaagcagccagagaatcggcgagctggagtggagcctgtgcgccgtggccgccacccagaagaagaagcccgacggcttcagcagcagaagcaaggccctgctgaagagacagctggagcagagcatcagagagcagatcctgctgaagggccacgtgacccagctgaaggagagcctgaaggaggtgcagctggagagagaccagtacgccgagcagatcaagggcgagagagcccagtggcagcagagaatgagaaagatgagccaggaggtgtgcaccctgaaggaggagaagaagcacgacacccacagagtggaggagctggagagaagcctgagcagactgaagaaccagatggccgagcccctgccccccgacgcccccgccgtgagcagcgaggtggagctgcaggacctgagaaaggagctggagagagtggccggcgagctgcaggcccaggtggagaacaaccagtgcatcagcctgctgaacagaggccagaaggagagactgagagagcaggaggagagactgcaggagcagcaggagagactgagagagagagagaagagactgcagcagctggccgagccccagagcgacctggaggagctgcacgagaacaagagcgccctgcagctggagcagcaggtgaaggagctgcaggagaagctgggccaggtgatggagaccctgaccagcgccgagaaggagcccgaggccgccgtgcccgccagcggcaccggcggcgagagcagcggcctgatggacctgctggaggagaaggccgacctgagagagcacgtggagaagctggagctgggcttcatccagtacagaagagagagatgccaccagaaggtgcacagactgctgaccgagcccggcgacagcgccaaggacgccagccccggcggcggccaccaccaggccggccccggccagggcggcgaggagggcgaggccgccggcgccgccggcgacggcgtggccgcctgcggcagctacagcgagggccacggcaagttcctggccgccgccagaaaccccgccgccgagcccagccccggcgcccccgccccccaggagctgggcgccgccgacaagcacggcgacctgtgcgaggccagcctgaccaacagcgtggagcccgcccagggcgaggccagagagggcagcagccaggacaaccccaccgcccagcccgtgctgcagctgctgggcgagatgcaggaccaccaggagcaccccggcctgggcagcaactgctgcgtgccctgcttctgctgggcctggctgcccagaagaagaagatag

SEQ ID NO: 314689 - protein, 616 aa, Artificial Sequence
  derived and/or modified sequence
MAGGRGAPGRGRDEPPESYPQRQDHELQALEAIYGADFQDLRPDACGPVKEPPEINLVLYPQGLTGEEVYVKVDLRVKCPPTYPDVVPEIELKNAKGLSNESVNLLKSRLEELAKKHCGEVMIFELAYHVQSFLSEHNKPPPKSFHEEMLERRAQEEQQRLLEAKRKEEQEQREILHEIQRRKEEIKEEKKRKEMAKQERLEIASLSNQDHTSKKDPGGHRTAAILHGGSPDFVGNGKHRANSSGRSRRERQYSVCNSEDSPGSCEILYFNMGSPDQLMVHKGKCIGSDEQLGKLVYNALETATGGFVLLYEWVLQWQKKMGPFLTSQEKEKIDKCKKQIQGTETEFNSLVKLSHPNVVRYLAMNLKEQDDSIVVDILVEHISGVSLAAHLSHSGPIPVHQLRRYTAQLLSGLDYLHSNSVVHKVLSASNVLVDAEGTVKITDYSISKRLADICKEDVFEQTRVRFSDNALPYKTGKKGDVWRLGLLLLSLSQGQECGEYPVTIPSDLPADFQDFLKKCVCLDDKERWSPQQLLKHSFINPQPKMPLVEQSPEDSEGQDYVETVIPSNRLPSAAFFSETQRQFSRYFIEFEELQLLGKGAFGAVIKVWYRVIPSPL

SEQ ID NO: 314690 - DNA, 1851 bp, Artificial Sequence
  derived and/or modified sequence
atggccggcggcagaggcgcccccggcagaggcagagacgagccccccgagagctacccccagagacaggaccacgagctgcaggccctggaggccatctacggcgccgacttccaggacctgagacccgacgcctgcggccccgtgaaggagccccccgagatcaacctggtgctgtacccccagggcctgaccggcgaggaggtgtacgtgaaggtggacctgagagtgaagtgcccccccacctaccccgacgtggtgcccgagatcgagctgaagaacgccaagggcctgagcaacgagagcgtgaacctgctgaagagcagactggaggagctggccaagaagcactgcggcgaggtgatgatcttcgagctggcctaccacgtgcagagcttcctgagcgagcacaacaagcccccccccaagagcttccacgaggagatgctggagagaagagcccaggaggagcagcagagactgctggaggccaagagaaaggaggagcaggagcagagagagatcctgcacgagatccagagaagaaaggaggagatcaaggaggagaagaagagaaaggagatggccaagcaggagagactggagatcgccagcctgagcaaccaggaccacaccagcaagaaggaccccggcggccacagaaccgccgccatcctgcacggcggcagccccgacttcgtgggcaacggcaagcacagagccaacagcagcggcagaagcagaagagagagacagtacagcgtgtgcaacagcgaggacagccccggcagctgcgagatcctgtacttcaacatgggcagccccgaccagctgatggtgcacaagggcaagtgcatcggcagcgacgagcagctgggcaagctggtgtacaacgccctggagaccgccaccggcggcttcgtgctgctgtacgagtgggtgctgcagtggcagaagaagatgggccccttcctgaccagccaggagaaggagaagatcgacaagtgcaagaagcagatccagggcaccgagaccgagttcaacagcctggtgaagctgagccaccccaacgtggtgagatacctggccatgaacctgaaggagcaggacgacagcatcgtggtggacatcctggtggagcacatcagcggcgtgagcctggccgcccacctgagccacagcggccccatccccgtgcaccagctgagaagatacaccgcccagctgctgagcggcctggactacctgcacagcaacagcgtggtgcacaaggtgctgagcgccagcaacgtgctggtggacgccgagggcaccgtgaagatcaccgactacagcatcagcaagagactggccgacatctgcaaggaggacgtgttcgagcagaccagagtgagattcagcgacaacgccctgccctacaagaccggcaagaagggcgacgtgtggagactgggcctgctgctgctgagcctgagccagggccaggagtgcggcgagtaccccgtgaccatccccagcgacctgcccgccgacttccaggacttcctgaagaagtgcgtgtgcctggacgacaaggagagatggagcccccagcagctgctgaagcacagcttcatcaacccccagcccaagatgcccctggtggagcagagccccgaggacagcgagggccaggactacgtggagaccgtgatccccagcaacagactgcccagcgccgccttcttcagcgagacccagagacagttcagcagatacttcatcgagttcgaggagctgcagctgctgggcaagggcgccttcggcgccgtgatcaaggtgtggtacagagtgatccccagccccctgtag

SEQ ID NO: 314691 - DNA, 1851 bp, Artificial Sequence
  derived and/or modified sequence
atggcgggtggtagaggcgcacctggacgcgggcgtgatgagccgccggagtcttatccacagcggcaggatcacgagctgcaggccttagaagccatatatggtgccgatttccaggaccttaggcctgatgcatgtgggcctgtgaaagagcctcccgaaataaatctagttctctacccacagggtctcaccggggaagaggtctatgtgaaggtcgacttaagggtgaaatgccctcccacttaccccgatgtcgtaccggaaatcgaattaaagaatgctaaaggactctccaatgaaagcgtaaatctactcaaatcccgcctggaggaactggctaagaaacactgcggcgaggtgatgatctttgaattagcataccatgtacagtcctttttgtcggaacataataaaccgccccccaagagctttcacgaggaaatgctggagcgaagagcacaggaagagcagcaaaggcttttagaagcaaagagaaaagaagagcaggaacagcgtgaaatcctccacgaaattcagcgacggaaggaggaaatcaaggaagagaaaaagcgaaaagagatggctaagcaggagcgattagagatagcctccttgtctaatcaggaccacacttccaagaaggatcccggcggccaccgtaccgcagccattctgcacggagggtcccctgacttcgtgggaaacggcaaacatagggctaattcttccggaaggagcagacgggagcgacaatactccgtgtgcaactcagaggattcacccggtagttgcgagatactgtacttcaatatgggctcccctgaccagctgatggttcataagggtaaatgtataggatctgacgagcaactcggcaaactggtgtacaatgccttagaaacagcgaccggggggtttgttttgttgtacgagtgggtgctccaatggcagaagaaaatgggcccctttcttaccagtcaagaaaaggagaaaatcgacaagtgcaagaagcaaattcaggggaccgagacagagttcaatagcctcgtcaagctttcccatccaaacgttgtgagatatctagccatgaatcttaaggaacaagatgactccatcgtcgttgatattctggtcgagcacatcagcggtgtgagcctggctgcacatcttagccacagtggccctatacctgttcatcagctacgccgctataccgcacagctcctgagcggtctggattacctccatagtaacagtgttgtacataaagtgctgtcagcatccaatgttctggttgacgcggagggcaccgtaaagatcactgactattccataagcaaacgcctcgctgatatttgcaaggaggacgttttcgaacagactagagtcagattctccgacaacgccctgccatataagactggcaagaagggagacgtctggcgactgggactcctgctcctgagtctgtcccagggacaggagtgcggagaataccccgtcacaattccttccgacttgcccgcagacttccaggattttttaaagaagtgtgtctgcctcgacgacaaagaaagatggagtccacagcagctcctaaaacattctttcattaatcctcagccgaaaatgcctctcgttgagcagtcacctgaggatagcgagggacaagactatgtggagaccgttatcccaagcaaccggctcccatcagctgcctttttttccgaaacccagagacagtttagtaggtactttatcgaatttgaggagctgcagcttttagggaagggtgcgttcggggctgtgatcaaggtgtggtaccgggttatcccatcaccactttag

SEQ ID NO: 314692 - DNA, 1851 bp, Artificial Sequence
  derived and/or modified sequence
atggccggcggccgcggggcccctggccggggcagagatgagcccccagagagctacccccagaggcaggaccacgagctgcaggccctggaggccatctacggggctgacttccaggacctgcggccagatgcctgtggccctgtgaaggagcccccagagatcaacctggtgctgtacccccagggcctgactggagaggaggtgtatgtgaaggtggacctgcgggtgaagtgcccccccacctacccagatgtggtgcctgagattgagctgaagaatgccaagggcctgagcaatgaatctgtgaacctgctgaagagccggctggaggagctggccaagaagcactgtggggaggtgatgatctttgagctggcctaccacgtgcagagcttcctgtctgagcacaacaagcccccacccaagagcttccacgaggagatgctggagcggcgggcccaggaggagcagcagaggctgctggaggccaagaggaaggaggagcaggagcagcgggagatcctgcacgagatccagaggaggaaggaggagatcaaggaggagaagaagaggaaggagatggccaagcaggagcggctggagatcgccagcctgagcaaccaggaccacaccagcaagaaggaccccggcggccacaggacagctgccatcctgcatggaggcagcccagactttgtgggcaatggcaagcaccgggccaacagcagcggccgcagccggcgggagcggcagtacagcgtgtgcaacagcgaggacagccctggcagctgtgagatcctgtacttcaacatgggcagcccagaccagctgatggtgcacaagggcaagtgcatcggcagtgatgagcagctgggcaagctggtgtacaatgccctggagacagccaccggcggctttgtgctgctgtatgagtgggtgctgcagtggcagaagaagatgggccccttcctgaccagccaggagaaggagaagattgacaagtgcaagaagcagatccagggcacagaaacagagttcaacagcctggtgaagctgagccaccccaacgtggtgcgctacctggccatgaacctgaaggagcaggatgacagcatcgtggtggacatcctggtggagcacatctctggagtgtccctggccgcccacctgagccacagcggccccatccctgtgcaccagctgcggcgctacacagcccagctgctgagcggcctggactacctgcacagcaacagcgtggtgcacaaggtgctgagcgccagcaatgtgctggtggatgctgagggcaccgtgaagatcacagactacagcatcagcaagaggctggccgacatctgcaaggaggatgtgtttgagcagaccagggtgcgcttcagtgacaatgccctgccctacaagacaggcaagaagggagatgtgtggaggctgggcctgctgctgctgagcctgagccagggccaggagtgtggggagtaccctgtgaccatccccagcgacctgcctgctgacttccaggacttcctgaagaagtgtgtgtgcctggatgacaaggagcgctggagcccccagcagctgctgaagcacagcttcatcaacccccagcccaagatgcccctggtggagcagagcccagaagattctgagggccaggactatgtggagaccgtcatccccagcaaccggctgcccagcgctgccttcttcagcgagacccagaggcagttcagccgctacttcatcgagtttgaggagctgcagctgctgggcaagggggcctttggagctgtgatcaaggtgtggtacagagtcatccccagccccctgtag

SEQ ID NO: 314693 - DNA, 1851 bp, Artificial Sequence
  derived and/or modified sequence
atggccggcggccggggcgcccccggccggggccgggacgagccccccgaaagttacccacagcggcaggatcacgagcttcaggccctggaagctatctatggtgccgacttccaggacctgaggcccgacgcatgtggccctgtgaaggaacccccagagatcaacctcgtgttgtatcctcagggtttgactggtgaggaggtgtatgtcaaggtggatctgcgcgtcaaatgtccaccaacttacccagatgtggttcccgaaattgaacttaagaacgccaagggattaagtaacgaatctgtgaatcttctaaaatccagactagaagaattagcgaaaaaacactgtggtgaagtgatgatcttcgaacttgcgtatcatgtgcagagctttctgagcgagcataataaaccccctccaaagtcattccacgaagagatgctagagagacgcgcccaagaggagcagcagcgcctgcttgaggccaagcgcaaggaagaacaagaacaaagggaaatcctccatgaaatccagagaaggaaggaggagattaaggaggagaagaaacgaaaggaaatggctaagcaggaaaggctggaaattgcttccctatctaaccaggatcatacctctaagaaagaccccggcggacatcggacagccgcaatcctgcacgggggcagcccagatttcgttggcaatgggaagcatcgagcgaatagctccgggcgaagcagacgcgaaaggcagtacagcgtgtgcaatagcgaggatagccctggttcatgtgagattctttacttcaatatgggaagccccgatcaacttatggtgcataagggaaagtgtatcggatcagacgagcagctgggaaaactggtgtacaatgccctggagacggcaaccggcgggttcgtcctcctttatgaatgggtgctccagtggcagaagaagatgggccctttcctgaccagtcaggagaaggaaaagatagataagtgtaagaaacagatccagggcacagaaaccgaattcaatagcctggtaaagctcagccatcccaacgttgtccgctatctggctatgaacttaaaagagcaggacgatagcatagtagtggatatacttgttgaacacatatcaggggtgtcactggctgctcatctgtcacattcaggcccaattcctgtacatcaattaagacggtacacagcccagctgttatctggtttggattatctgcactccaattccgtggtgcacaaggtgctgagcgcaagcaatgtcctcgtcgatgcggaggggaccgttaaaatcacagactattccatctctaagcggcttgccgacatctgcaaggaggacgtctttgagcaaactcgagttagattctctgataatgctttgccatataagacaggtaagaagggggacgtttggcgcctggggctattactgctcagcctcagccaaggccaggagtgtggggagtaccctgtaactatcccttctgacctgcctgccgactttcaggacttcctgaagaagtgcgtctgcctagatgataaggagcggtggagtcctcaacagttgctgaaacactcatttatcaacccccagcccaagatgcccctcgtagagcaaagtcccgaagattctgagggtcaggactacgtcgagacggttatacccagtaatcggctcccatccgccgctttcttttctgaaactcagcggcagttctctcggtacttcatcgagttcgaagagctacaactgctcggaaaaggtgcctttggcgcagttatcaaggtgtggtaccgggtgatccccagccccttgtag

SEQ ID NO: 314694 - DNA, 1851 bp, Artificial Sequence
  derived and/or modified sequence
atggcaggcggtaggggcgctcccggtcgaggccgagatgaacctccagaatcttacccacagagacaggatcacgagctgcaggctctcgaagccatctacggcgctgatttccaggacctccggccagatgcgtgtggcccagttaaagagcctcccgagattaatctggtgctgtatccacaagggctgactggagaagaagtctacgtgaaggtggacctccgggttaaatgccctcctacctatcccgacgtggtgcccgagatcgagctgaagaacgccaagggcctgagcaatgaatcggtcaaccttttgaagagtcggctcgaggagttagcgaagaagcattgtggagaggtcatgatttttgagttggcctaccatgttcagagcttcctcagtgagcataacaaaccccctcccaagagctttcatgaagagatgctggaaagacgggctcaagaggaacagcagcggttactggaagctaaacgcaaagaggaacaagagcagcgggaaattctgcatgagatccagcgtcgcaaggaggaaattaaagaggagaagaaaaggaaggaaatggccaagcaggagcgcttagaaatagcatccctttccaaccaagaccatacgagcaaaaaggaccctgggggtcaccgaaccgctgccatactccatgggggaagccctgatttcgtcggcaatggaaagcaccgagccaacagctctggtcggagcagacgagagcgacagtattccgtttgtaactctgaagattctcccggatcctgtgagattctttacttcaatatgggcagtcccgatcagttgatggtgcataaagggaagtgtatcggaagcgatgagcagttaggaaagcttgtttataacgccttggaaaccgcaacgggcggattcgtcctattgtatgagtgggttttacaatggcagaagaagatggggccttttctgacatctcaggaaaaggaaaagatcgataaatgtaagaaacagattcagggcacagaaacagagtttaactcactagtcaaactatcacatccaaatgtggtgaggtaccttgctatgaatctgaaagaacaggacgattcaatcgttgtcgacattttggtggaacacatctctggtgtgtccctcgccgctcacctgagtcatagtggcccaattcctgtccaccagctacggagatatactgcgcaacttctttcagggctcgattatctgcacagcaattctgtggtgcataaagtgctgtccgcgagcaacgtcctcgtagacgcagaaggaacggtgaagatcaccgactactcaatatcgaaacggttggcggatatctgtaaagaggacgttttcgaacagacgcgggttaggttcagtgataacgctcttccctacaaaactggcaaaaagggggacgtatggcgcctaggtcttctcctgctgagcctctctcagggacaggagtgcggtgagtacccggtaacaatcccctcagacctacccgcagacttccaggatttcctcaagaagtgtgtctgtttggacgataaagagagatggtcaccccagcagctgctgaagcatagttttattaacccccagccgaagatgcccctggtcgagcaaagcccagaggattccgaggggcaggattacgtagagactgtgatcccatctaacagactgcctagtgccgctttcttctcagaaacacagaggcagtttagtaggtactttatagagttcgaagagctgcagctcctcgggaagggagcttttggtgctgtgattaaggtgtggtatcgagttataccgtctcccctgtag

SEQ ID NO: 314695 - DNA, 3548 bp, Artificial Sequence
  derived and/or modified sequence
ggcccaccgccgcccaggcaaggccgccctgccttgggcgcagcgctgccatggctgggggccgtggggcccccgggcgcggccgggacgagcctccggagagctacccgcaacgacaggaccacgagctacaggccctggaggccatttacggcgcggacttccaagacctgcggccggacgcttgcggaccggtcaaagagccccctgaaatcaatttagttttgtaccctcaaggcctaactggtgaagaagtatatgtaaaagtggatttgagggttaaatgcccacctacctatccagatgtagttcctgaaatagagttaaaaaatgccaaaggtctatcaaatgaaagtgtcaatttgttaaaatctcgcctagaagaactggccaagaaacactgtggggaggtgatgatctttgaactggcttaccacgtgcagtcatttctcagcgagcataacaagccccctcccaagtcttttcatgaagaaatgctggaaaggcgggctcaggaggagcagcagaggctgttggaggccaagcggaaagaagagcaggagcaacgtgaaatcctgcatgagattcagagaaggaaagaagagataaaagaagagaaaaaaaggaaagaaatggctaagcaggaacgtttggaaattgctagtttgtcaaaccaagatcatacctctaagaaggacccaggaggacacagaacggctgccattctacatggaggctctcctgactttgtaggaaatggtaaacatcgggcaaactcctcaggaaggtctaggcgagaacgtcagtattctgtatgtaatagtgaagattctcctggctcttgtgaaattctgtatttcaatatggggagtcctgatcagctcatggtgcacaaagggaaatgtattggcagtgatgaacaacttggaaaattagtctacaatgctttggaaacagccactggtggctttgtcttgttgtatgagtgggtccttcagtggcagaaaaaaatgggtccattccttaccagtcaagaaaaagagaagattgataagtgcaaaaagcagattcaaggaacagaaacagaattcaactcactggtaaaattgagccatccaaatgtagtacgctaccttgcaatgaatctcaaagagcaagacgactccatcgtggtggacattttagtggagcacattagtggggtctctcttgctgcacacctgagccactcaggccccatccctgtgcatcagcttcgcaggtacacagctcagctcctgtcaggccttgattatctgcacagcaattctgtggtgcataaggtcctgagtgcatctaatgtcttggtggatgcagaaggcaccgtcaagattacggactatagcatttctaagcgcctcgcagacatttgcaaggaggatgtgtttgagcaaacccgagttcgttttagtgacaatgctctgccttataaaacggggaagaaaggagatgtttggcgtcttggccttctgctgctgtccctcagccaaggacaggaatgtggagagtaccctgtgaccatccctagtgacttaccagctgactttcaagattttctaaagaaatgtgtgtgcttggatgacaaggaaagatggagtccccagcagttgttgaaacacagctttataaatccccagccaaaaatgcctctagtggaacaaagtcctgaagattctgaaggacaagattatgttgagactgttattcctagcaaccggctacccagtgctgccttctttagtgagacacagagacagttttcccgatacttcattgagtttgaagaattacaacttcttggtaaaggagcttttggagctgtcatcaaggtgtggtacagagtcattcccagtcccctttagagctccttctctgttccatttccacaaagactcatggactttacttttattttgggagtggggagggaagtgaatatggctgttggatactatgctcatcctcaccttcctggagttaaaggttttatttaagttacgctggacacagttgagaattgtcccactcctctttccttgcttcatgtggagcattaacatgaaacacacatggttataacagcacttcaagtggaatcaagacctccacagaaagaacatttttgtgtgctttggttcagaaagaacattgttctttttttctcctgtttgctgttagagttgctgtagataaaaaggttctaaggttagaagagagatggacttcaaactgggagatggccccagcaggtctcgatggcttttattttccagctattattgggacaggaaagtagcgatgtattattaaggtacactgttgttgggtcttcctttcttcgttctagtctatttgggtgacttttattattatctgccccttgtagaaagaggtttcagctgtttttatataatagaagtatttctttgtaaattaggagacccagattattgtattaagtccatatacagtacatgtcatctttcacatatgaaggtaacccaccatcaactgagtatattgtctgttaaggattctgagagtatcattaggaagcattactgttactgtagaaaaacttttacactaaaaaaggaattaaattagttttcctgtggtaaaagacagacaagcaagacagatgtcctgatcagaaagatcataattatgtctaagaggaggggatgattgaagcgtatactgtccctttaacacaatatcattttgatcaaatcctttaacttcattctattttaaattcttgaacgtagaatagtaacaaatttcatctctttacaagtacttaataatgataggcaagctcatataacaaaaacatctgagtaacttaagcccccacggtttccagtagtttctccctgtgagaatccacagccctcacctcctacctctgtgcttctgtgtcagagtagggcagcctgcccagtgatctggcattcattagcagttggacccattactgtttctgcaccttttcacttcagtaaatgaattcctaggggtttccagtatagcaagctttactcccaacccagttcgtatatgatgtgtactgagacaggagatcgaaaggcaatgccaagatccccacctcccgccctacactgtcctcttccctattaatgtggcagtaaaagaacacagggctatcattttttggagcacctgccatatttcagattgtgtgccaggtgatttacaaaccttgtctttaaatctcaggacattcttacgagatgggtatgatcctcattccctagatgagggaactgaagctcagagaaggttatgtcctttgcctgagataagggagataaaaccagcattcagacccacctctgttgtactacaaagtgtgtgttcttgtcactatttccatacaaaaaaagataatctgaaactcaattttgtagtacttccttcttattcccaggacttcacttagacttttattagtttaattgaaacttgtgagccaaacaagagaa

SEQ ID NO: 314696 - DNA, 4020 bp, Artificial Sequence
  derived and/or modified sequence
gaggcagtgatattgtggaagattgaaatccacagataattcatgaccctcatcttatcactttactccatctttttatcctattaaattatttttgacaagatgtcctggtagactaaaggtgaacagatttgctcttgctcatcttctggtggatattttaacttgctattcacaatcaggacaaccaaagtcaaggacccagatgaaccacaaggcagctagtcagctacttagaggttggttacattcgaataaaaagtagtcagggaatgggggaggtggggagttggggagtacttggcagttgggatatgatccatttttttaaacaagttttttgtagatcccttgtaaaataataataataatgttgtgaatctccatgccaagtgaaaaaggcctaaagatgagttgaatttgtgataccatgggtaaggcatggaagaactcttgaatgtgttggccattttctctaactaacatgtggtatgtatggtcccctatattagatagaagtctttgctacatgtaattcaaaagcatctcgcttttctcaggaaccaaaggcttatgatgtaggacaaagaaatcatcttagaactgtcaagcatattttcacaataccatgtcaagatcaggaaaacacccttttgctagtgtgcttaacttatttatttcttctaggaaacaatagataaacagcatgaaaatgtaaatcatctggcatcactgatagaatttctgaaagagaaagagaagtagatggtcaaccagtcactagttggttggcatgaggtggtgtgcagaggaaagctgcattcactattgagtaaaaacttgtagaaagcacattatagagcttatgttggaatccatcttggaggatttttgttttaaactgtctttagcattttccctcttcccttctaatgggcattataattgtttcatctactctgtgaatctacataggtctttttttttagatgtttgatacattttaagtatttttaaatagatgaaaattctaaatgattttccctcaaatctatctagattattttaagatgagacaagattattgtcaatccctgaatgtctggagttacctcccatggatttttttttcctttggcctgggttttataaacaacttgaacatcatatcatataggataacaaaggaggaagttaacttaattcacctcagacttcagcctaagattcaatcaaattcatccttcagcctgtcttgtttcttctttatgtttcttttacttattgctgctaggatcctacataggatttctatagaaatgtatgaaattctgtggtcactgcatgtcaggattgcacagtatgttacaatacaatttcaaagagaacccacatttgtgagatttacagaccaaggtgtggtggaggaggtagaattgcagatcagataaaaagtgagcttacacttgaacttagttattcactgtgacctaaatttagtcctattgtaatatgtgcctgtcacaacacaaatacccctcttgaaagagatttactcatctatccaagcacttaatttggaaattttattgtcctattgcaaaatgaaacaaaattaaaagtggcctcgagtacttggtaagttacttaaaatttttacaaaaatatcccactcaatgccaaatctttcagtcctcaaaggcatttaagtccaatagtcatgctttaaatatggctttaaattatgccaccaaaatggtgcacttcacagattcaccagactgtagcatcataaagttaatttacagtttttacaacattgcttctacattcttactggtttacattaaaatcctttaagccaaaaggaagcttgctctatggatttaaatgcaaacttcatttaccagtgcaggaagtctcataaaactcagatgtactcccacaaaaattttattggcctttttgtaagagatgaaaaagaattgacacagttctctttaaagagaagaacttttttattattatttttatctccaactgcaggtggtgtcttttgccaaggtctctgtatttttctttcagttgtctttgggaggggatgttaagtcaaatcactaaaacagggttctctttggattaaaagttctggatttattgcaactattttccttgagaaacattctcagcatcaggattgataaacaaatgtagatgattaaaataggataattggttttagataatatcttctactgccaaacttctggcaaatttacctgtgaatttcaaaatgttataaaatctcttgatatgcttttgtttttccttttagccattttctcttcaatttcttagtccctctgccctctgtaaatgtgttgagtgatatagctatcagatgtattgaaggcaaagttctcgcagaggtctctgttccagctctgtaaaggtcacaggaatcgtgaaggagctgagaaatcttcctctccggcccactgtctgtggcccattgtcattgtttcctcatgaaacattgcagagtttgaatcctcagtaactctcattgactggattagaggtgatggccacagcaaatgggagagcaaaatgttggcctacagagaatgacacaattttattcgcctttggtgttagttgccatagtgctgtatttgaaaatcgatgctttagccaaaagctgaatgaccaccgtttccgtagtttccactgttttgtctgcatagaattttcctgaactacaagcaaaaatgtattttgtccaatgtcacaaaagtgaaaatgttactaatcttagatgtgttgcatattttgtgtttttacgttccaaactctttcaaaagctgccgttacaaagctgtttggctgtattgacagcatgtggtgtttttacaaaagcaattctaggagagccagtgtctaccatgaactcctgacatccccactccagggtcattcatgacattgaaatggcaacttgtacactgtaattcttcgaaaagtaacaggggatggaaatcagacctggccgttagtcactagtgtgtagtaccgtgatctgaagtaggaaatttaactgacatagaataattgtggtttttgaagcagctactcattgctttttccttttgctgtgaagatcatggattgggaatgtcctcgtgaggtggacctaaggcagtaacatttaaacttcatgtcctagcacccgccctccatctgacccaaagataaaaaaggcatcaagcttcatggttatgcctaagcttaaaaattcccttccccactactaatattgagttcagcagggccccatcttacttatttttcaaaaaagttatagctttgaattatagactatattactaaatttggtaaggtagttctttgcatgaatgggaatgtgtgtcaaaatactttcacaaaaggcatgattacaatggaaatgcccctttgcctccagttttgctaaccctaaaaagtatttcactaatttcaagcactgtttacactcaaatcccaaaattggccaaattatataattctcttaaattttcatttctgtaggtggagatttaactatggttctggtgaatcatagaagggagagacaatatttgaggggagtttatcagcagaatatcatgccttatgaccccattactgaaacacagacattacaatcagaaatagacctaataattccaatatccctccattaactagttccagtgatgctgagagacacagcaccctgtgccaggtatcagaaatataagcctcagcagagggtaactgaaaactttcaatcagaaacactctccaaggcttatggctagattatgtaggtcactaccattcaaaacttttctatacaaaggtggaaaagcactcagaatctgggaattttctggttggaagaacaatgttctccttttccaaattggaataaagactcagaattacccattcttcataatcatgtctgattggtacata

SEQ ID NO: 314697 - protein, 1853 aa, Artificial Sequence
  derived and/or modified sequence
MAASELYTKFARVWIPDPEEVWKSAELLKDYKPGDKVLLLHLEEGKDLEYHLDPKTKELPHLRNPDILVGENDLTALSYLHEPAVLHNLRVRFIDSKLIYTYCGIVLVAINPYEQLPIYGEDIINAYSGQNMGDMDPHIFAVAEEAYKQMARDERNQSIIVSGESGAGKTVSAKYAMRYFATVSGSASEANVEEKVLASNPIMESIGNAKTTRNDNSSRFGKYIEIGFDKRYRIIGANMRTYLLEKSRVVFQAEEERNYHIFYQLCASAKLPEFKMLRLGNADNFNYTKQGGSPVIEGVDDAKEMAHTRQACTLLGISESHQMGIFRILAGILHLGNVGFTSRDADSCTIPPKHEPLCIFCELMGVDYEEMCHWLCHRKLATATETYIKPISKLQATNARDALAKHIYAKLFNWIVDNVNQALHSAVKQHSFIGVLDIYGFETFEINSFEQFCINYANEKLQQQFNMHVFKLEQEEYMKEQIPWTLIDFYDNQPCINLIESKLGILDLLDEECKMPKGTDDTWAQKLYNTHLNKCALFEKPRLSNKAFIIQHFADKVEYQCEGFLEKNKDTVFEEQIKVLKSSKFKMLPELFQDDEKAISPTSATSSGRTPLTRTPAKPTKGRPGQMAKEHKKTVGHQFRNSLHLLMETLNATTPHYVRCIKPNDFKFPFTFDEKRAVQQLRACGVLETIRISAAGFPSRWTYQEFFSRYRVLMKQKDVLSDRKQTCKNVLEKLILDKDKYQFGKTKIFFRAGQVAYLEKLRADKLRAACIRIQKTIRGWLLRKKYLRMRKAAITMQRYVRGYQARCYAKFLRRTKAATIIQKYWRMYVVRRRYKIRRAATIVLQSYLRGFLARNRYRKILREHKAVIIQKRVRGWLARTHYKRSMHAIIYLQCCFRRMMAKRELKKLKIEARSVERYKKLHIGMENKIMQLQRKVDEQNKDYKCLVEKLTNLEGIYNSETEKLRSDLERLQLSEEEAKVATGRVLSLQEEIAKLRKDLEQTRSEKKCIEEHADRYKQETEQLVSNLKEENTLLKQEKEALNHRIVQQAKEMTETMEKKLVEETKQLELDLNDERLRYQNLLNEFSRLEERYDDLKEEMTLMVHVPKPGHKRTDSTHSSNESEYIFSSEIAEMEDIPSRTEEPSEKKVPLDMSLFLKLQKRVTELEQEKQVMQDELDRKEEQVLRSKAKEEERPQIRGAELEYESLKRQELESENKKLKNELNELRKALSEKSAPEVTAPGAPAYRVLMEQLTSVSEELDVRKEEVLILRSQLVSQKEAIQPKDDKNTMTDSTILLEDVQKMKDKGEIAQAYIGLKETNRLLESQLQSQKRSHENEAEALRGEIQSLKEENNRQQQLLAQNLQLPPEARIEASLQHEITRLTNENLYFEELYADDPKKYQSYRISLYKRMIDLMEQLEKQDKTVRKLKKQLKVFAKKIGELEVGQMENISPGQIIDEPIRPVNIPRKEKDFQGMLEYKKEDEQKLVKNLILELKPRGVAVNLIPGLPAYILFMCVRHADYLNDDQKVRSLLTSTINSIKKVLKKRGDDFETVSFWLSNTCRFLHCLKQYSGEEGFMKHNTSRQNEHCLTNFDLAEYRQVLSDLAIQIYQQLVRVLENILQPMIVSGMLEHETIQGVSGVKPTGLRKRTSSIADEGTYTLDSILRQLNSFHSVMCQHGMDPELIKQVVKQMFYIIGAITLNNLLLRKDMCSWSKGMQIRYNVSQLEEWLRDKNLMNSGAKETLEPLIQAAQLLQVKKKTDDDAEAICSMCNALTTAQIVKVLNLYTPVNEFEERVSVSFIRTIQMRLRDRKDSPQLLMDAKHIFPVTFPFNPSSLALETIQIPASLGLGFISRV

SEQ ID NO: 314698 - DNA, 5562 bp, Artificial Sequence
  derived and/or modified sequence
atggccgcctccgagttatatacaaagtttgctcgcgtgtggatccctgatccagaggaagtctggaaatctgcggagctgctcaaagattacaaacctggcgacaaggtgctgcttctgcatctggaagagggtaaagatctggagtaccacttagaccccaaaaccaaagaactgccacacttgaggaacccagatatcctggtgggggagaacgatttgactgcgctaagttacctccacgaacccgcagtgctacataatttgagggtaagattcatcgacagtaagctcatttacacgtactgtgggattgtgctggtggcaatcaatccatatgagcagcttccgatttacggtgaggacataatcaacgcatattccggtcagaacatgggagacatggatccacacatctttgccgtggctgaagaagcctataaacagatggcccgcgatgagcgcaatcagtcgatcatcgtcagcggtgaatccggcgccggcaagaccgtgtcggccaagtatgctatgagatactttgctactgtttccggctcagctagcgaggccaatgtggaggagaaagttctggcctccaaccccatcatggagtctatcggaaatgcaaaaaccaccagaaacgacaattcttcaagattcggtaagtatatcgagataggattcgacaaaaggtacagaatcattggcgccaacatgagaacatacctgcttgaaaaatcccgagtcgtttttcaggccgaagaagagcgcaactaccacatcttttatcagctctgcgcgtcagcaaagctgcctgagttcaaaatgctcagattgggaaatgccgataactttaactacacaaagcagggcggctctccagtgattgaaggggtggatgacgctaaagaaatggcccacacacggcaggcttgcaccctgctgggcatctctgaaagtcatcagatgggtattttcaggattctggccggaatcctccatctgggcaatgttggattcacgtcacgcgatgcagatagctgtaccatacccccaaaacatgaacctctgtgcattttttgcgagctcatgggcgtggattacgaggaaatgtgtcattggctctgccacaggaaattggcgacagctaccgagacttatatcaaacctatctcaaaactgcaggccacgaatgcccgtgacgcgctcgctaagcatatttacgccaagttatttaactggattgtggataatgtgaatcaggcattacactccgccgttaaacagcactccttcatcggagtgcttgacatttatggtttcgaaacatttgaaattaacagctttgagcagttctgtattaattacgcgaacgagaaactccagcagcagtttaacatgcacgtttttaaactggaacaggaagaatacatgaaagagcagataccttggactctgatagacttttacgacaatcagccctgcattaacctgatagagagcaagctggggatcctggacctgctggacgaagaatgcaagatgcccaaaggaacagatgatacctgggctcaaaagttgtataatacacacctcaacaaatgtgctctgtttgaaaaacctaggttgagtaacaaagccttcattattcaacacttcgccgacaaggtggaataccaatgtgagggtttcctggagaagaataaggacaccgtgtttgaagagcagattaaagtgctgaaatctagcaagttcaagatgttaccagagctgttccaagacgatgaaaaggcgatcagcccaacaagtgctacgtccagcggaaggactcctttgaccagaacgcccgccaagcctacgaagggacgcccaggccaaatggctaaggagcacaaaaagaccgtgggccatcagtttcggaactcattgcatctgttgatggagacattgaacgccacgacaccccactacgttagatgcatcaaaccaaatgacttcaagttcccgttcacattcgacgagaaacgcgccgtgcagcaactgcgggcatgtggggtgctggagaccatccgaatcagcgctgccggatttccctccaggtggacctaccaagaattcttctcccggtatagggtgctgatgaaacagaaagatgtgctgagcgaccgaaaacagacctgcaagaacgtgttagagaagctgattctggacaaggataagtaccagtttggaaaaactaaaatatttttccgcgccggccaggtcgcctatctggagaagcttagagccgacaaactccgagctgcgtgtattcgtatccagaagaccattcgtgggtggctacttagaaagaagtacctgcgcatgcggaaggcagcgatcacaatgcaaaggtacgtgcgaggctaccaggcccgttgctacgctaaatttctgagacgcactaaggcagcaacaatcatacagaaatattggagaatgtatgttgttcgcagaaggtacaaaattcgccgcgctgcaacaatcgtcctgcagtcatatcttcgcgggtttctggcccggaatagatatcggaaaatactcagagagcacaaagcagtcataattcaaaagcgggtgaggggttggctcgcacgaacacattacaaaagatcaatgcacgctattatctacctccagtgttgctttcgacggatgatggctaagagagaattgaaaaagctgaagattgaggcacggagcgtggaacggtacaaaaagcttcatattggcatggaaaacaagatcatgcagctgcagcgcaaagtggacgagcaaaacaaagattataaatgcctcgtagagaaactcaccaacctggaaggtatctataactcagaaactgagaaattacgtagcgatctggaacggctgcagctctctgaggaagaagcgaaggtggccactggccgcgtcctatctctacaggaagaaatcgcgaaactccgtaaagacctagagcagacgagatctgagaagaagtgcatcgaggaacatgccgacagatacaaacaggagacagaacagctggtctccaacctcaaagaagaaaatacattgctcaaacaggaaaaggaagcactcaatcaccggatagttcagcaggccaaagagatgactgaaacaatggaaaaaaagctggtcgaggaaaccaaacagctggagctcgatctgaatgacgagcgtttaaggtaccagaatttgcttaacgagttctctaggttagaagagcgttatgacgatcttaaggaggagatgactctgatggttcatgtgcctaagccggggcacaaacgcaccgatagcacacacagttctaacgaatccgaatatattttctcgtctgagatcgcggaaatggaagatattccaagccggaccgaggagcccagtgagaaaaaggtaccactggacatgagtctctttctgaagctgcagaagcgggtgactgagctggaacaggagaagcaggtcatgcaagacgaactggatagaaaagaggagcaggtccttagatccaaggcaaaagaggaagaaaggcctcaaatccgcggggccgagctggaatatgaatcgcttaaaagacaggagctggagtctgaaaataagaaattgaagaacgagcttaatgagttaaggaaagcattgtccgaaaagagcgcacctgaagttacggccccaggcgcacctgcctacagagtcttgatggaacaactgacctcggtctcggaagagttagatgtgcggaaggaggaggtactcatcctgaggtcccaactggtgagccagaaggaagctattcaaccgaaggatgacaagaacactatgaccgattctaccatactgcttgaggatgtgcaaaagatgaaggacaaaggagagattgctcaggcttacatcggcctgaaagagacgaacaggctactggagagccaattgcagtcacagaaaagaagtcatgaaaatgaagcggaggcactgagaggagaaattcagtctctaaaggaagagaacaatcggcaacagcaattgctggctcagaacttacagctccctccggaagctcgtattgaagcttcactgcaacacgagattactcggttgactaacgaaaacttgtattttgaagagctgtacgctgatgatcctaaaaagtatcaaagctacagaatctccctgtacaaacgcatgatcgatctaatggagcagcttgagaagcaagataaaaccgtgcgaaagctgaaaaagcagcttaaggtttttgcaaaaaagatcggcgagctggaagtgggacagatggagaacatctcaccgggccagattatcgacgagcccatcagacctgtaaacattccaaggaaggaaaaagacttccagggaatgttagagtataaaaaagaggatgagcaaaaattagtgaagaacttgatcctggaattaaagcctcggggagtggcagtaaacctgattcctggtctgcccgcctatattttatttatgtgcgtgcgccacgcagactatctcaatgatgatcagaaagtgagaagtctgctcacctctacgataaactccattaaaaaggtactgaagaaaaggggtgatgatttcgaaacagtctcgttctggctttccaacacctgtagattcctgcattgcctcaaacagtacagtggcgaggaagggttcatgaagcacaacaccagtcgtcagaatgagcactgcctcacaaacttcgacctggctgaatacagacaggtccttagtgacttagccatacagatctaccagcagctcgtgagggtgcttgagaacatccttcaacctatgattgtatctggtatgctcgagcacgaaactatccagggcgtctccggcgtcaagccaacaggattacgcaaacggactagctcaatagcagacgagggaacctatactctcgattctatcctgcggcagcttaatagctttcattccgtgatgtgtcaacacggcatggatcctgagctgatcaagcaggtggttaagcagatgttttacatcattggcgctattactcttaataatctgctgctccggaaggatatgtgcagttggtctaagggaatgcagattcgctacaacgtgtcacaactggaagagtggctgagggataagaaccttatgaactctggcgccaaggagactttagaacctctaatccaagctgctcagctcctccaagtgaaaaagaagacggacgatgacgcagaggcaatctgcagcatgtgtaacgcgctaactacagctcagatagtgaaggtgttgaatttgtacacaccagtcaatgaatttgaggagcgggtcagcgtgtccttcatacgcaccattcagatgcgactgcgcgatcgtaaagatagccctcagctacttatggatgctaagcacattttccctgtcacttttccgttcaatccatccagtctcgcacttgagacaattcagatccccgcttctctcggcctgggttttatcagtcgggtctag

SEQ ID NO: 314699 - DNA, 5562 bp, Artificial Sequence
  derived and/or modified sequence
atggccgccagcgagctgtacaccaagtttgcccgggtgtggatcccagaccctgaggaggtgtggaagtctgctgagctgctgaaggactacaagccaggggacaaggtgctgctgctgcacctggaggagggcaaggacctggagtaccacctggaccccaagaccaaggagctgccccacctgagaaatccagacatcctggtgggagaaaatgacctgacagccctgagctacctgcacgagcctgctgtgctgcacaacctgcgggtgcgcttcatcgacagcaagctgatctacacctactgcggcatcgtgctggtggccatcaacccctatgagcagctgcccatctatggagaggacatcatcaatgcctacagcggccagaacatgggagacatggacccccacatctttgctgtggccgaggaggcctacaagcagatggccagagatgaaagaaaccagagcatcatcgtgtctggagagagcggggccggcaagacagtgtctgccaagtatgccatgagatactttgccaccgtgtctggcagcgccagcgaggccaacgtggaggagaaggtgctggccagcaaccccatcatggagagcattggaaatgccaagaccaccagaaatgacaacagcagcagatttgggaagtacatcgagatcggctttgacaagcgctaccgcatcattggagccaacatgaggacctacctgctggagaagagccgggtggtgttccaggccgaggaggagaggaactaccacatcttctaccagctgtgtgccagcgccaagctgcctgagttcaagatgctgcggctgggcaatgctgacaacttcaactacaccaagcagggcggcagccctgtgattgagggcgtggatgatgccaaggagatggcccacacccggcaggcctgcaccctgctgggcatcagcgagagccaccagatgggcatcttccgcatcctggccggcatcctgcacctgggcaatgtgggcttcaccagcagagatgctgacagctgcaccatcccccccaagcatgagcccctgtgcatcttctgtgagctgatgggcgtggactatgaggagatgtgccactggctgtgccacaggaagctggccacagccacagagacctacatcaagcccatcagcaagctgcaggccaccaatgccagagatgccctggccaagcacatctatgccaagctgttcaactggatcgtggacaacgtgaaccaggccctgcacagcgctgtgaagcagcacagcttcatcggcgtgctggacatctacggctttgagacctttgagatcaacagctttgagcagttctgcatcaactatgccaatgagaagctgcagcagcagttcaacatgcacgtgttcaagctggagcaggaggagtacatgaaggagcagatcccctggaccctgattgacttctatgacaaccagccctgcatcaacctgattgagagcaagctgggcatcctggacctgctggatgaggagtgcaagatgcccaagggcacagatgacacctgggcccagaagctgtacaacacccacctgaacaagtgtgccctgtttgagaagccccggctgagcaacaaggccttcatcatccagcactttgctgacaaggtggagtaccagtgtgagggcttcctggagaagaacaaggacacagtgtttgaggagcagatcaaggtgctgaagagcagcaagttcaagatgctgcctgagctgttccaggatgatgagaaggccatcagccccaccagcgccaccagcagcggccgcacccccctgaccaggaccccagccaagcccaccaagggccggcccggccagatggccaaggagcacaagaagacagtgggccaccagttcaggaacagcctgcacctgctgatggagaccctgaatgccaccaccccccactacgtgcgctgcatcaagcccaatgacttcaagttccccttcacctttgatgagaagagagctgtgcagcagctgcgggcctgtggggtgctggagaccatccgcatctctgctgctggcttccccagccgctggacctaccaggagttcttcagccgctacagagtgctgatgaagcagaaggatgtgctgagtgacaggaagcagacctgcaagaatgtgctggagaagctgatcctggacaaggacaagtaccagtttgggaagaccaagatcttcttccgggccggccaggtggcctacctggagaagctgcgggctgacaagctgcgggccgcctgcatccgcatccagaagaccatccggggctggctgctgaggaagaagtacctgaggatgaggaaggccgccatcaccatgcagagatatgtgcggggctaccaggcccgctgctacgccaagttcctgcggaggaccaaggccgccaccatcatccagaagtactggaggatgtatgtggtgagaagacgctacaagatcagaagagctgccaccatcgtgctgcagagctacctgcggggcttcctggccaggaaccgctacaggaagatcctgcgggagcacaaggccgtcatcatccagaagagggtgcggggctggctggcccggacccactacaagaggtccatgcacgccatcatctacctgcagtgctgcttccggaggatgatggccaagcgggagctgaagaagctgaagattgaggcccggtctgtggagcgctacaagaagctgcacatcggcatggagaacaagatcatgcagctgcagaggaaggtggatgagcagaacaaggactacaagtgcctggtggagaagctgaccaacctggagggcatctacaacagcgagacagagaagctgcggagtgacctggagcggctgcagctgtctgaggaggaggccaaggtggccaccggccgggtgctgagcctgcaggaggagatcgccaagctgaggaaggacctggagcagaccaggtctgagaagaagtgcatcgaggagcacgccgaccgctacaagcaggagacagagcagctggtgagcaacctgaaggaggagaacaccctgctgaagcaggagaaggaggccctgaaccacagaattgtgcagcaggccaaggagatgacagagaccatggagaagaagctggtggaggagaccaagcagctggagctggacctgaatgatgagcggctgcgctaccagaacctgctgaatgagttcagccggctggaggagagatatgatgacctgaaggaggagatgaccctgatggtgcacgtgcccaagccaggccacaagaggacagacagcacccacagcagcaatgaaagtgagtacatcttcagcagcgagattgctgagatggaggacatccccagcaggacagaggagcccagcgagaagaaggtgcccctggacatgagcctcttcctgaagctgcagaagagggtgacagagctggagcaggagaagcaggtgatgcaggatgagctggacaggaaggaggagcaggtgctgcggagcaaggccaaggaggaggagcggccccagatcagaggagctgagctggagtatgagagcctgaagaggcaggagctggagagcgagaacaagaagctgaagaatgagctgaatgagctgaggaaggccctgtctgagaagagcgcccctgaggtgacagcccctggggccccagcctacagagtgctgatggagcagctgacctctgtgtctgaggagctggatgtgaggaaggaggaggtgctgatcctgcggagccagctggtgtcccagaaggaggccatccagcccaaggatgacaagaacaccatgacagacagcaccatcctgctggaggatgtgcagaagatgaaggacaagggggagatcgcccaggcctacatcggcctgaaggagaccaaccggctgctggagagccagctgcagagccagaagaggagccatgaaaatgaagctgaggccctgcggggggagatccagagcctgaaggaggagaacaaccggcagcagcagctgctggcccagaacctgcagctgcccccagaggcccgcatcgaggccagcctgcagcacgagatcacccggctgaccaatgaaaacctgtactttgaggagctgtatgcagatgaccccaagaagtaccagagctaccgcatcagcctgtacaagaggatgattgacctgatggagcagctggagaagcaggacaagacagtgaggaagctgaagaagcagctgaaggtgtttgccaagaagatcggggagctggaggtgggccagatggagaacatcagccctggccagatcattgatgagcccatccggcctgtgaacatccccaggaaggagaaggacttccagggcatgctggagtacaagaaggaggatgagcagaagctggtgaagaacctgatcctggagctgaagccccggggcgtggccgtgaacctgatccctggcctgcctgcctacatcctcttcatgtgtgtgagacatgctgactacctgaatgatgaccagaaggtgcgcagcctgctgaccagcaccatcaacagcatcaagaaggtgctgaagaagagaggagatgactttgaaacagtgtccttctggctgagcaacacctgccgcttcctgcactgcctgaagcagtacagcggggaggagggcttcatgaagcacaacaccagccggcagaatgagcactgcctgaccaactttgacctggccgagtaccggcaggtgctgagtgacctggccatccagatctaccagcagctggtgcgggtgctggagaacatcctgcagcccatgattgtgtctggcatgctggagcacgagaccatccagggcgtgtctggagtgaagcccaccggcctgaggaagaggaccagcagcattgctgatgagggcacctacaccctggacagcatcctgcggcagctgaacagcttccacagcgtgatgtgccagcacggcatggaccctgagctgatcaagcaggtggtgaagcagatgttctacatcatcggggccatcaccctgaacaacctgctgctgaggaaggacatgtgctcctggagcaagggcatgcagatccgctacaacgtgtcccagctggaggagtggctgcgggacaagaacctgatgaacagcggggccaaggagaccctggagcccctcatccaggccgcccagctgctgcaggtgaagaagaagacagatgatgatgctgaggccatctgcagcatgtgcaatgccctgaccacagcccagatcgtgaaggtgctgaacctgtacacccctgtgaatgaatttgaggagcgggtgtctgtgtccttcatccgcaccatccagatgaggctgcgggacaggaaggacagcccccagctgctgatggatgccaagcacatcttccctgtgaccttccccttcaaccccagcagcctggccctggagaccatccagatcccagccagcctgggcctgggcttcatcagccgggtgtag

SEQ ID NO: 314700 - DNA, 5989 bp, Artificial Sequence
  derived and/or modified sequence
gcacaggcggggggcgtaggcgcgcggggcccgccatggctgcgtcggagctctacacaaagtttgccagggtttggatacctgatccagaggaagtctggaagtcagcagagctgctcaaagattataagccaggagataaagtcctcctgcttcacctcgaggaaggaaaggatttggaataccatctagatccaaagaccaaggagctgcctcacttacgaaatcctgacatacttgttggtgaaaatgacctcacagccctcagctatcttcatgagcctgctgtgctccataatctcagagtccgctttattgattccaaacttatttatacgtattgtggtatagtcctagtagctataaatccctatgaacagctgcctatttatggagaagatattattaatgcatacagtggtcagaacatgggtgatatggatccacatatctttgcagtagctgaagaagcttacaagcaaatggccagagatgaacgaaatcagtccatcatcgtaagtggagagtctggggcaggaaaaacagtctcagctaagtatgccatgcgatactttgcaactgtgagtggttctgccagtgaggccaatgtggaggaaaaggtcttggcctccaaccccatcatggagtccattggaaatgctaaaacaaccaggaatgataatagcagccgttttgggaagtatattgagattggttttgataagagatatcgaatcattggtgccaatatgagaacttatcttttagagaaatccagagtggtattccaggcagaagaggagagaaactatcatatcttctatcagctttgtgcctcagcaaagttacctgaatttaaaatgctacgattaggaaatgcagataactttaattacacaaaacaaggaggcagtcctgtgattgaaggagtggatgatgcaaaggagatggcacatactaggcaggcctgcactttgctaggaattagtgaatctcatcaaatgggaattttccgaatacttgctggcatccttcacttaggcaatgttggatttacatcccgagatgcagacagctgcacaatacctcccaagcatgaacctctctgcatcttctgtgaactcatgggtgtggactatgaggagatgtgtcactggctctgccatcggaaactggctactgccacagagacatacatcaagcccatctccaagctgcaggccacaaatgcccgcgatgctttggccaagcacatctatgccaagctctttaactggattgtagataatgtcaatcaggctctccattctgctgtcaaacagcactcttttattggtgtgctagacatttacggatttgaaacatttgagataaatagttttgaacagttttgcataaattatgcaaatgaaaaactacagcaacaattcaatatgcatgtcttcaaattggagcaagaagaatatatgaaggaacaaattccatggacactcatagatttttatgataatcagccttgtattaatcttatagaatcaaaactaggcattctagatttactggatgaggaatgcaagatgcctaaaggcacagatgacacctgggcccaaaaattgtacaacacacatttgaacaaatgtgcactctttgaaaagcctcgtctatcaaacaaagctttcatcatccaacattttgctgacaaagtggaataccagtgtgaaggatttctcgaaaagaataaagacaccgtttttgaagaacaaattaaagttcttaaatcaagcaagtttaagatgctaccagaactatttcaagatgatgagaaggccatcagtccaacttcagccacctcctcagggcgcacacccctcacacgaactcctgcaaagcccaccaaaggcagaccaggccaaatggccaaagagcacaagaaaacagtggggcatcagttcagaaactccctgcacctgcttatggagacactcaatgccactacccctcactatgtgcgctgtatcaagcctaatgacttcaagttcccattcacgtttgatgagaagagggcagtgcagcagctgagagcatgtggtgtcctggaaaccatccgaatcagtgcggccggtttcccctcacggtggacttaccaagaatttttcagccgctaccgtgtcctaatgaagcagaaagatgtgctgagtgacagaaagcaaacatgcaagaatgtgttagagaaactgatactggacaaggacaaataccagtttggtaagacaaagatctttttccgtgccggtcaagtggcctatctagaaaaattgagagctgacaaactgagagctgcctgcatccggatccagaagaccatccgagggtggctgctgagaaagaagtacctacgcatgcggaaggcagccatcaccatgcagagatacgtgcggggctaccaggcccgatgctatgctaagtttctgcgcagaaccaaggcagcaaccatcattcaaaagtactggcgcatgtatgtggtccgcaggaggtacaagattagacgagctgccactatcgttcttcagtcttacttgcgaggcttcttggccagaaataggtatcgcaagatactccgtgagcacaaagcagtcatcattcagaagcgagtccggggctggctggcccgcacacactacaagaggagcatgcatgccatcatctaccttcagtgctgcttcaggcggatgatggccaagcgtgagctaaagaagctcaaaatcgaggctcgctcagtggagcgctataagaagctgcacatcggcatggagaacaagatcatgcagctgcagcgcaaagttgatgagcagaacaaagactacaaatgccttgtggagaaactaaccaatctggaaggaatatacaactctgagactgagaaactacgaagtgacttagaacgtcttcaactaagtgaagaggaagcgaaagttgccactgggcgggtccttagtctgcaggaagaaattgccaagctccggaaagacctggagcaaactcgttcagagaaaaaatgcattgaggaacatgcagatcgatacaaacaagaaacagagcagctggtatcaaatctgaaggaagaaaatactttgctgaagcaagaaaaagaagccctcaatcaccgcatcgtgcagcaggctaaggagatgacagaaactatggagaagaagttagtagaagaaacgaaacaactggaactcgaccttaatgatgaaaggctgagatatcagaaccttctgaatgagttcagtcgcctggaagaaagatatgatgacctcaaggaagagatgacccttatggtgcatgtgcctaagcctggacacaagagaacagactccacccacagcagcaacgagtctgaatatatctttagctctgaaattgcagaaatggaagacattccatcaaggacagaggaaccaagtgagaagaaggtacctctggacatgtcattgttccttaagctccagaagcgggtcacagagctggagcaggagaagcaggtgatgcaggatgagctggaccgcaaggaggagcaggtgctccgcagcaaggccaaggaagaagaaagaccacaaattagaggtgcagaactggaatatgagtcactcaagcgtcaagaactagaatcagaaaacaaaaaactgaagaatgagctaaatgagttgcgcaaggccctcagtgagaaaagtgccccagaggtgaccgccccaggtgcacctgcctaccgtgtcctcatggagcagctgacctctgtgagcgaggagcttgatgtccgcaaggaggaagtcctcatcttaaggtctcaactggtgagccagaaagaggccatccaacccaaggatgacaagaatacaatgacagattccacaatacttttggaagatgtacaaaaaatgaaagataaaggtgaaatagcacaagcatacattggtttgaaagaaacaaataggctcctggaatcccagctgcagtcacagaagaggagccatgagaatgaggccgaggccctccgtggggagatccagagcctgaaggaggagaacaaccgacagcagcagctgctggcccagaacctgcagctgcccccagaggcccgcattgaggccagcctgcagcacgagatcacccggctgaccaacgaaaacttgtattttgaggaattatatgcagatgaccctaagaagtatcaatcatatcggatttccctttacaaacggatgattgatttgatggaacaacttgaaaaacaggataagacggtccgtaaactgaaaaaacaactgaaagtatttgccaaaaaaattggcgaactagaagtgggccagatggagaacatatccccaggacagatcattgatgaacccatccgaccagtcaacattcccaggaaagaaaaggatttccaagggatgctggaatacaagaaggaggatgagcaaaaacttgttaagaacctgattctggaactgaagccacgtggtgtagcagtcaatttgattccaggattaccggcatatatcctgttcatgtgtgttcgacatgctgactacctgaatgatgatcagaaagtaaggtcgttgctaacatcaacaattaacagcatcaaaaaagtattgaagaaaagaggtgatgattttgaaaccgtctccttctggctctctaacacatgccgatttttgcactgcttgaaacagtacagtggagaagagggctttatgaagcacaacacatctcgccagaatgaacactgcctcaccaattttgacctggctgagtatcggcaggtgctgagtgacttggccattcagatctaccagcagctcgtgcgggtgttagagaacatccttcagccaatgattgtctcaggcatgctggaacatgaaacgattcagggcgtgtctggggtgaagcccacagggttgagaaagcgaacctccagtatcgccgatgagggcacctacacactggactccatcctccggcagctcaactccttccactcggtcatgtgtcagcatggcatggaccctgaactgatcaagcaggtggtcaagcagatgttctacatcataggggccatcaccctgaacaaccttctcctgcggaaggacatgtgctcctggagtaaaggcatgcagatcaggtacaatgtcagtcaactggaagaatggctgcgtgacaagaatctgatgaatagtggggctaaagaaaccctggaacctctcattcaggctgctcaacttttgcaagtgaaaaagaaaacagatgatgatgcagaagccatttgttctatgtgcaatgctttaactactgcccagattgtgaaagtgttgaatttgtatactccagttaatgagtttgaagaaagagtctctgtgtcgttcattcgtactatacagatgcgtttacgagacaggaaagactctccccagctgctcatggatgctaaacacatctttcctgtcacctttcctttcaacccatcttccctcgcactagaaaccatccagattccagccagcctcggcctgggcttcatttcacgggtctgaaagtgatgtccaggcaaaaattgacaatacatttcttgcccgaaataagaacccattatttccagtgagttactgaaaatacatttttaaagagaaagtactgattatctcccaaatgagaagtcattaactggaaatctccctagaatactttcatcactttggaaacaaagataggctctttcgtgctgtgttatctttatagcaacactcatccttaaccaactaggtaccgtgagtttacatacaggagaatgatggaaggaagggaggaaggaaaggaggagaaaaatgtgtcttcagctggcagcatttattttaaatccttagcactgagtttgaatggtataaaaagtataacttccatagatgagctgttgttaggaaggcac

SEQ ID NO: 314701 - DNA, 5562 bp, Artificial Sequence
  derived and/or modified sequence
atggccgccagcgagctgtacaccaagttcgcccgggtgtggatccctgatcctgaggaggtgtggaaatcagctgagcttttaaaagattacaaaccaggggacaaagtgctgctacttcacctggaggagggaaaggacctggaataccacctggacccgaagacaaaagagctgccacacttacggaaccctgacatcttggttggggaaaatgacctaaccgccctcagttacctgcacgagcctgcggtcctgcacaatcttagggtacgcttcatcgattcaaagctcatttacacgtattgtggaattgtgcttgtggctattaatccatacgagcaacttccaatctacggtgaagacatcatcaacgcctatagtggacagaatatgggagatatggacccccatatattcgcagtggctgaagaggcttacaagcaaatggcccgggatgagaggaatcagtccattatagtttcaggcgagagcggcgctggcaaaacggtgagcgccaagtatgcaatgagatacttcgctacagtcagtggatcggcatctgaggctaatgttgaggagaaagtcctggcatctaacccgattatggagtctatcggtaatgcaaaaaccacccgtaatgacaattcttcacgttttgggaagtatattgaaatcgggtttgataaacgatacagaataattggagctaatatgcgcacttacctgctggagaaaagccgcgtagtgtttcaggctgaggaagagcggaattaccacatcttctatcaactctgcgcgagtgcgaagcttccagagttcaaaatgctgcgactgggaaatgcagataacttcaattacactaagcaaggaggaagccctgtcatcgagggcgtggatgacgccaaggaaatggcgcacactcggcaggcttgtactctccttggtatttctgagtctcaccaaatggggatattcagaatcctcgcaggaatcctgcatctcggaaatgtaggcttcacttctcgggatgctgattcgtgtaccattccacccaaacacgaaccactctgcattttctgcgagcttatgggcgtggactacgaagaaatgtgccactggctgtgccacaggaagctcgcaaccgccaccgagacatatatcaagcctatctctaagcttcaggccacgaatgcgagggacgcattggcaaaacacatttacgctaagctgtttaactggattgttgacaacgtgaatcaggccctacatagtgccgttaagcagcacagctttataggagtccttgatatttatggtttcgaaacgttcgaaatcaattcatttgagcagttctgtatcaactacgcgaacgagaagctgcagcagcagttcaacatgcatgttttcaagctcgagcaggaggaatacatgaaagagcaaataccctggacactgatagacttctatgataaccaaccatgcatcaacctgatcgagagcaagctaggcatcctggatcttctcgacgaagagtgtaagatgccgaaggggacagacgatacatgggcccagaaattatataatacacatcttaacaaatgcgccctattcgaaaagcctcggttgtcaaataaggcctttataatccaacattttgccgacaaggtggaatatcaatgcgagggtttcctcgagaagaacaaggatacagtctttgaagaacagattaaggtgctgaagtcatccaaatttaaaatgttacccgaactgttccaggatgacgagaaagcaatttcccccacctctgctacaagctccggccgcacaccgttgacccgtacccccgccaagcccactaaaggtagacctgggcaaatggcaaaagaacacaaaaaaacagtggggcaccagttccgcaacagcctgcacttgttgatggagacgctaaacgccaccacaccccattatgtgaggtgcattaaacccaatgattttaagtttccgttcaccttcgacgagaagcgcgccgtccaacagcttagagcatgtggcgtgctcgagactatacggattagtgctgccgggtttccgtcccggtggacataccaggaattcttcagtagatacagggtcctcatgaagcagaaagacgtccttagcgacagaaaacagacatgcaaaaacgttttggaaaaacttatcctagataaagacaagtaccagtttgggaagaccaagatctttttcagagctggtcaagtggcttacctagagaagctgcgagccgacaagcttagggcggcctgtataaggattcaaaaaacgatcagaggctggctactgcggaagaagtacctgaggatgcgtaaggccgcaataactatgcaaaggtacgtccgagggtatcaggccagatgctacgccaaatttttaagaagaactaaagcagccacaattatccagaaatactggagaatgtacgttgtcagaaggcgttataaaattcgacgggccgccaccatcgtactgcagtcttacctgagggggtttctcgcgcggaataggtacaggaagatactccgggagcacaaagccgtcattattcaaaaacgcgtgcgcggctggctagcgaggacccactataaacgcagcatgcatgccattatttacctccagtgctgttttcggagaatgatggcgaaaagggaactgaagaaactcaaaatcgaggccaggtcggtggaaagatataaaaaattacacatcgggatggaaaacaagatcatgcaactgcagcggaaggttgacgagcagaacaaggactataaatgcctggttgagaaactgaccaacttggagggcatttataacagcgaaaccgaaaaactccggtccgatctggagcggcttcagctttcagaggaagaagccaaagttgccacaggaagggtgcttagcttacaagaggaaatcgctaagctgcgcaaggatcttgagcagaccaggtctgagaagaagtgtatcgaggagcacgcagaccgctataagcaagaaacagagcagctggtctcaaatctgaaggaggagaacacactgctgaaacaggaaaaggaggcattgaatcatcgtattgtccagcaggcaaaagaaatgaccgagacaatggagaaaaagttggttgaggagaccaaacagttggagctggatctgaacgacgaaagacttcgctatcagaatctactgaacgaattcagcagactcgaagagcggtatgacgatttaaaagaagagatgaccctgatggtgcacgtgccgaagcctggacataaacgcaccgactccactcatagcagcaacgagtctgagtacatatttagtagcgaaatcgcggaaatggaagatattccaagccgcacagaagaaccatcggaaaaaaaagtcccgctggatatgtctctgtttctgaagttacaaaagcgggttaccgaacttgagcaggaaaagcaggtgatgcaggacgaactggatcgcaaagaagagcaagtgctgagaagtaaagcaaaggaagaggagaggcctcagatcaggggagctgaactcgagtatgagagcctgaaacggcaggaattagagagcgaaaataagaagctaaagaacgaactaaatgagctgcggaaggccctgtctgaaaagtctgctcctgaggtcacggcccccggagccccagcgtacagagttttgatggagcagttaacttcagtatctgaggaacttgacgtgcgcaaagaagaggtcctgattctgcgctcccagctcgtgtctcagaaggaagctattcagccgaaagacgataagaacacaatgaccgacagtacaatattgttggaagacgtgcagaagatgaaggataagggtgagatagcgcaggcgtatatcggcttaaaggaaaccaatagactgttggaaagccagcttcagagccagaagagatctcatgagaatgaagccgaagccctgcgcggtgaaatccagtctttaaaggaggagaacaatagacagcagcagttgctggcccagaatctccagttgcctccggaagcccgtatcgaagcaagcctccagcacgaaataacacgattaacaaatgagaacctgtacttcgaggaactgtatgcagacgatcccaagaagtaccagtcctatcgaattagcctgtacaaacgtatgatagacctgatggagcaactggaaaagcaggataaaacggtaaggaagctgaagaagcagctgaaggtcttcgctaagaagattggtgagttagaggttgggcagatggaaaatatctctccaggccaaatcattgacgaacctatccgacctgtcaacatcccgaggaaggagaaggacttccaagggatgttagaatataagaaagaagacgagcagaagctggttaagaacctgattttagagctgaagccccgaggagtagcggttaatcttatcccaggcttgcccgcctatatcctgttcatgtgtgttcgccatgccgactaccttaatgacgatcaaaaggtgaggtccctcctgacttcaacaattaactccattaagaaagtacttaagaaacggggggacgacttcgaaaccgtgtcattttggctgagtaatacctgccggtttctccattgcttaaaacagtactccggtgaggagggctttatgaagcataacaccagccgacagaatgagcactgtctgacgaatttcgatctggccgaataccgacaggtgctgagcgacctagcaattcaaatttaccagcagcttgtccgggtgttggagaacattctgcaacccatgattgtgagtggcatgcttgagcatgaaacaatccagggcgtgtccggcgtgaagcccactggcctgcgaaagcgtacctcgtcaatcgctgacgaggggacatataccctcgattcaatcctgagacaattgaactctttccactctgtaatgtgtcaacacggtatggaccccgagttaatcaaacaagtagtgaagcagatgttctacatcatcggcgctattaccctaaacaatttgctgctgaggaaggatatgtgcagctggtcaaaggggatgcagattaggtataacgtgtctcagctcgaggagtggttaagggacaagaatctgatgaacagtggggcaaaagagaccctggagcccttgatccaggcagcacagctgctgcaggtcaagaagaagaccgacgacgacgctgaggctatttgcagcatgtgtaacgccctcaccactgcccagatagtcaaggttctgaacctgtacacaccggtgaatgagttcgaggaacgggtctccgtgagcttcatcagaaccatccaaatgcggctacgagataggaaagattccccgcagcttttaatggatgccaagcacatcttccctgtcaccttcccatttaacccgtctagcctcgcgttagagaccattcagatcccagcatctctgggtctgggctttatctcccgggtgtag

SEQ ID NO: 314702 - DNA, 5562 bp, Artificial Sequence
  derived and/or modified sequence
atggctgcctctgaactgtacactaagtttgccagagtatggatccccgaccccgaggaggtgtggaagtccgccgagctccttaaagactacaaaccaggagacaaggtgttactgttgcacctggaagagggaaaagatctagaataccacctagatccaaagaccaaggagcttccgcatcttagaaacccagacatcctggtgggggaaaacgatcttaccgccctgtcatacctgcatgagccagctgtgctccataacctgagagtgcgctttatcgatagtaagctcatctacacttattgtgggatcgtgctggtagccatcaacccttatgagcagctccctatctacggggaggacattatcaatgcttattccggccagaacatgggggatatggacccccatatctttgctgtggcagaggaggcttacaagcagatggcccgtgatgagcggaaccagtctataattgtaagcggtgagtctggggcagggaagaccgtaagcgccaagtacgctatgcgctactttgcaactgtgtccgggtccgcatctgaggccaatgtggaggaaaaggtcctggctagtaatccaatcatggaaagcatcggcaacgccaaaaccacccggaatgacaattctagccgctttggcaagtatatagagatcggcttcgacaagaggtaccggataatcggcgcaaatatgcgcacctatctactggagaaaagccgagttgtgtttcaggccgaggaagaaagaaattatcacatcttctaccagctgtgcgcctctgcaaagctccccgaattcaagatgctccgtctggggaatgcggacaactttaactatacaaaacaagggggttctcctgttatcgagggggtcgatgacgccaaggagatggcgcacactagacaggcctgcacactgctcgggatcagcgagtctcaccaaatgggcattttcaggattctcgctggtatcttgcatcttgggaatgtgggtttcacatctcgcgacgcggacagttgtaccatcccccctaagcacgaaccattgtgcatcttctgcgaactgatgggggttgactatgaggaaatgtgccactggttgtgccaccggaagctggccaccgctacggagacttacatcaagccaattagtaaattgcaggccacaaatgcgcgagatgcccttgccaaacacatctatgctaaactgttcaactggatagtcgataacgtgaaccaggcgctgcacagtgccgtgaaacagcactctttcattggggtgcttgacatatatggattcgaaacttttgagattaactccttcgaacaattttgcatcaactatgctaacgagaagctacagcagcaatttaacatgcatgtgtttaagttagaacaggaggagtacatgaaggagcagataccttggacactaatcgacttctacgacaaccagccttgtatcaacctgatcgagagtaagttgggtatactggatttgcttgacgaggagtgcaagatgccaaaaggcactgatgacacatgggcgcagaagttgtataatacccatttgaataaatgcgcgctgtttgagaagcccaggctgagcaacaaagcattcatcattcagcatttcgctgacaaagttgaatatcagtgtgaggggtttttggaaaaaaacaaggatacagtgttcgaagaacagatcaaagtgttgaaaagtagcaagttcaagatgctgcccgagctatttcaggacgatgagaaggccatttccccaacttctgcgactagctcaggcaggaccccactgactagaacgcccgctaagcctaccaagggtcggccaggccaaatggccaaggaacacaagaagacagtgggacaccagttccgcaatagtttgcacttgctgatggagacactaaatgctaccacaccacattatgtccgctgcatcaaacctaatgatttcaaatttccatttaccttcgacgagaagcgcgctgtgcagcagctgagggcttgcggggttctagaaactatccggattagtgccgctgggttcccaagcaggtggacctatcaagagttcttctctcgctaccgagtgctcatgaagcaaaaagatgttctgagtgaccggaaacagacatgcaaaaacgttctggaaaagctgatactggacaaagacaagtaccagtttggaaaaaccaagatatttttccgagctggccaagtcgcatacctcgagaagttgcgagccgataagctacgtgccgcatgcattaggatccagaagacaatccgaggctggctgcttaggaagaagtatttgcgtatgcgaaaggccgcaataaccatgcagcgttatgtgcgtggctaccaggctcgatgttatgccaagtttctccggagaacaaaagctgccacaattattcaaaagtactggcggatgtacgttgtgcgaagacgatacaaaatcaggagggccgctactatagtgctgcagtcatacctgagaggatttcttgcacgcaatcgataccgtaagatcctgcgggaacataaggcggttatcattcaaaaacgagtcaggggttggctggctcggactcactacaaacgatcgatgcacgcaataatttacctacagtgctgcttccgccgaatgatggctaagcgcgagctgaaaaagctgaagattgaggcacgctccgtggagcgctataagaagttacacataggaatggaaaataaaattatgcagctccaacgcaaggtcgacgagcagaacaaagactacaagtgcttggtggagaaactcacaaatttggagggtatctacaattcagagaccgagaaactgcgctctgacctagaacggctgcagctctctgaggaggaagctaaggtggcaaccgggcgtgtgctttcactccaggaggaaattgccaaactgcgcaaggacctggagcagactagaagcgaaaaaaagtgtatcgaggaacatgcagaccgctacaagcaggaaacagagcaactggtttccaacctcaaggaggaaaacacactgctgaaacaagagaaggaggccctgaaccataggatagtacagcaggccaaggaaatgacagagacaatggaaaaaaagctcgttgaggagaccaaacagctggagttggatctaaatgatgagcgactcaggtaccaaaaccttctaaacgagttttcacggctggaagagaggtacgacgatcttaaggaggaaatgactcttatggttcacgtccccaagcctgggcacaaacgcaccgatagcactcactcttcaaacgagagcgaatacatcttcagttctgagattgcagagatggaagacatcccttctagaactgaggaaccgtctgaaaagaaggtgcctttggacatgtccctttttctcaagcttcagaagagggtgacggaactggagcaggagaagcaggttatgcaggatgaactcgaccggaaggaggaacaggtgctcagatcgaaagcaaaggaggaggagagacctcagatacggggtgctgagctggaatatgagtctttaaaacggcaggagctggagtcagagaataaaaagttgaagaacgagctcaacgaactgaggaaagctctttccgagaagtccgcccctgaggtcacagcacccggtgctcctgcctaccgagtgctgatggaacagctgacctcggtctcagaggagctcgacgtaagaaaggaggaggtcttgattctcagatcacagcttgtcagccaaaaggaagctatccagcctaaggacgacaagaatactatgacagacagcacaatcttgttagaggacgtgcagaaaatgaaggataaaggggaaatcgcgcaggcatatatcgggctcaaagagactaaccgtctgctggagtcccagcttcagtcacaaaaacggtcccacgagaacgaggctgaagcactgcgcggtgaaattcaatcgctgaaagaggaaaataaccgccagcagcagctgctggcacaaaatctccaactgccccctgaggccagaatagaggccagcctgcagcatgaaatcacgagattgactaatgagaatctgtacttcgaagaactctacgccgatgatcccaaaaaataccagtcgtacagaatctcgttgtacaagcggatgattgacctgatggaacagttggagaagcaagacaagacagtacggaagctgaaaaaacagttgaaggtgttcgctaagaagatcggcgagctggaagtaggccagatggagaatataagtcccggtcagatcatcgacgaaccgatccgccctgtaaacatccccaggaaggaaaaggacttccagggcatgttggagtataaaaaagaggacgagcaaaagctagtcaagaacctgatcctggagttaaagcctcgcggagtggcagtaaatctgatccccggactccccgcatacattttgttcatgtgcgtgagacatgccgactacttgaatgatgatcagaaggtccgcagcttactgacaagtacaatcaacagcatcaaaaaagtgctaaaaaagcgaggagacgattttgagaccgtgagcttctggctatctaatacttgtcggttcctgcactgccttaaacagtatagcggggaggaaggtttcatgaaacacaacacatccagacagaacgaacattgcctgacgaacttcgacctggctgagtatagacaagtcctaagcgacctcgcaatacagatataccagcagctggtgagggtcctggaaaatatcctgcagcctatgatcgtgtctggcatgctcgagcacgagaccatccaaggcgtcagcggcgtaaaacccactggactaagaaagcgtacatcctccattgcggatgagggtacttacacgttggattcaattctccgccaactgaatagttttcacagtgtgatgtgccagcacggcatggatcctgaactgattaagcaggttgttaagcaaatgttctacattataggcgcaatcactctgaataatctcctgctccgtaaggatatgtgttcctggagcaaggggatgcaaattaggtacaacgtcagccagctggaggagtggcttagggacaagaatctcatgaacagtggggctaaggaaacccttgagcctctcatccaggcagcccagctgctccaggtcaaaaaaaagaccgatgacgacgcggaggctatttgtagtatgtgtaatgctttaacaaccgctcagatcgtgaaggtgctgaatctgtacacccctgttaacgaatttgaagagagagtgtctgtcagttttatcagaacaatccaaatgagacttagggaccgaaaagatagtccacagttactaatggacgccaagcacatttttcccgtcacgtttccatttaacccatcttccctggctctagagaccattcagatacccgcaagcctgggactgggcttcatctcgcgcgtctag

SEQ ID NO: 314703 - DNA, 5562 bp, Artificial Sequence
  derived and/or modified sequence
atggccgccagcgagctgtacaccaagttcgccagagtgtggatccccgaccccgaggaggtgtggaagagcgccgagctgctgaaggactacaagcccggcgacaaggtgctgctgctgcacctggaggagggcaaggacctggagtaccacctggaccccaagaccaaggagctgccccacctgagaaaccccgacatcctggtgggcgagaacgacctgaccgccctgagctacctgcacgagcccgccgtgctgcacaacctgagagtgagattcatcgacagcaagctgatctacacctactgcggcatcgtgctggtggccatcaacccctacgagcagctgcccatctacggcgaggacatcatcaacgcctacagcggccagaacatgggcgacatggacccccacatcttcgccgtggccgaggaggcctacaagcagatggccagagacgagagaaaccagagcatcatcgtgagcggcgagagcggcgccggcaagaccgtgagcgccaagtacgccatgagatacttcgccaccgtgagcggcagcgccagcgaggccaacgtggaggagaaggtgctggccagcaaccccatcatggagagcatcggcaacgccaagaccaccagaaacgacaacagcagcagattcggcaagtacatcgagatcggcttcgacaagagatacagaatcatcggcgccaacatgagaacctacctgctggagaagagcagagtggtgttccaggccgaggaggagagaaactaccacatcttctaccagctgtgcgccagcgccaagctgcccgagttcaagatgctgagactgggcaacgccgacaacttcaactacaccaagcagggcggcagccccgtgatcgagggcgtggacgacgccaaggagatggcccacaccagacaggcctgcaccctgctgggcatcagcgagagccaccagatgggcatcttcagaatcctggccggcatcctgcacctgggcaacgtgggcttcaccagcagagacgccgacagctgcaccatcccccccaagcacgagcccctgtgcatcttctgcgagctgatgggcgtggactacgaggagatgtgccactggctgtgccacagaaagctggccaccgccaccgagacctacatcaagcccatcagcaagctgcaggccaccaacgccagagacgccctggccaagcacatctacgccaagctgttcaactggatcgtggacaacgtgaaccaggccctgcacagcgccgtgaagcagcacagcttcatcggcgtgctggacatctacggcttcgagaccttcgagatcaacagcttcgagcagttctgcatcaactacgccaacgagaagctgcagcagcagttcaacatgcacgtgttcaagctggagcaggaggagtacatgaaggagcagatcccctggaccctgatcgacttctacgacaaccagccctgcatcaacctgatcgagagcaagctgggcatcctggacctgctggacgaggagtgcaagatgcccaagggcaccgacgacacctgggcccagaagctgtacaacacccacctgaacaagtgcgccctgttcgagaagcccagactgagcaacaaggccttcatcatccagcacttcgccgacaaggtggagtaccagtgcgagggcttcctggagaagaacaaggacaccgtgttcgaggagcagatcaaggtgctgaagagcagcaagttcaagatgctgcccgagctgttccaggacgacgagaaggccatcagccccaccagcgccaccagcagcggcagaacccccctgaccagaacccccgccaagcccaccaagggcagacccggccagatggccaaggagcacaagaagaccgtgggccaccagttcagaaacagcctgcacctgctgatggagaccctgaacgccaccaccccccactacgtgagatgcatcaagcccaacgacttcaagttccccttcaccttcgacgagaagagagccgtgcagcagctgagagcctgcggcgtgctggagaccatcagaatcagcgccgccggcttccccagcagatggacctaccaggagttcttcagcagatacagagtgctgatgaagcagaaggacgtgctgagcgacagaaagcagacctgcaagaacgtgctggagaagctgatcctggacaaggacaagtaccagttcggcaagaccaagatcttcttcagagccggccaggtggcctacctggagaagctgagagccgacaagctgagagccgcctgcatcagaatccagaagaccatcagaggctggctgctgagaaagaagtacctgagaatgagaaaggccgccatcaccatgcagagatacgtgagaggctaccaggccagatgctacgccaagttcctgagaagaaccaaggccgccaccatcatccagaagtactggagaatgtacgtggtgagaagaagatacaagatcagaagagccgccaccatcgtgctgcagagctacctgagaggcttcctggccagaaacagatacagaaagatcctgagagagcacaaggccgtgatcatccagaagagagtgagaggctggctggccagaacccactacaagagaagcatgcacgccatcatctacctgcagtgctgcttcagaagaatgatggccaagagagagctgaagaagctgaagatcgaggccagaagcgtggagagatacaagaagctgcacatcggcatggagaacaagatcatgcagctgcagagaaaggtggacgagcagaacaaggactacaagtgcctggtggagaagctgaccaacctggagggcatctacaacagcgagaccgagaagctgagaagcgacctggagagactgcagctgagcgaggaggaggccaaggtggccaccggcagagtgctgagcctgcaggaggagatcgccaagctgagaaaggacctggagcagaccagaagcgagaagaagtgcatcgaggagcacgccgacagatacaagcaggagaccgagcagctggtgagcaacctgaaggaggagaacaccctgctgaagcaggagaaggaggccctgaaccacagaatcgtgcagcaggccaaggagatgaccgagaccatggagaagaagctggtggaggagaccaagcagctggagctggacctgaacgacgagagactgagataccagaacctgctgaacgagttcagcagactggaggagagatacgacgacctgaaggaggagatgaccctgatggtgcacgtgcccaagcccggccacaagagaaccgacagcacccacagcagcaacgagagcgagtacatcttcagcagcgagatcgccgagatggaggacatccccagcagaaccgaggagcccagcgagaagaaggtgcccctggacatgagcctgttcctgaagctgcagaagagagtgaccgagctggagcaggagaagcaggtgatgcaggacgagctggacagaaaggaggagcaggtgctgagaagcaaggccaaggaggaggagagaccccagatcagaggcgccgagctggagtacgagagcctgaagagacaggagctggagagcgagaacaagaagctgaagaacgagctgaacgagctgagaaaggccctgagcgagaagagcgcccccgaggtgaccgcccccggcgcccccgcctacagagtgctgatggagcagctgaccagcgtgagcgaggagctggacgtgagaaaggaggaggtgctgatcctgagaagccagctggtgagccagaaggaggccatccagcccaaggacgacaagaacaccatgaccgacagcaccatcctgctggaggacgtgcagaagatgaaggacaagggcgagatcgcccaggcctacatcggcctgaaggagaccaacagactgctggagagccagctgcagagccagaagagaagccacgagaacgaggccgaggccctgagaggcgagatccagagcctgaaggaggagaacaacagacagcagcagctgctggcccagaacctgcagctgccccccgaggccagaatcgaggccagcctgcagcacgagatcaccagactgaccaacgagaacctgtacttcgaggagctgtacgccgacgaccccaagaagtaccagagctacagaatcagcctgtacaagagaatgatcgacctgatggagcagctggagaagcaggacaagaccgtgagaaagctgaagaagcagctgaaggtgttcgccaagaagatcggcgagctggaggtgggccagatggagaacatcagccccggccagatcatcgacgagcccatcagacccgtgaacatccccagaaaggagaaggacttccagggcatgctggagtacaagaaggaggacgagcagaagctggtgaagaacctgatcctggagctgaagcccagaggcgtggccgtgaacctgatccccggcctgcccgcctacatcctgttcatgtgcgtgagacacgccgactacctgaacgacgaccagaaggtgagaagcctgctgaccagcaccatcaacagcatcaagaaggtgctgaagaagagaggcgacgacttcgagaccgtgagcttctggctgagcaacacctgcagattcctgcactgcctgaagcagtacagcggcgaggagggcttcatgaagcacaacaccagcagacagaacgagcactgcctgaccaacttcgacctggccgagtacagacaggtgctgagcgacctggccatccagatctaccagcagctggtgagagtgctggagaacatcctgcagcccatgatcgtgagcggcatgctggagcacgagaccatccagggcgtgagcggcgtgaagcccaccggcctgagaaagagaaccagcagcatcgccgacgagggcacctacaccctggacagcatcctgagacagctgaacagcttccacagcgtgatgtgccagcacggcatggaccccgagctgatcaagcaggtggtgaagcagatgttctacatcatcggcgccatcaccctgaacaacctgctgctgagaaaggacatgtgcagctggagcaagggcatgcagatcagatacaacgtgagccagctggaggagtggctgagagacaagaacctgatgaacagcggcgccaaggagaccctggagcccctgatccaggccgcccagctgctgcaggtgaagaagaagaccgacgacgacgccgaggccatctgcagcatgtgcaacgccctgaccaccgcccagatcgtgaaggtgctgaacctgtacacccccgtgaacgagttcgaggagagagtgagcgtgagcttcatcagaaccatccagatgagactgagagacagaaaggacagcccccagctgctgatggacgccaagcacatcttccccgtgaccttccccttcaaccccagcagcctggccctggagaccatccagatccccgccagcctgggcctgggcttcatcagcagagtgtag

SEQ ID NO: 314704 - protein, 1852 aa, Artificial Sequence
  derived and/or modified sequence
MAASELYTKFARVWIPDPEEVWKSAELLKDYKPGDKVLLLHLEEGKDLEYHLDPKTKELPHLRNPDILVGENDLTALSYLHEPAVLHNLRVRFIDSKLIYTYCGIVLVAINPYEQLPIYGEDIINAYSGQNMGDMDPHIFAVAEEAYKQMARDERNQSIIVSGESGAGKTVSAKYAMRYFATVSGSASEANVEEKVLASNPIMESIGNAKTTRNDNSSRFGKYIEIGFDKRYRIIGANMRTYLLEKSRVVFQAEEERNYHIFYQLCASAKLPEFKMLRLGNADNFNYTKQGGSPVIEGVDDAKEMAHTRQACTLLGISESHQMGIFRILAGILHLGNVGFTSRDADSCTIPPKHEPLCIFCELMGVDYEEMCHWLCHRKLATATETYIKPISKLQATNARDALAKHIYAKLFNWIVDNVNQALHSAVKQHSFIGVLDIYGFETFEINSFEQFCINYANEKLQQQFNMHVFKLEQEEYMKEQIPWTLIDFYDNQPCINLIESKLGILDLLDEECKMPKGTDDTWAQKLYNTHLNKCALFEKPRLSNKAFIIQHFADKVEYQCEGFLEKNKDTVFEEQIKVLKSSKFKMLPELFQDDEKAISPTSATSSGRTPLTRTPAKPTKGRPGQMAKEHKKTVGHQFRNSLHLLMETLNATTPHYVRCIKPNDFKFPFTFDEKRAVQQLRACGVLETIRISAAGFPSRWTYQEFFSRYRVLMKQKDVLSDRKQTCKNVLEKLILDKDKYQFGKTKIFFRAGQVAYLEKLRADKLRAACIRIQKTIRGWLLRKKYLRMRKAAITMQRYVRGYQARCYAKFLRRTKAATIIQKYWRMYVVRRRYKIRRAATIVLQSYLRGFLARNRYRKILREHKAVIIQKRVRGWLARTHYKRSMHAIIYLQCCFRRMMAKRELKKLKIEARSVERYKKLHIGMENKIMQLQRKVDEQNKDYKCLVEKLTNLEGIYNSETEKLRSDLERLQLSEEEAKVATGRVLSLQEEIAKLRKDLEQTRSEKKCIEEHADRYKQETEQLVSNLKEENTLLKQEKEALNHRIVQQAKEMTETMEKKLVEETKQLELDLNDERLRYQNLLNEFSRLEERYDDLKEEMTLMVHVPKPGHKRTDSTHSSNESEYIFSSEIAEMEDIPSRTEEPSEKKVPLDMSLFLKLQKRVTELEQEKQVMQDELDRKEEQVLRSKAKEEERPQIRGAELEYESLKRQELESENKKLKNELNELRKALSEKSAPEVTAPGAPAYRVLMEQLTSVSEELDVRKEEVLILRSQLVSQKEAIQPKNTMTDSTILLEDVQKMKDKGEIAQAYIGLKETNRSSALDYHELNEDGELWLVYEGLKQANRLLESQLQSQKRSHENEAEALRGEIQSLKEENNRQQQLLAQNLQLPPEARIEASLQHEITRLTNENLDLMEQLEKQDKTVRKLKKQLKVFAKKIGELEVGQMENISPGQIIDEPIRPVNIPRKEKDFQGMLEYKKEDEQKLVKNLILELKPRGVAVNLIPGLPAYILFMCVRHADYLNDDQKVRSLLTSTINSIKKVLKKRGDDFETVSFWLSNTCRFLHCLKQYSGEEGFMKHNTSRQNEHCLTNFDLAEYRQVLSDLAIQIYQQLVRVLENILQPMIVSGMLEHETIQGVSGVKPTGLRKRTSSIADEGTYTLDSILRQLNSFHSVMCQHGMDPELIKQVVKQMFYIIGAITLNNLLLRKDMCSWSKGMQIRYNVSQLEEWLRDKNLMNSGAKETLEPLIQAAQLLQVKKKTDDDAEAICSMCNALTTAQIVKVLNLYTPVNEFEERVSVSFIRTIQMRLRDRKDSPQLLMDAKHIFPVTFPFNPSSLALETIQIPASLGLGFISRV

SEQ ID NO: 314705 - protein, 1458 aa, Artificial Sequence
  derived and/or modified sequence
MCHWLCHRKLATATETYIKPISKLQATNARDALAKHIYAKLFNWIVDNVNQALHSAVKQHSFIGVLDIYGFETFEINSFEQFCINYANEKLQQQFNMHVFKLEQEEYMKEQIPWTLIDFYDNQPCINLIESKLGILDLLDEECKMPKGTDDTWAQKLYNTHLNKCALFEKPRLSNKAFIIQHFADKVEYQCEGFLEKNKDTVFEEQIKVLKSSKFKMLPELFQDDEKAISPTSATSSGRTPLTRTPAKPTKGRPGQMAKEHKKTVGHQFRNSLHLLMETLNATTPHYVRCIKPNDFKFPFTFDEKRAVQQLRACGVLETIRISAAGFPSRWTYQEFFSRYRVLMKQKDVLSDRKQTCKNVLEKLILDKDKYQFGKTKIFFRAGQVAYLEKLRADKLRAACIRIQKTIRGWLLRKKYLRMRKAAITMQRYVRGYQARCYAKFLRRTKAATIIQKYWRMYVVRRRYKIRRAATIVLQSYLRGFLARNRYRKILREHKAVIIQKRVRGWLARTHYKRSMHAIIYLQCCFRRMMAKRELKKLKIEARSVERYKKLHIGMENKIMQLQRKVDEQNKDYKCLVEKLTNLEGIYNSETEKLRSDLERLQLSEEEAKVATGRVLSLQEEIAKLRKDLEQTRSEKKCIEEHADRYKQETEQLVSNLKEENTLLKQEKEALNHRIVQQAKEMTETMEKKLVEETKQLELDLNDERLRYQNLLNEFSRLEERYDDLKEEMTLMVHVPKPGHKRTDSTHSSNESEYIFSSEIAEMEDIPSRTEEPSEKKVPLDMSLFLKLQKRVTELEQEKQVMQDELDRKEEQVLRSKAKEEERPQIRGAELEYESLKRQELESENKKLKNELNELRKALSEKSAPEVTAPGAPAYRVLMEQLTSVSEELDVRKEEVLILRSQLVSQKEAIQPKLHENTMTDSTILLEDVQKMKDKGEIAQAYIGLKETNRLLESQLQSQKRSHENEAEALRGEIQSLKEENNRQQQLLAQNLQLPPEARIEASLQHEITRLTNENLDLMEQLEKQDKTVRKLKKQLKVFAKKIGELEVGQMENISPGQIIDEPIRPVNIPRKEKDFQGMLEYKKEDEQKLVKNLILELKPRGVAVNLIPGLPAYILFMCVRHADYLNDDQKVRSLLTSTINSIKKVLKKRGDDFETVSFWLSNTCRFLHCLKQYSGEEGFMKHNTSRQNEHCLTNFDLAEYRQVLSDLAIQIYQQLVRVLENILQPMIVSGMLEHETIQGVSGVKPTGLRKRTSSIADEGTYTLDSILRQLNSFHSVMCQHGMDPELIKQVVKQMFYIIGAITLNNLLLRKDMCSWSKGMQIRYNVSQLEEWLRDKNLMNSGAKETLEPLIQAAQLLQVKKKTDDDAEAICSMCNALTTAQIVKVLNLYTPVNEFEERVSVSFIRTIQMRLRDRKDSPQLLMDAKHIFPVTFPFNPSSLALETIQIPASLGLGFISRV

SEQ ID NO: 314706 - protein, 1129 aa, Artificial Sequence
  derived and/or modified sequence
MNINDGGRRRFEDNEHTLRIYPGAISEGTIYCPIPARKNSTAAEVIESLINKLHLDKTKCYVLAEVKEFGGEEWILNPTDCPVQRMMLWPRMALENRLSGEDYRFLLREKNLDGSIHYGSLQSWLRVTEERRRMMERGFLPQPQQKDFDDLCSLPDLNEKTLLENLRNRFKHEKIYTYVGSILIVINPFKFLPIYNPKYVKMYDNHQLGKLEPHIYAVADVAYHAMLQRKKNQCIVISGESGSGKTQSTNFLIHHLTALSQKGFASGVEQIILGAGPVLEAFGNAKTAHNNNSSRFGKFIQVNYQETGTVLGAYVEKYLLEKSRLVYQEHNERNYHVFYYLLAGASEDERSAFHLKQPEEYHYLNQDCFTVEGEDLRHDFERLQLAMEMVGFLPKTRRQIFSLLSAILHLGNICYKKKTYRDDSIDICNPEVLPIVSELLEVKEEMLFEALVTRKTVTVGEKLILPYKLAEAVTVRNSMAKSLYSALFDWIVFRINHALLNSKDLEHNTKTLSIGVLDIFGFEDYENNSFEQFCINFANERLQHYFNQHIFKLEQEEYRTEGISWHNIDYIDNTCCINLISKKPTGLLHLLDEESNFPQATNQTLLDKFKHQHEDNSYIEFPAVMEPAFIIKHYAGKVKYGVKDFREKNTDHMRPDIVALLRSSKNAFISGMIGIDPVAVFRWAILRAFFRAMVAFREAGKRNIHRKTGHDDTAPCAILKSMDSFSFLQHPVHQRSLEILQRCKEEKYSITRKNPRTPLSDLQGMNALNEKNQHDTFDIAWNGRTGIRQSRLSSGTSLLDKDGIFANSTSSKLLERAHGILTRNKNFKSKPALPKHLLEVNSLKHLTRLTLQDRITKSLLHLHKKKKPPSISAQFQASLSKLMETLGQAEPYFVKCIRSNAEKLPLRFSDVLVLRQLRYTGMLETVRIRQSGYSSKYSFQDFVSHFHVLLPRNIIPSKFNIQDFFRKINLNPDNYQVGKTMVFLKEQERQHLQDLLHQEVLRRIILLQRWFRVLLCRQHFLHLRQASVIIQRFWRNYLNQKQVRDAAVQKDAFVMASAAALLQASWRAHLERQRYLELRAAAIVIQQKWRDYYRRRHMAAICIQARWKAYRESKRYQEQRKNYPFAINM

SEQ ID NO: 314707 - DNA, 3390 bp, Artificial Sequence
  derived and/or modified sequence
atgaacataaacgacggagggcgcagaagattcgaagacaacgagcataccctccggatctatccaggagccattagtgaaggcactatctattgccctatcccagcccggaaaaacagcactgctgcggaggtgatcgagagcctgatcaacaaattgcacctggacaaaaccaagtgttatgttctcgccgaagtgaaggagttcggtggagaggagtggatattgaatccaactgactgcccagttcagcgcatgatgctatggccgaggatggctctggaaaaccggctgagtggcgaagactacagattcttactgagagagaaaaatcttgacggctcgattcattacgggtccctccagtcctggctgagggtgactgaggaacgccgtagaatgatggagcgaggcttcctgccacagccccagcagaaggactttgacgacctgtgctcactgcctgacctgaatgaaaagactcttttggagaaccttcgaaaccggttcaaacatgagaaaatatacacgtatgtgggcagtatcctgattgtgataaacccgttcaaattccttccaatatataaccctaaatacgtgaagatgtacgacaatcaccagttagggaagctcgagccccacatctacgctgtggctgacgttgcctaccacgctatgctgcagcggaaaaagaatcagtgcattgtgatctccggagaaagcgggtcgggcaaaacccagagtaccaatttcctgatacaccatctcacggctctgtcacagaagggttttgctagcggcgtcgagcagatcatcttaggggctggtccggttctcgaagcttttggaaacgccaagactgcacataacaataattccagccgttttggtaagtttatccaggtgaactaccaggaaaccgggaccgtgctgggggcctacgtggaaaagtacctgctggagaagtccagactcgtctatcaggagcataatgaacgaaattaccatgtattctactatctcctagccggagcgtccgaggacgagcggagcgccttccatcttaagcaacctgaggagtaccactacttaaatcaggattgctttacagtggaaggagaggatctcagacacgatttcgaacggctccagctcgctatggagatggtgggcttcctccccaagacccgtagacagatttttagcttgctgtccgctattctgcacctggggaatatttgctataaaaaaaagacttacagggacgactctatcgatatctgcaatccggaggtcctgcctatagtctcagaactgctcgaggtgaaagaggaaatgctgtttgaggcccttgtgacacgaaagaccgtgaccgtgggcgaaaagctcatcctgccgtataaactggccgaagcagtgaccgtgcggaacagcatggcgaagtcactgtatagcgccctttttgactggatagtcttcagaataaaccacgctcttctgaacagtaaagatttagaacacaataccaagaccctttctatcggcgtcctcgacatcttcggctttgaggactatgaaaataatagttttgaacaattctgcattaattttgccaacgagaggttacaacactacttcaatcagcatatcttcaagcttgaacaagaagagtaccgaaccgaaggaatctcttggcataatattgattacatagataacacatgctgcattaatttgatttccaagaagcctacggggctactgcacctgcttgatgaggagtctaactttccacaggccaccaatcagacgctgcttgataaattcaaacatcaacacgaagataactcttacatcgagttccctgccgtgatggagcccgccttcattattaagcattatgctgggaaggtcaagtatggagtcaaagattttcgagaaaaaaacacagaccacatgcgccctgacatcgtcgccctcttgagatcctctaagaatgccttcattagcgggatgatcggaatagaccctgtggccgtgttcaggtgggcgatcctgcgggcattttttcgcgcaatggtcgcttttcgtgaagccggtaagcgcaacatccacaggaaaactggccatgatgatacagctccttgtgctatattgaagtctatggactctttttctttcctacagcaccccgtccatcaaaggtctttggaaatcctgcagagatgcaaagaggaaaagtactcgattactcgaaaaaatcctcgcacccccctctctgacttacaaggaatgaatgccctgaatgagaagaatcagcatgacacgtttgacatcgcctggaatggtcgcaccggcatcaggcagtcccgcctgtcttcaggaacaagcctccttgacaaagatggcatttttgccaactctacaagtagtaaattgcttgaacgggcacacgggatcttgactcgcaacaagaattttaaaagcaaacctgccttgcccaaacacttgctggaagtgaactccttaaaacacctgaccaggctgaccctacaggataggatcacgaaatctctcttacatctgcataaaaaaaagaaacccccatctatatcagctcaattccaggcttccttatctaagctaatggagactctgggccaggccgagccgtacttcgtgaagtgtattaggtccaatgccgagaagttacctctcagattcagcgatgtgttggtgctcaggcaacttcggtatacaggtatgttagaaaccgtgaggatcagacagtcgggctacagctccaaatacagttttcaggactttgtgtctcactttcatgtgttgctcccccgcaatataatccccagcaaatttaatatacaagactttttccggaaaatcaatttgaatcctgacaactatcaggtcggcaaaacaatggtattcctcaaagaacaggagcggcaacatttgcaggatttactccatcaggaggtcctgaggcggattattctgcttcaacgctggtttcgggttttgttatgcagacagcattttctgcaccttcgacaggcttctgtcatcatccagaggttttggagaaactatctgaaccaaaaacaggtgcgcgatgctgcagtgcagaaggatgccttcgtaatggccagtgctgcggcgcttcttcaggcttcttggagggcacaccttgaacgccaaaggtatcttgagctgcgggccgcggccatagtcatccagcaaaagtggagagactattacagacggcgtcacatggcagccatctgcatacaggccaggtggaaggcttatcgtgagtcaaaacgttaccaggaacagagaaagaattatccctttgctattaatatgtag

SEQ ID NO: 314708 - DNA, 3390 bp, Artificial Sequence
  derived and/or modified sequence
atgaacatcaatgatggcggcagaagaagatttgaggacaatgagcacaccctgcgcatctacccaggggccatcagcgagggcaccatctactgccccatcccagccaggaagaacagcacagctgctgaggtgattgagagcctcatcaacaagctgcacctggacaagaccaagtgctacgtgctggccgaggtgaaggagtttggaggagaggagtggatcctgaaccccacagactgccctgtgcagaggatgatgctgtggcccaggatggccctggagaaccggctgtctggagaggactaccgcttcctgctgcgggagaagaacctggatggcagcatccactacggcagcctgcagagctggctgcgggtgacagaggagaggaggaggatgatggagcggggcttcctgccccagccccagcagaaggactttgatgacctgtgcagcctgcctgacctgaatgagaagaccctgctggagaacctgaggaaccgcttcaagcatgagaagatctacacctacgtgggcagcatcctgattgtcatcaaccccttcaagttcctgcccatctacaaccccaagtatgtgaagatgtatgacaaccaccagctgggcaagctggagccccacatctatgctgtggctgatgtggcctaccacgccatgctgcagaggaagaagaaccagtgcatcgtcatcagcggggagagcggcagcggcaagacccagagcaccaacttcctgatccaccacctgacagccctgagccagaagggctttgccagcggcgtggagcagatcatcctgggcgccggccctgtgctggaggcctttggaaatgccaagacagcccacaacaacaacagcagcagatttgggaagttcatccaggtgaactaccaggagactggaacagtgctgggcgcctacgtggagaagtacctgctggagaagagccggctggtgtaccaggagcacaatgaaagaaactaccacgtgttctactacctgctggccggggcctctgaagatgagaggtctgccttccacctgaagcagcctgaggagtaccactacctgaaccaggactgcttcaccgtggagggggaggacctgcggcatgactttgagcggctgcagctggccatggagatggtgggcttcctgcccaagacccggcggcagatcttcagcctgctgagcgccatcctgcacctgggcaacatctgctacaagaagaagacctacagagatgacagcattgacatctgcaaccctgaggtgctgcccatcgtgtctgagctgctggaggtgaaggaggagatgctgtttgaggccctggtgaccaggaagacagtgacagtgggggagaagctgatcctgccctacaagctggccgaggccgtgacagtgaggaacagcatggccaagagcctgtacagcgccctgtttgactggatcgtgttccgcatcaaccacgccctgctgaacagcaaggacctggagcacaacaccaagaccctgagcattggagtgctggacatcttcggctttgaagattatgagaacaacagctttgagcagttctgcatcaactttgccaatgaaaggctgcagcactacttcaaccagcacatcttcaagctggagcaggaggagtacagaacagagggcatctcctggcacaacatcgactacatcgacaacacctgctgcatcaacctgatcagcaagaagcccaccggcctgctgcacctgctggatgaggagagcaacttcccccaggccaccaaccagaccctgctggacaagttcaagcaccagcacgaggacaacagctacatcgagttccctgctgtgatggagcccgccttcatcatcaagcactacgccggcaaggtgaagtatggagtgaaggacttccgggagaagaacacagaccacatgaggccagacatcgtggccctgctgcggagcagcaagaatgccttcatcagcggcatgattggaattgatcctgtggccgtgttccgctgggccatcctgcgggccttcttccgggccatggtggccttccgggaggccggcaagaggaacatccacaggaagacaggccatgatgacacagccccctgtgccatcctgaagtccatggacagcttctccttcctgcagcaccctgtgcaccagaggagcctggagatcctgcagcgctgcaaggaggagaagtacagcatcaccaggaagaaccccaggacccccctgagtgacctgcagggcatgaatgccctgaatgagaagaaccagcacgacacctttgatattgcctggaatggccgcacaggcatccggcagagccggctgagcagcggcaccagcctgctggacaaggatggcatctttgccaacagcaccagcagcaagctgctggagcgggcccacggcatcctgaccaggaacaagaacttcaagagcaagccagccctgcccaagcacctgctggaggtgaacagcctgaagcacctgacccggctgaccctgcaggaccgcatcaccaagagcctgctgcacctgcacaagaagaagaagccacccagcatcagcgcccagttccaggccagcctgagcaagctgatggagaccctgggccaggccgagccctactttgtgaagtgcatccgcagcaatgctgagaagctgcccctgcgcttcagtgatgtgctggtgctgcggcagctgcgctacacaggcatgctggagaccgtgcgcatccggcagagcggctacagcagcaagtacagcttccaggactttgtgagccacttccacgtgctgctgcccaggaacatcatccccagcaagttcaacatccaggacttcttcaggaagatcaacctgaacccagacaactaccaggtgggcaagaccatggtgttcctgaaggagcaggagcggcagcacctgcaggacctgctgcaccaggaggtgctgcggcgcatcatcctgctgcagcgctggttccgggtgctgctgtgccggcagcacttcctgcacctgcggcaggccagcgtcatcatccagcgcttctggaggaactacctgaaccagaagcaggtgagagatgctgctgtgcagaaggatgcctttgtgatggccagcgctgctgccctgctgcaggcctcctggagggcccacctggagcggcagcgctacctggagctgcgggctgctgccatcgtcatccagcagaagtggagggactactacagaagaagacacatggccgccatctgcatccaggcccgctggaaggcctaccgggagagcaagcgctaccaggagcagaggaagaactacccctttgccatcaacatgtag

SEQ ID NO: 314709 - DNA, 3863 bp, Artificial Sequence
  derived and/or modified sequence
gcgcgaccgaagcggataagggacgcggcggcggttggctgtgtctgttgagagagtacaggacagcccggactgcgagaggcggcggcggaggcagtagttgcaccggcagaggcggccgctggcagcggttgaggcggcggtccaacgcgtgctctctgggcggggtgcggcgggggatgtgcctgctcaggccgggcggagtctctctgacagggcgggggatgcgccgcggccgctcgcccggaccctgaggctgctgggcccaccctcccggaaccgtccgaccctcggtggcctcggcctcttctgccatctccggtcctaccctggggcggagggtggaaggcagcttccgtcgaagaggagggggctgcggtggccaccgcggcggagcccgagttattttaccaagaaaatggtttgcacgactttgaacatatactatccatgctgatgggacaggatccaatatgaatataaatgatggaggaagacgacgctttgaagataatgaacatacattacggatatatcctggggctatttcagaagggacaatctactgtccgattcctgccagaaaaaactccacagctgctgaggtgattgagtctcttataaacaaacttcatcttgacaaaacaaaatgttatgttctagcagaggtaaaggaatttggtggagaagaatggattctcaatccaacagattgtccagttcagcgaatgatgctgtggccccgaatggctctggaaaatcgcttaagtggagaggactaccgcttccttctgagagagaaaaaccttgatggatcaatccattatggtagcctgcagtcatggctacgggtaacagaagaacgtcgcaggatgatggaacggggttttcttccacagcctcaacagaaagactttgatgatttatgtagtttacctgatttgaatgagaaaactctcttagaaaacctacgaaatcgctttaagcatgaaaaaatttatacctatgttggcagtattctaatagttattaacccattcaagtttcttcctatttataaccccaaatatgtcaaaatgtatgataaccaccaactgggaaaacttgagccccacatttatgctgtggctgatgtagcttatcatgccatgcttcagcgcaaaaagaatcagtgcatcgtgatttcaggagagagtggttctgggaagactcaaagcacaaactttcttattcaccaccttactgctctcagtcagaaaggatttgccagtggagtagaacagattattcttggagctggaccagtacttgaggcctttggaaatgcaaagacagctcataataacaattcaagtcgttttgggaagtttattcaagtaaattaccaggaaacaggcactgtacttggtgcctatgttgaaaaatatctactggagaagtccagactcgtttatcaggagcataatgaacggaactatcatgtattctattacctcctggcaggagcaagtgaagatgagagatcagcattccatcttaagcaaccagaggaatatcattatctcaatcaggattgcttcacggtggaaggagaagatttgagacatgactttgagcgcctacaacttgccatggaaatggtaggatttcttcccaagacacgaagacagattttctctcttctctcagccatactacatttgggtaatatctgttacaaaaagaagacataccgggatgactccattgatatctgtaatcctgaagttctgcctattgtctcagaattattagaggttaaagaagagatgctatttgaagcattagttacaaggaagacggtgacagtgggagaaaagcttattttgccatacaagttggcagaggctgtgacagtgaggaactccatggctaagtctctgtatagtgccctgtttgactggatagtttttcgaattaatcatgcacttctgaatagtaaagatttagagcataataccaagacattgtctattggtgttcttgatatttttgggtttgaagattatgaaaataacagctttgaacagttctgtattaattttgctaatgaacgtttacagcactactttaatcagcatatctttaaattggaacaagaggaatatagaactgaaggtatcagctggcacaacatagattacattgataatacctgctgcataaatcttattagcaaaaaaccaacaggactgcttcatcttttggatgaagaaagcaactttccacaggctacaaatcaaacattgctagacaagtttaagcatcaacatgaagataattcttacatcgaatttccagccgtgatggagcctgctttcattataaaacattatgctggaaaagtaaaatatggggtaaaggatttccgggaaaaaaatacagatcatatgcgcccagacattgtagctcttctgagaagcagcaagaatgcatttatctctgggatgattggaattgatcctgtagctgttttccgatgggcaattctccgagcttttttcagagccatggttgctttcagggaagctgggaaaagaaacattcacagaaaaactggacatgatgatacagcgccatgtgcaattttgaaaagtatggatagttttagctttctccaacacccagtccaccagaggagcttagagattctgcagagatgcaaggaagagaagtacagtataacccggaaaaatcccagaacacctctttctgatctccagggcatgaatgctctaaatgaaaaaaaccaacatgatacatttgatattgcctggaatggcagaactgggattcgccagagcagactatcaagtggcacctccttgcttgataaagatggaatatttgctaattcaactagcagcaaactcctggagagagcccatggaattctcacgagaaacaaaaatttcaaatccaagcctgcccttccaaagcacttgctagaagtaaattctttaaagcacctgacaagactgacactacaagatcgcattaccaagtctcttcttcatttacacaagaagaaaaaacctcccagcatcagtgcccagtttcaggcatcattaagcaagctaatggaaacacttggtcaagcagaaccatattttgtaaaatgcattcgctctaatgctgaaaagctgcccttaaggttcagtgatgtcttggtacttagacagcttcgatacaccgggatgctggaaacagttcgaattcgccaatcaggatacagctccaaatattctttccaggattttgtgagccacttccatgtacttcttccccgaaatattattccatccaaatttaacattcaggatttcttcaggaaaataaatcttaatccagataattatcaagttggaaaaaccatggtctttctaaaggagcaggaacgacagcacttacaagatctgcttcaccaagaggtgctccgcagaatcatattgttgcagcgatggttcagggtcttgctgtgtaggcagcatttcctccatctgagacaagcatctgttattatccagagattctggaggaattacctaaatcagaagcaagtcagagatgcagctgtgcagaaggatgcttttgttatggctagtgcagctgctcttctccaagcttcctggcgtgctcacttagagaggcagcggtacttggagttacgggctgcagccatcgttatccagcagaaatggagagattactataggcgcaggcacatggctgctatttgcatacaagcaagatggaaagcctacagggaaagtaaaaggtaccaagaacaaaggaaaaattatccttttgcaatcaacatgtag

SEQ ID NO: 314710 - DNA, 3390 bp, Artificial Sequence
  derived and/or modified sequence
atgaacatcaacgacggcggccggcggcggttcgaggacaacgagcatacactccgcatctacccaggcgctattagtgagggcaccatctattgccctattccagcacggaagaattcgactgctgccgaagtcattgaaagcctgataaataagttgcacctggataagactaagtgttatgtgttagcggaagtgaaagaatttgggggagaagagtggatactgaaccccacagattgccccgtgcagagaatgatgctgtggccccgcatggcactggagaatcggctctcaggcgaggattatcgcttcctattacgcgaaaagaacctggacggaagcatacattacgggagtctgcagagctggctgagggtcactgaagagcggcggaggatgatggaacgagggtttctgccccagcctcaacagaaggattttgatgatttgtgttcacttcctgacttgaatgagaaaacgcttttggaaaacttgagaaatagatttaaacacgaaaagatctacacttacgtgggctccatccttatcgtgatcaacccattcaagtttctgccaatatataatccaaaatacgtgaagatgtacgataaccaccagctggggaaactagaaccacatatctacgctgttgccgatgtggcttaccatgcaatgctgcaacgcaagaagaatcagtgtattgttatctcaggagagtccggaagcggtaaaactcagagcaccaattttcttattcatcaccttaccgccctctcacagaaaggattcgcctccggcgtcgagcagatcatactcggtgctggccccgtgctggaggcctttgggaatgcaaagaccgcccataataataactcttcacgattcgggaaattcattcaggttaattaccaagagacaggcaccgtgctgggggcctatgtggaaaagtatcttctcgagaaatctcggctcgtgtatcaggaacacaacgagaggaattaccacgtgttttactacctactagctggtgccagtgaagatgagcggtcagcatttcatctaaaacaaccagaagagtatcattatctaaatcaagattgctttaccgttgagggagaggacctgcgacacgatttcgagcgcctgcagctggcgatggagatggtggggtttttgcctaagactcgcagacagatttttagcctcctttccgccatcctgcacctggggaacatctgctacaaaaagaagacctaccgtgatgatagcatcgacatatgcaaccctgaggttctcccaattgtgagtgaactgctcgaggtaaaagaggagatgctgttcgaggccttggtaacacggaagaccgttactgtgggagagaagctgatcttgccgtataaattagccgaagcagtaaccgtgcgaaattcgatggcaaagtctctctactctgctctcttcgattggatagtgttccggattaatcatgcactgctcaactccaaagacttggaacataacaccaaaacactgtccattggtgtgctggacatcttcggcttcgaggactacgaaaacaactcatttgaacagttttgtatcaattttgctaacgaacgtttacagcattatttcaatcaacacatcttcaaactggaacaggaggagtatcggacggaaggtattagttggcataacatcgattacattgacaacacctgttgcataaaccttatctccaaaaagcctactgggctgctccatttgctggatgaggagagtaattttccgcaagctactaaccaaacgttactggataagttcaagcatcagcacgaggataatagttatatcgagttcccagcagtgatggagccagcattcattattaagcattacgccggaaaagtgaaatacggcgtgaaggactttcgcgaaaagaataccgaccatatgcgccctgatattgtggctctgttacgatctagcaagaacgcattcatttcaggcatgattgggatcgacccggtggccgtttttagatgggctatcctgagagctttttttcgtgccatggtagcattccgggaggcggggaagcgaaacatccatcgcaaaactggccacgatgatacggctccttgcgctatattgaagtccatggactcattttcatttctacagcatcctgtgcatcagcgctcattagaaattctacaaaggtgcaaagaagaaaagtactccattactcgcaagaatccacgtacccccctgtccgacctacagggaatgaacgccctaaacgagaaaaatcagcatgatactttcgacatcgcttggaatggacgcaccggcattaggcagtcacgcctgagttctgggacttccctgcttgacaaggacgggatttttgccaactccacttcgtccaaacttttggaaagggcacatggcattcttacccgtaataagaactttaaatcaaagcctgcgttacccaaacaccttctggaggtcaactcactgaagcacctaacccgtttgactctccaggaccggattaccaagtcactgctccacttacataaaaaaaagaagcctccgagtattagcgcccagtttcaggcctccttgagtaagctgatggagactctaggacaggctgagccttacttcgtgaagtgtatccggagcaatgccgaaaaattacctctgcgcttctcagatgtcttagttctgcgtcagctacgctacactggcatgctggaaacagtaagaattagacagagcggttattctagcaagtattcattccaggacttcgtttctcattttcatgtattgctaccgcgaaacattattcccagcaaattcaacatacaggatttctttcgaaagatcaacttgaatcctgacaactaccaggtgggaaagactatggtgttccttaaggaacaggagcgacagcacctgcaggatctgctccaccaagaggtacttcggcgcataatactattgcagcggtggttccgtgtgttgttatgtaggcagcactttctccacctccgtcaggccagcgtgattatccagagattttggcgcaactatctgaatcagaagcaagtacgagatgctgcagtacaaaaggatgcctttgttatggcctccgcagcagcccttctccaggcgagctggagagcacacctggagcggcaaagatatctggaattacgcgccgccgccattgtgatacagcagaagtggcgcgattattataggagacggcacatggccgccatctgcatccaggctagatggaaggcgtacagagagtctaaacggtatcaggaacaaaggaagaactaccccttcgccatcaatatgtag

SEQ ID NO: 314711 - DNA, 3390 bp, Artificial Sequence
  derived and/or modified sequence
atgaatattaacgacggtggaagacgtcgattcgaggataacgagcacacattgaggatttacccaggagccatctccgaaggcacgatctattgtcctatcccagctcgaaagaactcgactgccgctgaggtcattgagtcactgataaataagctacacctggataaaacgaaatgttacgtccttgcagaggtcaaagagttcgggggagaagaatggatcctcaacccgacagactgccccgtgcagcgtatgatgctgtggcccaggatggccctcgagaatcgcctcagcggcgaggattaccggtttctgttacgtgagaagaatctggatggctcaatccactatggctcactgcaatcctggcttagagtgacagaggaaagaagacggatgatggagcgaggcttccttccacagccccagcagaaggacttcgacgatctgtgtagcctacctgaccttaacgaaaagacactgctcgagaatctgcggaaccggttcaagcatgagaaaatatacacgtacgtcggatctattctcattgtaatcaaccctttcaagttcttgccaatttacaaccctaaatacgtaaagatgtatgacaaccaccagttgggcaaactggaaccacatatctacgctgtcgctgatgttgcctaccatgctatgctgcagaggaaaaaaaaccagtgcatagttatttccggcgagagtggctccggcaagacacagagcacgaatttcctgatccatcatctgacggccttgtcacaaaagggtttcgcatcgggagtggagcagataatcctaggagccggacctgtgctagaagcctttgggaacgcaaagaccgcccacaacaacaattccagccgttttggaaagtttatccaagtgaactaccaggaaacagggacagtactgggagcatacgtggagaaatacttactagagaagagcagattggtataccaagagcataacgaacgtaactaccatgtcttctactatttactggctggcgctagtgaggacgagcgcagcgccttccacctgaagcagccggaagagtaccactacctgaaccaggattgttttacggtggagggagaagacttgaggcacgatttcgagagattgcagttggccatggaaatggtcgggttccttccaaagactcgcaggcagatattttcattattgagtgccatcttgcacctgggtaacatctgctacaagaaaaagacttaccgcgatgacagcatcgacatatgcaaccccgaagtgctgcctatcgtttcagagctcctagaagtcaaagaggagatgctcttcgaagcactcgtcacacgaaaaactgtgacggtgggcgagaagctgatactgccatacaagttagcggaggcagtgaccgtgcgaaacagcatggcaaaatccttgtatagtgcgctgttcgattggattgtctttcggataaatcacgccctgctaaattcaaaggatctggagcacaacaccaaaaccctttccatcggtgtactagatatttttggcttcgaagattacgagaacaactcgtttgagcaattttgcataaacttcgccaacgaacgactccagcactatttcaatcagcacatttttaagttagaacaggaagagtatagaaccgagggaatctcatggcataatatagactatatcgataatacatgctgcattaacctcatctccaagaaacccactgggctgcttcaccttctagatgaagagagcaatttcccacaggccaccaaccagacgctgctggataagttcaagcatcagcatgaggataatagctacatcgagttcccagcagtgatggagccggcattcataattaagcactacgctggaaaggtgaagtacggggtcaaggattttcgagaaaagaacacggaccacatgaggccagacatcgttgccctcttacgttccagcaaaaatgcctttatctcaggcatgatcggtatcgaccccgtcgccgtttttcggtgggccatcctgcgggcttttttccgggcaatggtggcattccgcgaggctggcaagaggaatatccatcgtaagaccggccacgatgacacagcaccttgcgctatcctaaaatcaatggattcattctctttcttgcaacacccagttcaccagcgcagcctcgaaatcctgcaacggtgtaaagaagaaaaatactcaatcacccgcaaaaatcctcggaccccgctgtcggacttgcaagggatgaacgccttgaatgagaaaaaccaacatgatacctttgatattgcatggaacggcaggacagggatcaggcagtctaggctctccagcggaaccagcttgctggataaggatggaatcttcgctaattctactagcagtaagctcttggaacgcgcacacggcatcctgacacgcaataaaaatttcaaaagcaagccagccttgccaaaacatctgttggaagttaactccctgaagcacctgactcggttgactctccaagatagaatcactaagagcctcctgcatttgcacaaaaagaaaaagccgcctagcatctcagcgcagttccaggccagtctgagtaagctcatggagactctgggccaggccgagccgtatttcgtgaaatgcatacgctcgaacgctgagaaactccccctccggttcagcgatgtcctcgtgttgaggcagctgcgatataccgggatgctggagacagtgcgcattcggcaatctggctattcatcaaaatacagttttcaagactttgtgagccacttccatgtgctgctgcccagaaacatcataccatcaaagtttaatatccaggatttttttcgaaagatcaatcttaatccagataactatcaggtcggaaagactatggtgttcctgaaagagcaagagaggcagcaccttcaggatctgcttcaccaggaggtgttgcgcaggataatcctgctccagaggtggttcagggtactgctgtgcagacagcatttcttgcatctgcgccaggcgtcagttattatccagcgcttctggaggaactacctgaatcaaaaacaagtgagagatgccgctgttcagaaagacgcctttgtcatggctagtgccgctgcattactgcaagcctcctggcgtgcacatttagaaaggcaaagatatctggaactcagggctgctgctatcgtcattcagcaaaagtggcgggattattacagacgccgacacatggcggctatatgtatccaggctcgatggaaggcttaccgggagtccaaaagatatcaggagcagagaaaaaattatcccttcgctataaacatgtag

SEQ ID NO: 314712 - DNA, 3390 bp, Artificial Sequence
  derived and/or modified sequence
atgaacatcaacgacggcggcagaagaagattcgaggacaacgagcacaccctgagaatctaccccggcgccatcagcgagggcaccatctactgccccatccccgccagaaagaacagcaccgccgccgaggtgatcgagagcctgatcaacaagctgcacctggacaagaccaagtgctacgtgctggccgaggtgaaggagttcggcggcgaggagtggatcctgaaccccaccgactgccccgtgcagagaatgatgctgtggcccagaatggccctggagaacagactgagcggcgaggactacagattcctgctgagagagaagaacctggacggcagcatccactacggcagcctgcagagctggctgagagtgaccgaggagagaagaagaatgatggagagaggcttcctgccccagccccagcagaaggacttcgacgacctgtgcagcctgcccgacctgaacgagaagaccctgctggagaacctgagaaacagattcaagcacgagaagatctacacctacgtgggcagcatcctgatcgtgatcaaccccttcaagttcctgcccatctacaaccccaagtacgtgaagatgtacgacaaccaccagctgggcaagctggagccccacatctacgccgtggccgacgtggcctaccacgccatgctgcagagaaagaagaaccagtgcatcgtgatcagcggcgagagcggcagcggcaagacccagagcaccaacttcctgatccaccacctgaccgccctgagccagaagggcttcgccagcggcgtggagcagatcatcctgggcgccggccccgtgctggaggccttcggcaacgccaagaccgcccacaacaacaacagcagcagattcggcaagttcatccaggtgaactaccaggagaccggcaccgtgctgggcgcctacgtggagaagtacctgctggagaagagcagactggtgtaccaggagcacaacgagagaaactaccacgtgttctactacctgctggccggcgccagcgaggacgagagaagcgccttccacctgaagcagcccgaggagtaccactacctgaaccaggactgcttcaccgtggagggcgaggacctgagacacgacttcgagagactgcagctggccatggagatggtgggcttcctgcccaagaccagaagacagatcttcagcctgctgagcgccatcctgcacctgggcaacatctgctacaagaagaagacctacagagacgacagcatcgacatctgcaaccccgaggtgctgcccatcgtgagcgagctgctggaggtgaaggaggagatgctgttcgaggccctggtgaccagaaagaccgtgaccgtgggcgagaagctgatcctgccctacaagctggccgaggccgtgaccgtgagaaacagcatggccaagagcctgtacagcgccctgttcgactggatcgtgttcagaatcaaccacgccctgctgaacagcaaggacctggagcacaacaccaagaccctgagcatcggcgtgctggacatcttcggcttcgaggactacgagaacaacagcttcgagcagttctgcatcaacttcgccaacgagagactgcagcactacttcaaccagcacatcttcaagctggagcaggaggagtacagaaccgagggcatcagctggcacaacatcgactacatcgacaacacctgctgcatcaacctgatcagcaagaagcccaccggcctgctgcacctgctggacgaggagagcaacttcccccaggccaccaaccagaccctgctggacaagttcaagcaccagcacgaggacaacagctacatcgagttccccgccgtgatggagcccgccttcatcatcaagcactacgccggcaaggtgaagtacggcgtgaaggacttcagagagaagaacaccgaccacatgagacccgacatcgtggccctgctgagaagcagcaagaacgccttcatcagcggcatgatcggcatcgaccccgtggccgtgttcagatgggccatcctgagagccttcttcagagccatggtggccttcagagaggccggcaagagaaacatccacagaaagaccggccacgacgacaccgccccctgcgccatcctgaagagcatggacagcttcagcttcctgcagcaccccgtgcaccagagaagcctggagatcctgcagagatgcaaggaggagaagtacagcatcaccagaaagaaccccagaacccccctgagcgacctgcagggcatgaacgccctgaacgagaagaaccagcacgacaccttcgacatcgcctggaacggcagaaccggcatcagacagagcagactgagcagcggcaccagcctgctggacaaggacggcatcttcgccaacagcaccagcagcaagctgctggagagagcccacggcatcctgaccagaaacaagaacttcaagagcaagcccgccctgcccaagcacctgctggaggtgaacagcctgaagcacctgaccagactgaccctgcaggacagaatcaccaagagcctgctgcacctgcacaagaagaagaagccccccagcatcagcgcccagttccaggccagcctgagcaagctgatggagaccctgggccaggccgagccctacttcgtgaagtgcatcagaagcaacgccgagaagctgcccctgagattcagcgacgtgctggtgctgagacagctgagatacaccggcatgctggagaccgtgagaatcagacagagcggctacagcagcaagtacagcttccaggacttcgtgagccacttccacgtgctgctgcccagaaacatcatccccagcaagttcaacatccaggacttcttcagaaagatcaacctgaaccccgacaactaccaggtgggcaagaccatggtgttcctgaaggagcaggagagacagcacctgcaggacctgctgcaccaggaggtgctgagaagaatcatcctgctgcagagatggttcagagtgctgctgtgcagacagcacttcctgcacctgagacaggccagcgtgatcatccagagattctggagaaactacctgaaccagaagcaggtgagagacgccgccgtgcagaaggacgccttcgtgatggccagcgccgccgccctgctgcaggccagctggagagcccacctggagagacagagatacctggagctgagagccgccgccatcgtgatccagcagaagtggagagactactacagaagaagacacatggccgccatctgcatccaggccagatggaaggcctacagagagagcaagagataccaggagcagagaaagaactaccccttcgccatcaacatgtag

SEQ ID NO: 314713 - protein, 729 aa, Artificial Sequence
  derived and/or modified sequence
MNINDGGRRRFEDNEHTLRIYPGAISEGTIYCPIPARKNSTAAEVIESLINKLHLDKTKCYVLAEVKEFGGEEWILNPTDCPVQRMMLWPRMALENRLSGEDYRFLLREKNLDGSIHYGSLQSWLRVTEERRRMMERGFLPQPQQKDFDDLCSLPDLNEKTLLENLRNRFKHEKIYTYVGSILIVINPFKFLPIYNPKYVKMYDNHQLGKLEPHIYAVADVAYHAMLQRKKNQCIVISGESGSGKTQSTNFLIHHLTALSQKGFASGVEQIILGAGPVLEAFGNAKTAHNNNSSRFGKFIQVNYQETGTVLGAYVEKYLLEKSRLVYQEHNERNYHVFYYLLAGASEDERSAFHLKQPEEYHYLNQITKKPLRQSWDDYCYDSEPDCFTVEGEDLRHDFERLQLAMEMVGFLPKTRRQIFSLLSAILHLGNICYKKKTYRDDSIDICNPEVLPIVSELLEVKEEMLFEALVTRKTVTVGEKLILPYKLAEAVTVRNSMAKSLYSALFDWIVFRINHALLNSKDLEHNTKTLSIGVLDIFGFEDYENNSFEQFCINFANERLQHYFNQHIFKLEQEEYRTEGISWHNIDYIDNTCCINLISKKPTGLLHLLDEESNFPQATNQTLLDKFKHQHEDNSYIEFPAVMEPAFIIKHYAGKVKYGVKDFREKNTDHMRPDIVALLRSSKNAFISGMIGIDPVAVFRWAILRAFFRAMVAFREAGKRNIHRKTGK

SEQ ID NO: 314714 - DNA, 2190 bp, Artificial Sequence
  derived and/or modified sequence
atgaatatcaacgacggcggacggcgtcgttttgaagacaacgaacatacactgcggatctatcctggagcaatcagtgagggaaccatttactgtccgatcccagcacgtaagaactctaccgctgccgaggttattgaaagtttaattaacaagctgcatctcgataaaaccaagtgctacgtcctggctgaagttaaagagttcggaggggaagaatggattttaaacccgaccgactgccccgtccagagaatgatgctatggcctcggatggcgcttgaaaaccgcctcagcggcgaggattatcgttttttactgcgagagaagaatctggacgggtcgattcactacgggagcctgcaatcttggctacgtgtgacggaagagcgacggaggatgatggaacgaggctttcttccccagccccaacaaaaggacttcgatgacctctgcagcctaccagatctcaacgaaaagacccttttggaaaatctcaggaacaggttcaagcatgaaaagatttacacttatgtcgggtccattctgatagttatcaaccctttcaagtttctcccaatttacaatccaaaatatgttaagatgtacgataatcaccaactgggcaaactagagccccatatttacgccgtagctgatgtggcataccatgcaatgctgcagcgcaaaaaaaaccagtgcatcgtgataagcggcgaatctggttcaggcaaaacccagtccacaaatttcttgattcaccatctcacggcactgtcccagaagggctttgcaagcggcgttgagcagatcatcctcggggccggtcctgtattggaggcttttggaaatgccaagaccgcacacaacaacaactcttcccgcttcgggaagtttatccaagttaattaccaagagacaggaaccgtgcttggcgcctacgtagaaaagtacctgttagaaaaaagccgcttagtgtatcaggaacataatgaaaggaattaccacgtcttctattacctgcttgcaggcgcctctgaagatgaacgctccgcattccacctaaagcaacctgaggagtaccattatctgaaccagatcacaaaaaagccattgcggcagagctgggatgactattgctacgactccgagccagattgctttaccgtggagggcgaagacctgaggcacgattttgaacggctgcaactcgctatggaaatggtgggcttccttccaaaaacgagacgccagattttctccctcctgtcagccatcttgcatctgggaaacatctgttataaaaagaaaacatatcgggacgattcaatcgacatctgtaatcctgaggtccttcccatagttagcgaactcttagaagtgaaggaggagatgctatttgaagcactcgttaccaggaaaacagtgacagttggtgagaagctgattctgccatataaattggctgaggccgtcacagtacggaatagtatggccaaatctctctacagcgctcttttcgattggattgtttttagaatcaaccacgccctgctaaactctaaggacctagaacataataccaagactctgtcaatcggggtcctggatatcttcgggttcgaagactatgaaaataatagctttgagcaattctgtattaatttcgccaatgagcggctccagcattattttaatcaacacatcttcaagttggagcaggaagagtacagaacggaggggatttcttggcacaacatcgactatattgacaacacctgttgcatcaatttaatctccaagaagccgactggattgttacatctgttagatgaagagtctaattttccccaagctacaaaccagactctgctggataagttcaaacatcagcacgaggacaacagctacatagagtttcctgctgtgatggagcctgcctttattatcaagcactatgcaggtaaagtgaaatacggggtgaaggattttagagagaagaataccgaccatatgaggcctgatatcgttgctcttttgcgcagctccaagaacgcctttatctctgggatgatcggaatcgaccctgtcgcagtatttcgatgggccattttgcgtgcattttttagagccatggtcgcattcagagaggcaggaaagcgcaacattcacaggaaaacaggcaagtag

SEQ ID NO: 314715 - DNA, 2190 bp, Artificial Sequence
  derived and/or modified sequence
atgaacatcaatgatggcggcagaagaagatttgaggacaatgagcacaccctgcgcatctacccaggggccatcagcgagggcaccatctactgccccatcccagccaggaagaacagcacagctgctgaggtgattgagagcctcatcaacaagctgcacctggacaagaccaagtgctacgtgctggccgaggtgaaggagtttggaggagaggagtggatcctgaaccccacagactgccctgtgcagaggatgatgctgtggcccaggatggccctggagaaccggctgtctggagaggactaccgcttcctgctgcgggagaagaacctggatggcagcatccactacggcagcctgcagagctggctgcgggtgacagaggagaggaggaggatgatggagcggggcttcctgccccagccccagcagaaggactttgatgacctgtgcagcctgcctgacctgaatgagaagaccctgctggagaacctgaggaaccgcttcaagcatgagaagatctacacctacgtgggcagcatcctgattgtcatcaaccccttcaagttcctgcccatctacaaccccaagtatgtgaagatgtatgacaaccaccagctgggcaagctggagccccacatctatgctgtggctgatgtggcctaccacgccatgctgcagaggaagaagaaccagtgcatcgtcatcagcggggagagcggcagcggcaagacccagagcaccaacttcctgatccaccacctgacagccctgagccagaagggctttgccagcggcgtggagcagatcatcctgggcgccggccctgtgctggaggcctttggaaatgccaagacagcccacaacaacaacagcagcagatttgggaagttcatccaggtgaactaccaggagactggaacagtgctgggcgcctacgtggagaagtacctgctggagaagagccggctggtgtaccaggagcacaatgaaagaaactaccacgtgttctactacctgctggccggggcctctgaagatgagaggtctgccttccacctgaagcagcctgaggagtaccactacctgaaccagatcaccaagaagcccctgcggcagagctgggatgactactgctatgattctgagccagactgcttcaccgtggagggggaggacctgcggcatgactttgagcggctgcagctggccatggagatggtgggcttcctgcccaagacccggcggcagatcttcagcctgctgagcgccatcctgcacctgggcaacatctgctacaagaagaagacctacagagatgacagcattgacatctgcaaccctgaggtgctgcccatcgtgtctgagctgctggaggtgaaggaggagatgctgtttgaggccctggtgaccaggaagacagtgacagtgggggagaagctgatcctgccctacaagctggccgaggccgtgacagtgagaaattccatggccaagagcctgtacagcgccctgtttgactggatcgtgttccgcatcaaccacgccctgctgaacagcaaggacctggagcacaacaccaagaccctgagcattggagtgctggacatctttggatttgaggactatgagaacaacagctttgagcagttctgcatcaactttgccaatgaaaggctgcagcactacttcaaccagcacatcttcaagctggagcaggaggagtacagaacagagggcatctcctggcacaacatcgactacatcgacaacacctgctgcatcaacctgatcagcaagaagcccaccggcctgctgcacctgctggatgaggagagcaacttcccccaggccaccaaccagaccctgctggacaagttcaagcaccagcacgaggacaacagctacatcgagttccctgctgtgatggagcccgccttcatcatcaagcactacgccggcaaggtgaagtatggagtgaaggacttccgggagaagaacacagaccacatgaggccagacatcgtggccctgctgcggagcagcaagaatgccttcatcagcggcatgattggcatcgaccctgtggccgtgttccgctgggccatcctgcgggccttcttccgggccatggtggccttccgggaggccggcaagaggaacatccacaggaagacaggcaagtag

SEQ ID NO: 314716 - DNA, 4008 bp, Artificial Sequence
  derived and/or modified sequence
gcgcgaccgaagcggataagggacgcggcggcggttggctgtgtctgttgagagagtacaggacagcccggactgcgagaggcggcggcggaggcagtagttgcaccggcagaggcggccgctggcagcggttgaggcggcggtccaacgcgtgctctctgggcggggcggagtctctctgacagggcgggggatgcgccgcggccgctcgcccggaccctgaggctgctgggcccaccctcccggaaccgtccgaccctcggtggcctcggcctcttctgccatctccggtcctaccctggggcggagggtggaaggcagcttccgtcgaagaggagggggctgcggtggccaccgcggcggagcccgagttattttaccaagaaaatggtttgcacgactttgaacatatactatccatgctgatgggacaggatccaatatgaatataaatgatggaggaagacgacgctttgaagataatgaacatacattacggatatatcctggggctatttcagaagggacaatctactgtccgattcctgccagaaaaaactccacagctgctgaggtgattgagtctcttataaacaaacttcatcttgacaaaacaaaatgttatgttctagcagaggtaaaggaatttggtggagaagaatggattctcaatccaacagattgtccagttcagcgaatgatgctgtggccccgaatggctctggaaaatcgcttaagtggagaggactaccgcttccttctgagagagaaaaaccttgatggatcaatccattatggtagcctgcagtcatggctacgggtaacagaagaacgtcgcaggatgatggaacggggttttcttccacagcctcaacagaaagactttgatgatttatgtagtttacctgatttgaatgagaaaactctcttagaaaacctacgaaatcgctttaagcatgaaaaaatttatacctatgttggcagtattctaatagttattaacccattcaagtttcttcctatttataaccccaaatatgtcaaaatgtatgataaccaccaactgggaaaacttgagccccacatttatgctgtggctgatgtagcttatcatgccatgcttcagcgcaaaaagaatcagtgcatcgtgatttcaggagagagtggttctgggaagactcaaagcacaaactttcttattcaccaccttactgctctcagtcagaaaggatttgccagtggagtagaacagattattcttggagctggaccagtacttgaggcctttggaaatgcaaagacagctcataataacaattcaagtcgttttgggaagtttattcaagtaaattaccaggaaacaggcactgtacttggtgcctatgttgaaaaatatctactggagaagtccagactcgtttatcaggagcataatgaacggaactatcatgtattctattacctcctggcaggagcaagtgaagatgagagatcagcattccatcttaagcaaccagaggaatatcattatctcaatcagataacaaagaaacccctcagacagagctgggatgattattgctatgactctgagccggattgcttcacggtggaaggagaagatttgagacatgactttgagcgcctacaacttgccatggaaatggtaggatttcttcccaagacacgaagacagattttctctcttctctcagccatactacatttgggtaatatctgttacaaaaagaagacataccgggatgactccattgatatctgtaatcctgaagttctgcctattgtctcagaattattagaggttaaagaagagatgctatttgaagcattagttacaaggaagacggtgacagtgggagaaaagcttattttgccatacaagttggcagaggctgtgacagtgaggaactccatggctaagtctctgtatagtgccctgtttgactggatagtttttcgaattaatcatgcacttctgaatagtaaagatttagagcataataccaagacattgtctattggtgttcttgatatttttgggtttgaagattatgaaaataacagctttgaacagttctgtattaattttgctaatgaacgtttacagcactactttaatcagcatatctttaaattggaacaagaggaatatagaactgaaggtatcagctggcacaacatagattacattgataatacctgctgcataaatcttattagcaaaaaaccaacaggactgcttcatcttttggatgaagaaagcaactttccacaggctacaaatcaaacattgctagacaagtttaagcatcaacatgaagataattcttacatcgaatttccagccgtgatggagcctgctttcattataaaacattatgctggaaaagtaaaatatggggtaaaggatttccgggaaaaaaatacagatcatatgcgcccagacattgtagctcttctgagaagcagcaagaatgcatttatctctgggatgattggaattgatcctgtagctgttttccgatgggcaattctccgagcttttttcagagccatggttgctttcagggaagctgggaaaagaaacattcacagaaaaactggtaagtagtagttattagtattctaccatacttcatctttttttttttttttacctttctacttctccacaaaaaggagtagaattcttgctatgagattctcaaggacaaaaatcctgcttctgtagtcaatctagtgtcatctcttaactgatttgtgactatgaacagtttttcttttctgtaaaagagttatactgcctttaaaataatgaggataaagtcagagcatctgttcatgaagtgttcattttcttttcctttactcttagttcatggatttttaaaaactttgaaatttagaaatagataaagcaggatactttttctgtatgcctcccccttcaatcataaaatctctcatctcattttctgtgggagggcaacttcataagcacttttggcctactggaaaccaaactattgtttgctgtagctctagtcttagatagggccattgctgcatagagaagattttgtgatacatatgcagttgagatttatgcctttcagtagaaatgttatagggctcacctgtgctttcaggactcccaaagtgatttacgtggctttttgggatgtgcactagtagtaaaacttttaagtttagcttttaaatgtttgagacaaatagatatatttgagagagtgtatttctaaaaatacatgtaaaataattgaacctagtttccattttttagattgtaaagtatttgaactggtctttgtagatgtatagggagaattatagtttattagagaaataaaaggactatctcaaacctgctttgccttttacaaagtgatttctaagaggttatctttgtaaaaagctttaaggaaaattttttttctttaagatgctttcttgtttattatgacaaacttctaatcaagaaaaccactcaaaattgattagcatcctgctaagacataattgagtaagagaagaaacttttcttgtatttactgtcaaagcctatttactttattcacattatctgtatattcctttggcatttaaaatctattatttgtgaaagctagttgttacatatctgttattatcaatatcggcaatgacatgcaatgttattaatgataaacaacctgtattttctctaccttgataaagtctagattccttattttctaatcttgttttcccttctggctagtacagagcttccatataataatctctttttgaaaatttgtattcaacataacatgcatatacaaaagtacacaaagcaaaaatgtatagttcagtggagtaccacaaagtaaacacaaccctggaactaccacctaggttaagaaacacaacattccagccacccaaaatttctccttggaaaaaactttaaaatttttacttttt

SEQ ID NO: 314717 - DNA, 2190 bp, Artificial Sequence
  derived and/or modified sequence
atgaacatcaacgacggcggccggcggcggttcgaggacaacgagcataccctccgtatttatcccggcgccatctcagagggaaccatctactgccccataccagcccgaaagaactccactgcagccgaagtaatcgaatccctcatcaacaagctgcacctggataaaacgaagtgctacgtactagccgaggttaaggagtttggcggagaagaatggatcctcaaccctactgactgcccagtgcagcggatgatgctttggcctcggatggcactggaaaatcgcctgagcggtgaagactaccggttcttgctgagagagaagaatcttgatggatctatccactatggttcgctacagagctggctgcgtgtgacggaggagaggaggaggatgatggagagggggttcttgccacagcctcagcaaaaagactttgatgatctgtgctctctgcccgatttgaacgaaaaaacactgttagagaacctcagaaatcgcttcaaacatgagaaaatttacacatacgtgggctcgattctgattgtgattaatcccttcaaatttttacccatctataaccccaaatatgttaagatgtatgacaatcaccagctcggcaaattggaacctcatatctacgcggtggccgatgtggcttaccatgccatgctgcaacgcaagaaaaaccaatgtatcgtaatctctggggaatccggttccgggaagacccagagcactaatttcctcatccatcatcttaccgcgctgtcccagaaagggttcgcctccggggtagaacagattatcttgggagccggaccagtgttggaggccttcggcaacgctaaaacagcccataataacaattctagtcggttcgggaaatttatccaggtaaactaccaggagacagggaccgtgctgggagcttatgtggagaaatatctgctggagaagagcagacttgtttatcaggagcataatgaacgaaactaccatgtgttctactacctcctggccggtgcaagtgaggacgagaggtctgccttccacctgaaacagcccgaggaatatcactacctcaaccagattacgaaaaaacctttgcgccaatcttgggacgactattgctatgattctgaacctgattgttttacagttgaaggggaggatctccggcacgacttcgagaggctgcagttggccatggaaatggttggatttttgccaaagaccaggcgccagattttttccttgctcagtgctatattgcacctggggaacatctgctataagaagaagacttatcgggatgattccatcgatatctgcaatcccgaagtgttgccaatagtgtccgaattgctggaagtgaaggaggagatgctgttcgaagccctggtcaccagaaaaactgtcaccgtgggggaaaagctgatcctgccgtataaactcgcagaagccgtcacagttcgtaacagcatggccaagtccctgtattctgcactgtttgactggatcgtgtttcggatcaaccacgccctcctgaacagtaaagatctcgaacacaacactaagactctgtctatcggcgtgctggacatattcggttttgaggactatgagaacaatagtttcgaacagttctgcattaactttgctaacgagagattacagcattatttcaaccaacacattttcaagctcgagcaggaagagtaccggactgagggaatttcttggcataatattgattatattgacaatacctgttgcattaatctgatctctaagaaacctacgggcctccttcatctgctcgacgaagagagcaattttccccaggccactaaccagacactgctggataagtttaagcatcagcacgaagataatagttacatcgagtttcccgcagtgatggaacccgccttcatcataaagcactatgcagggaaggtgaagtatggcgttaaggattttcgagaaaaaaacaccgaccacatgagaccggatatcgttgcgctcttgagatcttcaaaaaatgcgttcattagcggaatgattggaatagaccctgtggccgtcttccgctgggctattttacgcgctttctttagggctatggttgctttcagggaggctggcaaacgcaatatccataggaagacaggtaagtag

SEQ ID NO: 314718 - DNA, 2190 bp, Artificial Sequence
  derived and/or modified sequence
atgaacatcaacgatgggggacgcaggcgcttcgaagacaatgagcacactcttagaatttaccccggagcaatctcagagggcactatctactgccccatcccagccaggaaaaacagtactgccgctgaggtcatcgagtctctgattaacaagctgcatctggacaagactaagtgttacgtgctcgctgaagtgaaagaatttggaggggaggagtggattctcaatcctactgattgccctgtgcagaggatgatgttgtggccacggatggccctcgagaaccggttgagcggggaggactatagatttctccttcgggaaaagaacctcgatggctcgatacattatggctccctgcagtcatggcttagagtgactgaggagcgaaggagaatgatggaacgtggatttttgccccaaccgcagcagaaggactttgatgatctctgtagcctacccgacctcaatgagaagacactgttagaaaacctccggaatcggtttaagcatgagaagatctatacctacgtggggtctatcctgatagttataaatcccttcaaattcttgcccatttacaatcctaaatatgtcaaaatgtatgacaaccaccagctgggcaagctggagccacacatttacgccgtagccgatgtggcttaccacgccatgctgcagcgcaaaaagaaccaatgcatagtgatcagcggcgagtcggggtccggaaaaacgcagagcacgaacttcctgatacaccacctcacagctctgtcccagaagggcttcgcttccggcgtagagcagatcatcctgggagctggtcctgtactcgaggcattcggcaacgccaagaccgcacacaacaataacagtagtcgctttggcaagttcatccaggttaactaccaggagaccggaaccgtactaggtgcgtacgtggaaaaatacttgctggagaagagccgcctggtgtatcaggagcacaacgagagaaactatcatgtgttttactatctgctggccggagcatctgaagacgaacgatccgccttccacttgaaacaaccagaggaatatcactatcttaaccagattactaaaaagccattgaggcaatcttgggatgactattgctacgactctgaacccgactgctttaccgtagagggcgaggatttacgacatgactttgagcgcctgcagcttgcaatggagatggtgggattcctgcccaaaactcggagacagatcttttccctgctgtcagccatcttacacctcggcaatatctgttacaaaaagaagacgtatagggacgatagcattgacatttgtaacccagaagtcctcccaattgtgtccgaacttctggaggtcaaggaggaaatgctcttcgaggccttggttacgcggaagacggtcactgtgggtgagaaactcattctgccatacaaactggccgaagccgttacagtgcggaactccatggctaagtccctctattctgcactgtttgactggatcgtcttccgcattaaccatgcattactgaattctaaggacctcgagcacaacactaagacactgtcaattggcgttctggacatttttggcttcgaagattacgagaataattctttcgagcagttctgtatcaactttgccaatgagcggcttcagcattacttcaaccagcatatttttaaattagaacaagaggagtatcgcacggaaggaatcagttggcacaatatagattacattgataacacgtgctgcatcaatctgattagcaagaaacccactggactactgcacctcttagatgaagagtccaacttcccccaggccaccaatcaaaccctgctagataaattcaagcatcaacacgaagacaattcttatattgagtttccagccgttatggagccagcttttatcatcaaacattacgcaggtaaagtcaaatacggcgtgaaagattttagagagaagaatacagatcacatgcgcccagatatcgtggctctgttgcggagcagcaagaatgcctttattagcgggatgatcggcatcgatcccgtggccgtgtttcggtgggcgattcttagggcattttttagagcaatggtggcatttcgggaggctggcaaacgtaatatacaccgcaaaacaggtaagtag

SEQ ID NO: 314719 - DNA, 2190 bp, Artificial Sequence
  derived and/or modified sequence
atgaacatcaacgacggcggcagaagaagattcgaggacaacgagcacaccctgagaatctaccccggcgccatcagcgagggcaccatctactgccccatccccgccagaaagaacagcaccgccgccgaggtgatcgagagcctgatcaacaagctgcacctggacaagaccaagtgctacgtgctggccgaggtgaaggagttcggcggcgaggagtggatcctgaaccccaccgactgccccgtgcagagaatgatgctgtggcccagaatggccctggagaacagactgagcggcgaggactacagattcctgctgagagagaagaacctggacggcagcatccactacggcagcctgcagagctggctgagagtgaccgaggagagaagaagaatgatggagagaggcttcctgccccagccccagcagaaggacttcgacgacctgtgcagcctgcccgacctgaacgagaagaccctgctggagaacctgagaaacagattcaagcacgagaagatctacacctacgtgggcagcatcctgatcgtgatcaaccccttcaagttcctgcccatctacaaccccaagtacgtgaagatgtacgacaaccaccagctgggcaagctggagccccacatctacgccgtggccgacgtggcctaccacgccatgctgcagagaaagaagaaccagtgcatcgtgatcagcggcgagagcggcagcggcaagacccagagcaccaacttcctgatccaccacctgaccgccctgagccagaagggcttcgccagcggcgtggagcagatcatcctgggcgccggccccgtgctggaggccttcggcaacgccaagaccgcccacaacaacaacagcagcagattcggcaagttcatccaggtgaactaccaggagaccggcaccgtgctgggcgcctacgtggagaagtacctgctggagaagagcagactggtgtaccaggagcacaacgagagaaactaccacgtgttctactacctgctggccggcgccagcgaggacgagagaagcgccttccacctgaagcagcccgaggagtaccactacctgaaccagatcaccaagaagcccctgagacagagctgggacgactactgctacgacagcgagcccgactgcttcaccgtggagggcgaggacctgagacacgacttcgagagactgcagctggccatggagatggtgggcttcctgcccaagaccagaagacagatcttcagcctgctgagcgccatcctgcacctgggcaacatctgctacaagaagaagacctacagagacgacagcatcgacatctgcaaccccgaggtgctgcccatcgtgagcgagctgctggaggtgaaggaggagatgctgttcgaggccctggtgaccagaaagaccgtgaccgtgggcgagaagctgatcctgccctacaagctggccgaggccgtgaccgtgagaaacagcatggccaagagcctgtacagcgccctgttcgactggatcgtgttcagaatcaaccacgccctgctgaacagcaaggacctggagcacaacaccaagaccctgagcatcggcgtgctggacatcttcggcttcgaggactacgagaacaacagcttcgagcagttctgcatcaacttcgccaacgagagactgcagcactacttcaaccagcacatcttcaagctggagcaggaggagtacagaaccgagggcatcagctggcacaacatcgactacatcgacaacacctgctgcatcaacctgatcagcaagaagcccaccggcctgctgcacctgctggacgaggagagcaacttcccccaggccaccaaccagaccctgctggacaagttcaagcaccagcacgaggacaacagctacatcgagttccccgccgtgatggagcccgccttcatcatcaagcactacgccggcaaggtgaagtacggcgtgaaggacttcagagagaagaacaccgaccacatgagacccgacatcgtggccctgctgagaagcagcaagaacgccttcatcagcggcatgatcggcatcgaccccgtggccgtgttcagatgggccatcctgagagccttcttcagagccatggtggccttcagagaggccggcaagagaaacatccacagaaagaccggcaagtag

SEQ ID NO: 314720 - DNA, 62 bp, Artificial Sequence
  derived and/or modified sequence
ttcacagcagcattacgcacaatagccagaaggtgggaacagacaaaatgccttttgatggg

SEQ ID NO: 314721 - protein, 1172 aa, Artificial Sequence
  derived and/or modified sequence
MKNEEALDTESSERLVLLAGGSLEISDVTEDDAGTYFCIADNGNETIEAQAELTVQAQPEFLKQPTNIYAHESMDIVFECEVTGKPTPTVKWVKNGDMVIPSDYFKIVKEHNLQVLGLVKSDEGFYQCIAENDVGNAQAGAQLIILEHDVAIPTLPPTSLTSATTDHLAPATTGPLPSAPRDVVASLVSTRFIKLTWRTPASDPHGDNLTYSVFYTKEGIARERVENTSHPGEMQVTIQNLMPATVYIFRVMAQNKHGSGESSAPLRVETQPEVQLPGPAPNLRAYAASPTSITVTWETPVSGNGEIQNYKLYYMEKGTDKEQDVDVSSHSYTINGLKKYTEYSFRVVAYNKHGPGVSTPDVAVRTLSDVPSAAPQNLSLEVRNSKSIMIHWQPPAPATQNGQITGYKIRYRKASRKSDVTETLVSGTQLSQLIEGLDRGTEYNFRVAALTINGTGPATDWLSAETFESDLDETRVPEVPSSLHVRPLVTSIVVSWTPPENQNIVVRGYAIGYGIGSPHAQTIKVDYKQRYYTIENLDPSSHYVITLKAFNNVGEGIPLYESAVTRPHTVPDPTPMMPPVGVQASILSHDTIRITWADNSLPKHQKITDSRYYTVRWKTNIPANTKYKNANATTLSYLVTGLKPNTLYEFSVMVTKGRRSSTWSMTAHGTTFELVPTSPPKDVTVVSKEGKPKTIIVNWQPPSEANGKITGYIIYYSTDVNAEIHDWVIEPVVGNRLTHQIQELTLDTPYYFKIQARNSKGMGPMSEAVQFRTPKASGSGGKGSRLPDLGSDYKPPMSGSNSPHGSPTSPLDSNMLLVIIVSVGVITIVVVVIIAVFCTRRTTSHQKKKRAACKSVNGSHKYKGNSKDVKPPDLWIHHERLELKPIDKSPDPNPIMTDTPIPRNSQDITPVDNSMDSNIHQRRNSYRGHESEDSMSTLAGRRGMRPKMMMPFDSQPPQPVISAHPIHSLDNPHHHFHSSSLASPARSHLYHPGSPWPIGTSMSLSDRANSTESVRNTPSTDTMPASSSQTCCTDHQDPEGATSSSYLASSQEEDSGQSLPTAHVRPSHPLKSFAVPAIPPPGPPTYDPALPSTPLLSQQALNHHIHSVKTASIGTLGRSRPPMPVVVPSAPEVQETTRMLEDSESSYEPDELTKEMAHLEGLMKDLNAITTA

SEQ ID NO: 314722 - DNA, 3519 bp, Artificial Sequence
  derived and/or modified sequence
atgaagaatgaagaagccctcgatactgagtccagtgagagactggttctgcttgccggcggttccctggagatttcagatgtcactgaggacgatgccggcacctatttctgtatcgctgataatggtaacgaaacgatcgaggcacaggccgaactgaccgtgcaggctcagcccgagttcctcaaacagccgactaatatatacgctcatgagagtatggacatagtgttcgagtgtgaagttacgggaaaacctacacctacagtgaagtgggtcaagaacggggacatggtgattccatcagactacttcaagattgttaaggagcacaacttgcaggtgcttggtctggtcaagagtgatgaaggcttttaccagtgcatagccgaaaatgacgtgggaaacgctcaagcaggggcacagcttatcattctggaacatgatgtggctattcccacgctcccgcccacaagcctgacatccgccacaacggaccatctggcccctgctacgactggacctttgccctccgctcctagagacgtggtcgctagcctggtgtccacacggttcatcaagctgacatggcggaccccggctagcgatccgcacggagataatctgacctacagcgtgttttatactaaggagggcattgcccgtgagcgtgtggagaatacctcccatccaggggaaatgcaagtaactatccagaacctgatgcccgctacggtgtatatcttccgcgttatggcccaaaacaagcacgggagcggcgagagcagcgctccactgcgggttgagactcaaccagaagttcagttgccgggccccgcaccaaatctgcgcgcttacgctgcctcgccgacatcaattaccgtcacatgggagactccagtgtccggaaacggtgagattcagaattataagctgtactacatggaaaaaggcaccgataaggaacaagacgtggacgtctcttcccatagttataccattaatgggcttaagaagtatacagaatatagcttcagggttgtcgcatacaacaagcatggccctggcgtaagtacaccagatgtggcagtgcgcacgttaagcgacgttccatcagcagccccgcagaatttatccttggaagttcgcaacagcaagagtatcatgatccactggcagccacctgctcccgctacgcaaaacggccaaataacaggctacaagattagatataggaaggctagccgaaagagtgacgtaaccgaaaccctggtctctgggactcagctgtcacagctgatcgaaggcttggacagagggactgagtacaatttccgcgtcgccgctctgaccattaacggaaccgggcccgctactgactggctcagcgccgagacctttgagagcgatctggatgagacccgcgtgcctgaggtgccatcatcattgcacgtccggcctctagtgactagcattgtagtttcttggacacctccagaaaatcagaatattgtagtacgtggatacgcgatcggttacggtattggaagcccccatgcacaaaccattaaggtcgattacaaacagcgatactataccatcgagaacttggatcccagtagccattacgtgattaccctgaaagcattcaacaatgtgggagaaggtatccccctgtacgaatctgctgtcactcgcccacacacagtgccagatcccactcctatgatgccacctgtgggggtgcaagcctccattttatcacacgacactatacggattacctgggcggataacagcctgcctaaacatcagaaaattacagactcccggtactacacagtaaggtggaaaaccaatatccccgccaatactaagtacaagaatgcaaatgccacaaccctcagttacctggtgaccgggttgaagccaaataccttgtatgaatttagcgtaatggtgacaaaggggcgccgtagctctacatggtcaatgacagcacatggcacaacattcgaattagtgcctacgtccccccccaaggacgtaactgtggtgtccaaggagggcaaacccaagactattatcgtaaattggcagccgcctagcgaggccaatgggaaaatcactggctacatcatttattatagcactgatgtcaatgctgaaatccacgattgggttattgagcccgtcgtgggcaatcggttgacacaccagatccaggagctgactctggatacaccttattacttcaagatacaggcccggaacagtaaaggcatgggccccatgagtgaagctgtgcaatttcgcacccctaaggcctctggcagcggcggtaaaggcagccgtctacccgaccttggcagcgactataaacccccgatgtctggttcaaactccccgcacggatcacccacatcccctttagatagcaacatgttactggtgattatcgtgtccgtcggggtgattacaatcgtggtggtagttataatcgccgtcttttgcacgcgccgtactacaagccatcagaaaaagaaaagagctgcttgcaagagtgtgaacggttctcacaagtacaagggtaattccaaggatgtgaagccacccgacctgtggatccaccatgagagactcgaattgaaaccaatcgataaaagccctgaccctaatcctatcatgactgacaccccaatccccagaaattcccaggacataacacccgttgacaatagtatggacagcaacatccaccagcgccgtaattcatacagagggcatgaaagcgaggacagcatgagcaccctcgccgggcggcgtggtatgaggccgaagatgatgatgccatttgattcacagccaccacagccggtgatcagcgcgcatcccattcactcgctggacaacccccatcaccattttcactctagcagcctggccagtcccgccaggtctcacctctaccatcccggctccccatggccaattggtacttcaatgtccctgagcgaccgagctaactctaccgagagtgtgcgcaacacacctagcaccgacacaatgcctgcctcctcatcccaaacgtgttgtacagatcaccaggatcccgaaggggcaacatcttcaagctacctggcgtcctcccaggaggaggacagcggtcagtctcttcctaccgcacatgtccgccccagccatcccctcaagtcattcgccgtgcctgccatcccacctccaggacctcccacttacgaccctgcgctgccttctacccccctactcagccagcaggcactcaatcaccacattcacagcgtcaaaaccgcctccatcgggacactgggtagatcgaggccacctatgcctgtggtggtgccctcagctccagaggtacaggagaccactcgaatgctagaggactctgagtccagctatgaacccgatgagctgactaaagaaatggctcacttagagggattaatgaaggacctaaatgccattacaaccgcctag

SEQ ID NO: 314723 - DNA, 3519 bp, Artificial Sequence
  derived and/or modified sequence
atgaagaatgaggaggccctggacacagagagcagcgagcggctggtgctgctggccggcggcagcctggagatcagtgatgtgacagaagatgatgctggcacctacttctgcatcgctgacaatggaaatgagaccatcgaggcccaggccgagctgactgtgcaggcccagcctgagttcctgaagcagcccaccaacatctatgcccacgagagcatggacatcgtgtttgaatgtgaggtgacaggcaagcccacccccaccgtgaagtgggtgaagaatggagacatggtgatccccagcgactacttcaagatcgtgaaggagcacaacctgcaggtgctgggcctggtgaagagtgatgagggcttctaccagtgcatcgcagaaaatgatgtgggcaatgcccaggccggggcccagctgatcatcctggagcatgatgtggccatccccaccctgccccccaccagcctgaccagcgccaccacagaccacctggccccagccaccaccggccccctgcccagcgcccccagagatgtggtggccagcctggtgtccacccgcttcatcaagctgacctggaggaccccagccagtgacccccatggagacaacctgacctacagcgtcttctacaccaaggagggcatcgcccgggagcgggtggagaacaccagccaccctggagagatgcaggtgaccatccagaacctgatgcctgccaccgtgtacatcttccgggtgatggcccagaacaagcacggcagcggggagagcagcgcccccctgcgggtggagacccagcctgaggtgcagctgcccggccctgcccccaacctgcgggcctatgctgccagccccaccagcatcaccgtgacctgggagacccctgtgtctggaaatggagagatccagaactacaagctgtactacatggagaagggcacagacaaggagcaggatgtggatgtgagcagccacagctacaccatcaatggcctgaagaagtacacagagtacagcttccgggtggtggcctacaacaagcacggccctggggtgtccaccccagatgtggccgtgaggaccctgagtgatgtgcccagcgctgccccccagaacctgagcctggaggtgaggaacagcaagagcatcatgatccactggcagcccccagccccagccacccagaatggccagatcaccggctacaagatccgctacaggaaggccagcaggaagagtgatgtgacagagaccctggtgtctggcacccagctgagccagctgattgagggcctggaccggggcacagagtacaacttccgggtggccgccctgaccatcaatggaactggacctgccacagactggctgtctgctgagacctttgaaagtgacctggatgagaccagggtgcctgaggtgcccagcagcctgcacgtgcggcccctggtgaccagcatcgtggtgtcctggaccccacctgagaaccagaacatcgtggtgcggggctacgccatcggctatggaattggcagcccccacgcccagaccatcaaggtggactacaagcagcgctactacaccatcgagaacctggaccccagcagccactacgtgatcaccctgaaggccttcaacaacgtgggggagggcatccccctgtatgagagcgctgtgacccggccccacacagtgcctgaccccacccccatgatgcctcctgtgggcgtgcaggccagcatcctgagccatgacaccatccgcatcacctgggccgacaacagcctgcccaagcaccagaagatcacagacagccgctactacacagtgcgctggaagaccaacatcccagccaacaccaagtacaagaatgccaatgccaccaccctgagctacctggtgacaggcctgaagcccaacaccctgtatgagttctctgtgatggtgaccaagggccgccgcagcagcacctggagcatgacagcccacggcaccacctttgagctggtgcccaccagcccccccaaggatgtgacagtggtgtccaaggagggcaagcccaagaccatcatcgtgaactggcagcccccatctgaggccaacgggaagatcaccggctacatcatctactacagcacagatgtgaatgctgagatccatgactgggtgattgagcctgtggtgggcaaccggctgacccaccagatccaggagctgaccctggacaccccctactacttcaagatccaggccaggaacagcaagggcatgggccccatgtctgaggccgtgcagttccgcacccccaaggccagcggcagcggcggcaagggcagccggctgcctgacctgggcagtgactacaagccacccatgagcggcagcaacagcccccacggcagccccaccagccccctggacagcaacatgctgctggtgatcatcgtgtctgtgggcgtcatcaccatcgtggtggtggtgatcatcgctgtgttctgcaccaggaggaccaccagccaccagaagaagaagagagctgcctgcaagtctgtgaatggcagccacaagtacaagggcaacagcaaggatgtgaagcccccagacctgtggatccaccacgagcggctggagctgaagcccatcgacaagagcccagaccccaaccccatcatgacagacacccccatccccaggaacagccaggacatcacccctgtggacaacagcatggacagcaacatccaccagaggagaaattcctaccggggccatgaaagtgaggacagcatgagcaccctggccggcagaagaggcatgaggcccaagatgatgatgccctttgacagccagcccccccagcctgtgatcagcgcccaccccatccacagcctggacaacccccaccaccacttccacagcagcagcctggccagccctgcccggagccacctgtaccaccctggcagcccctggcccatcggcacctccatgagcctgagtgaccgggccaacagcacagaatctgtgaggaacacccccagcacagacaccatgcctgccagcagcagccagacctgctgcacagaccaccaggaccctgagggcgccaccagcagcagctacctggccagcagccaggaggaggacagcggccagagcctgcccacagcccacgtgcggcccagccaccccctgaagagctttgctgtgcctgccatccccccacctggcccccccacctatgaccctgccctgcccagcacccccctgctgagccagcaggccctgaaccaccacatccacagcgtgaagacagccagcatcggcaccctgggccgcagcaggcctcccatgcctgtggtggtgcccagcgcccctgaggtgcaggagaccaccaggatgctggaggacagcgagagcagctatgagccagatgagctgaccaaggagatggcccacctggagggcctgatgaaggacctgaatgccatcaccacagcctag

SEQ ID NO: 314724 - DNA, 3519 bp, Artificial Sequence
  derived and/or modified sequence
atgaagaacgaggaggccctggacaccgagagcagcgagcggctggtcctcctggcagggggatccctggaaatcagcgacgtcactgaagatgatgctggcacctacttttgcatcgctgataacggaaacgaaacaatagaggcccaggccgagcttaccgtgcaggcacaacccgagtttctaaaacagcctacaaatatttatgcacacgagtccatggatatcgtctttgaatgcgaagtgaccggcaaacccaccccaacagtcaagtgggtcaagaacggagatatggttatcccctctgactactttaagattgttaaggagcacaacctgcaggtgctgggcttagtcaaatccgatgaaggtttctatcaatgcatagccgaaaatgatgtgggtaacgcccaggcaggggcccagcttatcattctggagcacgacgtcgcgattcctactctacccccaactagcttgacctcagcgacaacagaccacctcgcgcccgccaccacgggccccctcccctcggctcctcgcgatgtcgtggcgtcgctggtctctacacggtttattaaactcacctggcggacaccagctagtgacccccatggcgataaccttacctacagcgtgttttatacgaaagaggggattgctcgagagcgtgtggaaaacaccagccacccaggcgagatgcaagttactatccagaatctgatgcctgcaactgtatacattttccgtgtcatggcccagaacaagcatggttctggtgaaagcagcgcccccctgagagtcgagactcagcctgaagtgcagttaccaggacctgcacctaatctgagggcatacgccgctagccccacctccatcacagtgacatgggaaacacccgtcagtgggaacggggaaatccaaaactataagctttactatatggaaaagggaaccgacaaggagcaggatgtggatgtctcaagtcactcttacaccatcaatggactaaaaaaatacactgaatatagctttcgtgttgtcgcctacaataagcatgggcctggagtctctacccccgacgtcgccgttagaaccttatcagatgtgccttctgccgctccccagaacctgtctttggaggtgcgaaatagcaaaagtatcatgattcattggcagcctcctgcacccgcaacgcaaaatgggcagataaccgggtataaaattaggtaccgaaaagcctcccggaaatccgacgtgactgagaccctagtcagcggaactcagttgtctcagctaattgaaggccttgatagaggcaccgaatataatttccgtgtagcagctttaactatcaatggaactggcccagctaccgattggctaagcgcagagactttcgagagcgatcttgatgagacccgcgtgcccgaagtccccagttctctgcacgttaggccacttgttacctccatcgtcgtttcttggactccccctgagaatcaaaacatcgtggtgcgcggatacgcaataggctatggcattggttcacctcatgcacagaccatcaaggtcgactacaagcaaaggtactataccattgagaatttggatccctcgtctcattacgttatcaccctgaaggccttcaacaacgtcggcgagggaatccccctgtacgaatcagctgtcactcgtccgcatactgtacccgaccccactcctatgatgccaccggtaggagtccaggcctctatcttaagccacgatactatccgcatcacatgggccgacaacagcttgccgaagcaccagaagattaccgattcccgctactatactgtacgctggaagactaatatacccgctaataccaagtacaaaaacgctaacgcaaccactctgtcctacttggtcaccggactgaaaccaaacaccctgtacgagttctctgtgatggtgaccaagggtcgcaggtcatctacctggagcatgacagcccacggaacaacgttcgaactggtccccaccagtccccctaaagatgtcaccgttgtgtcaaaagaaggtaaacccaagaccatcatcgttaactggcagcctccctccgaggcaaatgggaaaatcaccggatacatcatctattatagcacagatgttaatgcggaaatccatgactgggtcattgagcccgtcgtggggaataggttgacccatcagatccaggaactcacactggacactccttattacttcaaaatccaggctaggaacagtaaaggcatggggcccatgagcgaggctgtgcaatttcggaccccaaaggcaagtgggtcagggggcaaggggtctagactgccggatctaggaagtgattataaaccgccaatgagcggatccaacagccctcacggatcccctaccagccccctggactctaatatgctcctcgtgattatcgttagcgtgggggtgatcacgattgtggtagtcgtgatcatcgccgtgttttgcacgcgtcgcacaacatcacatcagaaaaaaaaacgcgcagcttgtaagagcgtcaatgggtcacacaagtataaaggtaacagtaaagacgtaaaacctcccgacctgtggatccatcacgagagactggagcttaaaccaatcgacaaatcccccgatcccaatccaattatgaccgatacaccaataccacgaaattctcaggacattacaccggtggacaattcaatggacagcaacatccaccaacggcggaactcctaccggggacatgaatctgaggattccatgtccacccttgcggggagaaggggcatgagacccaaaatgatgatgcccttcgactcccagcccccacagcctgtgataagcgcacaccccatacacagcttagacaaccctcatcaccattttcacagtagtagccttgcaagccctgcgcgatcccacctttatcacccgggttccccgtggcctattggtaccagtatgtctctgtccgatcgtgcaaacagtaccgagtcagttaggaatactccttctactgacaccatgcccgctagttcgagtcagacttgctgcaccgatcaccaggatcccgagggggctacgtccagctcatacctcgcaagcagccaagaagaagattccggtcagtcactgcctacggctcatgtgcgacctagccaccccttaaagagttttgccgtgcccgcaatcccacctcccggacctcccacatatgaccctgccctgccttctaccccactcctgagccaacaggcactcaaccaccacatacattcggtgaaaaccgcctctattggaactttagggaggtccaggccccctatgcccgtggtggtgcccagcgcgcctgaggttcaggagactactagaatgttagaggattcagagagcagctacgaacccgacgagctgaccaaggagatggctcacctggaaggactgatgaaagatctgaacgcgatcacgaccgcctag

SEQ ID NO: 314725 - DNA, 7067 bp, Artificial Sequence
  derived and/or modified sequence
gagggaggcgccctggagtctcccctccagcgagaggggctgcgcgggccgggccgggccgggctgggctggagcagcggcggccgcgggagccgagcttgcagcgagggaccggctgaggcgcgcgggagggaaggaggcaagggctccgcggcgctgtcgccgccgctgccgctcactctcggggaagagatggcggcggagcggggagcccggcgactcctcagcaccccctccttctggctctactgcctgctgctgctcgggcgccgggcgccgggcgccgcggccgccaggagcggctccgcgccgcagtccccaggagccagcattcgaacgttcactccattttattttctggtggagccggtggatacactctcagttagaggctcttctgttatattaaactgttcagcatattctgagccttctccaaaaattgaatggaaaaaagatggaacttttttaaacttagtatcagatgatcgacgccagcttctcccggatggatctttatttatcagcaatgtggtgcattccaaacacaataaacctgatgaaggttattatcagtgtgtggccactgttgagagtcttggaactattatcagtagaacagcgaagctcatagtagcaggtcttccaagatttaccagccaaccagaaccttcctcagtttatgctgggaacaatgcaattctgaattgtgaagttaatgcagatttggtcccatttgtgaggtgggaacagaacagacaaccccttcttctggatgatagagttatcaaacttccaagtggaatgctggttatcagcaatgcaactgaaggagatggcgggctttatcgctgcgtagtggaaagtggtgggccaccaaagtatagtgatgaagttgaattgaaggttcttccagatcctgaggtgatatcagacttggtatttttgaaacagccttctcccttagtcagagtcattggtcaggatgtagtgttgccatgtgttgcttcaggacttcctactccaaccattaaatggatgaaaaatgaggaggcacttgacacagaaagctctgaaagattggtattgctggcaggtggtagcctggagatcagtgatgttactgaggatgatgctgggacttatttttgtatagctgataatggaaatgagacaattgaagctcaagcagagcttacagtgcaagctcaacctgaattcctgaagcagcctactaatatatatgctcacgaatctatggatattgtatttgaatgtgaagtgactggaaaaccaactccaactgtgaagtgggtcaaaaatggggatatggttatcccaagtgattattttaagattgtaaaggaacataatcttcaagttttgggtctggtgaaatcagatgaagggttctatcagtgcattgctgaaaatgatgttggaaatgcacaagctggagcccaactgataatccttgaacatgatgttgccatcccaacattacctcccacttcactgaccagtgccactactgaccatctagcaccagccacaacgggaccactgccttcagctcctcgggatgtcgtggcctccctggtctctacccgcttcatcaaattgacgtggcggacacctgcatcagatcctcacggagacaaccttacctactctgtgttctacaccaaggaagggattgctagggaacgtgttgagaataccagtcacccaggagagatgcaagtaaccattcaaaacctaatgccagcgaccgtgtacatctttagagttatggctcaaaataagcatggctcaggagagagttcagctccactgcgagtagaaacacaacctgaggttcagctccctggcccagcacctaaccttcgtgcatatgcagcttcgcctacctccatcactgttacgtgggaaacaccagtgtctggcaatggggaaattcagaattataaattgtactacatggaaaaggggactgataaagaacaggatgttgatgtttcaagtcactcttacaccattaatgggttgaaaaaatatacagagtatagtttccgagtggtggcctacaataaacatggtcctggagtttccacaccagatgttgctgttcgaacattgtcagatgttcccagtgctgctcctcagaatctgtccttggaagtgagaaattcaaagagtattatgattcactggcagccacctgctccagccacacaaaatgggcagattactggctacaagattcgctaccgaaaggcctcccgaaagagtgatgtcactgagaccttggtaagcgggacacagctgtctcagctgattgaaggtcttgatcgggggactgagtataatttccgagtggctgctctaacaatcaatggtacaggcccggcaactgactggctgtctgctgaaacttttgaaagtgacctagatgaaactcgtgttcctgaagtgcctagctctcttcacgtacgcccgctcgttactagcatcgtagtgagctggactcctccagagaatcagaacattgtggtcagaggttacgccattggttatggcattggcagccctcatgcccagaccatcaaagtggactataaacagcgctattacaccattgaaaatctggatcccagctctcactatgtgattaccctgaaagcatttaataacgtgggtgaaggcatccccctgtatgagagtgctgtgaccaggcctcacacagtgccagatcccactcccatgatgccaccagtgggagttcaggcttccattctgagtcatgacaccatcaggattacgtgggcagacaactcgctgcccaagcaccagaagattacagactcccgatactacaccgtccgatggaaaaccaacatcccagcaaacaccaagtacaagaatgcaaatgcaaccactttgagttatttggtgactggtttaaagccgaatacactctatgaattctctgtgatggtgaccaaaggtcgaagatcaagtacatggagtatgacagcccatgggaccacctttgaattagttccgacttctccacccaaggatgtgactgttgtgagtaaagaggggaaacctaagaccataattgtgaattggcagcctccctccgaagccaatggcaaaattacaggttacatcatatattacagtacagatgtgaatgcagagatacatgactgggttattgagcctgttgtgggaaacagactgactcaccagatacaagagttaactcttgacacaccatactacttcaaaatccaggcacggaactcaaagggcatgggacccatgtctgaagctgtccaattcagaacacctaaagcctcagggtctggagggaaaggaagccggctgccagacctaggatccgactacaaacctccaatgagcggcagtaacagccctcatgggagccccacctctcctctggacagtaatatgctgctggtcataattgtttctgttggcgtcatcaccatcgtggtggttgtgattatcgctgtcttttgtacccgtcgtaccacctctcaccagaaaaagaaacgagctgcctgcaaatcagtgaatggctctcataagtacaaagggaattccaaagatgtgaaacctccagatctctggatccatcatgagagactggagctgaaacccattgataagtctccagacccaaaccccatcatgactgatactccaattcctcgcaactctcaagatatcacaccagttgacaactccatggacagcaatatccatcaaaggcgaaattcatacagagggcatgagtcagaggacagcatgtctacactggctggaaggcgaggaatgagaccaaaaatgatgatgccctttgactcccagccaccccagcctgtgattagtgcccatcccatccattccctcgataaccctcaccatcatttccactccagcagcctcgcttctccagctcgcagtcatctctaccacccgggcagcccatggcccattggcacatccatgtccctttcagacagggccaattccacagaatccgttcgaaatacccccagcactgacaccatgccagcctcttcgtctcaaacatgctgcactgatcaccaggaccctgaaggtgctaccagctcctcttacttggccagctcccaagaggaagattcaggccagagtcttcccactgcccatgttcgcccttcccacccattgaagagcttcgccgtgccagcaatcccgcctccaggacctcccacctatgatcctgcattgccaagcacaccattactgtcccagcaagctctgaaccatcacattcactcagtgaagacagcctccatcgggactctaggaaggagccggcctcctatgccagtggttgttcccagtgcccctgaagtgcaggagaccacaaggatgttggaagactccgagagtagctatgaaccagatgagctgaccaaagagatggcccacctggaaggactaatgaaggacctaaacgctatcacaacagcatgacgaccttcaccaggacctgacttcaaacctgagtctggaagtcttggaacttacccttgaaaacaaggaattgtacagagtacgagaggacagcacttgagaacacagaatgagccagcagactggccagcgcctctgtgtagggctggctccaggcatggccacctgccttcccctggtcagcctggaagaagcctgtgtcgaggcagcttccctttgcctgctgatattctgcaggactgggcaccatgggccaaaattttgtgtccagggaagaggcgagaagtgcaacctgcatttcactttgtggtcaggccgtgtctttgtgctgtgactgcatcacctttatggagtgtagacattggcatttatgtacaattttatttgtgtcttattttattttaccttcaaaaacaaaaacgccatccaaaaccaaggaagtccttggtgttctccacaagtggttgacatttgactgcttgttccaattatgtatggaaagtctttgacagtgtgggtcgttcctggggttggcttgttttttggtttcatttttattttttaattctgagtcattgcatcctctaccagctgttaatccatcactctgagggggaggaaatgttgcattgctgtttgtaagctttttttattatttttttattataattattaaaggcctgactctttcctctcatcactgtgagattacagatctatttgaattgaatgaaatgtaacattgaaaagacttgtttgttgctttctgtgcagtttcagtattggggcgggtggggggctgggggttggtaataggaaatggaggggctgctgaggtcctgtgaatgtttctgtcattgtactttcttccagaagcctgcagagaatggaagcatcttctttattgtcctttcctggcatgtccatccttattgtcactacgttgcaactggagtttgatttggatctggttttaaaattcttctgtgcaatagatgggtttgaggatttagcggccctgatgtcttggtcatagcctggtaagaatgtccatgctgaggagccagatgttgtatttctaactgcctgagtcacacagaatagggtaagagcctgaccccattctgtaaatcagaaagcaaggatggagaccctttcctgctgctattattggctctctttgaggaagttggaggttaaggaaggaacttgtttgtttccgtatacgactccttcttctctctagttcagtcttcagccagtccagcgctctcttccacacttcagagccccttcagagaaagcattagcaggaatgagacaaggcagagctgcagtgccccctgaggcttccacacatctttctgaatattatttttcaagtaacaagggcagggacagcggaaacagctgcccaccccccccatcccagcagctcagctaagccctgatgagaatgaagccacaggagttgtctgaggtgaacccagccgctcagccacacatggaagccattgcctttgcacatagttcttgggttctttttcctaaaaaggtaaggagctgaggtgtgtggttttttaatattaagaatatataatggaaaacacacgactgacgctcaggcatcttcccctactccccaacagatccccagaagacagcgtggaaggcagtgtagacagtaaatcgggcttcagttctatagccaagaagagatcagctgctgaaaccaccagtgggtaccccaggccacctgcctttgaacttggggatttgccatgtttgatcttgtcacatacttgcttttttacaagatgaactctttgtatttatgatttggggggcaatgaaaggtgcaatgcaggaactgctgctgccgagctcgctggtcacatgggggtgccaggcgggattctggaaaaccagtgcacttaaactgatcctgaagagagctgtcccagcactctggccaccaggagggccagattccccagaaactaccttttgcccaaagaacatgctcagtatttggggcatttcctcccacaaaccctgactgcttctgttacctcagggccttggtacctggatactgccacagaattggggcgggtgggggaggggcctatttttaaataaaataactgttcaaagttgggggttttttaaaaaattaagaaaaaggaaagctattctgtattgcaccttttcacaatttaatacattttcttacattttcctgtgattttcgaaactaaaccattgtgtgtcctgtagtgtcctggttgagctgccgctcagcagcttcctcggggggatttggaacacctgtgtctgtcgccgcactgcctgtgggaggggcccagagggctgctgggactggcgtctgtacacacttgtttggccttttctgtagttgatgctgtaaactctatggctttttaaaaacgatttcatgtttttatttagtattggaaatccaatacacttttttaatccaatcaaac

SEQ ID NO: 314726 - DNA, 3519 bp, Artificial Sequence
  derived and/or modified sequence
atgaagaatgaggaggccctcgatacagaatcttcggaacgactggtcctcctcgcgggtgggagcttagagatctctgacgtcacagaagacgatgcgggtacgtatttttgtatcgcagataatggcaatgagacaatcgaggcgcaggcggagctgactgtccaggctcaaccagagtttctgaaacaacccactaacatctacgcacacgaaagtatggacatagtctttgagtgcgaagtcaccggaaagcccactcctacagtaaagtgggtgaagaacggggatatggtgattccatccgactacttcaagattgtgaaagagcataatctacaggtccttgggctcgtaaagagtgatgagggattctaccagtgtatcgctgaaaacgacgtaggaaacgctcaggcaggggcacaactcattatactggagcatgacgtggccatccctactctgcccccaacttctctgacatctgctaccacagaccacctcgctccagctacaacgggtcccttacccagcgcaccccgagatgtcgtcgccagtcttgtcagcacccgctttataaagctaacctggaggacaccagcttctgatccccacggagataacctgacgtactctgttttctataccaaggagggcatcgccagggagagggtagagaatactagccacccgggagaaatgcaagttaccattcagaacttaatgccagccacagtttatatttttcgggtgatggcccagaataagcacgggagcggtgagagcagcgctcccctgcgtgtcgagacacagccagaagtgcagctccctggtccagctcccaatctgagggcttatgctgcctcccctacctccatcacagtgacctgggaaacacctgtgtcgggaaatggggaaattcagaactacaaattgtactacatggagaagggcaccgataaggagcaagacgtggatgtttcttcccactcatatacgataaatggcctgaaaaagtacactgaatatagctttcgagttgtcgcgtataacaagcacgggcctggggtcagcaccccagacgtcgccgtcagaactctttccgacgtgcctagcgccgctccacagaatctgtcactagaagtgcgcaactccaagagcattatgatccattggcagcctccggcaccagctactcaaaatggtcagattactggctataagattagataccggaaggcaagccggaagagtgatgtgaccgaaactcttgtgtctggtacgcagctctcgcagttaattgagggactcgatagggggactgagtacaactttagggttgctgcactcacaataaacggaacagggccagccaccgactggctcagcgccgaaaccttcgagtccgatctcgatgagacccgggtccccgaggtcccttcatccctgcacgtgagaccgttggtaactagtatcgtagtgtcctggaccccccctgaaaaccagaatatcgttgttcgcggatatgcaataggctacggaatcggctcaccacatgctcagacaattaaagtggattataagcagcggtactatactatcgaaaacctagacccgagcagtcactatgttattacattgaaagcctttaacaatgtgggagaggggatcccactatatgagagcgcagtgaccaggcctcacaccgtgcccgatcctactcccatgatgcccccagtgggggtccaagcttctatcctgtcacacgataccatccgaatcacttgggccgataacagcctgcctaagcaccagaagattactgacagtcggtattacactgtgcggtggaagaccaacattccagcaaatacaaaatataagaacgctaatgctactacactgtcttacctcgtaacaggcctaaagccgaacactctctatgagttttctgtgatggtaactaaaggtagaaggtcatccacatggtccatgacagcccacggaacgacctttgaattggtcccgactagcccaccgaaggatgtgactgtggtatcgaaagagggaaaacctaagactattattgtcaactggcagcctccttccgaggccaatgggaaaattaccggctacattatatattactctaccgatgtaaacgcagaaatccacgactgggtgatagagcctgtggttggcaatcgacttacgcatcagatccaggagcttacccttgacaccccctattactttaaaatccaggcgcgtaacagcaaaggcatgggtcctatgtcagaggctgtgcagtttaggacgcccaaagcaagcgggtctggtggaaaggggagccggcttcctgatctcggttctgattataaaccacctatgagcgggtcaaatagtccccatggatcaccgacgagccccctggattccaacatgttgctggtcatcatcgtgtccgtaggagtgatcaccatagtggtagtggtgattattgctgttttctgtactagacgcaccacatctcaccagaaaaagaaaagagctgcgtgtaagagcgtaaatggctcccataagtacaagggcaattctaaagacgtaaagcctcctgatctgtggattcaccacgaacgactggagcttaagcctattgacaagtcgcctgaccccaatccgataatgaccgacactccaatccctagaaactctcaggacattacaccagttgataacagtatggacagcaacatccatcagcggcgtaattcgtatagaggccatgagtcggaggacagtatgtccaccctggctggccgtaggggtatgcgcccaaagatgatgatgccctttgatagccagccccctcagccggtgatctcagctcacccgatccattcattggataacccccatcatcactttcattcttcttctttagccagtcctgcaaggagccacctttaccacccaggctctccatggcccattgggacttcaatgtccctctccgatcgagctaacagcacggaatccgttcgtaatacgcctagcaccgacactatgcctgcaagctccagtcaaacatgctgtacggatcatcaggacccggaaggggcaacatcttcatcttatcttgcttcctcccaggaggaggattcagggcagtctctgcccactgcccacgtccgaccttcacatccgctaaaaagctttgccgtgcccgcaattccaccccctggtccacctacgtatgacccagctttaccttctacccccttgctgtctcagcaagccctgaatcaccatatccactctgttaagacggctagcattggcacgctgggcagaagtcgcccacccatgcccgtcgtggtgccaagcgcgcctgaggtgcaggaaaccacccgcatgcttgaggattcggagtctagctacgagccggatgagctgacgaaagagatggcgcacttagaaggcctgatgaaggatctgaatgctatcacaacggcttag

SEQ ID NO: 314727 - DNA, 3519 bp, Artificial Sequence
  derived and/or modified sequence
atgaagaacgaggaggccctggacaccgagagcagcgagagactggtgctgctggccggcggcagcctggagatcagcgacgtgaccgaggacgacgccggcacctacttctgcatcgccgacaacggcaacgagaccatcgaggcccaggccgagctgaccgtgcaggcccagcccgagttcctgaagcagcccaccaacatctacgcccacgagagcatggacatcgtgttcgagtgcgaggtgaccggcaagcccacccccaccgtgaagtgggtgaagaacggcgacatggtgatccccagcgactacttcaagatcgtgaaggagcacaacctgcaggtgctgggcctggtgaagagcgacgagggcttctaccagtgcatcgccgagaacgacgtgggcaacgcccaggccggcgcccagctgatcatcctggagcacgacgtggccatccccaccctgccccccaccagcctgaccagcgccaccaccgaccacctggcccccgccaccaccggccccctgcccagcgcccccagagacgtggtggccagcctggtgagcaccagattcatcaagctgacctggagaacccccgccagcgacccccacggcgacaacctgacctacagcgtgttctacaccaaggagggcatcgccagagagagagtggagaacaccagccaccccggcgagatgcaggtgaccatccagaacctgatgcccgccaccgtgtacatcttcagagtgatggcccagaacaagcacggcagcggcgagagcagcgcccccctgagagtggagacccagcccgaggtgcagctgcccggccccgcccccaacctgagagcctacgccgccagccccaccagcatcaccgtgacctgggagacccccgtgagcggcaacggcgagatccagaactacaagctgtactacatggagaagggcaccgacaaggagcaggacgtggacgtgagcagccacagctacaccatcaacggcctgaagaagtacaccgagtacagcttcagagtggtggcctacaacaagcacggccccggcgtgagcacccccgacgtggccgtgagaaccctgagcgacgtgcccagcgccgccccccagaacctgagcctggaggtgagaaacagcaagagcatcatgatccactggcagccccccgcccccgccacccagaacggccagatcaccggctacaagatcagatacagaaaggccagcagaaagagcgacgtgaccgagaccctggtgagcggcacccagctgagccagctgatcgagggcctggacagaggcaccgagtacaacttcagagtggccgccctgaccatcaacggcaccggccccgccaccgactggctgagcgccgagaccttcgagagcgacctggacgagaccagagtgcccgaggtgcccagcagcctgcacgtgagacccctggtgaccagcatcgtggtgagctggaccccccccgagaaccagaacatcgtggtgagaggctacgccatcggctacggcatcggcagcccccacgcccagaccatcaaggtggactacaagcagagatactacaccatcgagaacctggaccccagcagccactacgtgatcaccctgaaggccttcaacaacgtgggcgagggcatccccctgtacgagagcgccgtgaccagaccccacaccgtgcccgaccccacccccatgatgccccccgtgggcgtgcaggccagcatcctgagccacgacaccatcagaatcacctgggccgacaacagcctgcccaagcaccagaagatcaccgacagcagatactacaccgtgagatggaagaccaacatccccgccaacaccaagtacaagaacgccaacgccaccaccctgagctacctggtgaccggcctgaagcccaacaccctgtacgagttcagcgtgatggtgaccaagggcagaagaagcagcacctggagcatgaccgcccacggcaccaccttcgagctggtgcccaccagcccccccaaggacgtgaccgtggtgagcaaggagggcaagcccaagaccatcatcgtgaactggcagccccccagcgaggccaacggcaagatcaccggctacatcatctactacagcaccgacgtgaacgccgagatccacgactgggtgatcgagcccgtggtgggcaacagactgacccaccagatccaggagctgaccctggacaccccctactacttcaagatccaggccagaaacagcaagggcatgggccccatgagcgaggccgtgcagttcagaacccccaaggccagcggcagcggcggcaagggcagcagactgcccgacctgggcagcgactacaagccccccatgagcggcagcaacagcccccacggcagccccaccagccccctggacagcaacatgctgctggtgatcatcgtgagcgtgggcgtgatcaccatcgtggtggtggtgatcatcgccgtgttctgcaccagaagaaccaccagccaccagaagaagaagagagccgcctgcaagagcgtgaacggcagccacaagtacaagggcaacagcaaggacgtgaagccccccgacctgtggatccaccacgagagactggagctgaagcccatcgacaagagccccgaccccaaccccatcatgaccgacacccccatccccagaaacagccaggacatcacccccgtggacaacagcatggacagcaacatccaccagagaagaaacagctacagaggccacgagagcgaggacagcatgagcaccctggccggcagaagaggcatgagacccaagatgatgatgcccttcgacagccagcccccccagcccgtgatcagcgcccaccccatccacagcctggacaacccccaccaccacttccacagcagcagcctggccagccccgccagaagccacctgtaccaccccggcagcccctggcccatcggcaccagcatgagcctgagcgacagagccaacagcaccgagagcgtgagaaacacccccagcaccgacaccatgcccgccagcagcagccagacctgctgcaccgaccaccaggaccccgagggcgccaccagcagcagctacctggccagcagccaggaggaggacagcggccagagcctgcccaccgcccacgtgagacccagccaccccctgaagagcttcgccgtgcccgccatccccccccccggcccccccacctacgaccccgccctgcccagcacccccctgctgagccagcaggccctgaaccaccacatccacagcgtgaagaccgccagcatcggcaccctgggcagaagcagaccccccatgcccgtggtggtgcccagcgcccccgaggtgcaggagaccaccagaatgctggaggacagcgagagcagctacgagcccgacgagctgaccaaggagatggcccacctggagggcctgatgaaggacctgaacgccatcaccaccgcctag

SEQ ID NO: 314728 - protein, 617 aa, Artificial Sequence
  derived and/or modified sequence
MELYTGLQKLTIKNSGLRSIQPRAFAKNPHLRYINLSSNRLTTLSWQLFQTLSLRELQLEQNFFNCSCDIRWMQLWQEQGEAKLNSQNLYCINADGSQLPLFRMNISQCDLPEISVSHVNLTVREGDNAVITCNGSGSPLPDVDWIVTGLQSINTHQTNLNWTNVHAINLTLVNVTSEDNGFTLTCIAENVVGMSNASVALTVYYPPRVVSLEEPELRLEHCIEFVVRGNPPPTLHWLHNGQPLRESKIIHVEYYQEGEISEGCLLFNKPTHYNNGNYTLIAKNPLGTANQTINGHFLKEPFPESTDNFILFDEVSPTPPITVTHKPEEDTFGVSIAVGLAAFACVLLVVLFVMINKYGRRSKFGMKGPVAVISGEEDSASPLHHINHGITTPSSLDAGPDTVVIGMTRIPVIENPQYFRQGHNCHKPDTYVQHIKRRDIVLKRELGEGAFGKVFLAECYNLSPTKDKMLVAVKALKDPTLAARKDFQREAELLTNLQHEHIVKFYGVCGDGDPLIMVFEYMKHGDLNKFLRAHGPDAMILVDGQPRQAKGELGLSQMLHIASQIASGMVYLASQHFVHRDLATRNCLVGANLLVKIGDFGMSRDVYSTDYYRVVQA

SEQ ID NO: 314729 - DNA, 414 bp, Artificial Sequence
  derived and/or modified sequence
atgacacgcatccccgtgatagagaatccacagtacttcagacagggtcacaactgtcacaaaccagacacttatgtgcagcatataaagcgacgagacatcgtgcttaaacgggagttaggggagggggctttcggtaaggtgttcctggcagaatgttataacttgtcgccaactaaggacaaaatgctcgtcgccgtaaaagcactaaaagatccaaccctggcagctagaaaagattttcagcgcgaagctgagttattgacgaatctgcagcacgagcacattgtgaagttctacggggtctgcggagacggcgatcccctcataatggtgtttgagtatatgaagcacggcgacctgaataagttcctgtcctccatatcttccccaaagtcacaccagcaagggtag

SEQ ID NO: 314730 - DNA, 1854 bp, Artificial Sequence
  derived and/or modified sequence
atggaactgtataccgggttacagaagcttaccataaagaatagcggcctcagatctatccagccccgcgcattcgccaagaatccgcacctccggtatattaatctttcctctaatcggctgaccacattgtcatggcagctctttcaaaccctgtccttacgtgaattgcagctcgaacagaatttcttcaattgctcctgtgacatacgctggatgcagctctggcaggaacaaggcgaagctaaactgaattcgcagaatttgtactgtattaacgccgatggttctcagctgcctctatttcgaatgaacatttcccaatgtgacttacccgaaatttctgtttcacacgtgaatttgaccgtgagagaaggcgataacgcagtcatcacctgcaacggctccgggtccccactgcccgacgtggattggattgtgactggactacagagcattaatactcatcagacgaacttaaactggacaaatgtccatgcgatcaatttgacactcgtgaatgttacatccgaagacaatggctttactctgacctgtatcgctgaaaacgttgtcggaatgtccaacgcgagcgtggctctgactgtgtattacccccccagagtggttagcctggaagaacccgaattaagactcgaacactgcattgaatttgtcgtgcgcggtaatcctccgcctacactccattggctgcacaatgggcagccactgcgggagtctaaaattattcatgtggaatactatcaagaaggggagatcagtgaagggtgtcttttattcaataagcctacgcattataataatgggaattatacgctcatagcaaaaaatccactaggcaccgccaaccagacaattaatggacatttcctgaaggagccctttcccgagtctaccgacaatttcatactgttcgatgaagtatctcctacgcctcccatcaccgtaactcataagcctgaggaagacacatttggcgtatccatcgccgtgggcctggcagccttcgcatgcgtgctgctggtggttttgttcgtgatgatcaataagtacggccgtcggtcgaagttcggaatgaaagggccagtggccgtcatcagcggcgaggaggactcggcctctccgttgcaccacattaatcacggtattactacaccaagcagcctggacgccggcccagacactgtagtgatcgggatgacgaggattcctgtgattgaaaacccacagtattttagacaggggcacaactgccataaaccagacacatacgtccagcacattaagcgtcgggacattgtgttaaagagagagttaggagagggagcttttggaaaggtatttctagccgagtgttataatctgagccctaccaaggataagatgctggttgcagtgaaggccctcaaagacccaacactggcagcccggaaagactttcagagggaggccgaattattaaccaacctgcagcatgagcatattgtcaagttctatggggtatgtggggatggggaccctttgattatggtgttcgaatacatgaagcacggtgacctgaacaagttcctccgtgcacatggccctgatgctatgatcctggtggacgggcagcctcggcaagccaaaggagagctgggactgtctcagatgctccatattgcctcacagatcgcaagcgggatggtgtatcttgcttcccaacacttcgtacaccgggaccttgccaccagaaactgcttggttggtgcaaacctcctcgtcaaaatcggcgattttggcatgagtagggatgtgtatagcacagattactaccgagttgtacaagcatag

SEQ ID NO: 314731 - DNA, 414 bp, Artificial Sequence
  derived and/or modified sequence
atgacccgcatccctgtgattgagaacccccagtacttccggcagggccacaactgccacaagccagacacctacgtgcagcacatcaagagaagagacatcgtgctgaagcgggagctgggggagggcgccttcggcaaggtgttcctggccgagtgctacaacctgagccccaccaaggacaagatgctggtggccgtgaaggccctgaaggaccccaccctggccgccaggaaggacttccagcgggaggccgagctgctgaccaacctgcagcacgagcacatcgtgaagttctacggcgtgtgtggagatggagaccccctcatcatggtgtttgagtacatgaagcacggggacctgaacaagttcctgagcagcatcagcagccccaagagccaccagcagggctag

SEQ ID NO: 314732 - DNA, 1854 bp, Artificial Sequence
  derived and/or modified sequence
atggagctgtacacaggcctgcagaagctgaccatcaagaacagcggcctgcggagcatccagccccgggcctttgccaagaacccccacctgcgctacatcaacctgagcagcaaccggctgaccaccctgtcctggcagctgttccagaccctgagcctgcgggagctgcagctggagcagaacttcttcaactgcagctgtgacatccgctggatgcagctgtggcaggagcagggcgaggccaagctgaacagccagaacctgtactgcatcaatgctgatggcagccagctgcccctcttcaggatgaacatcagccagtgtgacctgcctgagatctctgtgagccacgtgaacctgactgtgcgggagggggacaatgctgtgatcacctgcaatggcagcggcagccccctgcctgatgtggactggatcgtgacaggcctgcagagcatcaacacccaccagaccaacctgaactggaccaacgtgcacgccatcaacctgaccctggtgaatgtgaccagcgaggacaatggcttcaccctgacctgcatcgcagaaaatgtggtgggcatgagcaatgcctctgtggccctgactgtgtactacccaccccgggtggtgtccctggaggagcctgagctgcggctggagcactgcattgaatttgtggtgcggggcaaccccccacccaccctgcactggctgcacaacggccagcccctgcgggagagcaagatcatccacgtggagtactaccaggagggggagatcagcgagggctgcctgctcttcaacaagcccacccactacaacaatggaaactacaccctgattgccaagaaccccctgggcacagccaaccagaccatcaatggccacttcctgaaggagcccttccctgagagcacagacaacttcatcctgtttgatgaggtgagccccaccccacccatcaccgtgacccacaagccagaggaggacaccttcggcgtgtccattgctgtgggcctggccgcctttgcctgtgtgctgctggtggtgctgtttgtgatgatcaacaagtatggccgccgcagcaagtttggcatgaagggccctgtggccgtcatcagcggggaggaggacagcgccagccccctgcaccacatcaaccacggcatcaccacccccagcagcctggatgctggccctgacacagtggtgattggcatgacccgcatccctgtgattgagaacccccagtacttccggcagggccacaactgccacaagccagacacctacgtgcagcacatcaagagaagagacatcgtgctgaagcgggagctgggggagggcgccttcggcaaggtgttcctggccgagtgctacaacctgagccccaccaaggacaagatgctggtggccgtgaaggccctgaaggaccccaccctggccgccaggaaggacttccagcgggaggccgagctgctgaccaacctgcagcacgagcacatcgtgaagttctacggcgtgtgtggagatggagaccccctcatcatggtgtttgagtacatgaagcacggggacctgaacaagttcctgcgggcccacggcccagatgccatgatcctggtggatggccagccccggcaggccaagggggagctgggcctgagccagatgctgcacatcgccagccagatcgccagcggcatggtgtacctggccagccagcactttgtgcaccgggacctggccaccaggaactgcctggtgggcgccaacctgctggtgaagattggagactttggcatgagcagagatgtgtacagcacagactactacagagtggtgcaggcctag

SEQ ID NO: 314733 - DNA, 414 bp, Artificial Sequence
  derived and/or modified sequence
atgacccggatccccgtgatcgagaacccccagtacttccggcagggacacaactgtcacaagcccgacacctacgtgcagcacatcaaaagacgagatatagtcctcaaaagagagctgggcgagggagcattcggcaaggtgttcctggctgagtgctacaacctgagccccaccaaggataaaatgctcgtagccgtgaaagccttaaaagacccaacgttagccgcgcgcaaggattttcagagagaggccgaactactgaccaacctccaacatgaacacatcgtcaaattctatggcgtgtgtggcgatggggacccacttattatggtcttcgaatacatgaagcacggcgacctgaacaagtttctttcatcaatatccagcccaaaatctcaccagcaagggtag

SEQ ID NO: 314734 - DNA, 1854 bp, Artificial Sequence
  derived and/or modified sequence
atggagctgtacaccggcctgcagaagctgaccatcaagaacagcggccttaggtctattcaacccagggcttttgcaaagaacccgcatttaagatatattaatctctcttctaatagactgacaacactgagctggcagctgtttcaaaccctctccctgcgcgaactccagctggaacagaactttttcaattgtagttgtgatattcggtggatgcaattgtggcaagagcagggggaggctaaactgaattcgcagaacttgtactgcattaatgccgatggtagtcagttgcccctttttcggatgaacattagccagtgtgatctgccagagatctccgtctcccacgttaatctaacagtcagggaaggggataatgccgtgatcacctgcaatggatccggaagtccacttcccgatgttgattggatcgtgacagggctgcagagcattaatactcaccaaaccaacctgaactggacaaacgtgcatgccattaacctgaccttggttaatgtcacctcagaagacaatgggttcactctgacctgtattgccgagaatgtggtgggcatgtccaatgcaagcgttgctctcaccgtgtactacccgccgagggtggtgagcttggaggagccggagcttagactcgagcactgcatcgagttcgttgtgcggggtaatcctccaccaactcttcactggttgcacaacggccagccgctaagggaatccaaaattattcatgtggagtactaccaggagggggagatatccgagggctgtttgcttttcaacaagcctacacactacaacaacgggaattacacactgatcgccaagaacccactgggcacagctaaccagaccatcaacggccatttcctcaaggagccatttccagaatcaaccgacaacttcatcctgttcgacgaggtttcacctaccccacctatcacagtaacacataaaccagaggaagataccttcggagtgtccatcgccgtcgggctggccgcctttgcgtgtgtgcttctggtggttcttttcgtgatgatcaacaaatatgggcgccggagcaagttcgggatgaaaggacctgttgccgtgatttcaggggaggaggacagtgcctcgccactgcaccatatcaaccatgggattaccacacctagcagccttgatgccgggcccgacaccgttgttattggaatgactaggatccctgtgattgagaacccccagtacttcagacaaggccacaattgtcataagcccgacacgtacgttcagcacataaaacggcgagatatagtgctgaaacgcgaactgggcgaaggtgccttcggcaaggtgtttcttgccgagtgttataacctgtccccgactaaagacaagatgttagtcgcagttaaggccttgaaagacccaaccctggctgcgagaaaggatttccagcgcgaggccgagctacttactaacctgcaacatgagcacatcgttaagttctacggagtttgtggcgacggtgatcctctcattatggtatttgaatatatgaagcatggtgacttgaacaagtttttgcgtgcccacggaccagacgctatgatcctggtcgatggtcagccacggcaggctaagggcgaactgggtctgtctcagatgctgcatatcgctagccagatcgccagcggcatggtctacctggcgagccagcactttgtgcacagggatctcgctactcgtaactgcctagtgggtgccaacttgttagttaaaattggcgactttggcatgtccagagatgtgtacagtacagactactaccgggtggtccaggcttag

SEQ ID NO: 314735 - DNA, 414 bp, Artificial Sequence
  derived and/or modified sequence
atgacaaggattccggtgattgagaatccgcagtactttcggcaagggcacaactgtcataagccagatacttacgtgcagcatataaaacgaagagatatcgtgcttaaaagggagcttggcgagggggcattcgggaaggtgttcttggcagagtgctacaacttgagtcccacaaaggacaagatgctggtggccgtaaaggccctgaaagatccgaccttggctgccaggaaggatttccagagggaagccgaactcctcaccaacttgcaacacgaacacatcgtcaaattctatggggtctgcggcgatggtgacccccttatcatggtttttgagtacatgaaacatggtgacctcaacaagttccttagctcgattagttctcctaaatcccatcagcaggggtag

SEQ ID NO: 314736 - DNA, 1854 bp, Artificial Sequence
  derived and/or modified sequence
atggaactgtacacaggtctgcagaaactcacgataaagaactccgggctgcgatcgatccagccgagagctttcgcaaagaacccacatctgaggtatatcaacctatcctccaatcgccttaccacactttcatggcagctcttccagacactgagtctgagagagctacaattagagcagaattttttcaattgttcatgtgacatccgctggatgcaactctggcaagagcagggggaagccaagctcaactcgcaaaatctttactgtatcaatgctgacggcagccagctgcctctcttcagaatgaacatcagccagtgtgaccttcccgagatttcggtctcacacgttaacttaacagttcgggaaggcgataatgcagtcataacctgtaacgggtctggctctcccctgcccgatgtggactggatcgtcacgggcctccagagtatcaatacacaccagaccaacctcaattggacaaatgtgcacgccattaatcttacgttagtcaacgttacaagtgaagacaatggttttaccctgacctgtatcgctgaaaacgtggtgggaatgtccaatgcctcggtggctctgaccgtttattaccctcctagggtggttagtctggaagagccagagctgcgcctcgagcactgtattgagtttgtcgttcgaggcaaccctcctccaacactgcactggttgcacaacggccaacctctgcgagaaagcaagatcatccacgttgaatattatcaagagggggagatctccgaaggatgtctgctttttaacaagcccactcactataataatggcaactataccctcatcgccaaaaaccctctgggaaccgccaaccagacaatcaatggccactttctaaaggaaccttttccagagtctactgacaacttcattttattcgatgaggtttctccgactccaccgattaccgtgacccacaaaccggaggaagatacttttggagtcagcatcgcagtgggcctagcggctttcgcttgtgtcctgctggttgtgctgttcgtcatgattaacaaatatgggagaaggagtaagtttggaatgaaggggcctgtggccgtgatctctggggaagaagattccgctagcccgcttcatcatattaatcacggcataactacacctagctccctggatgctggccctgacactgtcgtaattggaatgactagaatccccgttattgaaaacccacagtatttccgccaggggcataactgtcataagcccgatacctatgtgcagcatatcaagagaagggacatcgtccttaaacgggagctgggagagggggcttttggcaaagtgtttcttgctgagtgctataatctgagcccaaccaaagataagatgctggttgcagtgaaagcgttgaaggaccctacgctggcagctcggaaagacttccagcgcgaggctgagcttcttactaatctgcagcatgaacacattgtgaagttttatggcgtgtgcggcgacggagaccctcttattatggttttcgagtacatgaagcatggcgaccttaacaagttcctgcgggcacacggaccagacgccatgattctggtagatgggcagccgcgtcaggctaagggagagcttggcttgagccaaatgcttcacatcgcctctcagattgctagcggaatggtataccttgcttcacaacactttgtacacagggatctcgccactcgtaactgcctggtaggggctaatttgttagttaagatcggcgattttggcatgtcccgagacgtgtattccactgactattacagagtcgttcaagcctag

SEQ ID NO: 314737 - DNA, 414 bp, Artificial Sequence
  derived and/or modified sequence
atgaccagaatccccgtgatcgagaacccccagtacttcagacagggccacaactgccacaagcccgacacctacgtgcagcacatcaagagaagagacatcgtgctgaagagagagctgggcgagggcgccttcggcaaggtgttcctggccgagtgctacaacctgagccccaccaaggacaagatgctggtggccgtgaaggccctgaaggaccccaccctggccgccagaaaggacttccagagagaggccgagctgctgaccaacctgcagcacgagcacatcgtgaagttctacggcgtgtgcggcgacggcgaccccctgatcatggtgttcgagtacatgaagcacggcgacctgaacaagttcctgagcagcatcagcagccccaagagccaccagcagggctag

SEQ ID NO: 314738 - DNA, 1854 bp, Artificial Sequence
  derived and/or modified sequence
atggagctgtacaccggcctgcagaagctgaccatcaagaacagcggcctgagaagcatccagcccagagccttcgccaagaacccccacctgagatacatcaacctgagcagcaacagactgaccaccctgagctggcagctgttccagaccctgagcctgagagagctgcagctggagcagaacttcttcaactgcagctgcgacatcagatggatgcagctgtggcaggagcagggcgaggccaagctgaacagccagaacctgtactgcatcaacgccgacggcagccagctgcccctgttcagaatgaacatcagccagtgcgacctgcccgagatcagcgtgagccacgtgaacctgaccgtgagagagggcgacaacgccgtgatcacctgcaacggcagcggcagccccctgcccgacgtggactggatcgtgaccggcctgcagagcatcaacacccaccagaccaacctgaactggaccaacgtgcacgccatcaacctgaccctggtgaacgtgaccagcgaggacaacggcttcaccctgacctgcatcgccgagaacgtggtgggcatgagcaacgccagcgtggccctgaccgtgtactacccccccagagtggtgagcctggaggagcccgagctgagactggagcactgcatcgagttcgtggtgagaggcaaccccccccccaccctgcactggctgcacaacggccagcccctgagagagagcaagatcatccacgtggagtactaccaggagggcgagatcagcgagggctgcctgctgttcaacaagcccacccactacaacaacggcaactacaccctgatcgccaagaaccccctgggcaccgccaaccagaccatcaacggccacttcctgaaggagcccttccccgagagcaccgacaacttcatcctgttcgacgaggtgagccccaccccccccatcaccgtgacccacaagcccgaggaggacaccttcggcgtgagcatcgccgtgggcctggccgccttcgcctgcgtgctgctggtggtgctgttcgtgatgatcaacaagtacggcagaagaagcaagttcggcatgaagggccccgtggccgtgatcagcggcgaggaggacagcgccagccccctgcaccacatcaaccacggcatcaccacccccagcagcctggacgccggccccgacaccgtggtgatcggcatgaccagaatccccgtgatcgagaacccccagtacttcagacagggccacaactgccacaagcccgacacctacgtgcagcacatcaagagaagagacatcgtgctgaagagagagctgggcgagggcgccttcggcaaggtgttcctggccgagtgctacaacctgagccccaccaaggacaagatgctggtggccgtgaaggccctgaaggaccccaccctggccgccagaaaggacttccagagagaggccgagctgctgaccaacctgcagcacgagcacatcgtgaagttctacggcgtgtgcggcgacggcgaccccctgatcatggtgttcgagtacatgaagcacggcgacctgaacaagttcctgagagcccacggccccgacgccatgatcctggtggacggccagcccagacaggccaagggcgagctgggcctgagccagatgctgcacatcgccagccagatcgccagcggcatggtgtacctggccagccagcacttcgtgcacagagacctggccaccagaaactgcctggtgggcgccaacctgctggtgaagatcggcgacttcggcatgagcagagacgtgtacagcaccgactactacagagtggtgcaggcctag

SEQ ID NO: 314739 - protein, 264 aa, Artificial Sequence
  derived and/or modified sequence
MHLEGRDGRRYPGAPAVELLQTSVPSGLAELVAGKRRLPRGAGGADPSHSCPRGAAGQSSWAPAGQEFASFLTKGRSHSSLPQMSSSRSKDSCFTENTPLLRNSLQEKGSRCIPVYHPEFITAEESWEDSSADWERRYLLSREVSGLSASASSEKGDLLDSPHIRLRLSKLRRCVQWLKVMGLFAFVVLCSILFSLYPDQGKLWQLLALSPLENYSVNLSSHVDSTLLQVDLAGALVASGPSRPGREEHIVVELTQADALGSRW

SEQ ID NO: 314740 - protein, 218 aa, Artificial Sequence
  derived and/or modified sequence
MHLEGRDGRRYPGAPAVELLQTSVPSGLAELVAGKRRLPRGAGGADPSHSCPRGAAGQSSWAPAGQEFASFLTKGRSHSSLPQMSSSRSKDSCFTENTPLLRNSLQEKGSRCIPVYHPEFITAEESWEDSSADWERRYLLSREVSGLSASASSEKGDLLDSPHIRLRLSKLRRCVQWLKVMGLFAFVVLCSVTHNWTVYLNPRRSEHSVMSRTFEVLT

SEQ ID NO: 314741 - DNA, 2517 bp, Artificial Sequence
  derived and/or modified sequence
atgcacctggaaggccgcgatggccgcaggtatcccggggcccccgcggtcgaattgctgcagacaagcgtgccatctgggctggctgagctggtggctgggaagaggaggctgcccaggggagctggcggagccgatccgtctcactcctgcccaagaggtgcggctgggcagtcaagctgggccccagccggacaggagtttgcctcttttctgaccaagggtaggagccattccagcctgcctcagatgtcgtcttcccgtagcaaagattcctgttttaccgagaatacccccttgcttcgcaacagcctgcaggagaaaggatctagatgcattccggtttatcacccagaattcatcactgccgaagaaagctgggaggacagtagcgctgactgggagcggcgctatctgctcagtcgtgaggtatccggtttatctgcgtctgcttccagtgagaagggggacctactggactcccctcatattcgcctgagactcagtaagctccgtaggtgcgtgcaatggctcaaagtgatgggactcttcgcattcgtcgtgctgtgttcaatccttttcagcttgtatccagatcagggaaagctgtggcagcttttggcactgtccccactggagaattactcagtcaatctgtcatcacacgtagactcgactcttctgcaggttgacctcgccggcgcactcgtggcaagtggcccctcaaggccaggtagagaggaacacattgtggttgagttgacacaggccgacgctctagggtccagatggaggcggccgcaacaagtgacccataactggactgtctatctgaatccaagacgttcagagcacagcgtcatgagccggacatttgaggtgcttacccgcgaaaccgtaagcatttccatacgggcttctctccaacagacacaagccgtgccccttctgatggcccaccagtacctgagaggatccgtggagacacaggtaacgatcgcaaccgcaattttggccggcgtgtatgctctgatcattttcgagatcgtgcataggaccctcgctgccatgctagggtctctggccgcccttgctgcactggccgtaatcggcgaccggccatcactgacgcatgtggtcgagtggatcgattttgagaccttggccctgcttttcggtatgatgatcctggtggcaattttttccgaaacaggctttttcgactactgtgctgtcaaggcttacagactgagccgaggccgcgtgtgggcaatgataattatgttatgcctgattgccgctgtgttgagcgctttccttgataacgtgaccaccatgttgctcttcacacctgtcacgatccggctgtgcgaagtgttgaatttagatccgcgccaagtgctcatcgcagaggtgatctttaccaatattggcggagccgctaccgccataggcgaccctcccaacgtcatcattgtctctaatcaagagctccgtaaaatgggactggactttgctggcttcactgcacacatgttcatagggatctgcttggtcctcctggtgtgttttcctcttcttcggttgctctactggaataggaaactgtacaacaaggagccgtctgagattgtggagctcaagcacgaaatccatgtatggcgccttaccgctcagagaatctcccccgcttcacgcgaggagaccgccgttcgtcgcctgttgttaggtaaagtgctagcgctggagcatctattagcacgcaggctgcacacattccaccgccagatttcacaggaggacaagaactgggagaccaatatccaagagctacagaaaaaacatcgtatcagcgacggaattctgctcgccaagtgtctgacagtactcggattcgtgattttcatgtttttcctgaattcatttgttcctggaatccatttagatttgggatggatagcaatccttggcgctatttggcttctgattctagccgacatccacgactttgagattatcctccacagagtggagtgggctactttactgttcttcgcagccttattcgtactgatggaggccctggcgcacttacacctcatcgagtacgtgggggaacagactgcccttctgattaagatggtgccagaggaacagaggctcattgcagccatcgtgctcgttgtgtgggtgtctgccttggccagcagtttaattgataatattccctttacggccactatgattcccgtgcttctgaacttgagtcatgatcctgaagtcggactgcctgctccaccactcatgtatgcactggcctttggggcctgcttgggggggaacgggacactaatcggtgcttccgcaaacgtggtatgcgcagggatagccgaacagcacggctatggtttctcctttatggaattctttcgactgggattccctatgatggtcgtgtcctgtacagtcggcatgtgttacctgctcgtggcgcacgtcgtggtcggttggaattag

SEQ ID NO: 314742 - DNA, 2517 bp, Artificial Sequence
  derived and/or modified sequence
atgcacctggagggcagagatggaagacgctacccaggggccccagctgtggagctgctgcagacctctgtgcccagcggcctggccgagctggtggccggcaagaggcggctgcccaggggggccggcggcgctgaccccagccacagctgccccagaggagctgctggccagagctcctgggccccagctggccaggagtttgccagcttcctgaccaagggccgcagccacagcagcctgccccagatgagcagcagccgcagcaaggacagctgcttcacagagaacacccccctgctgaggaacagcctgcaggagaagggcagccgctgcatccctgtgtaccaccctgagttcatcacagctgaggagagctgggaggacagcagcgctgactgggagcggcgctacctgctgagccgggaggtgtctggcctgagcgccagcgccagcagcgagaagggggacctgctggacagcccccacatccggctgcggctgagcaagctgcggcgctgtgtgcagtggctgaaggtgatgggcctgtttgcctttgtggtgctgtgcagcatcctcttcagcctgtacccagaccagggcaagctgtggcagctgctggccctgagccccctggagaactacagcgtgaacctgagcagccacgtggacagcaccctgctgcaggtggacctggccggggccctggtggccagcggccccagccggcccggccgggaggagcacatcgtggtggagctgacccaggctgatgccctgggcagccgctggaggcggccccagcaggtgacccacaactggacagtgtacctgaaccccaggagaagtgagcacagcgtgatgagcaggacctttgaggtgctgacccgggagaccgtgtccatcagcatccgggccagcctgcagcagacccaggccgtgcccctgctgatggcccaccagtacctgcggggctctgtggagacccaggtgaccatcgccacagccatcctggccggcgtgtatgccctgatcatctttgaaattgtgcacaggaccctggccgccatgctgggcagcctggccgccctggccgccctggccgtcatcggggaccggcccagcctgacccacgtggtggagtggattgactttgagaccctggccctgctgtttggcatgatgatcctggtggccatcttcagcgagaccggcttctttgactactgtgctgtgaaggcctaccgcctgagccggggccgggtgtgggccatgatcatcatgctgtgcctgattgctgctgtgctgagcgccttcctggacaacgtgaccaccatgctgctcttcacccctgtgaccatccggctgtgtgaggtgctgaacctggacccccggcaggtgctgattgctgaggtgatcttcaccaacattggaggagctgccacagccatcggggaccccccaaatgtcatcatcgtgagcaaccaggagctgaggaagatgggcctggactttgctggcttcaccgcccacatgttcatcggcatctgcctggtgctgctggtgtgcttccccctgctgcggctgctgtactggaacaggaagctgtacaacaaggagcccagcgagatcgtggagctgaagcatgagatccacgtgtggaggctgacagcccagaggatcagccctgccagccgggaggagacagctgtgcggcggctgctgctgggcaaggtgctggccctggagcacctgctggcccggcggctgcacaccttccaccggcagatcagccaggaggacaagaactgggagaccaacatccaggagctgcagaagaagcaccgcatcagtgatggcatcctgctggccaagtgcctgactgtgctgggcttcgtcatcttcatgttcttcctgaacagctttgtgcccggcatccacctggacctgggctggatcgccatcctgggcgccatctggctgctgatcctggccgacatccatgactttgagatcatcctgcaccgggtggagtgggccaccctgctcttctttgctgccctgtttgtgctgatggaggccctggcccacctgcacctgattgaatatgtgggggagcagacagccctgctgatcaagatggtgcctgaggagcagaggctgattgctgccatcgtgctggtggtgtgggtgtctgccctggccagcagcctgattgacaacatccccttcaccgccaccatgatccctgtgctgctgaacctgagccatgaccctgaggtgggcctgcctgccccacccctgatgtatgccctggccttcggggcctgcctgggcggcaatggcaccctgattggagccagcgccaacgtggtgtgtgccggcattgctgagcagcacggctacggcttctccttcatggagttcttccggctgggcttccccatgatggtggtgtcctgcaccgtgggcatgtgctacctgctggtggcccacgtggtggtgggctggaactag

SEQ ID NO: 314743 - DNA, 2517 bp, Artificial Sequence
  derived and/or modified sequence
atgcacctggagggccgggacggccggcggtaccccggcgcccccgcggttgaactccttcagacatcggtgccgagtggtttggcggaattggtagcggggaagcgtcgcctgcccaggggcgcaggtggagctgacccatcccatagctgtcctagaggagcggccgggcagagttcttgggcccccgctgggcaggaatttgcgagtttcctgacaaaggggaggagccattcctcccttcctcagatgagctcgagccgcagcaaagacagctgttttacagagaacacccctctcctacggaatagcctacaagaaaagggtagcaggtgcattcccgtctaccacccagaatttatcacagccgaggagagttgggaggactcttcggcagattgggaaaggaggtaccttttgtcaagagaggtttcaggactgagcgcaagcgcctcaagcgagaaaggtgacctgctggactctccacacataagactgcgcctgtcaaagttgcggcggtgcgtccagtggctgaaggtgatggggctctttgctttcgtcgtcctgtgttccatcctcttttcgttatatccagatcaaggcaagctttggcagttgctggcgctgtcgcctttagagaattattctgttaacctgagctctcatgtcgactcaaccctgttacaagttgacctggctggagccctggtggcctccggccctagtaggccaggccgcgaagaacatatcgtggtggagcttactcaagcggatgccctgggatcgaggtggaggcgcccgcagcaggtgacacacaactggactgtctatctgaatcctaggaggagcgagcactctgtcatgtcaagaacatttgaagtgttgacaagagagacggtgtcaatatccattagagcctcactccagcagacgcaggcagtgccactgctgatggcccaccagtatctcaggggctcagtagagactcaagtaacgatcgccacagccatactggcgggagtgtacgccctgatcatttttgagatagtgcatagaacattggcggccatgctagggagcctcgcagcgcttgcagccctggctgtgattggcgaccggcccagcctgacacatgtggtggaatggattgatttcgaaacccttgccttgctgtttgggatgatgatactggtggctatattcagcgagaccggcttcttcgactactgcgcggttaaagcttaccgcctcagcagagggagagtgtgggccatgatcatcatgctttgcctgatcgccgccgtgttatccgcgtttttagataatgttactacgatgttactcttcactcccgtgaccatccgactttgtgaggttcttaacctcgatccacgccaggttctcatcgccgaagtgatttttaccaatattggtggggctgccacagctattggcgacccacccaacgtgatcatagttagtaatcaggaattgcggaagatgggactggacttcgccggctttacagctcatatgtttatcggcatatgcttggttttgctggtgtgcttcccgctgctccgcctgctgtactggaatagaaaactttataacaaggaaccatctgagatcgtggagctgaagcacgaaatccatgtgtggaggctcactgcccaaagaatctcacctgcttccagagaggagacggcagtgcggagattgctccttggcaaggtgcttgctttggagcacctcttggctagacgtttgcacacttttcacagacagatcagtcaggaggacaagaattgggagaccaacatccaggagctgcaaaagaagcaccgtatctccgatggaatattgctggccaagtgtttgacagttctgggatttgtgattttcatgtttttcctgaattcctttgtgccaggaatccatctagacctggggtggatcgccatcctgggcgccatatggttattgatcttggccgatatccacgacttcgagatcatactgcacagggtcgaatgggccactctgctctttttcgccgcactattcgtgctaatggaggccctcgcccatctccatttgatagagtacgtgggagagcagacagcactcctgataaaaatggttccagaggagcagagactcatcgctgctatcgtgttggtcgtctgggtgtccgcactggcctcctctctgatcgataacattccctttactgccaccatgatccccgttctgctgaacttaagccatgatccagaagtcggactaccagccccccccttaatgtacgccttagcatttggagcctgtcttgggggaaatggcacactgatcggggcatcagccaacgtggtctgtgcggggatagccgagcagcacggctacgggttcagttttatggagttcttcaggcttggatttccaatgatggtggtcagctgtacagttggcatgtgttacttgctggtcgcacacgtggttgtcggatggaattag

SEQ ID NO: 314744 - DNA, 3186 bp, Artificial Sequence
  derived and/or modified sequence
cctgggtgggggacccgctgcgggagcgccgagctccctctgagttcttacttcgaaggctgtgctccgctcaccatccagagcggaggtgcggaccttaaactcactcctggagaaagatctgcaagtgcgcagagagaagactggcagtggagcatgcatctggagggcagagacggcaggcggtaccccggcgcgccggcggtggagctcctgcagacgtccgtgcccagcggactcgctgaacttgtggccggcaagcgcaggcttcctcggggagccggtggagctgacccctcgcactcctgccccaggggggctgccgggcagagctcttgggctcctgcaggccaggagtttgcttcattcctcacaaaagggaggtctcactcttctttgccccagatgtccagctccaggtctaaagattcctgctttacagaaaacactcctttgctgaggaattccttacaggagaaagggtcacggtgcatacctgtttaccatccagagttcatcactgctgaagagtcttgggaagacagctctgctgactgggagcgaagatacctgctaagcagggaggtgtctggtctgtctgcatctgcctcctccgagaagggagaccttctggacagcccgcacatccgactccgtctttccaagctgaggcgctgtgtgcagtggctgaaagtcatgggcctgtttgcctttgtggtgctgtgttctattttgttcagcctatatccggatcaaggaaagctctggcagctgttggccttatcaccgctggagaactactccgtgaaccttagcagccacgtggactccacgctgctgcaggtggacctggcaggggccctagtggccagtgggccgagtcgtcctgggagggaagagcacatcgtggtggagctgacccaggctgacgctttgggctccaggtggcggcggccacagcaggtcactcacaactggacggtgtatttaaatccgaggagaagcgagcactcagtgatgagcaggacctttgaggtactgaccagagagacggtgtccatcagcatccgggcctccctgcagcagacccaggctgtccctcttttgatggctcatcagtacctccgcggaagtgtagaaacccaggtgaccatcgcgacggccatcctcgcgggcgtctacgcgctgatcatatttgagatcgtgcacagaactctggcggccatgctgggttcccttgcagcactggcagcactggctgtgattggcgatagacccagcctgacccatgtggtggagtggattgattttgagacgctggccctgctgtttggcatgatgatcttagtagccatattttcagaaacgggatttttcgattattgtgctgtaaaggcataccggctctcccggggacgggtgtgggccatgatcatcatgctctgtctcatcgcggccgtcctctctgccttcttggacaacgtcaccaccatgctcctcttcacgcctgtgaccataaggttgtgtgaggtgctcaaccttgatccaagacaagtcctgattgcagaagtgatcttcacaaacattggaggagctgccactgccatcggggaccctccaaatgtcattattgtttccaaccaagagctgaggaagatgggcctggactttgccggattcactgcacacatgttcattgggatttgccttgttctcctggtctgctttccgctcctcagactcctttactggaacagaaagctttataacaaggaacccagtgagattgttgaactgaagcacgagattcacgtctggcgcctgactgctcagcgcatcagcccggccagccgcgaggagacagctgtgcgccgcctgctgctggggaaggtgctggcactggagcacctgctcgcccggaggctgcacaccttccacagacagatctcacaggaggacaaaaattgggagaccaatatccaagaactccaaaaaaagcataggatatctgacgggattctgctcgccaaatgcctgacagtgttgggatttgttatcttcatgtttttcctcaattcgtttgtccctggcattcatcttgatcttggatggattgctattctgggtgccatctggttgctaattttagctgatattcatgattttgagataattctacacagagtggaatgggcaacccttctgttttttgcagcgctctttgttctgatggaggcattggcacatctccacttaatagaatatgttggagaacaaactgctttgctaataaagatggtcccagaggagcagcgcctcatagccgccattgtcctggtggtgtgggtctcagccctggcgtcgtccctgattgacaacatcccgttcactgctaccatgattcccgtgctcctgaacctgagccacgaccctgaggttggcctgcccgcaccgccgctcatgtatgccctggccttcggtgcttgcctgggaggtaacgggacactgattggcgcgtcggcaaacgtcgtgtgtgcagggattgcagaacagcatggatatgggttctccttcatggaatttttcaggctgggcttcccaatgatggttgtgtcctgcactgttgggatgtgttatctccttgtggctcatgtggtggtgggatggaattaatagacatccatctattgctcgaagactaaaggaaacttcatccatcacaacccattagtcataaaactaccctgaccccactgtttgaagaagaaaaggtgcttaccctggagatgctacagagacacagtggaatagaccttgacactaacactctaattcaagcgaatgttggaacaccatgacctcctctgtgtgtcctttctccccaaggacaaaatgtagaaagatgtgagataacttactcaagattcccctccagaaaaatacgtatgtttaaaaacccttcctgctatacataggaaaagacacacatccacctaaaattgactgtactgtttaactgtcaattctcctgaggctaaacacagtttgtttttcttgtaatcacttttcatgttaaaataatcagcattcaaattgtatgctttctgaatatagactttctgggaaaaggtttactgctcgtaaggaaacattttatgtattaaaataaactgttccttgataaaa

SEQ ID NO: 314745 - DNA, 2517 bp, Artificial Sequence
  derived and/or modified sequence
atgcatctcgagggcagagacgggagaaggtatcctggcgcacccgcagtcgaactgctgcagacctcagttccttctggcctggccgagctggtagccggtaaaaggaggttaccacggggagcaggcggtgccgatccttcccattcttgtccaagaggagccgctggacagagcagctgggcccctgctgggcaagagttcgcttcctttctgaccaaaggcagatcacatagctccctgcctcagatgtcgagttctaggtcaaaagatagttgtttcaccgaaaacacccccctgcttaggaactcactgcaagaaaagggatcccgctgcatacctgtgtaccaccctgagttcattacagctgaggaatcgtgggaagattcatctgccgattgggagagaaggtatcttctgagccgggaggtgtccggactgtccgcctctgcttcttccgagaaaggggatctccttgacagtcctcacattagactgcgcctgtccaagttgaggaggtgtgtgcagtggctgaaagtcatgggcttgttcgccttcgtggtcctctgcagtatcttgtttagcttatatcccgaccaggggaaattgtggcaattgctagcgctttctcctttggaaaattactccgtgaacctctcatcacatgtcgatagcaccctgctgcaggtcgacctggctggtgctctggtggcatccgggccttcccggcctggcagggaagaacacatcgtcgttgaactgacacaagccgacgcgctgggctcccgctggagacgaccgcagcaggtgacccacaactggaccgtatatctcaatcctaggcggagtgagcactcggtgatgagccggacgttcgaggtgctgacacgcgaaactgtaagcatcagtatacgggcaagcctgcaacagactcaggcagtgcctctgctaatggcccaccagtacctccgcggaagtgttgagacccaggtgacaattgccactgctatcctggccggagtgtacgccctgattatcttcgaaatcgttcaccgcacactcgccgctatgctgggttctcttgcagccttggcggcattggctgtaatcggggatagaccctccctgacacacgtggtagagtggatagatttcgagacactggcactgctttttggtatgatgattctggtggctattttcagcgaaactggcttcttcgattactgcgcagttaaagcttatcggctttcccggggaagagtgtgggctatgataatcatgctgtgcctgattgccgctgttctctcagctttcctggacaacgtaacgacaatgctgcttttcacaccagtgaccattcgcctctgcgaggttctgaacctagatcctcggcaggtcctgatagccgaggtaatttttacaaatatcggaggagcagctactgccattggcgatcctccaaacgtcatcatcgtgtccaaccaggaacttagaaaaatgggcttggacttcgccggatttaccgcccatatgtttataggcatttgtcttgtgctattggtgtgcttccccctactgcgcctgctttactggaaccggaagctttataacaaggagccatcagaaatcgtcgagctgaagcacgagatccacgtgtggcgcctgacagcccagcggattagcccagcgagtcgcgaagaaaccgcagtgcgtagattgttgctgggaaaagtgctggcactcgagcatttgctcgccagaaggcttcacacttttcatagacaaatcagtcaggaggataagaattgggagaccaacatacaggaactgcagaagaagcaccgaatcagtgatggtattctgctagcaaaatgtctaacggtacttggtttcgtgatcttcatgttctttctcaattcatttgtgcctggcattcacttagatcttggctggattgcaatcttgggagctatatggctgctgattctggccgacattcacgatttcgaaatcattttacaccgggtcgaatgggccactttgcttttttttgccgctttatttgtactcatggaagccctggcccacctccaccttattgagtacgtgggagagcagactgcattgttaatcaaaatggttccggaggagcaaaggctgatcgccgcaatagtgctggtggtctgggtgtccgcactggccagcagtctaatagacaacatccctttcacagccactatgatcccggttctactgaacctgagtcatgatcccgaagtcggtctacctgctccccctcttatgtacgcacttgcatttggcgcatgtctcggtggcaacggaaccctgataggggcatctgctaacgtcgtgtgcgccggaatcgccgaacagcacggttatgggttctcattcatggaattctttagactgggattccccatgatggtggtatcttgtaccgttggcatgtgctatctgttagtggcccatgtagtagtcggctggaactag

SEQ ID NO: 314746 - DNA, 2517 bp, Artificial Sequence
  derived and/or modified sequence
atgcacctggagggcagagacggcagaagataccccggcgcccccgccgtggagctgctgcagaccagcgtgcccagcggcctggccgagctggtggccggcaagagaagactgcccagaggcgccggcggcgccgaccccagccacagctgccccagaggcgccgccggccagagcagctgggcccccgccggccaggagttcgccagcttcctgaccaagggcagaagccacagcagcctgccccagatgagcagcagcagaagcaaggacagctgcttcaccgagaacacccccctgctgagaaacagcctgcaggagaagggcagcagatgcatccccgtgtaccaccccgagttcatcaccgccgaggagagctgggaggacagcagcgccgactgggagagaagatacctgctgagcagagaggtgagcggcctgagcgccagcgccagcagcgagaagggcgacctgctggacagcccccacatcagactgagactgagcaagctgagaagatgcgtgcagtggctgaaggtgatgggcctgttcgccttcgtggtgctgtgcagcatcctgttcagcctgtaccccgaccagggcaagctgtggcagctgctggccctgagccccctggagaactacagcgtgaacctgagcagccacgtggacagcaccctgctgcaggtggacctggccggcgccctggtggccagcggccccagcagacccggcagagaggagcacatcgtggtggagctgacccaggccgacgccctgggcagcagatggagaagaccccagcaggtgacccacaactggaccgtgtacctgaaccccagaagaagcgagcacagcgtgatgagcagaaccttcgaggtgctgaccagagagaccgtgagcatcagcatcagagccagcctgcagcagacccaggccgtgcccctgctgatggcccaccagtacctgagaggcagcgtggagacccaggtgaccatcgccaccgccatcctggccggcgtgtacgccctgatcatcttcgagatcgtgcacagaaccctggccgccatgctgggcagcctggccgccctggccgccctggccgtgatcggcgacagacccagcctgacccacgtggtggagtggatcgacttcgagaccctggccctgctgttcggcatgatgatcctggtggccatcttcagcgagaccggcttcttcgactactgcgccgtgaaggcctacagactgagcagaggcagagtgtgggccatgatcatcatgctgtgcctgatcgccgccgtgctgagcgccttcctggacaacgtgaccaccatgctgctgttcacccccgtgaccatcagactgtgcgaggtgctgaacctggaccccagacaggtgctgatcgccgaggtgatcttcaccaacatcggcggcgccgccaccgccatcggcgacccccccaacgtgatcatcgtgagcaaccaggagctgagaaagatgggcctggacttcgccggcttcaccgcccacatgttcatcggcatctgcctggtgctgctggtgtgcttccccctgctgagactgctgtactggaacagaaagctgtacaacaaggagcccagcgagatcgtggagctgaagcacgagatccacgtgtggagactgaccgcccagagaatcagccccgccagcagagaggagaccgccgtgagaagactgctgctgggcaaggtgctggccctggagcacctgctggccagaagactgcacaccttccacagacagatcagccaggaggacaagaactgggagaccaacatccaggagctgcagaagaagcacagaatcagcgacggcatcctgctggccaagtgcctgaccgtgctgggcttcgtgatcttcatgttcttcctgaacagcttcgtgcccggcatccacctggacctgggctggatcgccatcctgggcgccatctggctgctgatcctggccgacatccacgacttcgagatcatcctgcacagagtggagtgggccaccctgctgttcttcgccgccctgttcgtgctgatggaggccctggcccacctgcacctgatcgagtacgtgggcgagcagaccgccctgctgatcaagatggtgcccgaggagcagagactgatcgccgccatcgtgctggtggtgtgggtgagcgccctggccagcagcctgatcgacaacatccccttcaccgccaccatgatccccgtgctgctgaacctgagccacgaccccgaggtgggcctgcccgccccccccctgatgtacgccctggccttcggcgcctgcctgggcggcaacggcaccctgatcggcgccagcgccaacgtggtgtgcgccggcatcgccgagcagcacggctacggcttcagcttcatggagttcttcagactgggcttccccatgatggtggtgagctgcaccgtgggcatgtgctacctgctggtggcccacgtggtggtgggctggaactag

SEQ ID NO: 314747 - DNA, 2445 bp, Artificial Sequence
  derived and/or modified sequence
atgcaccttgaaggaagagatgggcggaggtatcccggcgcacctgctgttgaactgcttcagacgtccgtgccttcaggcttggctgaattagtcgctggaaagcgacggctccctcgtggggcgggaggtgctgacccttcacacagttgcccaagaggagccgccgggcagtcgtcttgggcaccagccggtcaggagttcgccagtttccttacaaagggcagaagtcactcctccctacctcagatgagctcttcccggagcaaagattcctgctttactgaaaacactcccctcttgagaaattcgctgcaggagaaagggagtagatgcatcccagtatatcacccagagtttattacagcagaagagtcatgggaggactcatctgccgactgggagcggcgatatctgctttcaagagaagtgagtggtctttcagcctccgccagcagtgaaaagggagacctgctggatagcccccacatccgactgcgcctaagcaaactgcgtcgctgcgtccaatggcttaaggtgatgggcctctttgcctttgtagtgttgtgctctattttgttctcactctaccctgaccagggcaagctatggcaacttctggccctgagcccacttgagaactactcagtaaacctgtctagccacgtcgattctactctgctccaggtagacttggctggggccctggtcgcaagcggtccttccagaccagggcgggaagagcacattgtggtggaactgacccaggctgatgcactcgggtccaggtggcggagacctcagcaggttactcacaattggactgtttatctgaacccacggcgcagtgagcactctgttatgagtcgaacattcgaagtgcttacccgagagactgtgtcaatttctatcagagcctctttgcaacagactcaagctgtccctcttctgatggcccaccaatacctgcggggctccgttgaaacccaggtcacgatcgctaccgcaatcctggctggagtgtacgctctgatcatttttgaaagaccaagcctgactcatgtagtggagtggattgacttcgagacgctggcactgctctttggtatgatgatcctggtggccatcttcagtgaaactggatttttcgactactgcgccgtcaaggcttatagactgagtagaggacgagtctgggccatgatcattatgctgtgtctcatcgccgcggttctgagcgcatttttagacaatgtgacgacaatgctgttatttactcccgtcaccattcgcctatgcgaagtgctcaatctggatccccgacaggttctgattgcagaggtgattttcaccaacatcgggggggccgcaacagccatcggggatccaccaaacgtaatcatcgtatcaaaccaggaactacgcaaaatgggcctagactttgctggatttacagcccacatgttcatcgggatctgcctggtgctgctggtctgttttcctttgctgagattattatattggaatagaaagttgtacaataaggaaccaagcgagatagttgagctgaagcatgagattcacgtgtggagattaactgcgcaacggatctcccccgcttctcgtgaagaaaccgcagtccgaagactgctgctgggcaaagtgctggctttggagcatctgcttgcgagacgtttgcacacattccaccgccagatcagtcaagaggataaaaactgggaaaccaatattcaggagctgcagaaaaagcataggatttcagacgggattctcctcgccaagtgcctaaccgttctcgggttcgtgatttttatgtttttcctgaactcctttgtcccagggattcaccttgacctggggtggattgccatcttgggggccatttggttgctaatcctggccgacatccacgactttgaaatcatcctacaccgtgtggaatgggcaacactattattttttgcagccctgtttgtactgatggaagccctggctcacttgcacctcatcgagtacgtgggggagcagacggccctgctgatcaagatggtccccgaagagcagaggctgattgccgcaattgtgttagtcgtgtgggtgtcagcgttagcgtcatccctcatcgacaatatcccctttactgctaccatgatcccagtgcttctgaatttaagccatgacccagaagtcggcctgcccgcacctcccctaatgtatgccctggcctttggagcatgcttaggtggaaacggaaccctaatcggggccagtgccaacgttgtctgcgccggcattgccgaacagcatggctatgggttttccttcatggagttttttcgtctgggatttcctatgatggtggtgagctgtacagtcggtatgtgttatctgctggtggcacacgtagtcgtcggatggaattag

SEQ ID NO: 314748 - DNA, 2445 bp, Artificial Sequence
  derived and/or modified sequence
atgcacctggagggcagagatggaagacgctacccaggggccccagctgtggagctgctgcagacctctgtgcccagcggcctggccgagctggtggccggcaagaggcggctgcccaggggggccggcggcgctgaccccagccacagctgccccagaggagctgctggccagagctcctgggccccagctggccaggagtttgccagcttcctgaccaagggccgcagccacagcagcctgccccagatgagcagcagccgcagcaaggacagctgcttcacagagaacacccccctgctgaggaacagcctgcaggagaagggcagccgctgcatccctgtgtaccaccctgagttcatcacagctgaggagagctgggaggacagcagcgctgactgggagcggcgctacctgctgagccgggaggtgtctggcctgagcgccagcgccagcagcgagaagggggacctgctggacagcccccacatccggctgcggctgagcaagctgcggcgctgtgtgcagtggctgaaggtgatgggcctgtttgcctttgtggtgctgtgcagcatcctcttcagcctgtacccagaccagggcaagctgtggcagctgctggccctgagccccctggagaactacagcgtgaacctgagcagccacgtggacagcaccctgctgcaggtggacctggccggggccctggtggccagcggccccagccggcccggccgggaggagcacatcgtggtggagctgacccaggctgatgccctgggcagccgctggaggcggccccagcaggtgacccacaactggacagtgtacctgaaccccaggagaagtgagcacagcgtgatgagcaggacctttgaggtgctgacccgggagaccgtgtccatcagcatccgggccagcctgcagcagacccaggccgtgcccctgctgatggcccaccagtacctgcggggctctgtggagacccaggtgaccatcgccacagccatcctggccggcgtgtatgccctgatcatctttgagcggcccagcctgacccacgtggtggagtggattgactttgagaccctggccctgctgtttggcatgatgatcctggtggccatcttcagcgagaccggcttctttgactactgtgctgtgaaggcctaccgcctgagccggggccgggtgtgggccatgatcatcatgctgtgcctgattgctgctgtgctgagcgccttcctggacaacgtgaccaccatgctgctcttcacccctgtgaccatccggctgtgtgaggtgctgaacctggacccccggcaggtgctgattgctgaggtgatcttcaccaacattggaggagctgccacagccatcggggaccccccaaatgtcatcatcgtgagcaaccaggagctgaggaagatgggcctggactttgctggcttcaccgcccacatgttcatcggcatctgcctggtgctgctggtgtgcttccccctgctgcggctgctgtactggaacaggaagctgtacaacaaggagcccagcgagatcgtggagctgaagcatgagatccacgtgtggaggctgacagcccagaggatcagccctgccagccgggaggagacagctgtgcggcggctgctgctgggcaaggtgctggccctggagcacctgctggcccggcggctgcacaccttccaccggcagatcagccaggaggacaagaactgggagaccaacatccaggagctgcagaagaagcaccgcatcagtgatggcatcctgctggccaagtgcctgactgtgctgggcttcgtcatcttcatgttcttcctgaacagctttgtgcccggcatccacctggacctgggctggatcgccatcctgggcgccatctggctgctgatcctggccgacatccatgactttgagatcatcctgcaccgggtggagtgggccaccctgctcttctttgctgccctgtttgtgctgatggaggccctggcccacctgcacctgattgaatatgtgggggagcagacagccctgctgatcaagatggtgcctgaggagcagaggctgattgctgccatcgtgctggtggtgtgggtgtctgccctggccagcagcctgattgacaacatccccttcaccgccaccatgatccctgtgctgctgaacctgagccatgaccctgaggtgggcctgcctgccccacccctgatgtatgccctggccttcggggcctgcctgggcggcaatggcaccctgattggagccagcgccaacgtggtgtgtgccggcattgctgagcagcacggctacggcttctccttcatggagttcttccggctgggcttccccatgatggtggtgtcctgcaccgtgggcatgtgctacctgctggtggcccacgtggtggtgggctggaactag

SEQ ID NO: 314749 - DNA, 2445 bp, Artificial Sequence
  derived and/or modified sequence
atgcacctggagggccgggacggccggcggtaccccggcgcccccgcagtagagctgctgcagactagtgtcccctccggtctagccgagctcgtggcagggaaaaggaggttgccccggggtgctggcggcgcggacccaagccatagctgtccgagaggggccgcaggccagtcctcttgggcacctgccgggcaagagtttgcctctttcctgaccaaaggaagatcccattcttcactaccgcaaatgtcttcgtccagaagcaaggacagctgcttcactgaaaacactccactactgaggaactccctgcaggaaaaaggcagccgctgtataccagtctaccatccggaatttatcaccgccgaagagagctgggaggacagttcagctgactgggaacgtcgttacctactgtcccgagaggttagtggattgtctgcctcggcttcatccgagaagggggatctccttgactcgccccatatcagactgcgattgagcaaactgcggcggtgcgtgcaatggctgaaagttatgggactcttcgctttcgtggtgctgtgttccattctgtttagcttatatcccgaccaggggaaactgtggcagctgctggctctctcaccactggagaattactctgtcaatctgtcttcacacgtcgactcgacactcctgcaggtggatttagcgggcgcactggtcgcaagcgggccatcccgccccggaagggaagagcacatcgtggtggagttgacacaggcggatgcactggggtcgaggtggaggaggccacagcaggtaactcacaattggactgtgtatttgaaccctcggcgctccgaacattcagtcatgtcacggacctttgaggtccttacaagggaaacagttagtattagtattagggccagcttgcaacaaacccaggctgtaccactgctgatggcccaccaatatctccggggatctgtggagacacaggtcacaattgcaactgccatcctggctggggtctatgctctgatcattttcgagcgaccttcactgacgcatgtagtggaatggatcgacttcgagaccctggctcttctcttcggcatgatgattctggtggcaatttttagcgaaactgggttcttcgactattgtgcagtgaaagcctacaggttatcccgtggccgagtgtgggccatgatcatcatgctgtgtctgatagctgccgttttatccgctttcctcgacaacgtgaccaccatgttactatttactcccgtgactatcaggctgtgtgaagttctcaacttggacccccgacaggtgctgatagctgaagttatttttactaacatcggaggcgccgcgacagccatcggcgatccccctaatgtcattatcgttagtaatcaagagctgagaaaaatgggccttgacttcgcagggttcactgcccatatgttcatcggaatctgtctggtgctgctggtgtgctttcctctcctaaggttgctgtattggaaccgcaaactctataacaaagaaccttccgagatcgtcgaactgaagcatgaaatccacgtttggaggctgacagcacagcggatctctccagcgtcaagggaggagactgcagtgaggcgcttgttacttggaaaagtactggctctcgaacacctgctagcaaggagactccacacattccataggcagatcagccaagaggataagaactgggagactaatattcaagagctgcagaaaaagcacagaatctcagacggaatactcttagctaaatgcctgaccgtgctcggcttcgtgatattcatgttttttctgaattcttttgtaccaggaattcatctggaccttggatggatagctattctcggggccatttggctgcttattcttgccgacatacatgacttcgagatcatcttacaccgggtggaatgggcaactctgcttttcttcgctgcactgtttgttctgatggaagccctcgcccacctgcaccttatcgagtatgtcggcgagcagacagcacttcttataaaaatggtgcctgaagaacagcggttaattgccgctattgtcctagttgtctgggtgagcgccctggcctccagtttgatagataacatccccttcaccgccacaatgattcccgtcttactcaatttgagccacgaccctgaggttggcctccctgccccaccactcatgtacgccctggccttcggcgcctgtctgggcggaaacggaacactgataggcgcctccgccaatgttgtatgcgcaggtatcgcagaacaacacggctacggctttagtttcatggaattcttccgactgggctttcctatgatggtggtttcttgtaccgtgggaatgtgctacctgctggtggcccacgtggttgttggctggaattag

SEQ ID NO: 314750 - DNA, 3068 bp, Artificial Sequence
  derived and/or modified sequence
cttacttcgaaggctgtgctccgctcaccatccagagcggaggtgcggaccttaaactcactcctggagaaagatctgcaagtgcgcagagagaagactggcagtggagcatgcatctggagggcagagacggcaggcggtaccccggcgcgccggcggtggagctcctgcagacgtccgtgcccagcggactcgctgaacttgtggccggcaagcgcaggcttcctcggggagccggtggagctgacccctcgcactcctgccccaggggggctgccgggcagagctcttgggctcctgcaggccaggagtttgcttcattcctcacaaaagggaggtctcactcttctttgccccagatgtccagctccaggtctaaagattcctgctttacagaaaacactcctttgctgaggaattccttacaggagaaagggtcacggtgcatacctgtttaccatccagagttcatcactgctgaagagtcttgggaagacagctctgctgactgggagcgaagatacctgctaagcagggaggtgtctggtctgtctgcatctgcctcctccgagaagggagaccttctggacagcccgcacatccgactccgtctttccaagctgaggcgctgtgtgcagtggctgaaagtcatgggcctgtttgcctttgtggtgctgtgttctattttgttcagcctatatccggatcaaggaaagctctggcagctgttggccttatcaccgctggagaactactccgtgaaccttagcagccacgtggactccacgctgctgcaggtggacctggcaggggccctagtggccagtgggccgagtcgtcctgggagggaagagcacatcgtggtggagctgacccaggctgacgctttgggctccaggtggcggcggccacagcaggtcactcacaactggacggtgtatttaaatccgaggagaagcgagcactcagtgatgagcaggacctttgaggtactgaccagagagacggtgtccatcagcatccgggcctccctgcagcagacccaggctgtccctcttttgatggctcatcagtacctccgcggaagtgtagaaacccaggtgaccatcgcgacggccatcctcgcgggcgtctacgcgctgatcatatttgagagacccagcctgacccatgtggtggagtggattgattttgagacgctggccctgctgtttggcatgatgatcttagtagccatattttcagaaacgggatttttcgattattgtgctgtaaaggcataccggctctcccggggacgggtgtgggccatgatcatcatgctctgtctcatcgcggccgtcctctctgccttcttggacaacgtcaccaccatgctcctcttcacgcctgtgaccataaggttgtgtgaggtgctcaaccttgatccaagacaagtcctgattgcagaagtgatcttcacaaacattggaggagctgccactgccatcggggaccctccaaatgtcattattgtttccaaccaagagctgaggaagatgggcctggactttgccggattcactgcacacatgttcattgggatttgccttgttctcctggtctgctttccgctcctcagactcctttactggaacagaaagctttataacaaggaacccagtgagattgttgaactgaagcacgagattcacgtctggcgcctgactgctcagcgcatcagcccggccagccgcgaggagacagctgtgcgccgcctgctgctggggaaggtgctggcactggagcacctgctcgcccggaggctgcacaccttccacagacagatctcacaggaggacaaaaattgggagaccaatatccaagaactccaaaaaaagcataggatatctgacgggattctgctcgccaaatgcctgacagtgttgggatttgttatcttcatgtttttcctcaattcgtttgtccctggcattcatcttgatcttggatggattgctattctgggtgccatctggttgctaattttagctgatattcatgattttgagataattctacacagagtggaatgggcaacccttctgttttttgcagcgctctttgttctgatggaggcattggcacatctccacttaatagaatatgttggagaacaaactgctttgctaataaagatggtcccagaggagcagcgcctcatagccgccattgtcctggtggtgtgggtctcagccctggcgtcgtccctgattgacaacatcccgttcactgctaccatgattcccgtgctcctgaacctgagccacgaccctgaggttggcctgcccgcaccgccgctcatgtatgccctggccttcggtgcttgcctgggaggtaacgggacactgattggcgcgtcggcaaacgtcgtgtgtgcagggattgcagaacagcatggatatgggttctccttcatggaatttttcaggctgggcttcccaatgatggttgtgtcctgcactgttgggatgtgttatctccttgtggctcatgtggtggtgggatggaattaatagacatccatctattgctcgaagactaaaggaaacttcatccatcacaacccattagtcataaaactaccctgaccccactgtttgaagaagaaaaggtgcttaccctggagatgctacagagacacagtggaatagaccttgacactaacactctaattcaagcgaatgttggaacaccatgacctcctctgtgtgtcctttctccccaaggacaaaatgtagaaagatgtgagataacttactcaagattcccctccagaaaaatacgtatgtttaaaaacccttcctgctatacataggaaaagacacacatccacctaaaattgactgtactgtttaactgtcaattctcctgaggctaaacacagtttgtttttcttgtaatcacttttcatgttaaaataatcagcattcaaattgtatgctttctgaatatagactttctgggaaaaggtttactgctcgtaaggaaacattttatgtattaaaataaactgttccttgataaaa

SEQ ID NO: 314751 - DNA, 2445 bp, Artificial Sequence
  derived and/or modified sequence
atgcacctcgaaggccgagacggaagacgctaccctggggcacctgccgtcgagctgctccagacctcagtgcccagcgggttagccgaactggtggctggcaaacggcgtctccccaggggagccggaggagcagaccctagccatagttgtccccgaggcgctgcaggtcagtcctcatgggcccctgccggacaagaattcgcctctttcctgactaaaggccgtagccactcttccttgccacagatgtctagctcccgcagcaaggattcttgctttactgaaaacacgcctctgctgcggaattctctgcaggagaaaggatcccgctgtatccctgtgtatcatcctgagtttataaccgcagaagagtcatgggaggatagctctgctgactgggagcgcagatatctgctgtctcgcgaagtttcaggtctgtctgccagcgcctcaagcgaaaagggggatctcctagacagtcctcacataaggttgcgcctgtccaagctaagaaggtgtgtgcagtggttgaaggtcatgggactgttcgctttcgtggtcctttgttctatcctgttctcactgtatccagaccagggcaaactgtggcaactgctggcattaagtccactggaaaattatagcgtaaacctgtcatcacacgtcgactccacattattgcaggtggacctggcaggtgctctggtcgcaagcgggcctagccggcctggtcgagaggagcacatcgttgtggagcttacacaggctgacgccctgggaagtcgctggcggaggccccaacaagtgacacacaactggactgtgtatctgaacccccgtagaagtgagcattcagttatgagtaggacctttgaggtgctgacaagggagaccgtctcaatcagtattagagccagcctgcaacagacccaggccgtgcccttgctcatggcccaccagtatcttagaggttcagttgagacccaggtaaccatcgctacagcaatccttgctggagtgtatgccctgatcatcttcgagaggccatccctgactcacgttgtcgagtggattgattttgagacactggccctgctctttgggatgatgattctcgtcgctatcttttcggagaccgggttctttgactactgtgccgtgaaagcctatcggctgtctcgtggaagggtgtgggcgatgattatcatgctatgtctcatcgcagcggtcctgagcgcatttttggataacgtcacaaccatgttattatttactcccgtcacgatccggctgtgtgaggtgctcaacttagatccgagacaggtacttattgcggaggtgatatttacaaatataggcggagccgcaacagcgatcggagatccacccaacgtgataatagtttctaatcaggagctacgtaagatgggcctggactttgcaggctttacagcccacatgttcataggaatttgcctggtgctgctcgtgtgttttcccttactccgcctactttattggaatcggaagctgtataacaaagagccatccgaaatagtggagttgaagcatgagatccatgtttggaggttaacggcacaaagaattagccccgcaagtagggaagagacagcggtcagacggcttctcctcggaaaagtgctggcccttgaacatttgttggcccgaagattgcataccttccatcgacagatttcccaggaagataagaactgggaaactaacatccaagaactgcagaaaaagcatagaatctccgacggaatcctactagccaagtgcctaaccgtcctcgggtttgtaatattcatgttcttcctgaacagtttcgtacccggaattcacttagatctgggatggatcgccatcctcggggcaatttggcttctgattcttgctgacattcatgactttgaaattatattacatcgggtcgagtgggccacattgctgttctttgctgcgcttttcgttctaatggaggctttagcccacctgcaccttattgagtatgtgggggaacagacagctctgctaatcaaaatggtgcccgaagaacagcgattgatcgcagccattgtgctcgtggtctgggtgtctgctttagctagttcactaattgataatatcccctttactgcaactatgattcccgttctgcttaacttgtcacacgaccccgaggtcggcctccccgcacccccactgatgtatgccctcgcgtttggcgcttgtttgggtggcaacggaaccctgattggcgctagcgctaatgtcgtgtgtgccggaattgctgagcagcatggttacggcttttcctttatggaattttttcggctgggtttccctatgatggtggtatcctgcacagtgggtatgtgttacctgttggtagcacacgtggtcgtaggttggaattag

SEQ ID NO: 314752 - DNA, 2445 bp, Artificial Sequence
  derived and/or modified sequence
atgcacctggagggcagagacggcagaagataccccggcgcccccgccgtggagctgctgcagaccagcgtgcccagcggcctggccgagctggtggccggcaagagaagactgcccagaggcgccggcggcgccgaccccagccacagctgccccagaggcgccgccggccagagcagctgggcccccgccggccaggagttcgccagcttcctgaccaagggcagaagccacagcagcctgccccagatgagcagcagcagaagcaaggacagctgcttcaccgagaacacccccctgctgagaaacagcctgcaggagaagggcagcagatgcatccccgtgtaccaccccgagttcatcaccgccgaggagagctgggaggacagcagcgccgactgggagagaagatacctgctgagcagagaggtgagcggcctgagcgccagcgccagcagcgagaagggcgacctgctggacagcccccacatcagactgagactgagcaagctgagaagatgcgtgcagtggctgaaggtgatgggcctgttcgccttcgtggtgctgtgcagcatcctgttcagcctgtaccccgaccagggcaagctgtggcagctgctggccctgagccccctggagaactacagcgtgaacctgagcagccacgtggacagcaccctgctgcaggtggacctggccggcgccctggtggccagcggccccagcagacccggcagagaggagcacatcgtggtggagctgacccaggccgacgccctgggcagcagatggagaagaccccagcaggtgacccacaactggaccgtgtacctgaaccccagaagaagcgagcacagcgtgatgagcagaaccttcgaggtgctgaccagagagaccgtgagcatcagcatcagagccagcctgcagcagacccaggccgtgcccctgctgatggcccaccagtacctgagaggcagcgtggagacccaggtgaccatcgccaccgccatcctggccggcgtgtacgccctgatcatcttcgagagacccagcctgacccacgtggtggagtggatcgacttcgagaccctggccctgctgttcggcatgatgatcctggtggccatcttcagcgagaccggcttcttcgactactgcgccgtgaaggcctacagactgagcagaggcagagtgtgggccatgatcatcatgctgtgcctgatcgccgccgtgctgagcgccttcctggacaacgtgaccaccatgctgctgttcacccccgtgaccatcagactgtgcgaggtgctgaacctggaccccagacaggtgctgatcgccgaggtgatcttcaccaacatcggcggcgccgccaccgccatcggcgacccccccaacgtgatcatcgtgagcaaccaggagctgagaaagatgggcctggacttcgccggcttcaccgcccacatgttcatcggcatctgcctggtgctgctggtgtgcttccccctgctgagactgctgtactggaacagaaagctgtacaacaaggagcccagcgagatcgtggagctgaagcacgagatccacgtgtggagactgaccgcccagagaatcagccccgccagcagagaggagaccgccgtgagaagactgctgctgggcaaggtgctggccctggagcacctgctggccagaagactgcacaccttccacagacagatcagccaggaggacaagaactgggagaccaacatccaggagctgcagaagaagcacagaatcagcgacggcatcctgctggccaagtgcctgaccgtgctgggcttcgtgatcttcatgttcttcctgaacagcttcgtgcccggcatccacctggacctgggctggatcgccatcctgggcgccatctggctgctgatcctggccgacatccacgacttcgagatcatcctgcacagagtggagtgggccaccctgctgttcttcgccgccctgttcgtgctgatggaggccctggcccacctgcacctgatcgagtacgtgggcgagcagaccgccctgctgatcaagatggtgcccgaggagcagagactgatcgccgccatcgtgctggtggtgtgggtgagcgccctggccagcagcctgatcgacaacatccccttcaccgccaccatgatccccgtgctgctgaacctgagccacgaccccgaggtgggcctgcccgccccccccctgatgtacgccctggccttcggcgcctgcctgggcggcaacggcaccctgatcggcgccagcgccaacgtggtgtgcgccggcatcgccgagcagcacggctacggcttcagcttcatggagttcttcagactgggcttccccatgatggtggtgagctgcaccgtgggcatgtgctacctgctggtggcccacgtggtggtgggctggaactag

SEQ ID NO: 314753 - protein, 668 aa, Artificial Sequence
  derived and/or modified sequence
MHLEGRDGRRYPGAPAVELLQTSVPSGLAELVAGKRRLPRGAGGADPSHSCPRGAAGQSSWAPAGQEFASFLTKGRSHSSLPQMSSSRSKDSCFTENTPLLRNSLQEKGSRCIPVYHPEFITAEESWEDSSADWERRYLLSREVSGLSASASSEKGDLLDSPHIRLRLSKLRRCVQWLKVMGLFAFVVLCSILFSLYPDQGKLWQLLALSPLENYSVNLSSHVDSTLLQVDLAGALVASGPSRPGREEHIVVELTQADALGSRWRRPQQVTHNWTVYLNPRRSEHSVMSRTFEVLTRETVSISIRASLQQTQAVPLLMAHQYLRGSVETQVTIATAILAGVYALIIFEIVHRTLAAMLGSLAALAALAVIGDRPSLTHVVEWIDFETLALLFGMMILVAIFSETGFFDYCAVKAYRLSRGRVWAMIIMLCLIAAVLSAFLDNVTTMLLFTPVTIRLCEVLNLDPRQVLIAEVIFTNIGGAATAIGDPPNVIIVSNQELRKMGLDFAGFTAHMFIGICLVLLVCFPLLRLLYWNRKLYNKEPSEIVELKHEIHVWRLTAQRISPASREETAVRRLLLGKVLALEHLLARRLHTFHRQISQEDKNWETNIQELQKKHRISDGILLAKCLTVLGFVIFMFFLNSFVPGIHLDLGGLGLVQAGRYYLSTPES

SEQ ID NO: 314754 - DNA, 2007 bp, Artificial Sequence
  derived and/or modified sequence
atgcacctcgagggcagagacggccgtaggtatccaggcgcaccggctgtagaacttctgcagacttccgtgccttcgggcttagcagagcttgtggcagggaaaaggcgtctgcctagaggggccggcggggcagatccaagtcactcatgccctagaggggccgctggtcagtccagctgggcacccgctgggcaggagttcgccagcttcctcaccaaaggaaggtcccatagcagtctgcctcagatgtctagctcccgtagtaaagacagttgcttcaccgaaaatacccccttgctaaggaatagcttgcaagagaaaggcagccggtgtatcccagtgtaccatcctgaattcataaccgctgaggagtcctgggaagatagttccgctgattgggagaggcggtacttattgagcagggaggtcagcggcctgagcgcatctgcttcctcagagaagggggaccttctcgatagcccccacatccgcctcaggctgagtaagcttaggaggtgcgtacagtggctcaaagtaatgggcttgttcgcatttgttgtgctctgtagcatcttgttttccctttaccccgatcagggcaaactgtggcagctattggctctgagccctctagagaactatagcgtgaacctatcaagccacgtggacagtaccctcctgcaggtggacctggccggtgcactggtcgcgagcggaccgagccgccctggccgtgaagagcacatagtcgttgagttgacccaggccgatgcgttgggatcccggtggagacgaccccaacaggtaactcataattggacagtgtatttgaaccctcgcagaagtgagcactctgtgatgagtcgcaccttcgaggttctaacccgggagactgtgtctatcagcatccgggcttctttgcagcagacacaggcggtgccccttttaatggcacaccaatatctgagggggtcggtggagacacaggtcactatagccacagctattttagcgggagtctatgccctcattatcttcgagattgttcataggacgctggctgcaatgctgggcagccttgccgctttggctgcgctagcggtcataggcgacaggccttcactcacccatgtggtcgagtggattgacttcgagactctggccctcctgttcggtatgatgatcctggttgccatctttagcgagactgggttcttcgactactgtgctgttaaggcatatcgactgtcacgcggtagggtctgggctatgattattatgttgtgcctcatcgccgcggtgctttccgcctttttagacaacgttacaaccatgctactgtttactccagtgaccatcagactttgcgaggtgctaaatctggatcctcgacaggtgttgatcgccgaagtcatctttactaacatcggaggcgcggccacagctattggcgaccccccgaacgtgatcatcgtgtctaaccaggagctgcgcaaaatggggcttgactttgccggatttacagcgcatatgtttattgggatctgcctggtgctactggtgtgcttccctttgctgcgtttgctgtattggaatagaaagctgtacaacaaggaaccatccgagatcgtagagctgaagcatgaaatccacgtatggagacttacggcgcagcgcatttccccagcttcgcgcgaggaaaccgccgtgcgcagacttttactgggcaaggtcctggctctcgagcacctcctggcccgacggttgcataccttccaccgacagatcagccaggaggacaaaaattgggaaactaacatccaagagctccagaaaaaacaccgcatatcagatgggattctgttggccaaatgccttactgttttgggcttcgtgatatttatgtttttcctgaactcttttgtccccggtatccacctcgatctgggtggcctggggctcgtgcaggcggggaggtactacctgtcaactcctgaaagctag

SEQ ID NO: 314755 - DNA, 2007 bp, Artificial Sequence
  derived and/or modified sequence
atgcacctggagggcagagatggaagacgctacccaggggccccagctgtggagctgctgcagacctctgtgcccagcggcctggccgagctggtggccggcaagaggcggctgcccaggggggccggcggcgctgaccccagccacagctgccccagaggagctgctggccagagctcctgggccccagctggccaggagtttgccagcttcctgaccaagggccgcagccacagcagcctgccccagatgagcagcagccgcagcaaggacagctgcttcacagagaacacccccctgctgaggaacagcctgcaggagaagggcagccgctgcatccctgtgtaccaccctgagttcatcacagctgaggagagctgggaggacagcagcgctgactgggagcggcgctacctgctgagccgggaggtgtctggcctgagcgccagcgccagcagcgagaagggggacctgctggacagcccccacatccggctgcggctgagcaagctgcggcgctgtgtgcagtggctgaaggtgatgggcctgtttgcctttgtggtgctgtgcagcatcctcttcagcctgtacccagaccagggcaagctgtggcagctgctggccctgagccccctggagaactacagcgtgaacctgagcagccacgtggacagcaccctgctgcaggtggacctggccggggccctggtggccagcggccccagccggcccggccgggaggagcacatcgtggtggagctgacccaggctgatgccctgggcagccgctggaggcggccccagcaggtgacccacaactggacagtgtacctgaaccccaggagaagtgagcacagcgtgatgagcaggacctttgaggtgctgacccgggagaccgtgtccatcagcatccgggccagcctgcagcagacccaggccgtgcccctgctgatggcccaccagtacctgcggggctctgtggagacccaggtgaccatcgccacagccatcctggccggcgtgtatgccctgatcatctttgaaattgtgcacaggaccctggccgccatgctgggcagcctggccgccctggccgccctggccgtcatcggggaccggcccagcctgacccacgtggtggagtggattgactttgagaccctggccctgctgtttggcatgatgatcctggtggccatcttcagcgagaccggcttctttgactactgtgctgtgaaggcctaccgcctgagccggggccgggtgtgggccatgatcatcatgctgtgcctgattgctgctgtgctgagcgccttcctggacaacgtgaccaccatgctgctcttcacccctgtgaccatccggctgtgtgaggtgctgaacctggacccccggcaggtgctgattgctgaggtgatcttcaccaacattggaggagctgccacagccatcggggaccccccaaatgtcatcatcgtgagcaaccaggagctgaggaagatgggcctggactttgctggcttcaccgcccacatgttcatcggcatctgcctggtgctgctggtgtgcttccccctgctgcggctgctgtactggaacaggaagctgtacaacaaggagcccagcgagatcgtggagctgaagcatgagatccacgtgtggaggctgacagcccagaggatcagccctgccagccgggaggagacagctgtgcggcggctgctgctgggcaaggtgctggccctggagcacctgctggcccggcggctgcacaccttccaccggcagatcagccaggaggacaagaactgggagaccaacatccaggagctgcagaagaagcaccgcatcagtgatggcatcctgctggccaagtgcctgactgtgctgggcttcgtcatcttcatgttcttcctgaacagctttgtgcccggcatccacctggacctgggcggcctgggcctggtgcaggccggccgctactacctgagcaccccagagagctag

SEQ ID NO: 314756 - DNA, 2007 bp, Artificial Sequence
  derived and/or modified sequence
atgcacctggagggccgggacggccggcggtaccccggcgcccccgccgtggaactcctgcagacatcagtaccctctggccttgcagagctagtggcggggaaacggagactgcccaggggtgcaggtggggcagatcctagccacagctgccctcggggtgccgcgggccaatcgtcctgggctcccgcaggtcaggagttcgcgtcattcctcaccaagggaagatcccactccagcttgccacagatgagctctagtcggtctaaggacagctgctttaccgaaaacaccccactgttgagaaattcattacaggagaaggggagcagatgtatcccagtctatcatccagagttcattactgcggaagagtcctgggaggattcatctgcagactgggaaaggagatacctgctgagcagagaggtctctggcctcagcgcctcagccagctccgagaagggtgatcttttagattccccacatatcagacttcgcctttccaagctgcgcaggtgcgttcagtggctgaaggtgatgggcttgtttgccttcgttgttctgtgctctatcctcttctctctttaccccgaccaaggaaaactgtggcagcttctcgccctaagcccgctggaaaattacagcgtaaatctttcctctcacgtcgatagcaccctgctgcaggtcgacctggctggagcactcgtggcttccggcccttcaaggccgggtcgtgaagagcatatcgtggtggagctgacgcaggctgatgcattagggagtcgatggcgtcgccctcaacaggtgacccataactggaccgtctatctgaaccctcggcgctccgaacacagcgtcatgtctaggactttcgaggtgttgacgcgagagacggtctcaatttccatccgggcaagcctgcagcaaacccaggctgtgcctctgctgatggcccatcaatatctgcgcgggtctgtggagacccaggttaccatcgccaccgccattctggctggagtgtacgccctgattattttcgagatagttcatcgtacacttgcagccatgctgggttctctagcagcactcgccgcactggcagtgatcggtgatcggccctccctaactcatgttgtggagtggattgatttcgagacactcgctttactgtttggcatgatgattctggtcgccatcttcagcgagaccggcttctttgattactgcgcggtgaaagcatacaggctgtctcggggccgggtgtgggccatgataatcatgctttgcttgatcgccgccgtgctgagcgccttcctggacaacgtaacaactatgctgttgtttaccccggtgacaatcaggctttgcgaagtattaaacctggacccccggcaggttctgatcgccgaggtgatcttcaccaatattggcggcgcagcaacagctattggggacccccctaatgtgataatcgtttcaaatcaggagctacggaagatgggccttgatttcgccgggtttacagcccacatgttcatagggatctgcctggtgctgttggtctgctttccgctcctccggttgctgtactggaaccggaagctctacaacaaggaaccatcagaaatcgtagagctaaaacacgagattcacgtctggcgccttaccgcccagaggataagcccggctagccgggaagaaactgcggtgcggaggctgctgctcggcaaggttctggcgctcgaacaccttctggctagaaggctccatactttccacaggcagatctctcaagaggataagaactgggaaactaacattcaggagcttcaaaagaaacataggattagcgacggaattctgctcgctaaatgcctcacagtccttggcttcgtgatttttatgtttttcctcaactctttcgtcccaggaatacatcttgaccttggtggcctaggccttgtccaggccggccgctactacctatccacgcctgaatcttag

SEQ ID NO: 314757 - DNA, 2117 bp, Artificial Sequence
  derived and/or modified sequence
cttacttcgaaggctgtgctccgctcaccatccagagcggaggtgcggaccttaaactcactcctggagaaagatctgcaagtgcgcagagagaagactggcagtggagcatgcatctggagggcagagacggcaggcggtaccccggcgcgccggcggtggagctcctgcagacgtccgtgcccagcggactcgctgaacttgtggccggcaagcgcaggcttcctcggggagccggtggagctgacccctcgcactcctgccccaggggggctgccgggcagagctcttgggctcctgcaggccaggagtttgcttcattcctcacaaaagggaggtctcactcttctttgccccagatgtccagctccaggtctaaagattcctgctttacagaaaacactcctttgctgaggaattccttacaggagaaagggtcacggtgcatacctgtttaccatccagagttcatcactgctgaagagtcttgggaagacagctctgctgactgggagcgaagatacctgctaagcagggaggtgtctggtctgtctgcatctgcctcctccgagaagggagaccttctggacagcccgcacatccgactccgtctttccaagctgaggcgctgtgtgcagtggctgaaagtcatgggcctgtttgcctttgtggtgctgtgttctattttgttcagcctatatccggatcaaggaaagctctggcagctgttggccttatcaccgctggagaactactccgtgaaccttagcagccacgtggactccacgctgctgcaggtggacctggcaggggccctagtggccagtgggccgagtcgtcctgggagggaagagcacatcgtggtggagctgacccaggctgacgctttgggctccaggtggcggcggccacagcaggtcactcacaactggacggtgtatttaaatccgaggagaagcgagcactcagtgatgagcaggacctttgaggtactgaccagagagacggtgtccatcagcatccgggcctccctgcagcagacccaggctgtccctcttttgatggctcatcagtacctccgcggaagtgtagaaacccaggtgaccatcgcgacggccatcctcgcgggcgtctacgcgctgatcatatttgagatcgtgcacagaactctggcggccatgctgggttcccttgcagcactggcagcactggctgtgattggcgatagacccagcctgacccatgtggtggagtggattgattttgagacgctggccctgctgtttggcatgatgatcttagtagccatattttcagaaacgggatttttcgattattgtgctgtaaaggcataccggctctcccggggacgggtgtgggccatgatcatcatgctctgtctcatcgcggccgtcctctctgccttcttggacaacgtcaccaccatgctcctcttcacgcctgtgaccataaggttgtgtgaggtgctcaaccttgatccaagacaagtcctgattgcagaagtgatcttcacaaacattggaggagctgccactgccatcggggaccctccaaatgtcattattgtttccaaccaagagctgaggaagatgggcctggactttgccggattcactgcacacatgttcattgggatttgccttgttctcctggtctgctttccgctcctcagactcctttactggaacagaaagctttataacaaggaacccagtgagattgttgaactgaagcacgagattcacgtctggcgcctgactgctcagcgcatcagcccggccagccgcgaggagacagctgtgcgccgcctgctgctggggaaggtgctggcactggagcacctgctcgcccggaggctgcacaccttccacagacagatctcacaggaggacaaaaattgggagaccaatatccaagaactccaaaaaaagcataggatatctgacgggattctgctcgccaaatgcctgacagtgttgggatttgttatcttcatgtttttcctcaattcgtttgtccctggcattcatcttgatcttggtggcctgggcttggttcaagctggcaggtattatttatccacacctgagagctga

SEQ ID NO: 314758 - DNA, 2007 bp, Artificial Sequence
  derived and/or modified sequence
atgcatttagaaggtcgggatggccgacggtacccgggagctccagcagtggaactgctgcagacctcagttccatcaggcctcgctgaactagttgctggaaaacgtcgtctgcctcggggtgctgggggagcggacccaagccatagctgccccagaggcgctgctggacagagttcctgggcccctgccggacaggagtttgcttcattcctgacaaaaggccgatctcactctagtttaccccagatgagtagttctaggtccaaggattcatgttttacagaaaatacacccctgctgcggaactcactgcaggaaaaagggtctcggtgtatcccagtgtaccacccagaattcataacagcggaagagtcttgggaggacagttcagctgactgggaaagacggtacctgctcagtcgcgaagtgtcaggtctgagcgcgtccgctagcagcgaaaagggagacctgctcgactcacctcacatcagattgcggctcagtaagctgcgaagatgcgtgcaatggctgaaagtaatgggcctgtttgccttcgtggtcctctgctccattctgtttagcctatatcctgaccagggcaagttgtggcagttactggcattgagccccttagaaaactattcagtgaatctctcgtctcatgtagacagcacactgctgcaggttgatctggccggtgccttagtggccagcggaccatcccgcccagggcgtgaagagcatatcgtggttgagttaacccaggcagatgcccttggatctagatggcgccgtcctcaacaggtgacacacaactggacagtctacctgaaccctcgtcgatcagagcacagcgtcatgtccaggacctttgaggtgctcacccgtgaaactgtttctatcagtattagggctagtcttcagcagacacaggccgtgcctctgttgatggcacaccagtacctccgcggatcagttgaaactcaagttaccatcgccacagctattcttgcgggtgtatatgctctcatcatttttgagatagtccaccggaccctggccgctatgttggggagtctcgctgcacttgctgctttggctgtcataggagatcgtccgtcactcacccatgtcgtcgagtggatcgatttcgagacccttgccctgctgttcggaatgatgattctggtagcaatattctccgagaccggattttttgattactgtgcggtcaaggcgtacagactctccaggggccgagtgtgggccatgatcatcatgctctgtctcattgccgcagtcctatcagcctttctagacaacgtgacgacaatgctgctctttacccccgtcaccatcagactgtgcgaggtacttaatctcgatccacgccaggttcttatagccgaggtgattttcaccaatatcggaggtgcagccacggccatcggtgatcccccaaacgtgattatagtcagcaaccaagaattgagaaaaatgggcttagattttgccggattcacggctcacatgttcatcggaatctgtttagtgctccttgtgtgcttcccattgcttaggctcctttactggaatagaaagctatacaacaaggagccttccgaaatcgttgagctgaagcacgagatacatgtctggaggttgacggcccagagaatttcacccgcttcaagggaagaaacagccgtccgtagactgcttttgggtaaagtactggcgctcgagcacctgctcgcaagaaggctccacacttttcatagacagatatcacaggaggataagaactgggagacaaacatccaggagcttcaaaagaagcacaggatatcggatggtattctactcgcaaagtgtctgacagtgctcggatttgtcattttcatgttcttcctgaatagtttcgtgccgggaatccacctggacttaggcggactaggtttggtgcaggccggacggtattatttgagcacccctgagagttag

SEQ ID NO: 314759 - DNA, 2007 bp, Artificial Sequence
  derived and/or modified sequence
atgcacctggagggcagagacggcagaagataccccggcgcccccgccgtggagctgctgcagaccagcgtgcccagcggcctggccgagctggtggccggcaagagaagactgcccagaggcgccggcggcgccgaccccagccacagctgccccagaggcgccgccggccagagcagctgggcccccgccggccaggagttcgccagcttcctgaccaagggcagaagccacagcagcctgccccagatgagcagcagcagaagcaaggacagctgcttcaccgagaacacccccctgctgagaaacagcctgcaggagaagggcagcagatgcatccccgtgtaccaccccgagttcatcaccgccgaggagagctgggaggacagcagcgccgactgggagagaagatacctgctgagcagagaggtgagcggcctgagcgccagcgccagcagcgagaagggcgacctgctggacagcccccacatcagactgagactgagcaagctgagaagatgcgtgcagtggctgaaggtgatgggcctgttcgccttcgtggtgctgtgcagcatcctgttcagcctgtaccccgaccagggcaagctgtggcagctgctggccctgagccccctggagaactacagcgtgaacctgagcagccacgtggacagcaccctgctgcaggtggacctggccggcgccctggtggccagcggccccagcagacccggcagagaggagcacatcgtggtggagctgacccaggccgacgccctgggcagcagatggagaagaccccagcaggtgacccacaactggaccgtgtacctgaaccccagaagaagcgagcacagcgtgatgagcagaaccttcgaggtgctgaccagagagaccgtgagcatcagcatcagagccagcctgcagcagacccaggccgtgcccctgctgatggcccaccagtacctgagaggcagcgtggagacccaggtgaccatcgccaccgccatcctggccggcgtgtacgccctgatcatcttcgagatcgtgcacagaaccctggccgccatgctgggcagcctggccgccctggccgccctggccgtgatcggcgacagacccagcctgacccacgtggtggagtggatcgacttcgagaccctggccctgctgttcggcatgatgatcctggtggccatcttcagcgagaccggcttcttcgactactgcgccgtgaaggcctacagactgagcagaggcagagtgtgggccatgatcatcatgctgtgcctgatcgccgccgtgctgagcgccttcctggacaacgtgaccaccatgctgctgttcacccccgtgaccatcagactgtgcgaggtgctgaacctggaccccagacaggtgctgatcgccgaggtgatcttcaccaacatcggcggcgccgccaccgccatcggcgacccccccaacgtgatcatcgtgagcaaccaggagctgagaaagatgggcctggacttcgccggcttcaccgcccacatgttcatcggcatctgcctggtgctgctggtgtgcttccccctgctgagactgctgtactggaacagaaagctgtacaacaaggagcccagcgagatcgtggagctgaagcacgagatccacgtgtggagactgaccgcccagagaatcagccccgccagcagagaggagaccgccgtgagaagactgctgctgggcaaggtgctggccctggagcacctgctggccagaagactgcacaccttccacagacagatcagccaggaggacaagaactgggagaccaacatccaggagctgcagaagaagcacagaatcagcgacggcatcctgctggccaagtgcctgaccgtgctgggcttcgtgatcttcatgttcttcctgaacagcttcgtgcccggcatccacctggacctgggcggcctgggcctggtgcaggccggcagatactacctgagcacccccgagagctag

SEQ ID NO: 314760 - DNA, 795 bp, Artificial Sequence
  derived and/or modified sequence
atgcacctggaaggtcgagacggacgccgctatcctggcgcgccggccgtggaactgctgcaaacatccgtcccttcaggcctcgccgagctggttgccggaaaacggagattaccgcgaggcgccggcggagctgatccttcccatagctgcccacgaggcgccgcggggcagagctcttgggcccctgcggggcaggaattcgcttctttcctcacaaaggggaggagtcatagctctctcccccaaatgtcatcttcacgctctaaggatagctgctttactgagaacacaccactgctgcgaaactcactgcaagaaaaaggttcacgttgcatacctgtttaccatcccgaatttataaccgccgaggagtcctgggaggattctagtgcagactgggagagacgctacctgctgtctagagaagtgtcaggactttccgcctcagcaagcagtgagaaaggagatcttctggacagcccccacattagattgcggttatctaagctccggcggtgtgtccagtggctgaaggtgatgggtcttttcgcttttgtcgtattgtgtagcatactgttcagtctgtatcccgaccagggcaagttatggcagcttctagccttgagcccactcgagaattactcagtcaacctgtcctcccatgtagactctactttattgcaggtcgacctggccggcgccttggtggcttcaggaccaagcaggccagggcgtgaggaacatatcgtcgtggagctcacacaagcagatgctctggggtcccgctggtag

SEQ ID NO: 314761 - DNA, 657 bp, Artificial Sequence
  derived and/or modified sequence
atgcacctcgaaggtagagatggccggcgataccctggagctcccgcagttgagctgttacagaccagcgtgccatcagggcttgcagagttggttgctggcaaacgcaggctcccccggggagcaggaggggccgatccctcacacagttgtccacgaggggcagctggtcaaagctcttgggcccccgcgggacaggagtttgcctccttcctgacaaaaggcaggtcgcattctagtctacctcaaatgtcatcttcacgatccaaagattcctgtttcacagagaacacccctttattgagaaattccctgcaggaaaaaggaagtagatgtatcccagtgtaccatcccgagttcatcacagccgaagagtcctgggaagactcctcagccgactgggagagacgttatctactgagtcgcgaggtcagcggactaagcgcatctgctagctcagaaaagggtgacctactcgattctcctcatatccgactgaggttgtccaaactgcgaaggtgcgtccagtggctcaaggtcatgggactgtttgcttttgtggtgctttgcagcgtgacacacaattggactgtgtatctaaatcctagacggtcggaacattctgtcatgtcaagaacattcgaagtgttgacatag

SEQ ID NO: 314762 - DNA, 795 bp, Artificial Sequence
  derived and/or modified sequence
atgcacctggagggcagagatggaagacgctacccaggggccccagctgtggagctgctgcagacctctgtgcccagcggcctggccgagctggtggccggcaagaggcggctgcccaggggggccggcggcgctgaccccagccacagctgccccagaggagctgctggccagagctcctgggccccagctggccaggagtttgccagcttcctgaccaagggccgcagccacagcagcctgccccagatgagcagcagccgcagcaaggacagctgcttcacagagaacacccccctgctgaggaacagcctgcaggagaagggcagccgctgcatccctgtgtaccaccctgagttcatcacagctgaggagagctgggaggacagcagcgctgactgggagcggcgctacctgctgagccgggaggtgtctggcctgagcgccagcgccagcagcgagaagggggacctgctggacagcccccacatccggctgcggctgagcaagctgcggcgctgtgtgcagtggctgaaggtgatgggcctgtttgcctttgtggtgctgtgcagcatcctcttcagcctgtacccagaccagggcaagctgtggcagctgctggccctgagccccctggagaactacagcgtgaacctgagcagccacgtggacagcaccctgctgcaggtggacctggccggggccctggtggccagcggccccagccggcccggccgggaggagcacatcgtggtggagctgacccaggctgatgccctgggcagccgctggtag

SEQ ID NO: 314763 - DNA, 657 bp, Artificial Sequence
  derived and/or modified sequence
atgcacctggagggcagagatggaagacgctacccaggggccccagctgtggagctgctgcagacctctgtgcccagcggcctggccgagctggtggccggcaagaggcggctgcccaggggggccggcggcgctgaccccagccacagctgccccagaggagctgctggccagagctcctgggccccagctggccaggagtttgccagcttcctgaccaagggccgcagccacagcagcctgccccagatgagcagcagccgcagcaaggacagctgcttcacagagaacacccccctgctgaggaacagcctgcaggagaagggcagccgctgcatccctgtgtaccaccctgagttcatcacagctgaggagagctgggaggacagcagcgctgactgggagcggcgctacctgctgagccgggaggtgtctggcctgagcgccagcgccagcagcgagaagggggacctgctggacagcccccacatccggctgcggctgagcaagctgcggcgctgtgtgcagtggctgaaggtgatgggcctgtttgcctttgtggtgctgtgcagcgtgacccacaactggacagtgtacctgaaccccaggagaagtgagcacagcgtgatgagcaggacctttgaggtgctgacctag

SEQ ID NO: 314764 - DNA, 795 bp, Artificial Sequence
  derived and/or modified sequence
atgcacctggagggccgggacggccggcggtaccccggcgcccccgccgttgaactcctgcagacttctgtaccatccggccttgccgaattggtcgcggggaaaaggagactccccagaggagctggaggtgccgatccaagtcactcttgtccccgcggggccgcaggacagtcatcttgggctcccgccggtcaagaatttgcttccttcctgacgaagggccgcagccactctagtttgccgcagatgtcaagtagccgcagcaaggattcatgctttacagagaacacccccttactgcgcaattcattacaggaaaaaggaagcaggtgcatccccgtttatcacccggagtttataaccgcagaggagagttgggaggatagctctgcggattgggagagacgatacctgctatctcgcgaagtgtcaggtctctctgcttcagcatcttctgaaaaaggcgatcttctggactcaccccacattcgactgcggctgtctaaattgagaagatgcgtgcagtggttaaaggtcatgggcttattcgcgtttgtggtgctctgcagtattttgttctcactgtacccagatcagggcaagctatggcaactattagccttgtccccgcttgagaactactcggtcaatctctcaagtcacgtggattcaacactgctccaggtcgatctggccggtgctctggtggctagtgggccctctaggcctggcagggaagagcacatcgtggtggagctcacacaggccgacgcactaggctcacgttggtag

SEQ ID NO: 314765 - DNA, 657 bp, Artificial Sequence
  derived and/or modified sequence
atgcacctggagggccgggacggccggcggtaccccggcgcccccgccgtcgagctgctgcagacctctgttcctagcggtctcgccgagctcgtagccggaaagaggcgacttccaaggggcgctggaggggccgatccttcacattcctgccccagaggtgctgccggccagagttcttgggccccggctgggcaggagtttgcttcatttcttacgaaaggccgcagtcactctagccttccccagatgtcttcttctcgctctaaggactcttgctttacagagaacacaccccttcttcgaaatagtctccaagaaaaggggtcaagatgcatccccgtgtatcaccccgaattcatcacagcagaggagagctgggaggactcgagcgccgattgggaaagacgatacttgctgtctagggaagtaagcggtttgtccgcgagtgcctcctcagagaaaggagacttgctggattcgccacatattagacttagattatccaagctgcgaaggtgcgtacagtggttgaaggtcatgggcctctttgcgtttgttgttctctgctccgtgacacataactggacagtctatctgaatccccggcggtccgagcacagcgtgatgagcaggacatttgaagtacttacgtag

SEQ ID NO: 314766 - DNA, 996 bp, Artificial Sequence
  derived and/or modified sequence
tccgctcaccatccagagcggaggtgcggaccttaaactcactcctggagaaagatctgcaagtgcgcaggtaaagtgcacgtgctccgcggtcgggaggaaggaggcgaggagccagactagcctgggaacaggcagggagggtttacacagccccggctgagtcgcggcttaggaagcaagagagaagactggcagtggagcatgcatctggagggcagagacggcaggcggtaccccggcgcgccggcggtggagctcctgcagacgtccgtgcccagcggactcgctgaacttgtggccggcaagcgcaggcttcctcggggagccggtggagctgacccctcgcactcctgccccaggggggctgccgggcagagctcttgggctcctgcaggccaggagtttgcttcattcctcacaaaagggaggtctcactcttctttgccccagatgtccagctccaggtctaaagattcctgctttacagaaaacactcctttgctgaggaattccttacaggagaaagggtcacggtgcatacctgtttaccatccagagttcatcactgctgaagagtcttgggaagacagctctgctgactgggagcgaagatacctgctaagcagggaggtgtctggtctgtctgcatctgcctcctccgagaagggagaccttctggacagcccgcacatccgactccgtctttccaagctgaggcgctgtgtgcagtggctgaaagtcatgggcctgtttgcctttgtggtgctgtgttctattttgttcagcctatatccggatcaaggaaagctctggcagctgttggccttatcaccgctggagaactactccgtgaaccttagcagccacgtggactccacgctgctgcaggtggacctggcaggggccctagtggccagtgggccgagtcgtcctgggagggaagagcacatcgtggtggagctgacccaggctgacgctttgggctccaggtgg

SEQ ID NO: 314767 - DNA, 750 bp, Artificial Sequence
  derived and/or modified sequence
tgctccgctcaccatccagagcggaggtgcggaccttaaactcactcctggagaaagatctgcaagtgcgcagagagaagactggcagtggagcatgcatctggagggcagagacggcaggcggtaccccggcgcgccggcggtggagctcctgcagacgtccgtgcccagcggactcgctgaacttgtggccggcaagcgcaggcttcctcggggagccggtggagctgacccctcgcactcctgccccaggggggctgccgggcagagctcttgggctcctgcaggccaggagtttgcttcattcctcacaaaagggaggtctcactcttctttgccccagatgtccagctccaggtctaaagattcctgctttacagaaaacactcctttgctgaggaattccttacaggagaaagggtcacggtgcatacctgtttaccatccagagttcatcactgctgaagagtcttgggaagacagctctgctgactgggagcgaagatacctgctaagcagggaggtgtctggtctgtctgcatctgcctcctccgagaagggagaccttctggacagcccgcacatccgactccgtctttccaagctgaggcgctgtgtgcagtggctgaaagtcatgggcctgtttgcctttgtggtgctgtgttctgtcactcacaactggacggtgtatttaaatccgaggagaagcgagcactcagtgatgagcaggacctttgaggtactgaccag

SEQ ID NO: 314768 - DNA, 795 bp, Artificial Sequence
  derived and/or modified sequence
atgcacctagagggtcgagacggtaggcggtacccaggtgcccctgccgtggagctgctgcaaacctcagtaccaagcggccttgccgaactcgtcgcaggaaaacgccgactgcccagaggagctgggggtgccgacccatcccactcttgtcccagaggggctgccggtcagtcctcttgggccccagccggtcaggagttcgcatccttcctcactaaaggaagaagtcactccagcttgccccaaatgagcagctctcggtccaaagacagctgttttaccgaaaacacccccttactgcgcaattccttgcaggagaagggcagccggtgtattccagtgtaccaccctgagtttatcacagccgaagaatcctgggaagactcttcggccgactgggagcggaggtatctcttgagcagggaggtctcaggcctttccgcttctgcatccagcgagaaaggcgacctcttagattctccccacatccggttgcggctgtctaagctgaggagatgtgtacagtggctgaaagtgatggggctattcgcatttgtagtgctttgtagcatcttgttctctctgtaccccgaccagggcaagctgtggcagttactggctttgtcccctttggagaattattctgtgaacctgtcttctcatgtggactctactctcctgcaggttgatcttgcaggggctctggtggcttcaggtccttccagacccggtcgggaagaacatatcgtggtcgaactcacacaggcagatgccctggggagtaggtggtag

SEQ ID NO: 314769 - DNA, 657 bp, Artificial Sequence
  derived and/or modified sequence
atgcacctggaaggcagggacgggagacgatatcccggagcacctgcagtggaactgctccagacaagcgtgccaagtggattggccgagttagtggctgggaaacgcagactccctcgcggtgcaggcggagcagatcccagtcattcttgtccccgtggggctgctggacagagctcatgggcacccgctggccaggagttcgcgtcattcctgactaagggccgttctcacagctctctcccccagatgagcagcagtaggtcaaaagactcctgttttactgaaaatacccccttactgcggaacagcctgcaggaaaaaggaagccgttgcatcccagtgtatcatcccgagttcattacagccgaagaaagctgggaggatagtagcgccgattgggaacggagatacttgctgtctagggaggtatccgggctcagtgcatcagcctctagcgagaagggcgatcttctggacagcccgcatatccggctccgactttccaaactgagacggtgcgtacagtggttgaaggtcatgggtctgtttgcatttgtggtgctttgttcagttactcataactggaccgtctatttaaacccacggaggtcagaacactcggtgatgtccagaaccttcgaagtgctgacttag

SEQ ID NO: 314770 - DNA, 795 bp, Artificial Sequence
  derived and/or modified sequence
atgcacctggagggcagagacggcagaagataccccggcgcccccgccgtggagctgctgcagaccagcgtgcccagcggcctggccgagctggtggccggcaagagaagactgcccagaggcgccggcggcgccgaccccagccacagctgccccagaggcgccgccggccagagcagctgggcccccgccggccaggagttcgccagcttcctgaccaagggcagaagccacagcagcctgccccagatgagcagcagcagaagcaaggacagctgcttcaccgagaacacccccctgctgagaaacagcctgcaggagaagggcagcagatgcatccccgtgtaccaccccgagttcatcaccgccgaggagagctgggaggacagcagcgccgactgggagagaagatacctgctgagcagagaggtgagcggcctgagcgccagcgccagcagcgagaagggcgacctgctggacagcccccacatcagactgagactgagcaagctgagaagatgcgtgcagtggctgaaggtgatgggcctgttcgccttcgtggtgctgtgcagcatcctgttcagcctgtaccccgaccagggcaagctgtggcagctgctggccctgagccccctggagaactacagcgtgaacctgagcagccacgtggacagcaccctgctgcaggtggacctggccggcgccctggtggccagcggccccagcagacccggcagagaggagcacatcgtggtggagctgacccaggccgacgccctgggcagcagatggtag

SEQ ID NO: 314771 - DNA, 657 bp, Artificial Sequence
  derived and/or modified sequence
atgcacctggagggcagagacggcagaagataccccggcgcccccgccgtggagctgctgcagaccagcgtgcccagcggcctggccgagctggtggccggcaagagaagactgcccagaggcgccggcggcgccgaccccagccacagctgccccagaggcgccgccggccagagcagctgggcccccgccggccaggagttcgccagcttcctgaccaagggcagaagccacagcagcctgccccagatgagcagcagcagaagcaaggacagctgcttcaccgagaacacccccctgctgagaaacagcctgcaggagaagggcagcagatgcatccccgtgtaccaccccgagttcatcaccgccgaggagagctgggaggacagcagcgccgactgggagagaagatacctgctgagcagagaggtgagcggcctgagcgccagcgccagcagcgagaagggcgacctgctggacagcccccacatcagactgagactgagcaagctgagaagatgcgtgcagtggctgaaggtgatgggcctgttcgccttcgtggtgctgtgcagcgtgacccacaactggaccgtgtacctgaaccccagaagaagcgagcacagcgtgatgagcagaaccttcgaggtgctgacctag

SEQ ID NO: 314772 - DNA, 83 bp, Artificial Sequence
  derived and/or modified sequence
aggagaatagcagtagaatgacaaaattagattttcacatgaaacttgatgacagtgtaggaaatggactgaaaggacaagac

SEQ ID NO: 314773 - protein, 1266 aa, Artificial Sequence
  derived and/or modified sequence
REATPPLRGLPAPPRHAPFPAGRFEPPRTKQGGRGSHTPWVYVINDLGIEENLKNDGKPKCQTGGKSKRTIQGTHKTTKQQSTAVDCKITSSTTGDKHFDKSPTKTRHPRKIDLRARYWAFLFDNLRRAVDEIYVTCESDQSVVECKEVLMMLDNYVRDFKALIDWIQLQEKLEKTDAQSRPTSLAWEVKKMSPGRHVIPSPSTDRINVTSNARRSLNFGGSTGTVPAPRLAPTGVSWADKVKAHHTGSTASSEITPAQSCPPMTVQKASRKNERKDAEGWETVQRGRPIRSRSTAVMPKVSLATEATRSKDDSDKENVCLLPDESIQKGQFVGDGTSNTIESHPKDSLHSCDHPLAEKTQFTVSTLDDVKNSGSIRDNYVRTSEISAVHIDTECVSVMLQAGTPPLQVNEEKFPAEKARIENEMDPSDISNVSAANLSMAEVLAKKEELADRLEKANEEAIASAIAEEEQLTREIEAEENNDINIETDNDSDFSASMGSGSVSFCGMSMDWNDVLADYEARESWRQNTSWGDIVEEEPARPPGHGIHMHEKLSSPSRKRTIAESKKKHEEKQMKAQQLREKLREEKTLKLQKLLEREKDVRKWKEELLDQRRRMMEEKLLHAEFKREVQLQAIVKKAQEEEAKVNEIAFINTLEAQNKRHDVLSKLKEYEQRLNELQEERQRRQEEKQARDEAVQERKRALEAERQARVEELLMKRKEQEARIEQQRQEKEKAREDAARERARDREERLAALTAAQQEAMEELQKKIQLKHDESIRRHMEQIEQRKEKAAELSSGRHANTDYAPKLTPYERKKQCSLCNVLISSEVYLFSHVKGRKHQQAVRENTSIQGRELSDEEVEHLSLKKYIIDIVVESTAPAEALKDGEERQKNKKKAKKIKARMNFRAKEYESLMETKNSGSDSPYKAKLQRLAKDLLKQVQVQDSGSWANNKVSALDRTLGEITRILEKENVADQIAFQAAGGLTALEHILQAVVPATNVNTVLRIPPKSLCNAINVYNLTCNNCSENCSDVLFSNKITFLMDLLIHQLTVYVPDENNTILGRNTNKQVFEGLTTGLLKVSAVVLGCLIANRPDGNCQPATPKIPTQEMKNKPSQGDPFNNRVQDLISYVVNMGLIDKLCACFLSVQGPVDENPKMAIFLQHAAGLLHAMCTLCFAVTGRSYSIFDNNRQDPTGLTAALQATDLAGVLHMLYCVLFHGTILDPSTASPKENYTQNTIQVAIQSLRFFNSFAALHLPAFQVPSIGLYRC

SEQ ID NO: 314774 - DNA, 3801 bp, Artificial Sequence
  derived and/or modified sequence
agagaggccaccccccccctgagaggcctgcccgccccccccagacacgcccccttccccgccggcagattcgagccccccagaaccaagcagggcggcagaggcagccacaccccctgggtgtacgtgatcaacgacctgggcatcgaggagaacctgaagaacgacggcaagcccaagtgccagaccggcggcaagagcaagagaaccatccagggcacccacaagaccaccaagcagcagagcaccgccgtggactgcaagatcaccagcagcaccaccggcgacaagcacttcgacaagagccccaccaagaccagacaccccagaaagatcgacctgagagccagatactgggccttcctgttcgacaacctgagaagagccgtggacgagatctacgtgacctgcgagagcgaccagagcgtggtggagtgcaaggaggtgctgatgatgctggacaactacgtgagagacttcaaggccctgatcgactggatccagctgcaggagaagctggagaagaccgacgcccagagcagacccaccagcctggcctgggaggtgaagaagatgagccccggcagacacgtgatccccagccccagcaccgacagaatcaacgtgaccagcaacgccagaagaagcctgaacttcggcggcagcaccggcaccgtgcccgcccccagactggcccccaccggcgtgagctgggccgacaaggtgaaggcccaccacaccggcagcaccgccagcagcgagatcacccccgcccagagctgcccccccatgaccgtgcagaaggccagcagaaagaacgagagaaaggacgccgagggctgggagaccgtgcagagaggcagacccatcagaagcagaagcaccgccgtgatgcccaaggtgagcctggccaccgaggccaccagaagcaaggacgacagcgacaaggagaacgtgtgcctgctgcccgacgagagcatccagaagggccagttcgtgggcgacggcaccagcaacaccatcgagagccaccccaaggacagcctgcacagctgcgaccaccccctggccgagaagacccagttcaccgtgagcaccctggacgacgtgaagaacagcggcagcatcagagacaactacgtgagaaccagcgagatcagcgccgtgcacatcgacaccgagtgcgtgagcgtgatgctgcaggccggcaccccccccctgcaggtgaacgaggagaagttccccgccgagaaggccagaatcgagaacgagatggaccccagcgacatcagcaacgtgagcgccgccaacctgagcatggccgaggtgctggccaagaaggaggagctggccgacagactggagaaggccaacgaggaggccatcgccagcgccatcgccgaggaggagcagctgaccagagagatcgaggccgaggagaacaacgacatcaacatcgagaccgacaacgacagcgacttcagcgccagcatgggcagcggcagcgtgagcttctgcggcatgagcatggactggaacgacgtgctggccgactacgaggccagagagagctggagacagaacaccagctggggcgacatcgtggaggaggagcccgccagaccccccggccacggcatccacatgcacgagaagctgagcagccccagcagaaagagaaccatcgccgagagcaagaagaagcacgaggagaagcagatgaaggcccagcagctgagagagaagctgagagaggagaagaccctgaagctgcagaagctgctggagagagagaaggacgtgagaaagtggaaggaggagctgctggaccagagaagaagaatgatggaggagaagctgctgcacgccgagttcaagagagaggtgcagctgcaggccatcgtgaagaaggcccaggaggaggaggccaaggtgaacgagatcgccttcatcaacaccctggaggcccagaacaagagacacgacgtgctgagcaagctgaaggagtacgagcagagactgaacgagctgcaggaggagagacagagaagacaggaggagaagcaggccagagacgaggccgtgcaggagagaaagagagccctggaggccgagagacaggccagagtggaggagctgctgatgaagagaaaggagcaggaggccagaatcgagcagcagagacaggagaaggagaaggccagagaggacgccgccagagagagagccagagacagagaggagagactggccgccctgaccgccgcccagcaggaggccatggaggagctgcagaagaagatccagctgaagcacgacgagagcatcagaagacacatggagcagatcgagcagagaaaggagaaggccgccgagctgagcagcggcagacacgccaacaccgactacgcccccaagctgaccccctacgagagaaagaagcagtgcagcctgtgcaacgtgctgatcagcagcgaggtgtacctgttcagccacgtgaagggcagaaagcaccagcaggccgtgagagagaacaccagcatccagggcagagagctgagcgacgaggaggtggagcacctgagcctgaagaagtacatcatcgacatcgtggtggagagcaccgcccccgccgaggccctgaaggacggcgaggagagacagaagaacaagaagaaggccaagaagatcaaggccagaatgaacttcagagccaaggagtacgagagcctgatggagaccaagaacagcggcagcgacagcccctacaaggccaagctgcagagactggccaaggacctgctgaagcaggtgcaggtgcaggacagcggcagctgggccaacaacaaggtgagcgccctggacagaaccctgggcgagatcaccagaatcctggagaaggagaacgtggccgaccagatcgccttccaggccgccggcggcctgaccgccctggagcacatcctgcaggccgtggtgcccgccaccaacgtgaacaccgtgctgagaatcccccccaagagcctgtgcaacgccatcaacgtgtacaacctgacctgcaacaactgcagcgagaactgcagcgacgtgctgttcagcaacaagatcaccttcctgatggacctgctgatccaccagctgaccgtgtacgtgcccgacgagaacaacaccatcctgggcagaaacaccaacaagcaggtgttcgagggcctgaccaccggcctgctgaaggtgagcgccgtggtgctgggctgcctgatcgccaacagacccgacggcaactgccagcccgccacccccaagatccccacccaggagatgaagaacaagcccagccagggcgaccccttcaacaacagagtgcaggacctgatcagctacgtggtgaacatgggcctgatcgacaagctgtgcgcctgcttcctgagcgtgcagggccccgtggacgagaaccccaagatggccatcttcctgcagcacgccgccggcctgctgcacgccatgtgcaccctgtgcttcgccgtgaccggcagaagctacagcatcttcgacaacaacagacaggaccccaccggcctgaccgccgccctgcaggccaccgacctggccggcgtgctgcacatgctgtactgcgtgctgttccacggcaccatcctggaccccagcaccgccagccccaaggagaactacacccagaacaccatccaggtggccatccagagcctgagattcttcaacagcttcgccgccctgcacctgcccgccttccaggtgcccagcatcggcctgtacagatgctag

SEQ ID NO: 314775 - DNA, 3801 bp, Artificial Sequence
  derived and/or modified sequence
cgtgaggctacccccccactgcgggggctgccagcgcccccgcggcatgcccccttccccgctggacggtttgagccacctagaacgaaacagggaggacgaggatcccacaccccgtgggtgtacgtcattaacgacttgggtatcgaggagaacctgaagaacgacggaaaaccgaagtgccagacagggggaaaatcgaaacgaactatccaaggtactcataagacaactaagcagcagagcaccgctgttgattgcaagattacctcttctaccacaggagacaagcattttgacaagagccctactaagactaggcacccaagaaagattgatctacgggctaggtactgggcctttttattcgacaacctcaggagggcagtggacgaaatctatgtgacgtgcgagtctgaccagtccgtagttgaatgtaaggaagttctgatgatgctggacaactatgtgagggattttaaggccctgatagactggatccagctccaggaaaagctggaaaagacagacgcacagagccggccaacatctctggcttgggaggttaaaaagatgagcccgggccgacacgtcatccccagcccatccactgaccgaattaatgtgaccagtaacgccaggaggtccctaaatttcgggggtagcacagggactgtgccagcaccccgcttagcaccaaccggcgttagctgggcagacaaggttaaggcccaccataccggctccacagcgagttcagagatcacgccagcccagtcgtgcccacctatgactgtgcagaaagcttctaggaaaaacgagcgcaaggacgctgagggttgggaaaccgtgcagcggggcaggcctatcaggagcagatctactgcggttatgcccaaggtgagtctggctactgaggccacccgcagtaaagatgactcagacaaagaaaatgtgtgtctgttgcctgatgagagcattcagaaaggacagttcgtaggtgatggcacatccaacaccattgagtcacaccctaaagacagcctccactcctgcgaccatccactggcggagaagacacagttcactgtttctaccctggatgatgtaaagaacagcggctctatccgggataactacgtgaggacaagcgagatttcagcggtgcatatcgacaccgagtgtgtgtctgttatgctgcaggcagggacccctcctcttcaagtgaatgaagagaagttccccgctgagaaggcaaggattgaaaacgagatggacccttctgacatctccaacgtgtccgcagcaaacctttctatggccgaggttctcgctaagaaggaggagcttgctgaccggttggagaaagccaatgaggaggccatcgcctccgccattgcggaagaagagcagctcacgcgggaaatagaagccgaggagaacaacgacattaacatcgaaaccgacaacgatagcgacttctctgcttcaatgggatccggatctgtttccttttgtggaatgagcatggattggaacgatgtcctcgccgattacgaggctcgtgaaagctggcgccaaaatacatcctggggagatatcgttgaggaggagcctgcccggccccccggccacggcattcatatgcatgaaaagctgagcagtccctcccgcaagcgtactattgcagaaagcaagaaaaaacacgaagagaaacagatgaaagcccagcagctgagggagaagcttagggaggagaagaccttgaagcttcagaaattgctagaacgggaaaaggatgtcagaaagtggaaggaagaactcttggaccagagacgtcgaatgatggaggagaaactcctacacgctgaattcaagcgcgaggtacaactgcaggccattgttaaaaaagctcaagaggaggaggctaaggttaatgaaatcgcctttatcaacacacttgaggcccagaataaaagacatgatgtactgtccaaacttaaagagtatgaacaacgcctcaacgagttgcaggaagagcgacagagacgtcaggaagagaagcaagccagagatgaagcggtgcaggagcggaaacgcgcattagaggctgagcggcaggcccgtgtagaagagcttctaatgaaaaggaaagaacaggaggcccggatagagcagcagcgacaggaaaaggagaaggcccgcgaggacgccgctcgagagcgggcccgtgatagagaagagcgccttgccgcactgaccgccgcccaacaagaagcaatggaggaactgcaaaagaaaattcagctgaagcacgatgagagcattcgcaggcacatggaacaaatcgaacagaggaaggagaaagccgctgagttgagctcaggccgtcacgctaacaccgattatgcacctaagctcacaccgtatgaaagaaaaaaacagtgcagtttatgcaacgtcctgatctcaagcgaggtgtacctgttttctcatgtaaagggacgtaagcatcagcaggcggtgcgcgagaacactagtatccagggaagagaactatctgatgaagaagtggagcatttgagcctgaaaaagtacatcatcgatatagtggtcgagtccaccgctcccgcggaggccttaaaggatggagaagagcgtcagaaaaataaaaagaaggcaaaaaaaatcaaagccagaatgaacttccgggctaaggagtacgagagccttatggaaaccaagaatagtggatcagactctccctataaggcaaaattgcagaggttggccaaggacctcctgaaacaggtgcaagtgcaggactctggaagctgggctaataacaaggtgtccgccctggacaggacactcggcgagatcacacggatcctggagaaggagaacgttgctgaccagattgcgtttcaggcagccgggggcctaacggctctagaacatatcttgcaggccgtcgtcccagcgacaaatgtcaacactgtgctgaggatcccccccaagagcttgtgtaacgccataaatgtctataatctcacttgtaacaattgctcagagaactgcagcgacgtgctgttctctaataaaatcacgtttctgatggatcttctgatccatcagttaaccgtgtacgtaccagacgagaacaacactatactcgggcgcaacacaaataagcaggtgttcgagggccttacaactggtctgttgaaggtcagtgctgtggtgcttggctgtctgattgcaaatcggcccgatggaaattgtcagcctgcaactccaaagatccccacccaggagatgaaaaacaagcctagccagggtgatccattcaacaaccgcgttcaagacctaattagttacgtggtgaatatgggactcattgacaagttatgcgcctgctttctctctgtgcagggacctgtggatgagaacccaaagatggctattttcctgcagcacgctgccggcctgcttcacgcaatgtgtaccctctgttttgcggtgacgggccgcagttattcaatattcgataataacaggcaggatcctactggacttacagcagccctacaggctacagatctcgccggtgtcttacacatgctctattgcgtcctgtttcatggcaccattctggatccgagcacagcctcgcccaaggagaactatacccagaatacaattcaagtggcaatacagtcacttcgattttttaacagctttgcggcccttcatctgcccgcgtttcaggtgccctctatcgggctgtaccgatgttag

SEQ ID NO: 314776 - DNA, 3801 bp, Artificial Sequence
  derived and/or modified sequence
cgggaggccaccccacccctgcggggcctgcctgccccacccaggcatgcccccttccctgctggccgctttgagccccccaggaccaagcagggcggccggggcagccacaccccctgggtgtatgtgatcaatgacctgggcatcgaggagaacctgaagaatgatggcaagcccaagtgccagacaggaggcaagagcaagaggaccatccagggcacccacaagaccaccaagcagcagagcacagctgtggactgcaagatcaccagcagcaccaccggggacaagcactttgacaagagccccaccaagaccaggcaccccaggaagattgacctgcgggcccgctactgggccttcctgtttgacaacctgcggcgggctgtggatgagatctacgtgacctgtgagagtgaccagagcgtggtggagtgcaaggaggtgctgatgatgctggacaactacgtgcgggacttcaaggccctgattgactggatccagctgcaggagaagctggagaagacagatgcccagagccggcccaccagcctggcctgggaggtgaagaagatgagccctggaagacatgtgatccccagccccagcacagaccgcatcaacgtgaccagcaatgcccggcgcagcctgaactttggaggcagcactggaacagtgcctgccccccggctggcccccaccggggtgtcctgggccgacaaggtgaaggcccaccacacaggcagcacagccagcagcgagatcaccccagcccagagctgcccccccatgacagtgcagaaggccagcaggaagaatgaaaggaaggatgctgagggctgggagaccgtgcagaggggccggcccatccgcagccgcagcacagctgtgatgcccaaggtgtccctggccacagaggccaccaggagcaaggatgacagcgacaaggaaaatgtgtgcctgctgcctgatgagagcatccagaagggccagtttgtgggagatggcaccagcaacaccatcgagagccaccccaaggacagcctgcacagctgtgaccaccccctggccgagaagacccagttcaccgtgtccaccctggatgatgtgaagaacagcggcagcatccgggacaactacgtgaggaccagcgagatctctgctgtgcacatcgacacagaatgtgtgtctgtgatgctgcaggccggcaccccacccctgcaggtgaatgaggagaagtttcctgctgagaaggccagaattgaaaatgagatggaccccagcgacatcagcaatgtgtctgctgccaacctgtccatggccgaggtgctggccaagaaggaggagctggccgaccggctggagaaggccaatgaggaggccatcgccagcgccatcgccgaggaggagcagctgacccgggagattgaggccgaggagaacaatgacatcaacatcgagacagacaatgacagcgacttcagcgcctccatgggcagcggctctgtgtccttctgtggcatgtccatggactggaatgatgtgctggccgactatgaggcccgggagagctggaggcagaacacctcctggggagacatcgtggaggaggagcccgcccggcccccaggccacggcatccacatgcatgagaagctgagcagccccagcaggaagaggaccatcgccgagagcaagaagaagcatgaggagaagcagatgaaggcccagcagctgcgggagaagctgcgggaggagaagaccctgaagctgcagaagctgctggagcgggagaaggatgtgaggaagtggaaggaggagctgctggaccagaggaggaggatgatggaggagaagctgctgcatgctgagttcaagcgggaggtgcagctgcaggccatcgtgaagaaggcccaggaggaggaggccaaggtgaatgagatcgccttcatcaacaccctggaggcccagaacaagagacatgatgtgctgagcaagctgaaggagtatgagcagaggctgaatgagctgcaggaggagcggcagaggcggcaggaggagaagcaggccagagatgaggccgtgcaggagaggaagagggccctggaggccgagcggcaggcccgggtggaggagctgctgatgaagaggaaggagcaggaggcccgcatcgagcagcagaggcaggagaaggagaaggcccgggaggatgctgcccgggagcgggcccgggaccgggaggagcggctggccgccctgacagctgcccagcaggaggccatggaggagctgcagaagaagatccagctgaagcatgatgagagcatcagaagacacatggagcagatcgagcagaggaaggagaaggctgctgagctgagcagcggcagacatgccaacacagattatgcccccaagctgaccccctatgaaaggaagaagcagtgcagcctgtgcaatgtgctgatcagcagcgaggtgtacctgttcagccacgtgaagggcaggaagcaccagcaggccgtgcgggagaacaccagcatccagggccgggagctgagtgatgaggaggtggagcacctgagcctgaagaagtacatcatcgacatcgtggtggagagcacagccccagctgaggccctgaaggatggagaggagcggcagaagaacaagaagaaggccaagaagatcaaggccaggatgaacttccgggccaaggagtatgagagcctgatggagaccaagaacagcggcagtgacagcccctacaaggccaagctgcagaggctggccaaggacctgctgaagcaggtgcaggtgcaggacagcggctcctgggccaacaacaaggtgtctgccctggacaggaccctgggggagatcacccgcatcctggagaaggaaaatgtggccgaccagatcgccttccaggccgccggcggcctgacagccctggagcacatcctgcaggccgtggtgcctgccaccaacgtgaacacagtgctgcgcatcccccccaagagcctgtgcaatgccatcaacgtgtacaacctgacctgcaacaactgcagcgagaactgcagtgatgtgctcttcagcaacaagatcaccttcctgatggacctgctgatccaccagctgactgtgtatgtgcctgatgagaacaacaccatcctgggcaggaacaccaacaagcaggtgtttgagggcctgaccaccggcctgctgaaggtgtctgctgtggtgctgggctgcctgattgccaacagaccagatggcaactgccagcctgccacccccaagatccccacccaggagatgaagaacaagcccagccagggcgaccccttcaacaacagagtgcaggacctgatctcctatgtggtgaacatgggcctgattgacaagctgtgtgcctgcttcctgtctgtgcagggccctgtggatgagaaccccaagatggccatcttcctgcagcacgccgccggcctgctgcacgccatgtgcaccctgtgctttgctgtgacaggccgcagctacagcatctttgacaacaaccggcaggaccccaccggcctgacagctgccctgcaggccacagacctggccggcgtgctgcacatgctgtactgtgtgctcttccacggcaccatcctggaccccagcacagccagccccaaggagaactacacccagaacaccatccaggtggccatccagagcctgcgcttcttcaacagctttgctgccctgcacctgcctgccttccaggtgcccagcatcggcctgtaccgctgctag

SEQ ID NO: 314777 - DNA, 3801 bp, Artificial Sequence
  derived and/or modified sequence
cgggaggccaccccccccctgcggggcctgcccgcccccccccggcacgcgcccttccctgctggtagatttgaaccacctaggaccaaacaaggtggccgcggcagccatacaccttgggtttacgtgatcaatgatctgggcatagaagagaaccttaaaaacgacgggaaacctaaatgtcaaacaggcggcaagagcaagagaaccatccagggcacacacaaaacaactaagcagcagagcactgccgtagactgtaagatcaccagctcaaccacaggggataaacattttgataaatctccaactaagacaaggcacccccgcaagattgatcttagagcccgatactgggccttccttttcgataacctgaggcgagctgtggatgaaatctatgtaacctgtgagagcgatcaatcagtcgtggaatgcaaggaagtgttgatgatgttggataactatgtcagagatttcaaggccttgatcgactggatacagcttcaagagaaacttgaaaaaacagacgcccagtctcgcccaacatccctggcttgggaagtcaagaagatgtcccccggccggcacgtgattcctagtccatccactgatcggatcaatgtgacatccaacgccagaagatccttgaacttcggtggctcgaccggtacagtacctgctccccgcttggcccctaccggcgttagctgggctgacaaagtgaaagctcatcacacaggctccaccgcatcatctgaaattactcccgcgcaatcatgtccacctatgactgtgcaaaaggcatcacgcaagaatgagcgaaaggacgcagaaggctgggagactgtacagaggggcagaccaatacgcagccgcagcactgccgtgatgcctaaagtgagcctagccaccgaagctactcggtccaaagacgactccgacaaggagaacgtctgcctcctcccagacgaaagtatacagaagggccagtttgtgggtgatggcacaagtaatacgatagagagtcatccaaaggattctctccattcctgtgatcaccccctggcagagaaaactcagtttacagtttccactttagacgatgtaaagaacagcggcagcatccgagataactatgtgagaacctctgaaatttccgcggttcatatcgacactgagtgtgtgtccgttatgctgcaggccggaacaccacctctacaagtgaatgaggagaaattccctgccgagaaggcacggattgaaaacgaaatggatccgtccgatattagcaacgtgagcgctgcaaatctcagtatggctgaagtgctcgccaagaaagaagagctggcggacaggttggagaaggcaaacgaggaggccatcgccagcgccatcgcagaggaagagcaactgacaagagagatcgaggccgaggaaaacaacgatatcaacatcgagactgacaatgactcagatttcagcgcctccatgggcagcggctcggtaagtttttgcggtatgtcaatggactggaacgatgttctagctgactacgaagccagggaatcctggcggcagaatacttcttggggcgacattgttgaagaagagcccgctcgaccacccgggcatggtattcacatgcatgagaagttgtcttcaccgagccgcaagcgcacgatcgcggagagcaaaaaaaagcatgaggagaagcaaatgaaggcccaacagctgagagagaagctgcgtgaggagaagacactgaagctccagaaacttttggaacgggagaaggacgtgagaaagtggaaggaggagctgctggaccagagaagacgcatgatggaggagaagctcttacatgctgaatttaaacgggaagttcaactccaggccatcgtaaaaaaggcccaggaggaggaggctaaggtgaacgagatagcctttattaacactctcgaagctcagaataaaagacacgatgttctcagcaagctgaaggaatatgaacagaggttaaatgaattacaggaggaaaggcaaagacggcaggaggaaaagcaagctagagacgaggccgtccaagagcgcaagagggcgctggaggcagaacgtcaagctagggtcgaagaactgctcatgaaaaggaaggagcaagaggcccgcattgaacagcaaagacaggaaaaggagaaggctcgtgaggatgccgcaagagaacgtgcacgtgacagagaggagcggctcgctgccctgaccgcagctcagcaagaggccatggaggaactccagaagaagatccagttgaaacatgatgagagcattagaaggcacatggaacaaatagagcagcggaaggagaaggcggcggagctgtctagcgggaggcacgcaaataccgattacgccccaaagctgaccccttatgagagaaagaagcagtgtagcctgtgtaatgtcttaatatctagcgaagtctacctgttcagccacgtgaaagggcgcaagcaccagcaagccgtgagagagaatacctcaattcaaggccgggagctgtctgatgaggaggtggagcatcttagccttaaaaagtatatcatcgatattgtggtcgagagcactgcgcccgcagaagcgttgaaagacggcgaggagaggcagaagaacaaaaaaaaagccaagaagataaaagctaggatgaatttcagggccaaggagtacgagtcccttatggagaccaaaaattctggaagcgactccccctacaaagctaaattgcaacgcctggccaaggatttactgaaacaggtccaggtccaggacagtgggagctgggcaaacaataaggtgagcgctctcgataggacactgggggaaatcactcgcatattggagaaggagaatgtggcagatcagattgcattccaggcggcaggcggtctcaccgccttagaacacatcctgcaggcggtagtgccagccacaaatgtaaatactgtgttgagaattcccccgaagagtctttgcaacgccattaacgtatataacctcacgtgtaacaactgctccgagaattgttcggatgtgctgtttagcaacaagattactttcctgatggacctcctgatccatcaactgacagtctacgttcctgatgaaaataatacgattctgggacggaacacgaacaagcaggtcttcgaggggctcactacaggacttctcaaagtgagtgctgtggtcctagggtgcctaattgctaatagaccagatggaaattgtcagcccgccacgccaaaaatccccactcaagaaatgaagaacaagccatcccagggcgacccatttaataacagggttcaggacctcatttcctacgtagtgaacatgggtctgattgacaaactttgtgcatgttttctgtctgtgcaggggcctgtcgatgaaaaccctaaaatggcgattttcctccagcatgcggcaggtctgctccacgcaatgtgtaccttatgcttcgccgtgacgggcagatcctattccatttttgacaataataggcaagatccgaccggtttgaccgccgcactgcaggccacggatctggctggggtactgcacatgctgtattgcgtgctctttcacgggacaatccttgaccctagcactgccagccccaaggagaattatacacagaataccatccaagtcgcgatccagtccctgagatttttcaactccttcgcagccctgcacctgcccgcctttcaggtgccttcgatcggcctgtacaggtgctag

SEQ ID NO: 314778 - DNA, 3801 bp, Artificial Sequence
  derived and/or modified sequence
agggaagccacgccacctttgagagggttaccggctcctcctagacacgccccttttcccgctggtagattcgagccccctcgaacaaaacagggcggacggggatcacatactccttgggtgtacgtcatcaatgacctaggtatagaggaaaacctcaaaaatgacggaaaacctaaatgtcagactggcggaaaatccaagaggaccatccaaggaacacataagacaaccaagcagcaatcaaccgcggtggactgtaagataacctccagcactacgggcgacaagcactttgacaagagccctaccaagacccgccatccacggaaaatcgatctgcgggcacgatattgggcctttctgtttgataatctgcgcagggcggtggatgaaatctacgtcacttgtgagagtgaccagagcgtcgtcgaatgtaaggaggtactgatgatgctggataattacgtccgcgattttaaagcactgatagactggatacagctgcaggagaagctggaaaagaccgatgctcaatcccggcctactagcctcgcgtgggaagtgaagaagatgtctccagggaggcatgttataccaagtccttcgacggaccgaattaatgtcaccagtaacgctcgccgatctctgaattttggtggtagtactggcaccgttcccgctccacggctggccccaacaggagtttcttgggctgacaaggtgaaagctcaccatacaggctctactgcctcctccgagataactcctgcacaatcctgtcctcctatgaccgtgcaaaaggccagccgcaagaacgagcgaaaagacgccgaaggatgggagacagtgcaaaggggcagacctatcagatcacggtctacagctgtgatgcccaaggtatctttagcaactgaggcaacccggtccaaggacgattcagataaggaaaatgtatgcctgctgcccgacgagagcatacagaagggtcagtttgtgggagacggcactagcaacactattgaaagtcatcctaaggattctctacattcctgtgaccaccccctggccgagaaaacccagtttacagtgtctaccctggatgatgtgaagaactcaggatcgattcgggataattatgtgcgaacatcagagatatcggctgtgcatattgacactgagtgcgtgtctgttatgcttcaggcaggaactcctcccttacaggttaacgaggagaaatttccggcagagaaagcgagaatcgagaacgagatggatccctccgacatatcgaatgtgtccgccgcaaacctgagcatggcagaggttttggcaaaaaaagaggagctggcagacaggctggaaaaggctaacgaggaagccatagcatccgctatcgctgaagaggaacagctgacgagggagatcgaagccgaagagaacaacgacattaacatagaaaccgacaatgattcagatttctccgcttccatgggatcaggaagcgtcagcttttgtggcatgagtatggactggaatgacgtactggccgactacgaggcaagagagtcctggaggcaaaacacctcttggggcgatatcgttgaagaagagcccgctcgacctcccggtcacggaatacacatgcatgagaagctttcttccccttctcgaaagcgcaccattgccgaatcgaagaaaaagcatgaagagaaacaaatgaaagcacagcagttgagagagaaactcagagaagaaaaaaccctgaaactgcagaagcttctggagagggagaaggacgtccgaaagtggaaggaggagctgctggaccaacggaggcgcatgatggaagagaagttgctccacgccgagtttaagagagaggttcagctgcaggctatcgtgaagaaggcccaggaggaggaggccaaggtcaatgagattgcattcattaacaccctcgaagcacagaataagcgccatgatgtgttaagtaagctcaaggagtacgagcagaggttgaacgaattacaggaagagcgccagcggaggcaggaggaaaaacaggcacgcgacgaagcagtccaagaacgaaaaagagctcttgaggctgaaagacaggccagagtggaagagctgttaatgaagcggaaggagcaggaagctcggatagagcaacagagacaagaaaaggagaaggccagggaggatgcggcacgcgagagggccagggatcgggaagaaaggctggcagcgttaactgccgcacagcaggaagctatggaagagctccagaagaagattcagctcaagcatgacgagtctatccggagacacatggagcagatcgagcagagaaaggaaaaagcagccgagctctcgtccggcaggcatgctaatactgactacgctcctaaactgacaccttacgaacggaagaagcaatgcagcttgtgcaatgttctcatttcctctgaggtgtatctattttcccatgtcaaggggaggaaacaccaacaggcagtgcgggagaacacaagcatccaaggccgtgagctgtccgacgaagaagtcgagcacctcagtttaaaaaagtatattattgatatcgtggtggagagtacagcccctgctgaggccttgaaagacggggaagagagacagaagaacaagaagaaggcgaagaaaataaaagcccgtatgaacttcagggctaaagagtacgagagtctgatggaaactaaaaactcgggcagcgacagcccctacaaggctaaactgcagagactagccaaggatctgttgaaacaggtgcaggtacaagactcgggcagttgggcgaacaataaggtttctgcccttgacaggaccctcggcgagataactaggatcctggagaaagaaaacgtggccgatcaaatcgcctttcaggcagctggagggctgaccgctctggaacatatcctccaggctgtggtaccggcaacaaatgttaacactgtgctcagaatccccccaaaatccttgtgtaacgccatcaatgtctacaaccttacgtgcaacaattgcagcgagaattgcagcgacgtgctgttctcaaataaaatcacctttctgatggacctcctgatccaccagctcactgtctacgtgcctgacgagaataatacgattctgggcagaaacacgaataagcaggtctttgagggccttacaaccggactgttaaaggtgagcgcggtggtgcttggttgcctcatcgccaatagacccgatggcaattgccaacccgcaacgccaaagattcctacgcaagagatgaagaacaaaccgtctcaaggcgacccttttaacaaccgcgtgcaggacctgatctcctacgtcgttaacatgggcttgatcgataaactgtgcgcctgcttcctgagtgtccaggggccagtagatgagaatccgaagatggctatatttcttcagcatgctgctgggttgctccacgccatgtgcacattatgcttcgccgtaacgggcagatcctacagtattttcgacaataacaggcaggatccaaccggtctcaccgccgctcttcaggctacagatttggcaggggttctgcacatgctctactgtgtgctgttccacggtacaatccttgacccatccacagcctcaccaaaagaaaactatacccaaaacaccatacaggttgcaatacagagcctgcgcttttttaactccttcgccgcattacatcttcctgcttttcaggtgcccagtatcggcctgtacagatgttag

SEQ ID NO: 314779 - DNA, 5427 bp, Artificial Sequence
  derived and/or modified sequence
ccgggaagccaccccgcctctccgaggcctccctgccccgccccgtcacgcccctttcccggcgggacgctttgagccgccccgaactaagcagggcggtcgggggagtcatactccatgggtttatgtgataaatgatcttggcatagaagagaatttaaagaatgatggaaaacctaaatgtcaaactggtggaaaatctaagaggaccattcaaggcactcataaaactactaaacagcagagtactgcagtggactgtaaaataacatcgtctacgactggagataaacactttgataaaagtcccactaaaacaaggcaccctcggaaaattgatctaagagctcgatactgggcatttctttttgataatcttcgccgagcagtagatgaaatctatgtaacttgcgaatcagatcagagtgtggtcgaatgtaaggaggtgctaatgatgctggataactatgtaagagatttcaaagcattgattgactggattcagcttcaggaaaagctagagaagacagatgctcaaagcagaccaacatcattggcatgggaagtaaagaagatgtctccgggacgccatgtgattccaagtccatcaacagatagaataaatgtaacatcaaatgctcgacgaagcttaaattttggaggttcaactggcacagtgccagctcctcgtctggctcccacaggtgtcagttgggctgacaaggtaaaggctcatcatacaggctctactgcttcttcagaaataacacccgcccagtcttgcccaccaatgacagtgcagaaggcctcacgcaaaaatgaacggaaagatgctgaaggatgggagaccgttcagagaggaaggcctattcgttctcgatcaacagcagtgatgccaaaagtttcattggcaacagaagccacaagatcaaaggatgacagtgataaagaaaatgtatgtcttttacctgatgaaagcatacagaaaggtcaatttgttggagatggaacttctaatactatagaatctcatcccaaagactcattacactcttgtgaccatcctcttgccgaaaaaacccagttcacagtgagtacattggatgatgtgaagaattctggcagtattcgagacaattatgttcgaacttctgaaatatctgctgtccacattgatacagagtgtgtttcagttatgctgcaagctggtacacctcctttacaagtaaatgaagaaaaatttccagcagagaaagcaaggatagaaaatgaaatggacccttcagatatttcaaatgtgagtgctgctaacttgtccatggcagaagtccttgctaaaaaagaagagctagcagatcgtctagaaaaggccaatgaagaagccattgctagtgctattgctgaagaagaacagttaactagagaaattgaagctgaagaaaacaatgatattaacattgaaactgacaacgacagtgatttttctgccagcatgggcagtgggagtgtttctttctgtggtatgtccatggactggaacgatgtccttgcagattatgaagctcgtgagtcttggcgccaaaatacatcctggggggacattgtagaagaagaacctgctagacctccagggcatggaattcacatgcatgaaaaactttcttcaccctctcgtaaaagaacaattgcagaatctaagaagaaacatgaagaaaaacaaatgaaagcacagcagctaagggaaaagttacgcgaagagaaaacattgaagcttcagaaattgttagaaagggagaaggatgtccggaagtggaaggaagaattgctagatcaacgacgcaggatgatggaagaaaaattacttcatgctgagtttaagcgagaagtgcagttacaagcaattgtgaaaaaagcacaagaagaagaagctaaggtaaatgaaattgcctttataaatacccttgaagcccagaataaacgtcatgatgttttatcaaaattgaaggaatatgaacagaggcttaatgagctacaggaagagcgtcagagaagacaggaagaaaagcaagcacgtgatgaagctgtgcaggaacgcaagagagctctagaggcagagcggcaggcccgtgtagaagaattgttaatgaagaggaaagaacaagaagcccgaattgaacaacagaggcaagaaaaggaaaaagcccgtgaggatgcagcccgggaaagagctagagacagggaagaacgattggcagcactcacagctgctcaacaagaagctatggaagagttacagaaaaaaattcagctcaagcatgatgaaagtattcgaaggcacatggaacagattgaacaaagaaaagaaaaagctgctgagctaagcagtgggcgacatgcaaatactgattatgcccccaaactgaccccttatgaaagaaagaagcagtgttctctctgcaatgtcctgatctcttcagaggtatatctttttagccatgttaaagggagaaaacaccagcaagccgtgagagagaataccagcatccaggggcgtgaactgtcagatgaagaagtggagcatctttccttgaagaagtacattattgacattgtggttgaaagtacagctccagcagaagctttgaaagatggagaagagcggcaaaaaaataaaaaaaaagccaaaaagataaaagcccggatgaacttcagggctaaggaatatgagagtttaatggaaaccaaaaattctggctctgattcaccttataaagcaaagcttcagcgattagccaaagatcttctaaaacaagtacaagttcaagacagtggctcatgggcaaacaataaagtgtctgctttggatcggaccctaggagagatcactagaatactggaaaaagagaatgtggcagatcagattgcatttcaagctgctggtggattaacagcccttgaacacatccttcaagcagtagtcccagccacaaatgtgaacacagttttaagaattcctcctaagtctctctgcaatgcaatcaatgtttacaacctcacctgcaataactgttcagaaaactgcagtgatgttctgtttagtaacaagattaccttcttaatggacctcctgatacaccagttgacggtttatgttccagatgaaaataatactattttggggagaaatacaaataaacaagtttttgaaggcttgacaactggacttctcaaagtcagtgctgtggttttgggctgcctgattgccaatcgaccagatggaaactgccagccagctaccccaaaaataccaacacaggaaatgaaaaacaaaccctcacaaggtgatccttttaacaatcgagttcaggaccttatcagctacgtggtgaacatgggtctgattgacaaactgtgtgcctgcttcctctcggtgcaaggcccagtggatgagaatcccaagatggccatatttctgcagcatgccgcaggactcttacatgcaatgtgtacactgtgctttgctgtcactggaaggtcatacagcatatttgacaataatcgccaggatcccacagggctgacagctgctcttcaggcaaccgacctggctggagttcttcatatgctctactgtgtcctcttccatggcaccatcttggaccccagcactgccagtcccaaggagaattacactcaaaataccatccaagtggccattcagagtttacgtttcttcaacagctttgcagctcttcatctgcctgcttttcaggtaccaagtattggtttatatcgatgttaaccaatcaagagttagtattttagtgtagataggatgtcagattcttctcctgaattggggcataaggaataaactacaataaatggaattataatatatattataatttattaaactactattttctgggaactgtattagatgctctataacatctagcattctcatttattctcatagctaccatgcaaagtattattatacccattttacagatagagaagctgacagttaagtaatgtgcccaaggttacatgtttgtgaaccaggactagtaaccatgactctcccaccccaaagcctatgttcatcctttgccatgctgctatttataaatcttttgtctggaattctttatatcaggacattatcatctcatcaacttttaaatattaaggaaagtaatggtttcttacgtaaatagaaccaaaattagataaattgattgatatgactttctacggatggtttagctgattttgtgtccaatgtaaagtgtataactagctttacagggatttgcatctttagctatgaagtttttatagctaaagaaagaagaattgctttatgctataacaccagactgtcagcctggaaacagattttttttttcatgtaggaaatttaattttcaaaaacactgaacctttggaacagagcaagccccaaggaatagactttctctttcagtttattaactgtcaagtgatttcattaaaaaaggaacaaatttggcagatgatgaacccataatttagatgaattgctttgctctgagggaaaaaggttatagagaaacaaatgtatgaaaatagtggactttgccattctgagatgagaagaatacttctatattgtagctgatgacaaatgtgccattctttaattgatgtcttcctgtcattttgttcaaaaaaggaaacttgtgactaagttgtatcattggatctagtatctttcaactttgtagaattagtttatctgtcacaagaacagaaatcccttcctttgggttaatgcttttctgtctccagagcagttgaactagccttaggaggtaactgactgcacaatacgtagagttctgggaggttacagccacatataaatgagagatatctgctccaaaaaatgtcagtagttcttgcctcagggttgaacataacatctgtgttttatgaagacgtaagcccaccgtattctgtctggaaacagtttggaaatcagggaaccttaactttacatgctcaggatatggagtccaccagtctacccatcagctgcgtcgaaagggagtgatttcttttgttaacagattatggaatagcaaatatctaaaaactgtctcttagcttcctgtttcacgggtcttcttggccaacatttatactgctacaggggactccatatcataaacaagcatctaggataagtcagctgttcggtcagtcactccatcagggagccctaggtccctgctccctgcccctctcctcctgtgaacttgtggcctgtgcaggctcactcacaaaggcgcaccactgaacttcaccagacctgctccctagtgcctttaagcctaaagggcttaataatgggcgataatgtcaagtgatttcatt

SEQ ID NO: 314780 - DNA, 381 bp, Artificial Sequence
  derived and/or modified sequence
tgaggcctggacagaatgagcagcagcttcgacagaatgggccccggcatcggcgccatcctggagagaagcatcgacatggacagaggcttcctgagcggccccatgggcagcggcatgagagagagaatcggcagcaagggcaaccagatcttcgtgagaaacctgcccttcgacctgacctggcagaagctgaaggagaagttcagccagtgcggccacgtgatgttcgccgagatcaagatggagaacggcaagagcaagggctgcggcaccgtgagattcgacagccccgagagcgccgagaaggcctgcagaatcatgaacggcatcaagatcagcggcagagagatcgacgtgagactggacagaaacgcctag

SEQ ID NO: 314781 - DNA, 381 bp, Artificial Sequence
  derived and/or modified sequence
tagggacttgaccgcatgagctccagctttgaccgaatggggccaggaatcggcgcaatcctggagagatctattgacatggacagaggttttttgtcaggacctatgggaagcggtatgcgggagaggataggttccaaaggaaatcagatcttcgtgaggaatcttccattcgaccttacgtggcagaagctaaaagagaaatttagccagtgcggacacgttatgtttgccgagatcaaaatggagaacggaaaaagcaaaggatgtgggacagtcaggttcgactcccctgaaagtgccgagaaagcctgtcgcatcatgaacggaatcaaaatttccggcagagagatcgatgttaggctcgatcggaacgcgtag

SEQ ID NO: 314782 - DNA, 381 bp, Artificial Sequence
  derived and/or modified sequence
tgaggactggacaggatgagcagcagctttgacaggatgggccctggcattggagccatcctggagaggagcattgacatggaccggggcttcctgagcggccccatgggcagcggcatgagggagcgcatcggcagcaaaggaaaccagatctttgtgaggaacctgccctttgacctgacctggcagaagctgaaggagaagttcagccagtgtggccacgtgatgtttgctgagatcaagatggagaatggcaagagcaagggctgcggcaccgtgcgctttgacagccctgagagcgctgagaaggcctgccgcatcatgaatggcatcaagatcagcggccgggagattgatgtgcggctggacagaaatgcctag

SEQ ID NO: 314783 - DNA, 731 bp, Artificial Sequence
  derived and/or modified sequence
tgggactggaccggatgagttccagctttgatagaatgggaccaggtataggagctatactggaaaggagcatcgatatggatcgaggatttttatcgggtccaatgggaagcggaatgagagagagaataggctccaaaggcaaccagatatttgtcagaaatctaccttttgacttgacttggcagaaactaaaagagaaattcagtcagtgtggtcatgtaatgtttgcagaaataaaaatggagaatggaaagtcaaaaggctgtggaacagtcagatttgactccccagaatcagctgaaaaagcctgcagaataatgaatggcataaaaatcagtggcagagaaattgatgttcgcttggatcgtaatgcataatttcaagccatggagctgatccatttataaatgcagttttaataaaccatggaataccaaggcacaacatatcaaacacattggatcccacgatgttagacatagccatatctcctttccctacaaaagaaaagcatactgttaaaatgtgcttaccaatactgtgttttattaataatcttcataagaaaagaaacactggatacttttttgttgttgattcgttttgaaaaattgttgttagagcaaaagtcttactgaatttgtatttttaaatttttcttgggttagtatttaaagtcttaacatttatttaataattatatttattaaaccatttttcaataaggt

SEQ ID NO: 314784 - DNA, 381 bp, Artificial Sequence
  derived and/or modified sequence
tgaggcctggaccggatgagcagcagcttcgaccggatgggccccggcattggggccattttagagagatctatagatatggacaggggcttcctgtccggacccatgggttctggaatgcgcgaacgcatcgggtcgaaaggaaatcagatcttcgtgcgaaacctaccttttgatctgacttggcagaagctgaaagagaaattttctcagtgcggccatgtcatgtttgcagaaatcaaaatggagaatggtaagtccaaggggtgtgggactgttagattcgacagccccgaatctgccgaaaaagcatgtcgcatcatgaacggtattaagatttctgggcgcgagatagacgtccgcctcgatcgtaatgcatag

SEQ ID NO: 314785 - DNA, 381 bp, Artificial Sequence
  derived and/or modified sequence
tgagggttagacaggatgtctagctctttcgacaggatgggtcctggcattggagccatcctcgagcgcagtattgacatggacaggggttttctgagcggccctatgggaagcgggatgcgggaacgcattggctctaagggcaaccagatattcgtgcggaatttgccttttgacttgacctggcagaagttaaaggagaaattttctcagtgcggacacgtgatgtttgccgaaattaaaatggagaatggcaaatctaaaggttgtggaacagtgagatttgattcaccggagtccgccgagaaggcatgtcgaatcatgaatggcattaagatttcaggtcgggagatcgacgtccggctggaccgtaacgcctag

SEQ ID NO: 314786 - protein, 191 aa, Artificial Sequence
  derived and/or modified sequence
MALVHKLLRGTYFLRKFSKPTSALYPFLGIRFAEYSSSLQKPVASPGKASSQRKTEGDLQGDHQKEVALDITSSEEKPDVSFDKAIRDEAIYHFRLLKDEIVDHWRGPEGHPLHEVLLEQAKVVWQFRGKEDLDKWTVTSDKTIGGRSEVFLKMGKNNQSALLYGTLSSEAPQDGESTRSGYCAMISRIPR

SEQ ID NO: 314787 - DNA, 576 bp, Artificial Sequence
  derived and/or modified sequence
atggctcttgtgcacaagctcttgcgcggtacctatttcctgaggaaattctctaagccaacctccgctctgtatccctttctcgggatcaggtttgcggagtacagttcctcacttcaaaagcctgtggcctcccccgggaaggcctcatcccagcgcaagactgaaggtgaccttcagggagatcaccaaaaagaggtcgctctggatataacttcatccgaggagaagccagacgtaagctttgacaaggctatcagagacgaggcaatataccattttcgactcctcaaagacgagatcgtcgaccattggaggggccctgagggccaccctctgcacgaagtgcttctggagcaggccaaagtcgtctggcaattccgaggaaaagaagatctggacaaatggaccgtcacctcggataagaccattggaggaaggtcagaggtttttttgaagatgggcaagaataatcagtccgcacttttgtatggcaccctgtcttccgaagctccgcaggacggggaatcgaccaggagtggttactgtgctatgattagtaggattccccggtag

SEQ ID NO: 314788 - DNA, 630 bp, Artificial Sequence
  derived and/or modified sequence
atggccctggtgcacaaattgttacggggtacttatttccttcgaaagttctcaaagccgacttctgcgctgtacccgttcctgggcataaggttcgctgagtatagttcctctttgcagaagcccgtggctagccctggcaaggctagtagccagcgaaaaacggaaggcgacctccaaggcgaccaccagaaggaggtggccctggacattacttcttccgaggagaaacccgatgttagcttcgataaggcaattagggacgaggcaatctatcacttccgcctgttaaaagatgagattgtcgaccactggaggggcccggaggggcatcctctgcatgaggtcctcttggagcaggccaaggtcgtgtggcagtttcgaggtaaggaggacctggataaatggaccgttacatcggataaaacgataggtgggaggtctgaggtcttcctgaaaatggggaaaaacaaccaaagtgccctgctctacggcaccctgtcctccgaggccccacaggatggggaatccacaagatctggctattgcgctatgatcagccgcatcccgaggggagcttttgaaagaaaaatgagttacgactggtctcagtttaataccctgtattag

SEQ ID NO: 314789 - DNA, 576 bp, Artificial Sequence
  derived and/or modified sequence
atggccctggtgcacaagctgctgcggggcacctacttcctgaggaagttcagcaagcccaccagcgccctgtaccccttcctgggcatccgctttgctgagtacagcagcagcctgcagaagcctgtggccagccctgggaaggccagcagccagaggaagacagaaggagacctgcagggcgaccaccagaaggaggtggccctggacatcaccagcagcgaggagaagccagatgtgtcctttgacaaggccatcagagatgaggccatctaccacttccggctgctgaaggatgaaattgtggaccactggaggggccctgagggccaccccctgcacgaggtgctgctggagcaggccaaggtggtgtggcagttccggggcaaggaggacctggacaagtggacagtgaccagtgacaagaccatcggcggccgctctgaggtgttcctgaagatgggcaagaacaaccagagcgccctgctgtatggcaccctgagcagcgaggccccccaggatggagagagcaccaggagcggctactgtgccatgatcagccgcatccccaggtag

SEQ ID NO: 314790 - DNA, 630 bp, Artificial Sequence
  derived and/or modified sequence
atggccctggtgcacaagctgctgcggggcacctacttcctgaggaagttcagcaagcccaccagcgccctgtaccccttcctgggcatccgctttgctgagtacagcagcagcctgcagaagcctgtggccagccctgggaaggccagcagccagaggaagacagaaggagacctgcagggcgaccaccagaaggaggtggccctggacatcaccagcagcgaggagaagccagatgtgtcctttgacaaggccatcagagatgaggccatctaccacttccggctgctgaaggatgaaattgtggaccactggaggggccctgagggccaccccctgcacgaggtgctgctggagcaggccaaggtggtgtggcagttccggggcaaggaggacctggacaagtggacagtgaccagtgacaagaccatcggcggccgctctgaggtgttcctgaagatgggcaagaacaaccagagcgccctgctgtatggcaccctgagcagcgaggccccccaggatggagagagcaccaggagcggctactgtgccatgatcagccgcatccccaggggggcctttgagaggaagatgtcctatgactggagccagttcaacaccctgtactag

SEQ ID NO: 314791 - DNA, 837 bp, Artificial Sequence
  derived and/or modified sequence
gcggcggcaggccggcggttggtgtgtcccgggtgtggggaggcgacagagccctggcacttgagggttgagggggcctccccagcgcggcgaaccgtctagcctccggaggccaggccgtgagtgcgggaggtatacgccaaggcggaagaattttgccactcactacctgtgtgacctcgggtagaattgggctatttgctgaagcttcttggtggcccttgctagcccaggaagaaacttacattttgatttttttgtaccatggctttggttcacaaattgctgcgtggtacttattttctcagaaaattctctaagccaacttctgccttgtatccatttttgggtattcgctttgcagagtattccagtagtcttcagaaaccagtggcttctcctggcaaagcctcctcacagaggaagactgaaggggatttgcaaggagatcaccagaaagaagttgctttggatataacttcttctgaggagaagcctgatgttagtttcgataaagcaattagagatgaagcaatataccattttaggcttttgaaggatgaaattgtggatcattggagaggaccggaaggccaccctctgcatgaggtcttgctggaacaagccaaggttgtctggcaattccgggggaaagaagatttggataagtggacagtgacttctgataagacgattggaggcagaagtgaagtgtttttgaaaatgggcaagaataaccaaagtgcactgctatatggaactctgagctctgaggcgcctcaggacggggagtctacccgaagtgggtactgtgcaatgatatccaggattccaagg

SEQ ID NO: 314792 - DNA, 781 bp, Artificial Sequence
  derived and/or modified sequence
ggaagggaaaagcagatggacctatacgggtaaagtggcttctgggcggaaggtacactataggctcggggaggtagaattgggctatttgctgaagcttcttggtggcccttgctagcccaggaagaaacttacattttgatttttttgtaccatggctttggttcacaaattgctgcgtggtacttattttctcagaaaattctctaagccaacttctgccttgtatccatttttgggtattcgctttgcagagtattccagtagtcttcagaaaccagtggcttctcctggcaaagcctcctcacagaggaagactgaaggggatttgcaaggagatcaccagaaagaagttgctttggatataacttcttctgaggagaagcctgatgttagtttcgataaagcaattagagatgaagcaatataccattttaggcttttgaaggatgaaattgtggatcattggagaggaccggaaggccaccctctgcatgaggtcttgctggaacaagccaaggttgtctggcaattccgggggaaagaagatttggataagtggacagtgacttctgataagacgattggaggcagaagtgaagtgtttttgaaaatgggcaagaataaccaaagtgcactgctatatggaactctgagctctgaggcgcctcaggacggggagtctacccgaagtgggtactgtgcaatgatatccaggattccaaggggtgcttttgagaggaagatgtcttacgattggtcccagttcaatactctgtat

SEQ ID NO: 314793 - DNA, 576 bp, Artificial Sequence
  derived and/or modified sequence
atggccctggtgcacaagctgctgcggggcacctacttcctgcggaagttttctaaacctacatccgctttatatcccttcctaggaatccggtttgccgaatattccagttccctgcagaaaccggtggcctcccctggaaaggcctcctcccagcgtaaaactgagggcgatctgcaaggcgatcatcagaaagaggttgctttggacataacatcctcggaggagaagcctgacgtgtcttttgataaagcgattcgcgatgaggctatctaccacttcagactgctgaaagacgagatcgttgaccactggcgcgggcccgagggacatcctctgcacgaggtgcttcttgagcaggctaaggttgtgtggcagttccgaggaaaggaagatctggataaatggaccgtcacatccgataagacaatagggggcagatctgaagtgttcctaaagatgggaaagaataatcagtccgccctcctgtatggcacattgagttctgaggctccacaagacggagagagcacaagatctgggtactgcgcaatgattagcagaatcccccgttag

SEQ ID NO: 314794 - DNA, 630 bp, Artificial Sequence
  derived and/or modified sequence
atggccctggtgcacaagctgctgcggggcacctacttcctgcggaagttttcaaagccaacatctgccctgtaccctttcctcggcataagattcgcggaatactcctcatcgctgcaaaagcctgttgccagtcctggaaaggcttcatcacagcggaaaactgagggcgatctccagggcgaccatcagaaggaggttgctctggatatcaccagctccgaggaaaaacccgacgttagctttgacaaagcaattcgcgatgaggctatttatcatttccgccttctgaaagatgagatcgtggatcattggcgcggccctgaaggtcaccctctgcatgaggttttgttggagcaggctaaggtcgtttggcagttccgtgggaaggaagatctggataagtggacagtcacctccgataagacaataggaggtcgctctgaagtctttcttaaaatgggtaaaaacaaccagtctgcgctgctgtatggaaccttgtcctctgaggcccctcaagacggagagagcacccgcagcggctactgcgccatgatctcgaggatcccaagaggggcctttgagagaaaaatgtcttacgactggagtcaatttaatacgttgtactag

SEQ ID NO: 314795 - DNA, 576 bp, Artificial Sequence
  derived and/or modified sequence
atggccctggttcacaagctgctgcgaggcacgtatttcctccggaaattctccaaacctacgagcgccctttacccgttcttgggcatcaggtttgccgaatacagctcatccttacagaaacctgtggcatcaccaggaaaagcatcctcacaaagaaagacggagggagacttgcagggagaccatcaaaaagaagtcgcactggacattacctcctcagaggaaaagccggacgtttcctttgataaggccattagggatgaagccatttaccatttcaggctgctcaaagatgagatagtggaccactggcgtgggcctgagggtcatcctttgcacgaggtgctcctggagcaagcaaaagtcgtctggcagttccgaggaaaggaggatctcgataaatggacggtaacgagcgacaagacaattggtggaagatctgaagtgtttctaaagatggggaagaataatcagagtgccctattatacgggacactgtcgagtgaagccccacaggatggagagagtacccggagcggatactgtgcgatgatttctcgtatccctagatag

SEQ ID NO: 314796 - DNA, 630 bp, Artificial Sequence
  derived and/or modified sequence
atggcgctggttcacaaattgttacgtggtacgtacttccttcggaaattttccaagcccacttcagcactgtatccgtttctgggcatacgtttcgctgaatactcatccagtctgcagaagcccgtagccagccctgggaaggcatccagtcaacgaaagaccgaaggtgatcttcagggcgaccaccagaaagaagttgccctagatattaccagctcagaggaaaaacctgatgttagctttgacaaagcgattcgcgatgaggcaatataccattttcggctgctgaaagacgagattgtggatcactggagggggcctgagggtcatcctcttcatgaggttctgttagaacaagccaaagtcgtttggcaatttaggggcaaggaggatttggataagtggacagtcactagtgacaagaccatcggtggaaggtctgaagtttttctcaaaatgggaaaaaacaaccagagtgccctgctatacggcacgctcagtagtgaggcccctcaggacggggagtcaactaggtcggggtactgcgctatgatatctcgaatcccccgaggtgcctttgagagaaagatgtcttatgattggtcccaattcaacaccctttattag

SEQ ID NO: 314797 - DNA, 576 bp, Artificial Sequence
  derived and/or modified sequence
atggccctggtgcacaagctgctgagaggcacctacttcctgagaaagttcagcaagcccaccagcgccctgtaccccttcctgggcatcagattcgccgagtacagcagcagcctgcagaagcccgtggccagccccggcaaggccagcagccagagaaagaccgagggcgacctgcagggcgaccaccagaaggaggtggccctggacatcaccagcagcgaggagaagcccgacgtgagcttcgacaaggccatcagagacgaggccatctaccacttcagactgctgaaggacgagatcgtggaccactggagaggccccgagggccaccccctgcacgaggtgctgctggagcaggccaaggtggtgtggcagttcagaggcaaggaggacctggacaagtggaccgtgaccagcgacaagaccatcggcggcagaagcgaggtgttcctgaagatgggcaagaacaaccagagcgccctgctgtacggcaccctgagcagcgaggccccccaggacggcgagagcaccagaagcggctactgcgccatgatcagcagaatccccagatag

SEQ ID NO: 314798 - DNA, 630 bp, Artificial Sequence
  derived and/or modified sequence
atggccctggtgcacaagctgctgagaggcacctacttcctgagaaagttcagcaagcccaccagcgccctgtaccccttcctgggcatcagattcgccgagtacagcagcagcctgcagaagcccgtggccagccccggcaaggccagcagccagagaaagaccgagggcgacctgcagggcgaccaccagaaggaggtggccctggacatcaccagcagcgaggagaagcccgacgtgagcttcgacaaggccatcagagacgaggccatctaccacttcagactgctgaaggacgagatcgtggaccactggagaggccccgagggccaccccctgcacgaggtgctgctggagcaggccaaggtggtgtggcagttcagaggcaaggaggacctggacaagtggaccgtgaccagcgacaagaccatcggcggcagaagcgaggtgttcctgaagatgggcaagaacaaccagagcgccctgctgtacggcaccctgagcagcgaggccccccaggacggcgagagcaccagaagcggctactgcgccatgatcagcagaatccccagaggcgccttcgagagaaagatgagctacgactggagccagttcaacaccctgtactag

SEQ ID NO: 314799 - protein, 479 aa, Artificial Sequence
  derived and/or modified sequence
MAWNTNLRWRLPLTCLLLQVIMVILFGVFVRYDFEADAHWWSERTHKNLSDMENEFYYRYPSFQDVHVMVFVGFGFLMTFLQRYGFSAVGFNFLLAAFGIQWALLMQGWFHFLQDRYIVVGVENLINADFCVASVCVAFGAVLGKVSPIQLLIMTFFQVTLFAVNEFILLNLLKVKDAGGSMTIHTFGAYFGLTVTRILYRRNLEQSKERQNSVYQSDLFAMIGTLFLWMYWPSFNSAISYHGDSQHRAAINTYCSLAACVLTSVAISSALHKKGKLDMVHIQNATLAGGVAVGTAAEMMLMPYGALIIGFVCGIISTLGFVYLTPFLESRLHIQDTCGINNLHGIPGIIGGIVGAVTAASASLEVYGKEGLVHSFDFQGFNGDWTARTQGKFQIYGLLVTLAMALMGGIIVGLILRLPFWGQPSDENCFEDAVYWEMPEGNSTVYIPEDPTFKPSGPSVPSVPMVSPLPMASSVPLVP

SEQ ID NO: 314800 - protein, 470 aa, Artificial Sequence
  derived and/or modified sequence
MAWNTCLLLQVIMVILFGVFVRYDFEADAHWWSERTHKNLSDMENEFYYRYPSFQDVHVMVFVGFGFLMTFLQRYGFSAVGFNFLLAAFGIQWALLMQGWFHFLQDRYIVVGVENLINADFCVASVCVAFGAVLGKVSPIQLLIMTFFQVTLFAVNEFILLNLLKVKDAGGSMTIHTFGAYFGLTVTRILYRRNLEQSKERQNSVYQSDLFAMIGTLFLWMYWPSFNSAISYHGDSQHRAAINTYCSLAACVLTSVAISSALHKKGKLDMVHIQNATLAGGVAVGTAAEMMLMPYGALIIGFVCGIISTLGFVYLTPFLESRLHIQDTCGINNLHGIPGIIGGIVGAVTAASASLEVYGKEGLVHSFDFQGFNGDWTARTQGKFQIYGLLVTLAMALMGGIIVGLILRLPFWGQPSDENCFEDAVYWEMPEGNSTVYIPEDPTFKPSGPSVPSVPMVSPLPMASSVPLVP

SEQ ID NO: 314801 - protein, 445 aa, Artificial Sequence
  derived and/or modified sequence
MAWNTNLRWRLPLTCLLLQVIMVILFGVFVRYDFEADAHWWSERTHKNLSDMENEFYYRYPSFQDVHVMVFVGFGFLMTFLQRYGFSAVGFNFLLAAFGIQWALLMQGWFHFLQDRYIVVGVENLINADFCVASVCVAFGAVLGKVSPIQLLIMTFFQVTLFAVNEFILLNLLKVKDAGGSMTIHTFGAYFGLTVTRILYRRNLEQSKERQNSVYQSDLFAMIGTLFLWMYWPSFNSAISYHGDSQHRAAINTYCSLAACVLTSVAISSALHKKGKLDMVHIQNATLAGGVAVGTAAEMMLMPYGALIIGFVCGIISTLGFVYLTPFLESRLHIQDTCGINNLHGIPGIIGGIVGAVTAASASLEVYGKEGLVHSFDFQGFNGDWTARTQGKFQIYGLLVTLAMALMGGIIVGLILRLPFWGQPSDENCFEDAVYWEDLELAPNQ

SEQ ID NO: 314802 - protein, 237 aa, Artificial Sequence
  derived and/or modified sequence
  misc_feature (1)..(1): Xaa can be any naturally occurring amino acid
XDSQHRAAINTYCSLAACVLTSVAISSALHKKGKLDMVHIQNATLAGGVAVGTAAEMMLMPYGALIIGFVCGIISTLGFVYLTPFLESRLHIQDTCGINNLHGIPGIIGGIVGAVTAASASLEVYGKEGLVHSFDFQGFNGDWTARTQGKFQIYGLLVTLAMALMGGIIVGLILRLPFWGQPSDENCFEDAVYWEMPEGNSTVYIPEDPTFKPSGPSVPSVPMVSPLPMASSVPLVP

SEQ ID NO: 314803 - DNA, 1440 bp, Artificial Sequence
  derived and/or modified sequence
atggcctggaacaccaacctgcggtggagactgccactgacctgtctcctgctacaggtaataatggtcatcttatttggcgtcttcgtccgttacgacttcgaagcagatgcacactggtggtctgagcggacacataagaatcttagcgacatggagaacgaattttactaccggtatccaagctttcaagatgtgcacgtcatggtttttgtcggattcggcttccttatgacatttttgcaacgttacggcttcagtgcagtggggttcaattttctgctcgccgcctttggtatccagtgggccctgctcatgcagggctggtttcatttcctccaggatcgctacatcgttgtgggagtcgaaaacttgataaacgccgacttctgtgttgccagcgtttgtgttgcattcggcgccgtcttagggaaggtgagccctattcaactcctcatcatgacgttcttccaagtcaccctctttgccgtgaatgagtttattctgctaaacctcttgaaagtgaaggacgcaggaggctcgatgacgatccacaccttcggggcttactttgggcttactgtcacccggattctgtataggcgcaacctggagcagagcaaagaacggcagaacagcgtttaccagagtgacctgttcgctatgataggcacactgttcctttggatgtactggccctcatttaacagtgcaatcagttaccacggggacagtcagcaccgtgcggctataaatacatattgcagcctcgcggcatgtgtgcttacttccgtggccatatcctccgcactacacaaaaaaggcaaattagatatggtgcacattcaaaacgctactctggccgggggtgtagccgtgggtacagccgcggaaatgatgttaatgccatacggcgccctgattataggattcgtttgcggtatcatcagcaccctcggttttgtttacctgaccccttttttggagagcagactccatatccaggatacctgtgggatcaacaatctgcacggtatccccgggatcattggaggcatcgtaggcgctgtcacagctgcctctgcatcccttgaagtctatggcaaagaagggctcgtgcactcgttcgatttccaaggcttcaacggagattggacagcgcgcacgcagggcaagtttcaaatttacggactgttggttacattggccatggctttgatgggaggcattattgttggcctcatcttgcggttgccgttttggggacagcccagcgacgagaactgcttcgaagatgcggtctactgggaaatgcccgagggcaactccaccgtgtacatcccagaagatccaactttcaagccctcaggtccgtccgtaccatctgtgcctatggtgagtcctttgcccatggcctcgagtgtcccgctggttccatag

SEQ ID NO: 314804 - DNA, 1413 bp, Artificial Sequence
  derived and/or modified sequence
atggcttggaacacgtgcctgctgctgcaggttatcatggtgatcctgtttggcgtattcgttcgttatgattttgaagcagacgcccactggtggtctgagcgaacccacaaaaacctgagtgacatggagaatgaattttattataggtacccttcttttcaagacgtccatgtgatggtctttgtgggatttggatttttaatgactttcttacaaaggtacggcttctctgctgtgggatttaatttcctgctcgcggcgttcgggattcagtgggcacttctgatgcaaggctggttccacttcctccaggaccgttatatagtggtcggcgtagagaacttaatcaacgctgatttttgtgtagcctccgtgtgcgtggcgttcggcgccgtcttaggcaaagtcagtcctatccagctactcatcatgaccttcttccaggtcacactcttcgctgtcaacgaatttatccttctcaatctattgaaagtcaaggacgcaggcggaagcatgactattcacaccttcggggcctactttggcctgaccgtgacacgcatactgtatagacgaaatctggagcagagtaaagagagacagaatagtgtctaccagtcagatctctttgcgatgatcggcaccctgtttttgtggatgtactggccatcttttaatagcgccatcagctaccacggagactcacagcatcgggctgcaataaatacctattgctccttagctgcgtgtgtgctgacatccgtcgccatttcttcagctctacacaagaagggcaaactcgatatggtccacatccaaaatgctaccctagcaggtggggtggctgtgggaacagccgcagagatgatgttgatgccatacggcgctctaataattgggtttgtgtgcggcataatctcaaccctgggtttcgtgtacctaactccctttctggagagtcgtctgcatatccaagatacgtgtggaataaacaatctgcacggcattccaggaatcatcgggggcattgtgggcgctgtgacggctgcctctgccagcctggaagtgtacgggaaagaaggtctggttcactcgtttgacttccagggattcaatggcgattggaccgcacgcacgcagggcaaattccagatttacggtcttttggtcaccctggcaatggctcttatgggtggaattatcgttgggctgattcttcggctgccgttctggggacagccatcggacgaaaactgtttcgaggacgctgtgtactgggagatgcccgagggcaattccacagtgtacataccagaggacccaacctttaagccatccggccctagcgttccctctgttcctatggtttcccctcttccaatggcctcatccgttccactcgtgccctag

SEQ ID NO: 314805 - DNA, 1338 bp, Artificial Sequence
  derived and/or modified sequence
atggcctggaataccaacttaagatggagactgcccctgacatgcctgctccttcaggttattatggtcatcctgtttggcgtttttgtgaggtacgatttcgaggcggatgcacactggtggtccgagagaactcacaaaaacttgagcgacatggaaaacgagttctattatcggtacccgtctttccaggacgtacatgtgatggttttcgtgggtttcggatttcttatgacgttcctacagagatatggattttctgccgtaggctttaactttctgctggccgcctttgggatccagtgggcccttttaatgcagggttggtttcactttcttcaggaccgttacattgtggtgggtgtagagaacttaatcaacgcagacttctgcgtggcaagcgtctgtgtggcgtttggtgcagtgctcggtaaggtgagtccaattcaactgctgatcatgactttcttccaagtcacgctttttgctgtgaatgaatttatcctgctgaatttgcttaaagttaaggatgcaggtgggagcatgactatacacaccttcggcgcctactttggactcaccgtgacccgaatcctctacagacggaacctcgaacagtcaaaggagaggcagaatagcgtgtaccaaagtgacctctttgccatgatcggaacactgttcctatggatgtactggcccagctttaacagtgcaatctcgtaccacggcgactctcagcacagagccgcgataaacacatactgttcactcgcagcctgtgtgctgacctctgtcgcaatctcttccgctctccataagaaggggaaactcgacatggttcacatacagaacgcgacgcttgctgggggggtcgccgttgggacagctgctgagatgatgcttatgccctacggggcattgatcatcggttttgtgtgcggaataatctctaccctggggttcgtctacctcacaccctttctcgaaagtaggctccacatccaagacacttgtgggatcaataacttgcacggtattccagggataatcggcggcatcgtgggtgcagtcaccgcggccagtgctagccttgaagtctatgggaaggagggcttggtccacagtttcgacttccagggctttaatggcgattggacggcccgcactcaggggaagttccagatctacggactgctggtgacgctagcgatggctttgatgggaggcatcattgtgggattgatcctgagattgcctttctggggacagccctccgatgagaattgtttcgaggatgcggtatattgggaagacctggagctggcaccaaatcagtag

SEQ ID NO: 314806 - DNA, 714 bp, Artificial Sequence
  derived and/or modified sequence
tgagacagtcaacaccgcgcagccattaacacatactgctcgctggccgcgtgcgtcctcacatcagtcgcgatcagctcagctctgcacaaaaagggcaaacttgatatggtccacatccagaacgccacccttgccgggggggtcgctgtcggcaccgccgccgagatgatgctgatgccatatggagcactgataatcggctttgtttgcggaattatctccactcttggatttgtctatctgactccatttctcgaatccagactacacatccaggacacatgtgggattaacaacttgcacgggatccccggcattatcggaggaatcgtgggtgccgtcacagcggcaagcgcaagcctggaagtttacgggaaagagggactggtgcattccttcgattttcaggggtttaacggggactggactgcccggacgcagggcaaatttcaaatctatggcctgcttgttacactggccatggccctgatgggcgggattattgtgggcctgatacttcgcctaccattctggggccaaccctccgatgaaaactgttttgaagacgccgtatactgggagatgccggaggggaactcaaccgtctacatccccgaggatccaacttttaagccctctgggccaagcgtgccctcagtcccaatggtcagtcccttacccatggccagctcagtgcctttggttccttag

SEQ ID NO: 314807 - DNA, 1440 bp, Artificial Sequence
  derived and/or modified sequence
atggcctggaacaccaacctgcgctggaggctgcccctgacctgcctgctgctgcaggtgatcatggtgatcctgtttggagtgtttgtgcgctatgactttgaagcagatgcccactggtggagcgagaggacccacaagaacctgagtgacatggagaatgagttctactaccgctaccccagcttccaggatgtgcacgtgatggtgtttgtgggcttcggcttcctgatgaccttcctgcagagatatggcttctctgctgtgggcttcaacttcctgctggccgccttcggcatccagtgggccctgctgatgcagggctggttccacttcctgcaggaccgctacatcgtggtgggcgtggagaacctgatcaatgctgacttctgtgtggcctctgtgtgtgtggcctttggagctgtgctgggcaaggtgagccccatccagctgctgatcatgaccttcttccaggtgaccctgtttgctgtgaatgagttcatcctgctgaacctgctgaaggtgaaggatgctgggggctccatgaccatccacacctttggagcctacttcggcctgactgtgacccgcatcctgtacagaagaaacctggagcagagcaaggagcggcagaacagcgtgtaccagagcgacctgtttgccatgattggcaccctcttcctgtggatgtactggcccagcttcaacagcgccatctcctaccacggggacagccagcacagagctgccatcaacacctactgcagcctggccgcctgtgtgctgacctctgtggccatcagcagcgccctgcacaagaagggcaagctggacatggtgcacatccagaatgccaccctggccggcggcgtggccgtgggcacagctgctgagatgatgctgatgccctacggggccctgatcattggatttgtgtgtggcatcatcagcaccctgggctttgtgtacctgacccccttcctggagagccggctgcacatccaggacacctgtggcatcaacaacctgcacggcatccctggcatcatcggcggcatcgtgggcgctgtgacagctgccagcgccagcctggaggtgtatggcaaggagggcctggtgcacagctttgacttccagggcttcaacggggactggacagcccggacccagggcaagttccagatctacggcctgctggtgaccctggccatggccctgatgggcggcatcatcgtgggcctcatcctgcggctgcccttctggggccagcccagtgatgagaactgctttgaagatgctgtgtactgggagatgcctgagggcaacagcacagtgtacatccctgaggaccccaccttcaagcccagcggccccagcgtgcccagcgtgcccatggtgagccccctgcccatggccagctctgtgcccctggtgccctag

SEQ ID NO: 314808 - DNA, 1413 bp, Artificial Sequence
  derived and/or modified sequence
atggcctggaacacctgcctgctgctgcaggtgatcatggtgatcctgtttggagtgtttgtgcgctatgactttgaagcagatgcccactggtggagcgagaggacccacaagaacctgagtgacatggagaatgagttctactaccgctaccccagcttccaggatgtgcacgtgatggtgtttgtgggcttcggcttcctgatgaccttcctgcagagatatggcttctctgctgtgggcttcaacttcctgctggccgccttcggcatccagtgggccctgctgatgcagggctggttccacttcctgcaggaccgctacatcgtggtgggcgtggagaacctgatcaatgctgacttctgtgtggcctctgtgtgtgtggccttcggggctgtgctgggcaaggtgagccccatccagctgctgatcatgaccttcttccaggtgaccctgtttgctgtgaatgagttcatcctgctgaacctgctgaaggtgaaggatgctgggggctccatgaccatccacaccttcggggcctacttcggcctgactgtgacccgcatcctgtacagaagaaacctggagcagagcaaggagcggcagaacagcgtgtaccagagcgacctgtttgccatgattggcaccctcttcctgtggatgtactggcccagcttcaacagcgccatctcctaccatggagacagccagcaccgggccgccatcaacacctactgcagcctggccgcctgtgtgctgacctctgtggccatcagcagcgccctgcacaagaagggcaagctggacatggtgcacatccagaatgccaccctggccggcggcgtggccgtgggcacagctgctgagatgatgctgatgccctatggagccctgatcatcggctttgtgtgtggcatcatcagcaccctgggctttgtgtacctgacccccttcctggagagccggctgcacatccaggacacctgtggcatcaacaacctgcacggcatccctggcatcattggaggcatcgtgggcgctgtgacagctgccagcgccagcctggaggtgtatggcaaggagggcctggtgcacagctttgacttccagggcttcaatggagactggacagcccggacccagggcaagttccagatctacggcctgctggtgaccctggccatggccctgatgggcggcatcatcgtgggcctcatcctgcggctgcccttctggggccagcccagtgatgagaactgctttgaagatgctgtgtactgggagatgcctgagggcaacagcacagtgtacatccctgaggaccccaccttcaagcccagcggccccagcgtgcccagcgtgcccatggtgagccccctgcccatggccagctctgtgcccctggtgccctag

SEQ ID NO: 314809 - DNA, 1338 bp, Artificial Sequence
  derived and/or modified sequence
atggcctggaacaccaacctgcgctggaggctgcccctgacctgcctgctgctgcaggtgatcatggtgatcctgtttggagtgtttgtgcgctatgactttgaagcagatgcccactggtggagcgagaggacccacaagaacctgagtgacatggagaatgagttctactaccgctaccccagcttccaggatgtgcacgtgatggtgtttgtgggcttcggcttcctgatgaccttcctgcagagatatggcttctctgctgtgggcttcaacttcctgctggccgccttcggcatccagtgggccctgctgatgcagggctggttccacttcctgcaggaccgctacatcgtggtgggcgtggagaacctgatcaatgctgacttctgtgtggcctctgtgtgtgtggcctttggagctgtgctgggcaaggtgagccccatccagctgctgatcatgaccttcttccaggtgaccctgtttgctgtgaatgagttcatcctgctgaacctgctgaaggtgaaggatgctgggggctccatgaccatccacacctttggagcctacttcggcctgactgtgacccgcatcctgtacagaagaaacctggagcagagcaaggagcggcagaacagcgtgtaccagagcgacctgtttgccatgattggcaccctcttcctgtggatgtactggcccagcttcaacagcgccatctcctaccacggggacagccagcacagagctgccatcaacacctactgcagcctggccgcctgtgtgctgacctctgtggccatcagcagcgccctgcacaagaagggcaagctggacatggtgcacatccagaatgccaccctggccggcggcgtggccgtgggcacagctgctgagatgatgctgatgccctacggggccctgatcattggatttgtgtgtggcatcatcagcaccctgggctttgtgtacctgacccccttcctggagagccggctgcacatccaggacacctgtggcatcaacaacctgcacggcatccctggcatcatcggcggcatcgtgggcgctgtgacagctgccagcgccagcctggaggtgtatggcaaggagggcctggtgcacagctttgacttccagggcttcaacggggactggacagcccggacccagggcaagttccagatctacggcctgctggtgaccctggccatggccctgatgggcggcatcatcgtgggcctcatcctgcggctgcccttctggggccagcccagtgatgagaactgctttgaagatgctgtgtactgggaggacctggagctggcccccaaccagtag

SEQ ID NO: 314810 - DNA, 714 bp, Artificial Sequence
  derived and/or modified sequence
tgagacagccagcacagagctgccatcaacacctactgcagcctggccgcctgtgtgctgacctctgtggccatcagcagcgccctgcacaagaagggcaagctggacatggtgcacatccagaatgccaccctggccggcggcgtggccgtgggcacagctgctgagatgatgctgatgccctacggggccctgatcattggatttgtgtgtggcatcatcagcaccctgggctttgtgtacctgacccccttcctggagagccggctgcacatccaggacacctgtggcatcaacaacctgcacggcatccctggcatcatcggcggcatcgtgggcgctgtgacagctgccagcgccagcctggaggtgtatggcaaggagggcctggtgcacagctttgacttccagggcttcaacggggactggacagcccggacccagggcaagttccagatctacggcctgctggtgaccctggccatggccctgatgggcggcatcatcgtgggcctcatcctgcggctgcccttctggggccagcccagtgatgagaactgctttgaagatgctgtgtactgggagatgcctgagggcaacagcacagtgtacatccctgaggaccccaccttcaagcccagcggccccagcgtgcccagcgtgcccatggtgagccccctgcccatggccagctctgtgcccctggtgccctag

SEQ ID NO: 314811 - DNA, 1440 bp, Artificial Sequence
  derived and/or modified sequence
atggcctggaacaccaacctgcggtggcggctgcccctgacctgccttctgctccaagtcatcatggtgatcctcttcggcgtcttcgtgcggtatgattttgaagcggatgcacactggtggagtgagcggactcacaagaacctgtctgacatggaaaacgagttctattataggtatccatctttccaggacgtgcatgtcatggtgtttgtcggcttcggcttcctgatgaccttcctgcagcgttatgggttctcggctgtgggctttaacttcttgctcgccgcctttggtatccaatgggcccttctgatgcaaggctggttccacttcctgcaggaccgatacattgtggttggggtcgagaatctcatcaatgccgatttctgtgtggcttcggtctgtgtcgcttttggcgcagtgttggggaaggtgagcccgatccagcttctgattatgacctttttccaggtgacactgttcgcagtcaacgagttcatactgctgaacctcctcaaggttaaggatgctggggggtcaatgacaatccatacatttggcgcttactttggcctgactgtgacgcggatactgtataggcgaaatctagagcaaagtaaggaaagacagaatagcgtgtatcagagcgacttattcgccatgatcggaaccttatttctgtggatgtactggccctccttcaatagcgctattagttatcacggcgattctcaacaccgagctgctattaacacttactgctctcttgcggcgtgtgtcctgactagtgtcgccatctcctctgccctccataaaaagggaaagttagacatggtacatatccagaacgcaaccctggctggtggagtcgccgtgggaacagccgcggaaatgatgctcatgccgtatggcgcgctaatcatcggcttcgtctgcggcatcatctcgaccctaggattcgtgtacctgacacccttcttagaaagccgcctccatatccaggacacttgtgggatcaacaatcttcatggaatccctggtattatcgggggtatcgttggcgctgtcactgccgcctctgcctcccttgaggtatatggaaaagaagggctggtgcacagctttgattttcaaggatttaacggcgactggactgccaggacgcaggggaagttccagatttatgggttgctcgtcactctggctatggctttaatgggcgggatcattgtaggcctgatcctgcgactgcctttttgggggcaaccatctgacgaaaattgtttcgaggacgccgtgtattgggagatgccagaaggaaactctaccgtgtacataccggaagaccccacatttaaacccagcggacccagtgtaccttcagtgccaatggtcagccccctacccatggcaagctcagtgccactggttccctag

SEQ ID NO: 314812 - DNA, 1413 bp, Artificial Sequence
  derived and/or modified sequence
atggcctggaacacctgcctgctgctgcaggtgatcatggtgatcttgtttggtgtgtttgtgcgatatgactttgaggcggatgcccactggtggagcgagcgcacacataagaatcttagtgacatggaaaacgaattctattatcggtacccttctttccaggatgtccacgttatggtgttcgtgggattcgggtttctgatgacatttttgcaacgctatgggttcagcgctgtgggttttaatttcctcctggccgcattcggaatccagtgggctcttctgatgcagggctggttccacttcctccaggaccgatatatcgttgtgggcgtagaaaacctaattaatgctgacttctgcgttgcttccgtgtgtgtggctttcggagccgtattgggtaaagtgagccccatacagttgctcattatgacgttcttccaagtgactctgtttgctgtgaatgaatttattctgttgaacctgttgaaagtgaaggacgcaggggggtccatgacaatacatacgttcggtgcctacttcgggcttaccgtaacacgaattctctatcgtagaaaccttgaacaaagcaaagaaagacagaacagcgtgtatcagtcagacctgtttgcaatgatcgggaccctgtttctgtggatgtactggccatcattcaactccgcaatttcgtaccatggagatagccaacatcgggcagccattaacacatactgctctctcgccgcgtgcgtccttactagcgtggctatctcctcagccctgcataagaaaggcaaactggatatggtgcacatccaaaatgctacactggccgggggagtggctgtgggcacggctgccgagatgatgctgatgccatacggagccctgataatcggattcgtctgtgggatcatatctacactggggttcgtctaccttactccttttctggaaagtaggctgcacattcaggacacctgtggtataaataacttacatggaatccctgggatcatcggagggattgtgggggcggtgaccgccgcctccgccagtctggaagtgtatggtaaagaggggctggttcactccttcgatttccagggtttcaatggggattggacagcaagaacccaaggtaaatttcagatctacggtctgttagtcaccctggccatggccctcatggggggcatcatcgtgggtctaatcctgaggctgcccttttggggccaaccttccgacgaaaactgctttgaggatgctgtatactgggaaatgcccgagggaaattctacagtgtacatccccgaagaccctacctttaagccttccggaccttccgttccgtcagtcccaatggtatcccccctccctatggccagctccgtacccctggttccttag

SEQ ID NO: 314813 - DNA, 1338 bp, Artificial Sequence
  derived and/or modified sequence
atggcctggaacaccaacctgcggtggcggctgcccctgacctgcctgcttctgcaggtgatcatggttattctatttggggtgttcgttcgctacgactttgaagctgacgcccattggtggagtgagaggacacataagaatctgagcgacatggaaaacgagttttactacaggtacccatcattccaggacgtgcacgtgatggtgtttgttgggtttgggtttcttatgacgtttctccaacgatatggatttagcgccgtcgggtttaactttctgctggctgcctttggtatccagtgggccctcctcatgcaagggtggtttcatttcttgcaggataggtacattgtagtgggcgttgagaatctgattaacgctgacttctgcgtcgcttctgtctgcgtggcttttggagcagtgctgggaaaagtcagtcctatccaactgctaatcatgacattcttccaggtgaccctctttgccgtaaatgaattcatcttattaaatttactgaaggtaaaagatgcgggcggttctatgacgatccacaccttcggggcctactttggcctaacagtcaccagaatcttataccggaggaacttggagcagagcaaagagagacagaactctgtgtaccagtctgatctgttcgcgatgatcgggaccttgtttctctggatgtattggccctcgttcaattctgctatatcctaccacggtgactctcagcaccgggccgccatcaacacgtactgctctctcgctgcctgtgtcttaaccagtgtagctattagtagcgcattgcataagaaggggaagttagacatggttcatatacagaacgccactttagcaggtggagtggcagtgggcaccgccgccgaaatgatgctgatgccatacggagcactgattatcggttttgtgtgtggcatcatcagtactctcgggttcgtttacctcacaccttttctcgagagtagactgcacattcaggatacttgcgggatcaataatttgcatggaataccaggaattatcgggggaattgtcggcgccgtaactgccgcttccgctagtctcgaggtgtatggcaaagaagggcttgttcactcctttgatttccagggattcaacggagactggaccgctagaacacaggggaagtttcagatttacggccttcttgtgacactggctatggctttgatgggcgggattattgtggggctgatcctgcggctccctttctggggacagcccagcgatgagaactgtttcgaagacgcggtttattgggaggatctcgagctagcccctaaccagtag

SEQ ID NO: 314814 - DNA, 714 bp, Artificial Sequence
  derived and/or modified sequence
tgagacagccagcaccgggccgccatcaacacctactgcagcctggctgcctgtgttttaaccagtgttgccatctcatcagctctgcacaagaagggaaaattggacatggtgcatattcagaatgctacactggccggaggcgtcgctgtgggaactgctgccgagatgatgttaatgccatatggggctcttatcatcggatttgtttgcggaatcatttcgacccttggcttcgtgtaccttaccccgtttctcgagtctcgacttcacattcaggatacttgtggaatcaacaacctgcacggtattccaggcatcatcggaggaattgtcggggctgttacagccgcatcagccagcctcgaggtatacggtaaggagggtttggtgcactcctttgattttcaggggttcaatggagattggactgctagaacacagggtaagttccagatctatggattactggtgacactggctatggcactgatgggaggcatcatagtgggtctgattttgagactacccttctggggccagccgagcgacgaaaactgctttgaagatgcagtatattgggagatgcctgaggggaacagcacagtctacatccctgaggatccaactttcaaaccttctggtcccagcgtgcccagcgtgcctatggtgtccccactccctatggcttcaagcgttccgctggtgccctag

SEQ ID NO: 314815 - DNA, 1440 bp, Artificial Sequence
  derived and/or modified sequence
atggcgtggaacacaaacctccgctggagactgccattgacttgcttgctgctgcaggttattatggtgatcctgtttggagtgttcgtgaggtacgactttgaggctgacgcgcactggtggtcagagcgcacccacaagaatctcagtgatatggagaatgagttctactatcgctatccaagctttcaggatgtccatgtcatggtctttgtgggatttggatttttaatgaccttccttcaaagatacggattctctgcggtggggtttaacttccttttggccgctttcgggatccaatgggccctgttgatgcagggctggtttcatttcctgcaagacagatatatcgtagtgggagtcgaaaacctcattaacgcagacttttgcgtcgcttctgtgtgcgtcgcttttggtgccgttttagggaaggtctctcctatccaattactcataatgaccttcttccaggtcacgttatttgccgtaaatgagttcattcttctgaacctgctaaaggttaaagatgcgggaggatccatgactatccataccttcggggcttattttgggctcactgtgacgagaatcctctaccggcgtaacctggaacagagcaaggaaaggcagaactctgtgtatcagtctgacctctttgcaatgatcgggaccctcttcctgtggatgtactggccctccttcaatagtgcaatctcataccacggtgactcccaacatagggccgcaatcaatacttactgctcactggcagcctgcgtgcttaccagcgtggccatatctagcgctctgcacaagaagggaaaacttgatatggttcatatccagaacgccaccctagcaggtggagtcgctgtgggaacagctgctgaaatgatgcttatgccttatggcgcacttatcattgggttcgtgtgcggtattatatcaactctggggtttgtatatctcaccccttttctggaatcccgcttgcacattcaagacacctgtgggatcaacaatttacacggaattcctggaatcattgggggtatcgtgggagcggtcacagcagcttccgcctcattggaggtctacggcaaggaaggcctagtccattctttcgacttccagggattcaacggcgattggacagcgaggacccaaggcaagtttcagatctatggcctcctggtgaccctggcaatggccctgatgggcggtatcatcgttggactgatcctgcgcctgcccttttggggccaaccctcagacgaaaactgctttgaagacgctgtgtactgggaaatgccagagggcaatagcacagtgtacatccccgaggatccgaccttcaagccatccggtccctcagtaccttccgtgccaatggtgagcccccttccaatggcctcaagtgttccgctcgttccctag

SEQ ID NO: 314816 - DNA, 1413 bp, Artificial Sequence
  derived and/or modified sequence
atggcatggaatacatgccttcttctccaggtcatcatggttatcttgttcggggtcttcgtcagatatgactttgaggcagatgcccactggtggagcgagagaactcacaagaacctttccgacatggagaacgagttctactataggtatcctagcttccaggacgtgcacgtgatggtttttgttggcttcggctttctgatgacattccttcagcggtacggattttccgcagtaggcttcaatttcttgctggcagcttttggaattcaatgggcactgttaatgcagggatggttccacttcctgcaggaccggtacatagtcgtcggagtggagaacctgattaatgccgacttttgtgtggcctcagtgtgtgtcgcttttggagccgttctggggaaagtctccccaatacaactgcttattatgacctttttccaagtgactctctttgctgtgaacgagttcattctgctgaatctcctgaaagttaaggacgcgggaggaagcatgacaatccacacgttcggcgcatacttcggcctgactgttacaaggattctatatcgaagaaatttggaacagtcaaaggaacgccagaactctgtctaccagtccgacctgtttgcaatgattggcaccctatttctctggatgtactggccaagcttcaattctgcaatatcataccacggcgactctcaacacagagcagccattaatacctactgctcactggccgcatgtgtcctcacctcagtagctattagctccgccctgcataaaaaggggaaactggacatggttcacatccagaacgcaactctggccggaggtgtcgcagtagggactgccgctgagatgatgctaatgccctacggcgctctgatcattgggttcgtatgcggcatcatatctacactgggttttgtctacctgactccgtttcttgaatcccgactgcatatacaggacacctgcggcatcaacaaccttcacggcattccaggaatcatcggagggattgtcggagctgtcactgctgcttcggccagcctcgaagtgtacggaaaagagggcctggtgcactcttttgatttccaaggttttaatggcgactggaccgccaggacccaaggcaagttccagatttacggactactcgtgaccctcgcaatggcccttatggggggtataatagtgggtctgatacttcgcctgcccttttgggggcagcctagtgatgagaactgttttgaggatgcagtgtattgggagatgcctgaaggcaactctaccgtgtatatcccggaagatcctactttcaagccttctggacccagtgtgccatctgtgccgatggtgagcccattaccgatggcatcttcggtgcccttggtcccctag

SEQ ID NO: 314817 - DNA, 1338 bp, Artificial Sequence
  derived and/or modified sequence
atggcttggaacaccaatctgcgctggagactgcctcttacatgcctcctgctccaagtgatcatggtaatactgtttggggtcttcgtccgctatgacttcgaagcagacgcacattggtggtcagagcgtacacataagaatctgagcgatatggagaatgaattctactaccgctacccaagttttcaggacgtccatgtcatggtctttgtcggatttggcttcctcatgaccttcctgcagcgatatggtttcagtgccgtgggttttaattttctcctagctgcgtttggcatccagtgggcgcttctgatgcagggctggtttcacttcctccaagataggtatatagttgtgggcgttgagaacctcatcaacgctgatttctgcgtggcgtccgtttgcgtggcattcggtgcagtgctggggaaggtctcaccgatccagttattgattatgacttttttccaagtgactttgtttgccgtcaatgagttcatccttttgaacctactgaaggtgaaggacgccggtgggtccatgaccatccacacctttggcgcttactttgggcttactgtgacccgcatcctctaccgtcgcaacttggaacagagcaaggaacggcagaattctgtttaccagtcagacctttttgctatgatcgggaccctgttcctttggatgtattggccgagttttaatagcgcgattagctaccatggagattctcaacacagggccgcaattaatacatactgttcactggcagcctgtgtattgacatctgttgctattagtagcgccctgcacaaaaaggggaaactcgatatggtgcatatacagaacgctacactcgccggtggcgtagcggtcggtactgccgcagaaatgatgctgatgccatacggggcactgattattggatttgtctgcggcattatctcaaccctgggcttcgtctacctgactccatttctcgagagtcgactacatatccaggacacttgtgggatcaacaacctgcatggcatcccaggaatcatcggcggtattgtaggggctgttacagccgcttccgcttccctcgaagtgtacgggaaggagggacttgtgcatagctttgacttccaagggtttaacggggattggactgcaaggactcagggcaagttccagatctacggactcctggtgacactcgctatggctctcatggggggtattatcgtggggctaattttacgtctgcctttttgggggcaaccctctgatgagaactgcttcgaggatgcggtttattgggaggacctcgagctggccccaaatcaatag

SEQ ID NO: 314818 - DNA, 714 bp, Artificial Sequence
  derived and/or modified sequence
tgagactctcaacatcgtgcggcaataaatacctactgtagcttagcggcttgtgtgcttacatccgtagctatcagttccgccctccacaagaagggcaagctcgatatggtgcacatccagaatgcaaccctggcagggggagtggccgtcggaactgccgcagagatgatgcttatgccatacggtgccctgattatcggcttcgtttgcggcatcatctctaccctaggatttgtgtatctgactccgtttctagaaagccgtctccatatccaagacacatgcgggatcaacaacttacatgggatcccaggaataatcgggggaattgtcggggcagtcaccgctgcttctgccagtcttgaagtttacggcaaagaagggctggtacattcctttgattttcagggttttaatggagactggactgccagaactcagggcaaattccaaatctatggtctgctggtgacgttagcaatggccttgatgggtggcattatagtgggccttatcttgagattacccttttggggccagccgtcagatgagaattgcttcgaggacgcagtgtattgggagatgcccgaagggaatagtaccgtgtacatacccgaggaccccaccttcaaaccctctgggccatctgtcccctccgttcctatggttagtcccctgcctatggcgagttctgttcctctggtcccttag

SEQ ID NO: 314819 - DNA, 1982 bp, Artificial Sequence
  derived and/or modified sequence
ctcaaaagccccgccggcctccgagcgtccgaaccgcccgctgccagcccggccaggcacccctgcagcatggcctggaacaccaacctccgctggcggctgccgctcacctgcctgctcctgcaggtgattatggtgattctcttcggggtgttcgtgcgctacgacttcgaggccgacgcccactggtggtcagagaggacgcacaagaacttgagcgacatggagaacgaattctactatcgctacccaagcttccaggacgtgcacgtgatggtcttcgtgggcttcggcttcctcatgactttcctgcagcgctacggcttcagcgccgtgggcttcaacttcctgttggcagccttcggcatccagtgggcgctgctcatgcagggctggttccacttcttacaagaccgctacatcgtcgtgggcgtggagaacctcatcaacgctgacttctgcgtggcctctgtctgcgtggcctttggggcagttctgggtaaagtcagccccattcagctgctcatcatgactttcttccaagtgaccctcttcgctgtgaatgagttcattctccttaacctgctaaaggtgaaggatgcaggaggctccatgaccatccacacatttggcgcctactttgggctcacagtgacccggatcctctaccgacgcaacctagagcagagcaaggagagacagaattctgtgtaccagtcggacctctttgccatgattggcaccctcttcctgtggatgtactggcccagcttcaactcagccatatcctaccatggggacagccagcaccgagccgccatcaacacctactgctccttggcagcctgcgtgcttacctcggtggcaatatccagtgccctgcacaagaagggcaagctggacatggtgcacatccagaatgccacgctcgcaggaggggtggccgtgggtaccgctgctgagatgatgctcatgccttacggtgccctcatcatcggcttcgtctgcggcatcatctccaccctgggttttgtatacctgaccccattcctggagtcccggctgcacatccaggacacatgtggcattaacaatctgcatggcattcctggcatcataggcggcatcgtgggtgctgtgacagcggcctccgccagccttgaagtctatggaaaagaagggcttgtccattcctttgactttcaaggtttcaacggggactggaccgcaagaacacagggaaagttccagatttatggtctcttggtgaccctggccatggccctgatgggtggcatcattgtggggctcattttgagattaccattctggggacaaccttcagatgagaactgctttgaggatgcggtctactgggagatgcctgaagggaacagcactgtctacatccctgaggaccccaccttcaagccctcaggaccctcagtaccctcagtacccatggtgtccccactacccatggcttcctcggtacccttggtaccctaggctcccagggcaggtgaggagcaggctccacagactgtcctggggcccagaggagctggtgctgacctagctagggatgcaagagtgagcaagcagcacccccacctgctggcttggcctcaaggtgcctccacccctgccctccccttcatcccagggggtctgactgagaatggagaaggagaagctacaaagtgggcatccaagccgggttctggctgcagaagttctgcctctgcctggggtcttggccacattggagaaaaacaggctcaaagtggggctgggacctggtgggtgaacctgagctctcccaggagacaacttagctgccagtcaccacctatgaggctcttctaccccgtgcctgcacctcggccagcatctcctatgctccctgggtcccccagacctctctgtgttgtgtgcgtggcagcctccaggaataaacattcttgttgtcctttgtaaaa

SEQ ID NO: 314820 - DNA, 1882 bp, Artificial Sequence
  derived and/or modified sequence
atggcctggaacacctgcctgctcctgcaggtgattatggtgattctcttcggggtgttcgtgcgctacgacttcgaggccgacgcccactggtggtcagagaggacgcacaagaacttgagcgacatggagaacgaattctactatcgctacccaagcttccaggacgtgcacgtgatggtcttcgtgggcttcggcttcctcatgactttcctgcagcgctacggcttcagcgccgtgggcttcaacttcctgttggcagccttcggcatccagtgggcgctgctcatgcagggctggttccacttcttacaagaccgctacatcgtcgtgggcgtggagaacctcatcaacgctgacttctgcgtggcctctgtctgcgtggcctttggggcagttctgggtaaagtcagccccattcagctgctcatcatgactttcttccaagtgaccctcttcgctgtgaatgagttcattctccttaacctgctaaaggtgaaggatgcaggaggctccatgaccatccacacatttggcgcctactttgggctcacagtgacccggatcctctaccgacgcaacctagagcagagcaaggagagacagaattctgtgtaccagtcggacctctttgccatgattggcaccctcttcctgtggatgtactggcccagcttcaactcagccatatcctaccatggggacagccagcaccgagccgccatcaacacctactgctccttggcagcctgcgtgcttacctcggtggcaatatccagtgccctgcacaagaagggcaagctggacatggtgcacatccagaatgccacgctcgcaggaggggtggccgtgggtaccgctgctgagatgatgctcatgccttacggtgccctcatcatcggcttcgtctgcggcatcatctccaccctgggttttgtatacctgaccccattcctggagtcccggctgcacatccaggacacatgtggcattaacaatctgcatggcattcctggcatcataggcggcatcgtgggtgctgtgacagcggcctccgccagccttgaagtctatggaaaagaagggcttgtccattcctttgactttcaaggtttcaacggggactggaccgcaagaacacagggaaagttccagatttatggtctcttggtgaccctggccatggccctgatgggtggcatcattgtggggctcattttgagattaccattctggggacaaccttcagatgagaactgctttgaggatgcggtctactgggagatgcctgaagggaacagcactgtctacatccctgaggaccccaccttcaagccctcaggaccctcagtaccctcagtacccatggtgtccccactacccatggcttcctcggtacccttggtaccctaggctcccagggcaggtgaggagcaggctccacagactgtcctggggcccagaggagctggtgctgacctagctagggatgcaagagtgagcaagcagcacccccacctgctggcttggcctcaaggtgcctccacccctgccctccccttcatcccagggggtctgactgagaatggagaaggagaagctacaaagtgggcatccaagccgggttctggctgcagaagttctgcctctgcctggggtcttggccacattggagaaaaacaggctcaaagtggggctgggacctggtgggtgaacctgagctctcccaggagacaacttagctgccagtcaccacctatgaggctcttctaccccgtgcctgcacctcggccagcatctcctatgctccctgggtcccccagacctctctgtgttgtgtgcgtggcagcctccaggaataaacattcttgttgtcctttgt

SEQ ID NO: 314821 - DNA, 1748 bp, Artificial Sequence
  derived and/or modified sequence
gaaccgcccgctgccagcccggccaggcacccctgcagcatggcctggaacaccaacctccgctggcggctgccgctcacctgcctgctcctgcaggtgattatggtgattctcttcggggtgttcgtgcgctacgacttcgaggccgacgcccactggtggtcagagaggacgcacaagaacttgagcgacatggagaacgaattctactatcgctacccaagcttccaggacgtgcacgtgatggtcttcgtgggcttcggcttcctcatgactttcctgcagcgctacggcttcagcgccgtgggcttcaacttcctgttggcagccttcggcatccagtgggcgctgctcatgcagggctggttccacttcttacaagaccgctacatcgtcgtgggcgtggagaacctcatcaacgctgacttctgcgtggcctctgtctgcgtggcctttggggcagttctgggtaaagtcagccccattcagctgctcatcatgactttcttccaagtgaccctcttcgctgtgaatgagttcattctccttaacctgctaaaggtgaaggatgcaggaggctccatgaccatccacacatttggcgcctactttgggctcacagtgacccggatcctctaccgacgcaacctagagcagagcaaggagagacagaattctgtgtaccagtcggacctctttgccatgattggcaccctcttcctgtggatgtactggcccagcttcaactcagccatatcctaccatggggacagccagcaccgagccgccatcaacacctactgctccttggcagcctgcgtgcttacctcggtggcaatatccagtgccctgcacaagaagggcaagctggacatggtgcacatccagaatgccacgctcgcaggaggggtggccgtgggtaccgctgctgagatgatgctcatgccttacggtgccctcatcatcggcttcgtctgcggcatcatctccaccctgggttttgtatacctgaccccattcctggagtcccggctgcacatccaggacacatgtggcattaacaatctgcatggcattcctggcatcataggcggcatcgtgggtgctgtgacagcggcctccgccagccttgaagtctatggaaaagaagggcttgtccattcctttgactttcaaggtttcaacggggactggaccgcaagaacacagggaaagttccagatttatggtctcttggtgaccctggccatggccctgatgggtggcatcattgtggggctcattttgagattaccattctggggacaaccttcagatgagaactgctttgaggatgcggtctactgggaggacctggaacttgctcctaatcaatagaatacagcaaaggcatgggatgcaggtgattctgtgtacatggttacgtaactaaatagataagattgtagcacctgtcttgctggagtgtttcacactcttgctggctttgatgaagcaggtggccatttgaggcccaactgagagtggcctgtaaaactgagggcagctgacagccagcaagaaaatgagccttcagtcctgtaaatgcaaggaactgaattgtgccaagagctgcatgagcttggaagcagatccttcctcagtcaagcttccagatgaggacccagtcctgacccatactttgattgcaggcttgcagagggcccagctcagccattccaagattcttgacccacagaagctgagag

SEQ ID NO: 314822 - DNA, 1014 bp, Artificial Sequence
  derived and/or modified sequence
ggacagccagcaccgagccgccatcaacacctactgctccttggcagcctgcgtgcttacctcggtggcaatatccagtgccctgcacaagaagggcaagctggacatggtgcacatccagaatgccacgctcgcaggaggggtggccgtgggtaccgctgctgagatgatgctcatgccttacggtgccctcatcatcggcttcgtctgcggcatcatctccaccctgggttttgtatacctgaccccattcctggagtcccggctgcacatccaggacacatgtggcattaacaatctgcatggcattcctggcatcataggcggcatcgtgggtgctgtgacagcggcctccgccagccttgaagtctatggaaaagaagggcttgtccattcctttgactttcaaggtttcaacggggactggaccgcaagaacacagggaaagttccagatttatggtctcttggtgaccctggccatggccctgatgggtggcatcattgtggggctcattttgagattaccattctggggacaaccttcagatgagaactgctttgaggatgcggtctactgggagatgcctgaagggaacagcactgtctacatccctgaggaccccaccttcaagccctcaggaccctcagtaccctcagtacccatggtgtccccactacccatggcttcctcggtacccttggtaccctaggctcccagggcaggtgaggagcagggggtctgactgagaatggagaaggagaagctacaaagtgggcatccaagccgggttctggctgcagaagttctgcctctgcctggggtcttggccacattggagaaaaacaggctcaaagtggggctgggacctggtgggtgaacctgagctctcccaggagacaacttagctgccagtcaccacctatgaggctcttctaccccgtgcctgcacctcggccagcatctcctatgctccctgggtcccccagacctctctgtgttgtgtgcgtggca

SEQ ID NO: 314823 - DNA, 1440 bp, Artificial Sequence
  derived and/or modified sequence
atggcctggaacaccaacctgagatggagactgcccctgacctgcctgctgctgcaggtgatcatggtgatcctgttcggcgtgttcgtgagatacgacttcgaggccgacgcccactggtggagcgagagaacccacaagaacctgagcgacatggagaacgagttctactacagataccccagcttccaggacgtgcacgtgatggtgttcgtgggcttcggcttcctgatgaccttcctgcagagatacggcttcagcgccgtgggcttcaacttcctgctggccgccttcggcatccagtgggccctgctgatgcagggctggttccacttcctgcaggacagatacatcgtggtgggcgtggagaacctgatcaacgccgacttctgcgtggccagcgtgtgcgtggccttcggcgccgtgctgggcaaggtgagccccatccagctgctgatcatgaccttcttccaggtgaccctgttcgccgtgaacgagttcatcctgctgaacctgctgaaggtgaaggacgccggcggcagcatgaccatccacaccttcggcgcctacttcggcctgaccgtgaccagaatcctgtacagaagaaacctggagcagagcaaggagagacagaacagcgtgtaccagagcgacctgttcgccatgatcggcaccctgttcctgtggatgtactggcccagcttcaacagcgccatcagctaccacggcgacagccagcacagagccgccatcaacacctactgcagcctggccgcctgcgtgctgaccagcgtggccatcagcagcgccctgcacaagaagggcaagctggacatggtgcacatccagaacgccaccctggccggcggcgtggccgtgggcaccgccgccgagatgatgctgatgccctacggcgccctgatcatcggcttcgtgtgcggcatcatcagcaccctgggcttcgtgtacctgacccccttcctggagagcagactgcacatccaggacacctgcggcatcaacaacctgcacggcatccccggcatcatcggcggcatcgtgggcgccgtgaccgccgccagcgccagcctggaggtgtacggcaaggagggcctggtgcacagcttcgacttccagggcttcaacggcgactggaccgccagaacccagggcaagttccagatctacggcctgctggtgaccctggccatggccctgatgggcggcatcatcgtgggcctgatcctgagactgcccttctggggccagcccagcgacgagaactgcttcgaggacgccgtgtactgggagatgcccgagggcaacagcaccgtgtacatccccgaggaccccaccttcaagcccagcggccccagcgtgcccagcgtgcccatggtgagccccctgcccatggccagcagcgtgcccctggtgccctag

SEQ ID NO: 314824 - DNA, 1413 bp, Artificial Sequence
  derived and/or modified sequence
atggcctggaacacctgcctgctgctgcaggtgatcatggtgatcctgttcggcgtgttcgtgagatacgacttcgaggccgacgcccactggtggagcgagagaacccacaagaacctgagcgacatggagaacgagttctactacagataccccagcttccaggacgtgcacgtgatggtgttcgtgggcttcggcttcctgatgaccttcctgcagagatacggcttcagcgccgtgggcttcaacttcctgctggccgccttcggcatccagtgggccctgctgatgcagggctggttccacttcctgcaggacagatacatcgtggtgggcgtggagaacctgatcaacgccgacttctgcgtggccagcgtgtgcgtggccttcggcgccgtgctgggcaaggtgagccccatccagctgctgatcatgaccttcttccaggtgaccctgttcgccgtgaacgagttcatcctgctgaacctgctgaaggtgaaggacgccggcggcagcatgaccatccacaccttcggcgcctacttcggcctgaccgtgaccagaatcctgtacagaagaaacctggagcagagcaaggagagacagaacagcgtgtaccagagcgacctgttcgccatgatcggcaccctgttcctgtggatgtactggcccagcttcaacagcgccatcagctaccacggcgacagccagcacagagccgccatcaacacctactgcagcctggccgcctgcgtgctgaccagcgtggccatcagcagcgccctgcacaagaagggcaagctggacatggtgcacatccagaacgccaccctggccggcggcgtggccgtgggcaccgccgccgagatgatgctgatgccctacggcgccctgatcatcggcttcgtgtgcggcatcatcagcaccctgggcttcgtgtacctgacccccttcctggagagcagactgcacatccaggacacctgcggcatcaacaacctgcacggcatccccggcatcatcggcggcatcgtgggcgccgtgaccgccgccagcgccagcctggaggtgtacggcaaggagggcctggtgcacagcttcgacttccagggcttcaacggcgactggaccgccagaacccagggcaagttccagatctacggcctgctggtgaccctggccatggccctgatgggcggcatcatcgtgggcctgatcctgagactgcccttctggggccagcccagcgacgagaactgcttcgaggacgccgtgtactgggagatgcccgagggcaacagcaccgtgtacatccccgaggaccccaccttcaagcccagcggccccagcgtgcccagcgtgcccatggtgagccccctgcccatggccagcagcgtgcccctggtgccctag

SEQ ID NO: 314825 - DNA, 1338 bp, Artificial Sequence
  derived and/or modified sequence
atggcctggaacaccaacctgagatggagactgcccctgacctgcctgctgctgcaggtgatcatggtgatcctgttcggcgtgttcgtgagatacgacttcgaggccgacgcccactggtggagcgagagaacccacaagaacctgagcgacatggagaacgagttctactacagataccccagcttccaggacgtgcacgtgatggtgttcgtgggcttcggcttcctgatgaccttcctgcagagatacggcttcagcgccgtgggcttcaacttcctgctggccgccttcggcatccagtgggccctgctgatgcagggctggttccacttcctgcaggacagatacatcgtggtgggcgtggagaacctgatcaacgccgacttctgcgtggccagcgtgtgcgtggccttcggcgccgtgctgggcaaggtgagccccatccagctgctgatcatgaccttcttccaggtgaccctgttcgccgtgaacgagttcatcctgctgaacctgctgaaggtgaaggacgccggcggcagcatgaccatccacaccttcggcgcctacttcggcctgaccgtgaccagaatcctgtacagaagaaacctggagcagagcaaggagagacagaacagcgtgtaccagagcgacctgttcgccatgatcggcaccctgttcctgtggatgtactggcccagcttcaacagcgccatcagctaccacggcgacagccagcacagagccgccatcaacacctactgcagcctggccgcctgcgtgctgaccagcgtggccatcagcagcgccctgcacaagaagggcaagctggacatggtgcacatccagaacgccaccctggccggcggcgtggccgtgggcaccgccgccgagatgatgctgatgccctacggcgccctgatcatcggcttcgtgtgcggcatcatcagcaccctgggcttcgtgtacctgacccccttcctggagagcagactgcacatccaggacacctgcggcatcaacaacctgcacggcatccccggcatcatcggcggcatcgtgggcgccgtgaccgccgccagcgccagcctggaggtgtacggcaaggagggcctggtgcacagcttcgacttccagggcttcaacggcgactggaccgccagaacccagggcaagttccagatctacggcctgctggtgaccctggccatggccctgatgggcggcatcatcgtgggcctgatcctgagactgcccttctggggccagcccagcgacgagaactgcttcgaggacgccgtgtactgggaggacctggagctggcccccaaccagtag

SEQ ID NO: 314826 - DNA, 714 bp, Artificial Sequence
  derived and/or modified sequence
tgagacagccagcacagagccgccatcaacacctactgcagcctggccgcctgcgtgctgaccagcgtggccatcagcagcgccctgcacaagaagggcaagctggacatggtgcacatccagaacgccaccctggccggcggcgtggccgtgggcaccgccgccgagatgatgctgatgccctacggcgccctgatcatcggcttcgtgtgcggcatcatcagcaccctgggcttcgtgtacctgacccccttcctggagagcagactgcacatccaggacacctgcggcatcaacaacctgcacggcatccccggcatcatcggcggcatcgtgggcgccgtgaccgccgccagcgccagcctggaggtgtacggcaaggagggcctggtgcacagcttcgacttccagggcttcaacggcgactggaccgccagaacccagggcaagttccagatctacggcctgctggtgaccctggccatggccctgatgggcggcatcatcgtgggcctgatcctgagactgcccttctggggccagcccagcgacgagaactgcttcgaggacgccgtgtactgggagatgcccgagggcaacagcaccgtgtacatccccgaggaccccaccttcaagcccagcggccccagcgtgcccagcgtgcccatggtgagccccctgcccatggccagcagcgtgcccctggtgccctag

SEQ ID NO: 314827 - protein, 531 aa, Artificial Sequence
  derived and/or modified sequence
MSKPHSEAGTAFIQTQQLHAAMADTFLEHMCRLDIDSPPITARNTGIICTIGPASRSVETLKEMIKSGMNVARLNFSHGTHEYHAETIKNVRTATESFASDPILYRPVAVALDTKGPEIRTGLIKGSGTAEVELKKGATLKITLDNAYMEKCDENILWLDYKNICKVVEVGSKIYVDDGLISLQVKQKGADFLVTEVENGGSLGSKKGVNLPGAAVDLPAVSEKDIQDLKFGVEQDVDMVFASFIRKASDVHEVRKVLGEKGKNIKIISKIENHEGVRRFDEILEASDGIMVARGDLGIEIPAEKVFLAQKMMIGRCNRAGKPVICATQMLESMIKKPRPTRAEGSDVANAVLDGADCIMLSGETAKGDYPLEAVRMQHLIAREAEAAIYHLQLFEELRRLAPITSDPTEATAVGAVEASFKCCSGAIIVLTKSGRSAHQVARYRPRAPIIAVTRNPQTARQAHLYRGIFPVLCKDPVQEAWAEDVDLRVNFAMNVGKARGFFKKGDVVIVLTGWRPGSGFTNTMRVVPVP

SEQ ID NO: 314828 - protein, 366 aa, Artificial Sequence
  derived and/or modified sequence
MSKPHSEAGTAFIQTQQLHAAMADTFLEHMCRLDIDSPPIKKGVNLPGAAVDLPAVSEKDIQDLKFGVEQDVDMVFASFIRKASDVHEVRKVLGEKGKNIKIISKIENHEGVRRFDEILEASDGIMVARGDLGIEIPAEKVFLAQKMMIGRCNRAGKPVICATQMLESMIKKPRPTRAEGSDVANAVLDGADCIMLSGETAKGDYPLEAVRMQHLIAREAEAAMFHRKLFEELVRASSHSTDLMEAMAMGSVEASYKCLAAALIVLTESGRSAHQVARYRPRAPIIAVTRNPQTARQAHLYRGIFPVLCKDPVQEAWAEDVDLRVNFAMNVGKARGFFKKGDVVIVLTGWRPGSGFTNTMRVVPVP

SEQ ID NO: 314829 - protein, 183 aa, Artificial Sequence
  derived and/or modified sequence
NMNRYSFMLSGNHLLFHLLLWPAQTARLLKHIFPTGSCKLRDVAEHLLQCPQTGHECCKAQNRANLVEGWFSQNTQRGPSHDGVAEFHMSLTVSCPDPTPSTDPQGRHNREPILGRDDDFMCKQVKFRMCVVGRDGNAQSSVRYTGPLYRRKIRTEFLFVVFLLETRELKPQVNKNVQGTRPS

SEQ ID NO: 314830 - DNA, 552 bp, Artificial Sequence
  derived and/or modified sequence
aacatgaacagatacagcttcatgctgagcggcaaccacctgctgttccacctgctgctgtggcccgcccagaccgccagactgctgaagcacatcttccccaccggcagctgcaagctgagagacgtggccgagcacctgctgcagtgcccccagaccggccacgagtgctgcaaggcccagaacagagccaacctggtggagggctggttcagccagaacacccagagaggccccagccacgacggcgtggccgagttccacatgagcctgaccgtgagctgccccgaccccacccccagcaccgacccccagggcagacacaacagagagcccatcctgggcagagacgacgacttcatgtgcaagcaggtgaagttcagaatgtgcgtggtgggcagagacggcaacgcccagagcagcgtgagatacaccggccccctgtacagaagaaagatcagaaccgagttcctgttcgtggtgttcctgctggagaccagagagctgaagccccaggtgaacaagaacgtgcagggcaccagacccagctag

SEQ ID NO: 314831 - DNA, 552 bp, Artificial Sequence
  derived and/or modified sequence
aacatgaacagatacagctttatgctgtctggaaatcacctgctcttccaccttctattgtggcctgcacagacggcccgactcctcaaacatatctttccaactggctcatgtaagctacgcgatgttgcagaacatctcctacagtgcccacaaaccggacacgagtgctgcaaagctcagaacagggcgaatttagtggaggggtggttttctcagaacactcagcggggaccatcacatgacggggttgcagagttccatatgtcgctcaccgtgagctgccccgatccaacaccgtccactgatccccaagggcgacacaaccgtgagcccatcctgggacgggacgatgattttatgtgtaaacaagtgaagttccggatgtgcgttgttggccgtgatggaaacgcgcagtcgtctgttcggtacaccgggcccctttacaggcgcaaaattcgcaccgagttcctttttgttgtgttcctcctggagacaagagaactgaagccacaggtgaacaaaaatgtgcagggcaccaggccatcctag

SEQ ID NO: 314832 - DNA, 552 bp, Artificial Sequence
  derived and/or modified sequence
aacatgaaccgctacagcttcatgctgagcggcaaccacctgctcttccacctgctgctgtggccagcccagacagcccggctgctgaagcacatcttccccaccggcagctgcaagctgagagatgtggccgagcacctgctgcagtgcccccagacaggccacgagtgctgcaaggcccagaacagagccaacctggtggagggctggttcagccagaacacccagaggggccccagccatgatggagtggccgagttccacatgagcctgactgtgtcctgcccagaccccacccccagcacagacccccagggccgccacaaccgggagcccatcctgggcagagatgatgacttcatgtgcaagcaggtgaagttcaggatgtgtgtggtgggcagagatggaaatgcccagagctctgtgcgctacacaggccccctgtacagaaggaagatcagaacagagttcctgtttgtggtgttcctgctggagacccgggagctgaagccccaggtgaacaagaatgtgcagggcacccggcccagctag

SEQ ID NO: 314833 - DNA, 552 bp, Artificial Sequence
  derived and/or modified sequence
aatatgaatcggtacagttttatgcttagcggcaaccatctactgtttcacttgttgctgtggcctgcacagactgccaggctgcttaagcatatcttccctactggatcttgcaagctgcgcgatgtagccgaacacctgctccagtgtccacagacaggccacgagtgctgcaaggctcagaaccgcgcaaacctggtggaggggtggttctcacagaacacacaacggggtcccagccatgatggggtggcagagtttcacatgtccctaacggtcagttgcccagacccaacaccgagtactgacccgcaggggcgtcataaccgcgaacccatactcggcagggacgacgatttcatgtgtaagcaggttaaattcaggatgtgtgtagtgggacgcgatggcaatgcccaaagtagtgtgcgatacaccggtccattataccggagaaaaattagaacagaattcctgttcgtagtgtttctactagaaacacgggagttgaaaccccaggtcaacaagaacgttcagggcacgagacccagctag

SEQ ID NO: 314834 - protein, 1197 aa, Artificial Sequence
  derived and/or modified sequence
MWMHCCWAWPPRSQSERTMCWLKMCGVSLRLSLQVVNSWPLGRGSAGLPEPDFWPGPLKFSRTDHLASCLQRGRDLGLPSYTKARAALGLSPITRWQDINPALSRSNDTVLEATAALYNQDLSWLELLPGGLLESHRDPGPLFSTIVLEQFVRLRDGDRYWFENTRNGLFSKKEIEEIRNTTLQDVLVAVINIDPSALQPNVFVWHKGDPCPQPRQLSTEGLPACAPSVVRDYFEGSGFGFGVTIGTLCCFPLVSLLSAWIVARLRMRNFKRLQGQDRQSIVSEKLVGGMEALEWQGHKEPCRPVLVYLQPGQIRVVDGRLTVLRTIQLQPPQKVNFVLSSNRGRRTLLLKIPKEYDLVLLFNLEEERQALVENLRGALKESGLSIQEWELREQELMRAAVTREQRRHLLETFFRHLFSQVLDINQADAGTLPLDSSQKVREALTCELSRAEFAESLGLKPQDMFVESMFSLADKDGNGYLSFREFLDILVVFMKGSPEEKSRLMFRMYDFDGNGLISKDEFIRMLRSFIEISNNCLSKAQLAEVVESMFRESGFQDKEELTWEDFHFMLRDHNSELRFTQLCVKGVEVPEVIKDLCRRASYISQDMICPSPRVSARCSRSDIETELTPQRLQCPMDTDPPQEIRRRFGKKVTSFQPLLFTEAHREKFQRSCLHQTVQQFKRFIENYRRHIGCVAVFYAIAGGLFLERAYYYAFAAHHTGITDTTRVGIILSRGTAASISFMFSYILLTMCRNLITFLRETFLNRYVPFDAAVDFHRLIASTAIVLTVLHSVGHVVNVYLFSISPLSVLSCLFPGLFHDDGSELPQKYYWWFFQTVPGLTGVVLLLILAIMYVFASHHFRRRSFRGFWLTHHLYILLYVLLIIHGSFALIQLPRFHIFFLVPAIIYGGDKLVSLSRKKVEISVVKAELLPSGVTHLRFQRPQGFEYKSGQWVRIACLALGTTEYHPFTLTSAPHEDTLSLHIRAAGPWTTRLREIYSAPTGDRCARYPKLYLDGPFGEGHQEWHKFEVSVLVGGGIGVTPFASILKDLVFKSSVSCQVFCKKIYFIWVTRTQRQFEWLADIIREVEENDHQDLVSVHIYITQLAEKFDLRTTMLYICERHFQKVLNRSLFTGLRSITHFGRPPFEPFFNSLQEVHPQVRKIGVFSCGPPGMTKNVEKACQLINRQDRTHFSHHYENF

SEQ ID NO: 314835 - DNA, 3594 bp, Artificial Sequence
  derived and/or modified sequence
atgtggatgcattgttgctgggcgtggccgcctcggtcccagtccgagcgaaccatgtgctggctgaagatgtgcggcgtgagcctcagactcagcctgcaagtggtgaactcttggcctctgggcagggggagtgctggcctgccagaaccggacttttggcccggtcctctgaagtttagtaggactgatcatctggcttcttgcctgcaacgaggacgggatctggggctgccatcttacactaaagccagggctgccctcggcctgtccccgatcactcgctggcaggacatcaatcccgctctgagccgctccaatgatacagtcctggaagcaaccgcagcactttataaccaggacctcagctggctggaactgttgccgggaggattgctggagagccacagggatccagggccgttgttcagtaccatcgtgctcgaacagttcgtgaggctgcgtgacggcgatcgctattggtttgagaataccagaaacggtctgttttctaagaaagaaatcgaggaaattaggaacacgacccttcaagacgtgctagtggctgttattaatatcgacccaagcgcccttcaaccaaacgtattcgtgtggcacaagggggatccttgcccccagccgcggcagcttagcactgagggactacctgcctgcgcccctagcgttgttcgtgactattttgaaggttccgggttcggctttggcgtgacaattggaacattatgctgttttccactggtcagtctgttatcagcctggattgtcgctaggctgcgcatgagaaatttcaagaggctgcagggtcaggatcggcagagtatagtgtcagagaagctggttggagggatggaggctctggagtggcaaggccacaaagaaccttgcaggccggtgctcgtgtatctccagcccggacagattcgggtggtcgacggcagacttaccgttttgcgcacgatacaattgcaacctccacagaaggtgaactttgttttgtcctctaaccgcggcagaaggactctgctgcttaagataccaaaggagtacgatctcgtgctgctctttaacctggaggaagagaggcaagctcttgttgagaacctgcggggagctcttaaggagtccggcttatcaattcaggagtgggaacttcgggaacaagaactaatgcgagccgctgttacgagagaacagcggcgtcacctgttggagacattcttccggcatctcttctctcaagtgctggacatcaaccaagctgatgctgggaccctccccctggattcttctcaaaaagtaagggaagccttgacctgtgaactgtctcgggctgaatttgccgagagcctgggactgaagcctcaggacatgtttgtggaatcgatgtttagtcttgcggacaaagacggaaatggctatctcagctttcgggagttcctagatatactggtggtgtttatgaagggcagccctgaggagaagtcacgacttatgttccgaatgtacgattttgatgggaatggcctgatatcaaaggatgaattcataagaatgctgaggtcttttatcgagatctccaacaattgtttgtccaaggctcaactcgcagaggtggttgagtcaatgtttagggagagtggatttcaggacaaggaggagctgacatgggaagattttcactttatgttgcgcgatcataacagtgagctcagattcactcaattgtgtgttaagggggtggaggttccggaggttatcaaagacctttgtagacgagcgagctacattagtcaggacatgatatgtccttccccgagggttagcgcccggtgcagtagatctgatatcgagaccgagttaacacctcagagactgcaatgccctatggacacggatccaccgcaggagattcggcgccggtttggcaaaaaagtgacctcatttcagccactgctgttcactgaagctcacagagagaaatttcagcgctcttgtttacatcagactgttcagcaatttaagaggttcattgagaattatcggcgccatattggatgcgtcgctgtgttttatgccattgcgggagggctctttctcgagcgcgcgtactattatgctttcgctgcacaccacaccggtattactgataccacaagagtcggcatcatattatcaagggggaccgctgcttctataagcttcatgttctcatacatcctcttaaccatgtgtaggaaccttatcacattcctgcgggagacattcctcaacaggtacgtcccattcgatgccgctgttgatttccataggttaattgcaagtactgccattgtccttactgtgttacacagtgtgggccatgtcgtgaatgtgtacctgttcagtataagccccctgtcagtgctgtcgtgcttgtttcctgggttatttcacgatgacggctcagagctcccacaaaaatattattggtggttcttccagacagtgcccggactaactggggtggtgctactgctgattctggccataatgtacgtgtttgcaagccatcattttcggaggcgctcctttaggggattttggttgacacatcacctatatatcttactctatgtattgctcattatccacggatccttcgcccttatccagctccccaggttccacatcttttttctggttcctgctataatctatggcggcgataaactggtgagtttaagccgaaaaaaggttgaaatctccgtagtgaaggccgagttgctaccctctggggtgacgcatctgaggttccagcggcctcagggtttcgagtacaagtcaggtcagtgggtgcgcattgcatgtctggctcttggcacaacggagtaccatccgttcaccttgacatcagctccacatgaggacacactatccttgcacatcagggccgcagggccctggacgacccgactcagggagatctacagcgcgccaaccggtgatcggtgtgctcgctaccctaaactgtatctggacggcccattcggagaaggccaccaggaatggcacaagtttgaggtgagtgtgctcgtggggggcgggattggcgttacaccctttgcctcgatcttgaaagacttagtgttcaaaagctccgtctcatgccaggtcttttgtaagaaaatatactttatatgggtcacacgtactcaaaggcagtttgaatggttggctgatatcatccgcgaagtagaagaaaatgatcatcaggatttggtctcagtgcacatttacatcacccagctggccgagaaatttgatctcagaaccactatgctctacatttgtgagagacacttccagaaggtgttgaatcggtctctcttcacaggcctgcgctccataactcactttgggagaccaccgttcgaacctttttttaacagtttacaggaggtgcacccacaggtacggaagataggagtgttcagttgcggcccccccggaatgactaagaatgttgagaaggcatgtcagttgataaatcggcaggatcgcacccatttctcacaccattatgagaacttctag

SEQ ID NO: 314836 - DNA, 3594 bp, Artificial Sequence
  derived and/or modified sequence
atgtggatgcactgctgctgggcctggccacccaggagccagagcgagaggaccatgtgctggctgaagatgtgtggggtgtccctgcggctgagcctgcaggtggtgaacagctggcccctgggccggggcagcgctggcctgcctgagccagacttctggccaggccccctgaagttcagcaggacagaccacctggccagctgcctgcagaggggccgggacctgggcctgcccagctacaccaaggcccgggccgccctgggcctgagccccatcacccgctggcaggacatcaacccagccctgagccgcagcaatgacacagtgctggaggccacagctgccctgtacaaccaggacctgtcctggctggagctgctgcccggcggcctgctggagagccaccgggaccccggccccctcttcagcaccatcgtgctggagcagtttgtgcggctgagagatggagaccgctactggtttgagaacaccagaaatggcctcttcagcaagaaggagattgaggagatccggaacaccaccctgcaggatgtgctggtggccgtcatcaacatcgaccccagcgccctgcagcccaacgtgtttgtgtggcacaagggggacccctgcccccagccccggcagctgagcacagagggcctgcctgcctgtgcccccagcgtggtgcgggactactttgagggcagcggctttggatttggagtgaccatcggcaccctgtgctgcttccccctggtgtccctgctgagcgcctggatcgtggcccggctgaggatgaggaacttcaagaggctgcagggccaggaccggcagagcatcgtgtctgagaagctggtgggcggcatggaggccctggagtggcagggccacaaggagccctgcaggcctgtgctggtgtacctgcagcccggccagatccgggtggtggatggccgcctgactgtgctgcggaccatccagctgcagcccccccagaaggtgaactttgtgctgagcagcaacagaggaagaaggaccctgctgctgaagatccccaaggagtatgacctggtgctgctcttcaacctggaggaggagcggcaggccctggtggagaacctgcggggggccctgaaggagagcggcctgagcatccaggagtgggagctgcgggagcaggagctgatgagagctgctgtgacccgggagcagaggaggcacctgctggagaccttcttccgccacctgttcagccaggtgctggacatcaaccaggctgatgctggcaccctgcccctggacagcagccagaaggtgcgggaggccctgacctgtgagctgagcagagctgagtttgctgagagcctgggcctgaagccccaggacatgtttgtggagagcatgttcagcctggccgacaaggatggaaatggctacctgtccttccgggagttcctggacatcctggtggtgttcatgaagggcagccctgaggagaagagccggctgatgttcaggatgtatgactttgatggaaatggcctcatcagcaaggatgagttcatccgcatgctgcggagcttcatcgagatcagcaacaactgcctgagcaaggcccagctggccgaggtggtggagagcatgttccgggagagcggcttccaggacaaggaggagctgacctgggaggacttccacttcatgctgcgggaccacaacagcgagctgcgcttcacccagctgtgtgtgaagggcgtggaggtgcctgaggtgatcaaggacctgtgccggcgggccagctacatcagccaggacatgatctgccccagcccccgggtgtctgcccgctgcagcagaagtgacattgaaacagagctgaccccccagaggctgcagtgccccatggacacagaccccccccaggagatcagaagaagatttgggaagaaggtgaccagcttccagcccctgctcttcacagaggcccaccgggagaagttccagaggagctgcctgcaccagacagtgcagcagttcaagcgcttcatcgagaactaccgccgccacatcggctgtgtggccgtgttctacgccatcgccggcggcctcttcctggagcgggcctactactatgcctttgctgcccaccacacaggcatcacagacaccaccagggtgggcatcatcctgagccggggcacagctgccagcatctccttcatgttctcctacatcctgctgaccatgtgcaggaacctgatcaccttcctgcgggagaccttcctgaaccgctacgtgccctttgatgctgctgtggacttccaccggctgattgccagcacagccatcgtgctgactgtgctgcacagcgtgggccacgtggtgaatgtgtacctgttcagcatcagccccctgtctgtgctgagctgcctcttccctggcctcttccatgatgatggcagcgagctgccccagaagtactactggtggttcttccagacagtgcccggcctgactggagtggtgctgctgctgatcctggccatcatgtatgtgtttgccagccaccacttcagaagaagaagcttccggggcttctggctgacccaccacctgtacatcctgctgtatgtgctgctgatcatccacggcagctttgccctgatccagctgccccgcttccacatcttcttcctggtgcctgccatcatctacggcggggacaagctggtgtccctgagcaggaagaaggtggagatctctgtggtgaaggccgagctgctgcccagcggcgtgacccacctgcgcttccagaggccccagggctttgagtacaagagcggccagtgggtgcgcatcgcctgcctggccctgggcaccacagagtaccaccccttcaccctgaccagcgcccctcatgaggacaccctgagcctgcacatccgggctgctggcccctggaccacccggctgcgggagatctacagcgcccccaccggggacagatgtgcccgctaccccaagctgtacctggatggcccctttggagagggccaccaggagtggcacaagtttgaggtgtctgtgctggtgggcggcggcatcggcgtgaccccatttgccagcatcctgaaggacctggtgttcaagagctctgtgtcctgccaggtgttctgcaagaagatctacttcatctgggtgaccaggacccagaggcagtttgagtggctggccgacatcatccgggaggtggaggagaatgaccaccaggacctggtgtctgtgcacatctacatcacccagctggccgagaagtttgacctgcggaccaccatgctgtacatctgtgagcggcacttccagaaggtgctgaacagaagcctcttcaccggcctgcggagcatcacccacttcggccggcccccatttgagcccttcttcaacagcctgcaggaggtgcacccccaggtgaggaagattggagtcttcagctgtggccccccaggcatgaccaagaatgtggagaaggcctgccagctgatcaaccggcaggacaggacccacttcagccaccactatgagaacttctag

SEQ ID NO: 314837 - DNA, 3594 bp, Artificial Sequence
  derived and/or modified sequence
atgtggatgcactgctgctgggcctggcccccccggagccagagcgaaagaactatgtgctggctgaagatgtgcggcgtctctctcagactgagtctccaagttgtcaactcctggcccctcggtcgcgggtcagctggcctgcctgaaccggatttctggcccggacctcttaagttcagccggactgaccatctagcaagttgtttacagagaggaagagaccttgggctcccaagctacaccaaggctagagctgccctgggcctgtctccaattacacgctggcaggacataaaccctgctctgtcccggagcaatgatactgttctcgaggccactgctgctctctacaaccaggatctgtcctggctggaactgctgcccggggggctcctcgaaagccatagggacccagggccgcttttctctactattgtgctggagcaattcgttcggttgagagacggagaccgatactggttcgagaacacaagaaatgggttgttctctaagaaagaaatcgaggagatacgaaataccactctgcaggatgtcctggttgcggttattaacatcgacccttctgcactccagcccaatgtctttgtttggcataaaggcgatccctgcccacagccccgtcagctaagtactgaaggactcccggcctgtgccccgtctgtcgtacgagactactttgagggatccggctttgggtttggtgtcaccatcggcaccctgtgttgttttcccctggtgtctcttctgtctgcatggatcgttgcccggcttaggatgcgcaattttaaacgcctacaaggacaggatcgtcagagcattgtgtccgagaagttggtgggaggcatggaggcactggagtggcagggtcacaaagaaccatgccgccccgttttggtgtacctccaaccaggtcagatccgggtggtagacggtagactgacagttcttcggaccattcagctgcagcctccacagaaagtaaactttgtgctgtcctcgaacaggggacgacgtacccttcttcttaaaattcccaaggaatacgatctagtccttcttttcaacctagaagaggaacggcaggcactggtcgaaaatttgagaggagctctcaaggaatccggcctctccatacaagaatgggaactccgggagcaggaactgatgagggccgctgtgacccgcgagcagcgtcgccatctgctcgaaaccttctttagacatctttttagccaggtgctagacatcaaccaggccgacgcagggacgctgccattggatagcagccagaaggtgagagaggccttaacctgcgaactgtctcgtgccgaattcgccgaaagtctcggcttgaaaccgcaagacatgtttgtagagtcgatgttctctctggccgacaaggacggaaatggatacttgtctttccgggagtttcttgatattctggtagtattcatgaagggctcccccgaagaaaaatctcgcctcatgttccgtatgtatgatttcgatggaaatggcctgatttctaaggatgagtttattcggatgctgcgaagcttcatagagatctcaaacaattgcctgtcgaaagcccagttagctgaggttgtggaatctatgttccgtgagagcggattccaagacaaagaggaactgacttgggaggattttcattttatgctcagggatcataacagcgagctgaggtttacgcaactgtgtgttaaaggtgtcgaagtccctgaggtgatcaaggatttatgtcggcgggcttcctacatctctcaggacatgatctgtccatcaccaagagttagtgctcgttgctcaaggtccgatatcgagacagaactcactccgcagagactgcaatgtcctatggacaccgacccaccacaggagatccggcgtagatttggaaagaaagtcacctcctttcagcctctgctgtttaccgaagcccatagagagaaattccaaaggagttgcttacaccagactgtacaacaattcaagcggtttatcgagaattaccgtcggcacatcggctgcgtcgctgttttttatgccattgcaggcggactgtttctggaaagggcctactactatgcttttgccgcgcaccacaccgggataaccgacacaacacgcgtcggcattattttgagtagggggactgctgccagtatttcttttatgttcagttatattcttctaacaatgtgtaggaacctaatcacattcttgcgcgaaaccttcttgaatcgctacgtgccgtttgatgccgccgtcgactttcaccgtctaatcgctagcactgccatagttttgaccgttctccacagcgtcggacatgtggttaacgtataccttttctctatctcccctttgtcagttctctcatgcctgttccccggcctctttcatgatgatgggagtgagctgcctcagaaatactactggtggtttttccaaaccgtgcccggcctcactggcgtcgtgttgctgctgattttggctatcatgtatgtttttgccagccatcactttcgcagaaggagtttccggggcttctggctgactcatcatctgtacatcctgttgtacgtgctgctgattatccacggtagttttgccctgattcaactcccccgctttcacattttctttctggtgccagccatcatttacgggggtgacaaactggtctccttgagccgcaagaaagtggagatcagtgtggtaaaagccgaactgttgccctcaggagttacgcacctgaggtttcaaagaccccagggtttcgagtacaaaagtgggcaatgggtacggattgcctgtctcgcgctaggcacaacagaatatcacccctttacgctgacaagcgcaccccatgaagatacgctgagtctgcacatccgagccgctggcccctggactactcgcctgcgcgaaatctactctgctcctaccggagatcgttgcgcgaggtatcctaagctctacctggacggcccttttggggaaggacatcaggagtggcacaagtttgaggtgtcggttttggttgggggcggaataggagtaacacccttcgcctccatcctgaaggatctggtgtttaagtcttctgtcagttgtcaggttttctgtaagaaaatctattttatatgggtgactcgaacccagcgccaattcgagtggcttgcagatattatcagggaagtcgaggagaatgaccaccaggacctcgtttccgtgcatatatatatcacccaactggcggaaaaattcgacctacggaccaccatgttgtacatttgtgaacgccacttccagaaggtcctgaaccgatctttattcaccggcttgcggagtatcacacattttggacgcccgccctttgaacccttttttaatagtcttcaagaggtccacccccaggtcaggaagataggagtgttcagttgcgggccaccaggaatgaccaagaatgtggagaaggcctgccagttgatcaacagacaggacagaacccacttcagtcaccattacgagaatttctag

SEQ ID NO: 314838 - DNA, 3594 bp, Artificial Sequence
  derived and/or modified sequence
atgtggatgcactgctgctgggcctggcctccgaggagccagagtgaaaggaccatgtgctggctcaagatgtgcggagtctccctccggttatcacttcaggtggttaattcatggcccctgggcagagggtctgctggcttgcccgaacccgatttctggccaggcccactcaagttcagccggacagatcatttggcctcatgtctccaacgcggtcgtgacctaggtctgccaagttacacgaaagccagagcagctttagggctaagccctattactcgatggcaggacattaaccctgccctcagccggagcaacgacacagttttagaagctaccgcagccctgtacaatcaggaccttagctggctggaactactgcccggaggattgttggaaagccacagagacccaggcccactgttcagtaccatcgtgttagagcaattcgtgcgactccgagacggggatcgttattggtttgagaatacacggaatggactgttctctaaaaaagaaattgaggagatccgcaatactactctgcaggatgtgttagtagctgttattaacatagacccctctgcactgcagcctaacgtgtttgtatggcacaagggtgatccttgcccccagcctcgacagctctctactgaaggcctccctgcatgcgctccttccgttgtacgtgattattttgaggggtccggatttggtttcggagtgacgattggcacactgtgttgtttcccattggtcagtctgctctccgcctggatcgtcgccagactccggatgagaaacttcaaacgcttgcagggccaagaccgccagagcatcgtgagcgaaaaactggttggagggatggaggcactggaatggcaaggtcataaagaaccgtgtcggccagtcctggtatacctgcagcccggacaaattcgcgttgttgacggacgcttaaccgtgctgcggacaattcagttacaacccccacagaaagtgaattttgtgctcagtagtaataggggtaggcgaactctcttgcttaaaatccctaaggaatacgatttagtgctgctcttcaatctagaagaggagaggcaggccctagtggagaatctccgcggtgccctgaaggaatcgggcctctcgatccaagagtgggaattgcgcgagcaggagctgatgcgagctgccgtgaccagagagcagcggagacatctgcttgaaacattttttaggcacctgttcagccaggtgttagacatcaaccaagctgacgccggaaccctccctctggatagttcacagaaggtgagggaagctctaacatgcgagcttagccgcgcagaatttgctgagtccctcggtctgaaaccccaggatatgtttgttgagagcatgtttagtttggccgacaaagatggcaatggctacttgtcatttcgagaattcctcgatatcttggttgtgtttatgaaggggagccctgaagagaaaagcaggctcatgttcaggatgtacgatttcgatggcaacggcctgatcagtaaagatgaattcatcaggatgcttcgctctttcatagaaatctcaaacaattgtctctccaaggcccaattggccgaggtggtggagtctatgtttcgtgaaagtggctttcaggataaggaagagctgacttgggaagatttccatttcatgctccgcgatcacaacagtgaactaaggttcacacagttgtgcgtaaagggcgtagaggtgccagaagtcatcaaggatctgtgtcgccgagctagttacatcagccaggatatgatctgtccaagcccacgggtctccgcacgttgctcccggtccgacatcgagacggagttaactccccaacgactgcagtgccccatggataccgatcctccacaggagatcagaaggcggtttggtaagaaagtgactagcttccagcccctgctgtttacagaggctcatagggaaaagttccagcggtcttgtctgcatcagacggtgcagcagttcaagagatttatagaaaactacaggcggcatatcgggtgcgtggccgttttctatgcaatcgcgggagggctgttcctggagagagcctactactacgcattcgccgctcaccatacgggcattactgatacaactagagtcggaatcatcctgtctagggggacagcagcctcaatcagcttcatgttcagttacatcctcctaaccatgtgccgcaacctgattactttcctcagagagactttcctcaataggtatgtgccattcgacgccgcagtggatttccaccggctcattgcctctacagccatcgtgctaaccgtgctgcactccgtcgggcacgtcgtcaacgtgtacctattttctatcagtcccctcagcgtgctctcttgccttttccccggtctcttccacgatgatggctcggaactcccacaaaagtattattggtggttcttccagaccgttcctggactcactggcgttgtgctgctcctgattctcgctatcatgtatgtctttgcctctcaccatttcaggcggcgaagctttcgcggattttggctcactcatcacctctacatcttgttgtacgtccttctgattatccacggctcgttcgcactcatacaactgccaagattccacatattttttctggttcctgcaattatttacggcggtgataagctcgtgagtctctcccgcaaaaaggtggagatctctgtggtcaaggccgagttactgcccagcggagtgactcatttgcgcttccagaggccccagggtttcgaatataaatctggccagtgggtacgaatcgcatgcctggcactgggcacgacggagtatcacccatttaccctgacatccgcccctcatgaagacactctttctctgcatatccgagcagccggaccatggacaacgagactacgggagatttattccgcccctactggtgacagatgcgccaggtaccccaaactgtatttagatggaccttttggcgaggggcaccaggagtggcataaattcgaagtatccgtattagtcggcggtggcatcggagtcaccccttttgcgagtatcctaaaagacctggtatttaaatccagcgtgagctgtcaggtcttctgtaaaaagatctactttatttgggtgactagaactcaaaggcaattcgagtggcttgctgatatcatccgagaggtcgaagagaatgaccaccaggatctagtgtctgtccacatctatatcacgcagctggcagaaaagtttgatctcagaacaaccatgctgtacatctgcgaaagacacttccagaaagttttgaaccgaagtctgttcactgggctccggtcaatcacacactttggaaggccacctttcgagccatttttcaacagcctgcaggaggtgcacccacaagtccgcaagattggcgtgtttagctgtggccctccaggtatgacaaaaaatgtggaaaaggcatgtcagttgatcaatcgacaggacaggacacatttctcccaccactatgagaacttctag

SEQ ID NO: 314839 - DNA, 3594 bp, Artificial Sequence
  derived and/or modified sequence
atgtggatgcactgctgctgggcctggccccccagaagccagagcgagagaaccatgtgctggctgaagatgtgcggcgtgagcctgagactgagcctgcaggtggtgaacagctggcccctgggcagaggcagcgccggcctgcccgagcccgacttctggcccggccccctgaagttcagcagaaccgaccacctggccagctgcctgcagagaggcagagacctgggcctgcccagctacaccaaggccagagccgccctgggcctgagccccatcaccagatggcaggacatcaaccccgccctgagcagaagcaacgacaccgtgctggaggccaccgccgccctgtacaaccaggacctgagctggctggagctgctgcccggcggcctgctggagagccacagagaccccggccccctgttcagcaccatcgtgctggagcagttcgtgagactgagagacggcgacagatactggttcgagaacaccagaaacggcctgttcagcaagaaggagatcgaggagatcagaaacaccaccctgcaggacgtgctggtggccgtgatcaacatcgaccccagcgccctgcagcccaacgtgttcgtgtggcacaagggcgacccctgcccccagcccagacagctgagcaccgagggcctgcccgcctgcgcccccagcgtggtgagagactacttcgagggcagcggcttcggcttcggcgtgaccatcggcaccctgtgctgcttccccctggtgagcctgctgagcgcctggatcgtggccagactgagaatgagaaacttcaagagactgcagggccaggacagacagagcatcgtgagcgagaagctggtgggcggcatggaggccctggagtggcagggccacaaggagccctgcagacccgtgctggtgtacctgcagcccggccagatcagagtggtggacggcagactgaccgtgctgagaaccatccagctgcagcccccccagaaggtgaacttcgtgctgagcagcaacagaggcagaagaaccctgctgctgaagatccccaaggagtacgacctggtgctgctgttcaacctggaggaggagagacaggccctggtggagaacctgagaggcgccctgaaggagagcggcctgagcatccaggagtgggagctgagagagcaggagctgatgagagccgccgtgaccagagagcagagaagacacctgctggagaccttcttcagacacctgttcagccaggtgctggacatcaaccaggccgacgccggcaccctgcccctggacagcagccagaaggtgagagaggccctgacctgcgagctgagcagagccgagttcgccgagagcctgggcctgaagccccaggacatgttcgtggagagcatgttcagcctggccgacaaggacggcaacggctacctgagcttcagagagttcctggacatcctggtggtgttcatgaagggcagccccgaggagaagagcagactgatgttcagaatgtacgacttcgacggcaacggcctgatcagcaaggacgagttcatcagaatgctgagaagcttcatcgagatcagcaacaactgcctgagcaaggcccagctggccgaggtggtggagagcatgttcagagagagcggcttccaggacaaggaggagctgacctgggaggacttccacttcatgctgagagaccacaacagcgagctgagattcacccagctgtgcgtgaagggcgtggaggtgcccgaggtgatcaaggacctgtgcagaagagccagctacatcagccaggacatgatctgccccagccccagagtgagcgccagatgcagcagaagcgacatcgagaccgagctgaccccccagagactgcagtgccccatggacaccgaccccccccaggagatcagaagaagattcggcaagaaggtgaccagcttccagcccctgctgttcaccgaggcccacagagagaagttccagagaagctgcctgcaccagaccgtgcagcagttcaagagattcatcgagaactacagaagacacatcggctgcgtggccgtgttctacgccatcgccggcggcctgttcctggagagagcctactactacgccttcgccgcccaccacaccggcatcaccgacaccaccagagtgggcatcatcctgagcagaggcaccgccgccagcatcagcttcatgttcagctacatcctgctgaccatgtgcagaaacctgatcaccttcctgagagagaccttcctgaacagatacgtgcccttcgacgccgccgtggacttccacagactgatcgccagcaccgccatcgtgctgaccgtgctgcacagcgtgggccacgtggtgaacgtgtacctgttcagcatcagccccctgagcgtgctgagctgcctgttccccggcctgttccacgacgacggcagcgagctgccccagaagtactactggtggttcttccagaccgtgcccggcctgaccggcgtggtgctgctgctgatcctggccatcatgtacgtgttcgccagccaccacttcagaagaagaagcttcagaggcttctggctgacccaccacctgtacatcctgctgtacgtgctgctgatcatccacggcagcttcgccctgatccagctgcccagattccacatcttcttcctggtgcccgccatcatctacggcggcgacaagctggtgagcctgagcagaaagaaggtggagatcagcgtggtgaaggccgagctgctgcccagcggcgtgacccacctgagattccagagaccccagggcttcgagtacaagagcggccagtgggtgagaatcgcctgcctggccctgggcaccaccgagtaccaccccttcaccctgaccagcgccccccacgaggacaccctgagcctgcacatcagagccgccggcccctggaccaccagactgagagagatctacagcgcccccaccggcgacagatgcgccagataccccaagctgtacctggacggccccttcggcgagggccaccaggagtggcacaagttcgaggtgagcgtgctggtgggcggcggcatcggcgtgacccccttcgccagcatcctgaaggacctggtgttcaagagcagcgtgagctgccaggtgttctgcaagaagatctacttcatctgggtgaccagaacccagagacagttcgagtggctggccgacatcatcagagaggtggaggagaacgaccaccaggacctggtgagcgtgcacatctacatcacccagctggccgagaagttcgacctgagaaccaccatgctgtacatctgcgagagacacttccagaaggtgctgaacagaagcctgttcaccggcctgagaagcatcacccacttcggcagaccccccttcgagcccttcttcaacagcctgcaggaggtgcacccccaggtgagaaagatcggcgtgttcagctgcggcccccccggcatgaccaagaacgtggagaaggcctgccagctgatcaacagacaggacagaacccacttcagccaccactacgagaacttctag

SEQ ID NO: 314840 - DNA, 4539 bp, Artificial Sequence
  derived and/or modified sequence
aaggtcaaagtaaaattttaagatcccttgtgcttgtatagacctctgtcaggcagcactgacagaggggacacccctcaccctgagtggggaatcaacctgcagaagaggaatgtcccaccggtttgggagcaaacagcaggactgggtgggctcagggataaggatgatggtgtggagggagccggctgtctaacctctgaccccattaaccacacccctttcctccccacccccaacctataaagcacccaagcctacaaagtgctgaagatgtggatgcactgctgctgggcatggcctcccagatcgcagagcgagaggaccatgtgttggttgaagatgtgcggggtgagtctgaggctgtccctgcaggttgtgaactcctggcctctgggaagaggctcagctggacttccagaaccagatttctggcctgggccactgaagttttcccgcacagaccacctggccagctgcctgcagcggggccgggatctgggcctgccctcttacaccaaggccagggcagcactgggcttgtctcccattacccgctggcaggacatcaaccctgcactctcccggagcaatgacactgtactggaggccacagctgccctgtacaaccaggacttatcctggctagagctgctccctgggggactcctggagagccaccgggaccctggacctctgttcagcaccatcgtccttgaacaatttgtgcggctacgggatggtgaccgctactggtttgagaacaccaggaatgggctgttctccaagaaggagattgaagaaatccgaaataccaccctgcaggacgtgctggtcgctgttatcaacattgaccccagtgctctgcagcccaatgtctttgtctggcataaaggagacccctgtccgcagccgagacagctcagcactgaaggcctgccagcgtgtgctccctctgttgttcgtgactattttgagggcagtggatttggcttcggggtcaccatcgggaccctctgttgcttccctttggtgagcctgctcagtgcctggattgttgcccggctccggatgagaaatttcaagaggctccagggccaggaccgccagagcatcgtgtctgagaagctcgtgggaggcatggaagctttggaatggcaaggccacaaggagccctgccggcccgtgcttgtgtacctgcagcccgggcagatccgtgtggtagatggcaggctcaccgtgctccgcaccatccagctgcagcctccacagaaggtcaacttcgtcctgtccagcaaccgtggacgccgcactctgctgctcaagatccccaaggagtatgacctggtgctgctgtttaacttggaggaagagcggcaggcgctggtggaaaatctccggggagctctgaaggagagcgggttgagcatccaggagtgggagctgcgggagcaggagctgatgagagcagctgtgacacgggagcagcggaggcacctcctggagacctttttcaggcaccttttctcccaggtgctggacatcaaccaggccgacgcagggaccctgcccctggactcctcccagaaggtgcgggaggccctgacctgtgagctgagcagggccgagtttgccgagtccctgggcctcaagccccaggacatgtttgtggagtccatgttctctctggctgacaaggatggcaatggctacctgtccttccgagagttcctggacatcctggtggtcttcatgaaaggctctcctgaggaaaagtctcgccttatgttccgcatgtacgactttgatgggaatggcctcatttccaaggatgagttcatcaggatgctgagatccttcatcgagatctccaacaactgcctgtccaaggcccagctggctgaggtggtggagtccatgttccgggagtcgggattccaggacaaggaggaactgacatgggaagattttcacttcatgctgcgggaccacaatagcgagctccgcttcacgcagctctgtgtcaaaggggtggaggtgcctgaagtcatcaaggacctctgccggcgagcctcctacatcagccaggatatgatctgtccctctcccagagtgagtgcccgctgttcccgcagcgacattgagactgagttgacacctcagagactgcagtgccccatggacacagaccctccccaggagattcggcggaggtttggcaagaaggtaacgtcattccagcccttgctgttcactgaggcgcaccgagagaagttccaacgcagctgtctccaccagacggtgcaacagttcaagcgcttcattgagaactaccggcgccacatcggctgcgtggccgtgttctacgccatcgctggggggcttttcctggagagggcctactactacgcctttgccgcacatcacacgggcatcacagacaccacccgcgtgggaatcatcctgtcgcggggcacagcagccagcatctctttcatgttctcctacatcttgctcaccatgtgccgcaacctcatcaccttcctgcgagaaaccttcctcaaccgctacgtgcccttcgacgccgccgtggacttccatcgcctcattgcctccaccgccatcgtcctcacagtcttacacagtgtgggccatgtggtgaatgtgtacctgttctccatcagccccctcagcgtcctctcttgcctctttcctggcctcttccatgatgatgggtctgagctcccccagaagtattactggtggttcttccagaccgtaccaggcctcacgggggttgtgctgctcctgatcctggccatcatgtatgtctttgcctcccaccacttccgccgccgcagtttccggggcttctggctgacccaccacctctacatcctgctctatgtcctgctcatcatccatggtagctttgccctgatccagctgccccgtttccacatcttcttcctggtcccagcaatcatctatgggggcgacaagctggtgagcctgagccggaagaaggtggagatcagcgtggtgaaggcggagctgctgccctcaggagtgacccacctgcggttccagcggccccagggctttgagtacaagtcagggcagtgggtgcggatcgcttgcctggctctggggaccaccgagtaccaccccttcacactgacctctgcgccccatgaggacacgcttagcctgcacatccgggcagcagggccctggaccactcgcctcagggagatctactcagccccgacgggtgacagatgtgccagatacccaaagctgtaccttgatggaccatttggagagggccaccaggagtggcataagtttgaggtgtcagtgttagtgggagggggcattggggtcaccccttttgcctccatcctcaaagacctggtcttcaagtcatccgtcagctgccaagtgttctgtaagaagatctacttcatctgggtgacgcggacccagcgtcagtttgagtggctggctgacatcatccgagaggtggaggagaatgaccaccaggacctggtgtctgtgcacatctacatcacccagctggctgagaagttcgacctcaggaccactatgctgtacatctgtgagcggcacttccagaaggttctgaaccggagtctattcacaggcctgcgctccatcacccactttggccgtcccccctttgagcccttcttcaactccctgcaggaggtccacccccaggtccggaagatcggggtgtttagctgtggcccccctggcatgaccaagaatgtggaaaaggcctgtcagctcatcaacaggcaggaccggactcacttctcccaccattatgagaacttctaggcccctgcccgggggttctgcccactgcccagttgagcagaggtttgagcccacacctcacctctgttcttcctatttctggctgcctcagccttctctgatttcccacctcccaaccttgttccaggtggccatagtcagtcaccatgtgtgggctcagggacccccaggaccaggatgtgtctcagcctggagaaatggtgggggggcagtgtctagggactagagtgagaagtaggggagctactgatttggggcaaagtgaaacctctgcttccagacttcagaaacaaatctcagaagacaagctgacctgacaagtactatgtgtgtgcatgtctgtatgtgtgttggggcggtgagtgtaaggatgcagtgggagcatggatgctggcatcttagaaccctccctactcccatacctcctcctcttctgggctccccactgtcagacgggctggcaaatgccttgcaggaggtagaggctggacccatggcaagccatttacagaaacccactcggcaccccagtctaacaccacaactaatttcacccaaggttttaagcacgttctttcatcagaccctggcccaatacctatgtatgcaatgctcctcagccctcttctccctgctccagtagtctcccttccaaataaatcacttttctgc

SEQ ID NO: 314841 - DNA, 1709 bp, Artificial Sequence
  derived and/or modified sequence
aaacagcggacggaggggccggcggtggcggagccggagcaagcaggggttcggcggcattacctgtacccattcaccggcggctaccggcggcggcgcgcagcgtgtcaggcggagagacccgccgccaggaatgaatctgaagtctgctgcagtaaaacacagaaggctttaaaatgttttcttgcataaaattcaaaacttttaagtagctgcttatgagaatagggaaggcagaaagctaatgtctgtctcaagatacaggacagctgtttgctcatcaacctcaactgtgtgtgcaactgaggaacatggctcaagaaactaatcacagccaagtgcctatgctttgttccactggctgtggattttatggaaaccctcgtacaaatggcatgtgttcagtatgctataaagaacatcttcaaagacagaatagtagtaatggtagaataagcccacctgcaacctctgtcagtagtctgtctgaatctttaccagttcaatgcacagatggcagtgtgccagaagcccagtcagcattagactctacatcttcatctatgcagcccagccctgtatcaaatcagtcacttttatcagaatctgtagcatcttctcaattggacagtacatctgtggacaaagcagtacctgaaacagaagatgtgcaggcttcagtatcagacacagcacagcagccatctgaagagcaaagcaagtctcttgaaaaaccgaaacaaaaaaagaatcgctgtttcatgtgcaggaagaaagtgggacttactgggtttgaatgccggtgtggaaatgtttactgtggtgtacaccgttactcagatgtacacaattgctcttacaattacaaagccgatgctgctgagaaaatcagaaaagaaaatccagtagttgttggtgaaaagatccaaaagatttgaactcctgctggaatacaaaattcttgagcatctgcaaactaaaaattgacttgaggttttttttttcctagtcattgggaatgtagagcagtgtatcttgcatgtcatcggaagaatagatttttgttttggttttgttttgaaaatgactctgaacatttatttccattgcaatttctgtggctgaggagacttaaactttacaagtattatccttttaagatcattttaattttagttgagtgcagagggcttttataacaaacgtgcagaaattttggagggctgtgatttttccagtattaaacatgcatgcattaatcttgcagtttattttctcattgtgtatgtatatatcgcttttctctgcagcacgatttctcttttgataatgccctttagggcacaactagttatcagtaactgaatgtatcttaatcattatggctgcttctgttttttcattaacaaaggttattcatatgttagcatatagtttctttgcacccactatttatgtctgaatcatttgtcacaagagagtgtgtgctgatgagattgtaagtttgtgtgtttaaacttttttttgagcgagggaagaaaaagctgtatgcatttcattgctgtctacaggtttctttcagattatgttcatgggtttgtgtgtatacaatatgaagaatgatctgaagtaattgtgctgtatttatgtttattcaccagtctttgattaaattaaatgaaaaaaaaaaaaaaaaaaaaaaaaaaaaa

SEQ ID NO: 314842 - DNA, 909 bp, Artificial Sequence
  derived and/or modified sequence
cagatactttggtgttgaacatttgggatagaagagagaaatttaaaattaaaaattttccatatttctatcacaaatattggtgtgcaactgaggaacatggctcaagaaactaatcacagccaagtgcctatgctttgttccactggctgtggattttatggaaaccctcgtacaaatggcatgtgttcagtatgctataaagaacatcttcaaagacagaatagtagtaatggtagaataagcccacctgcaacctctgtcagtagtctgtctgaatctttaccagttcaatgcacagatggcagtgtgccagaagcccagtcagcattagactctacatcttcatctatgcagcccagccctgtatcaaatcagtcacttttatcagaatctgtagcatcttctcaattggacagtacatctgtggacaaagcagtacctgaaacagaagatgtgcaggcttcagtatcagacacagcacagcagccatctgaagagcaaagcaagtctcttgaaaaaccgaaacaaaaaaagaatcgctgtttcatgtgcaggaagaaagtgggacttactgggtttgaatgccggtgtggaaatgtttactgtggtgtacaccgttactcagatgtacacaattgctcttacaattacaaagccgatgctgctgagaaaatcagaaaagaaaatccagtagttgttggtgaaaagatccaaaagatttgaactcctgctggaatacaaaattcttgagcatctgcaaactaaaaattgacttgaggttttttttttcctagtcattgggaatgtagagcagtgtatcttgcatgtcatcggaagaatagatttttgttttggttttgttttgaaaatgactctgaacatttatttccattgcaatttctgtgg

SEQ ID NO: 314843 - DNA, 1814 bp, Artificial Sequence
  derived and/or modified sequence
aataattagcgggcgggcggggcccgcgcgtcagccgcgggagccggccaatccagtggctctcctccgcggtcgcgtcataggccgaacaaccaaacagaaaagtttaataaacagcggacggaggggccggcggtggcggagccggagcaagcaggggttcggcggcattacctgtacccattcaccggcggctaccggcggcggcgcgcagcgtgtcaggcggagagacccgccgccaggaatgaatctgaagtctgctgcagtaaaacacagaaggctttaaaatgttttcttgcataaaattcaaaacttttaagtagctgcttatgagaatagggaaggcagaaagctaatgtctgtctcaagatacaggacagctgtttgctcatcaacctcaactgtgtgtgcaactgaggaacatggctcaagaaactaatcacagccaagtgcctatgctttgttccactggctgtggattttatggaaaccctcgtacaaatggcatgtgttcagtatgctataaagaacatcttcaaagacagaatagtagtaatggtagaataagcccacctgcaacctctgtcagtagtctgtctgaatctttaccagttcaatgcacagatggcagtgtgccagaagcccagtcagcattagactctacatcttcatctatgcagcccagccctgtatcaaatcagtcacttttatcagaatctgtagcatcttctcaattggacagtacatctgtggacaaagcagtacctgaaacagaagatgtgcaggcttcagtatcagacacagcacagcagccatctgaagagcaaagcaagtctcttgaaaaaccgaaacaaaaaaagaatcgctgtttcatgtgcaggaagaaagtgggacttactgggtttgaatgccggtgtggaaatgtttactgtggtgtacaccgttactcagatgtacacaattgctcttacaattacaaagccgatgctgctgagaaaatcagaaaagaaaatccagtagttgttggtgaaaagatccaaaagatttgaactcctgctggaatacaaaattcttgagcatctgcaaactaaaaattgacttgaggttttttttttcctagtcattgggaatgtagagcagtgtatcttgcatgtcatcggaagaatagatttttgttttggttttgttttgaaaatgactctgaacatttatttccattgcaatttctgtggctgaggagacttaaactttacaagtattatccttttaagatcattttaattttagttgagtgcagagggcttttataacaaacgtgcagaaattttggagggctgtgatttttccagtattaaacatgcatgcattaatcttgcagtttattttctcattgtgtatgtatatatcgcttttctctgcagcacgatttctcttttgataatgccctttagggcacaactagttatcagtaactgaatgtatcttaatcattatggctgcttctgttttttcattaacaaaggttattcatatgttagcatatagtttctttgcacccactatttatgtctgaatcatttgtcacaagagagtgtgtgctgatgagattgtaagtttgtgtgtttaaacttttttttgagcgagggaagaaaaagctgtatgcatttcattgctgtctacaggtttctttcagattatgttcatgggtttgtgtgtatacaatatgaagaatgatctgaagtaattgtgctgtatttatgtttattcaccagtctttgattaaataaaaaggaaaaccagaatgctcccttgta

SEQ ID NO: 314844 - DNA, 1472 bp, Artificial Sequence
  derived and/or modified sequence
ggagcaagcaggggttcggcggcattacctgtacccattcaccggcggctaccggcggcggcgcgcagcgtgtcaggcggagagacccgccgccaggtgtgcaactgaggaacatggctcaagaaactaatcacagccaagtgcctatgctttgttccactggctgtggattttatggaaaccctcgtacaaatggcatgtgttcagtatgctataaagaacatcttcaaagacagaatagtagtaatggtagaataagcccacctgcaacctctgtcagtagtctgtctgaatctttaccagttcaatgcacagatggcagtgtgccagaagcccagtcagcattagactctacatcttcatctatgcagcccagccctgtatcaaatcagtcacttttatcagaatctgtagcatcttctcaattggacagtacatctgtggacaaagcagtacctgaaacagaagatgtgcaggcttcagtatcagacacagcacagcagccatctgaagagcaaagcaagtctcttgaaaaaccgaaacaaaaaaagaatcgctgtttcatgtgcaggaagaaagtgggacttactgggtttgaatgccggtgtggaaatgtttactgtggtgtacaccgttactcagatgtacacaattgctcttacaattacaaagccgatgctgctgagaaaatcagaaaagaaaatccagtagttgttggtgaaaagatccaaaagatttgaactcctgctggaatacaaaattcttgagcatctgcaaactaaaaattgacttgaggttttttttttcctagtcattgggaatgtagagcagtgtatcttgcatgtcatcggaagaatagatttttgttttggttttgttttgaaaatgactctgaacatttatttccattgcaatttctgtggctgaggagacttaaactttacaagtattatccttttaagatcattttaattttagttgagtgcagagggcttttataacaaacgtgcagaaattttggagggctgtgatttttccagtattaaacatgcatgcattaatcttgcagtttattttctcattgtgtatgtatatatcgcttttctctgcagcacgatttctcttttgataatgccctttagggcacaactagttatcagtaactgaatgtatcttaatcattatggctgcttctgttttttcattaacaaaggttattcatatgttagcatatagtttctttgcacccactatttatgtctgaatcatttgtcacaagagagtgtgtgctgatgagattgtaagtttgtgtgtttaaacttttttttgagcgagggaagaaaaagctgtatgcatttcattgctgtctacaggtttctttcagattatgttcatgggtttgtgtgtatacaatatgaagaatgatctgaagtaattgtgctgtatttatgtttattcaccagtctttgatt

SEQ ID NO: 314845 - DNA, 1559 bp, Artificial Sequence
  derived and/or modified sequence
cgcggtcgcgtcataggccgaacaaccaaacagaaaagtttaataaacagcggacggaggggccggcggtggcggagccggagcaagcaggggttcggcggcattacctgtacccattcaccggcggctaccggcggcggcgcgcagcgtgtcaggcggagagacccgccgccagatcaaaagacactgacttagctgcttaccagaaggggaacttgggtgtgcaactgaggaacatggctcaagaaactaatcacagccaagtgcctatgctttgttccactggctgtggattttatggaaaccctcgtacaaatggcatgtgttcagtatgctataaagaacatcttcaaagacagaatagtagtaatggtagaataagcccacctgttcaatgcacagatggcagtgtgccagaagcccagtcagcattagactctacatcttcatctatgcagcccagccctgtatcaaatcagtcacttttatcagaatctgtagcatcttctcaattggacagtacatctgtggacaaagcagtacctgaaacagaagatgtgcaggcttcagtatcagacacagcacagcagccatctgaagagcaaagcaagtctcttgaaaaaccgaaacaaaaaaagaatcgctgtttcatgtgcaggaagaaagtgggacttactgggtttgaatgccggtgtggaaatgtttactgtggtgtacaccgttactcagatgtacacaattgctcttacaattacaaagccgatgctgctgagaaaatcagaaaagaaaatccagtagttgttggtgaaaagatccaaaagatttgaactcctgctggaatacaaaattcttgagcatctgcaaactaaaaattgacttgaggttttttttttcctagtcattgggaatgtagagcagtgtatcttgcatgtcatcggaagaatagatttttgttttggttttgttttgaaaatgactctgaacatttatttccattgcaatttctgtggctgaggagacttaaactttacaagtattatccttttaagatcattttaattttagttgagtgcagagggcttttataacaaacgtgcagaaattttggagggctgtgatttttccagtattaaacatgcatgcattaatcttgcagtttattttctcattgtgtatgtatatatcgcttttctctgcagcacgatttctcttttgataatgccctttagggcacaactagttatcagtaactgaatgtatcttaatcattatggctgcttctgttttttcattaacaaaggttattcatatgttagcatatagtttctttgcacccactatttatgtctgaatcatttgtcacaagagagtgtgtgctgatgagattgtaagtttgtgtgtttaaacttttttttgagcgagggaagaaaaagctgtatgcatttcattgctgtctacaggtttctttcagattatgttcatgggtttgtgtgtatacaatatgaagaatgatctgaagtaattgtgctgtatttatgtttattcaccagtctttgatt

SEQ ID NO: 314846 - DNA, 1602 bp, Artificial Sequence
  derived and/or modified sequence
ggagtacagcttcaagtgaagttaatctgaggtgaagcaaacagaaaattgtggaggttttgttggaatgaatctgaagtctgctgcagtaaaacacagaaggctttaaaatgttttcttgcataaaattcaaaacttttaagtagctgcttatgagaatagggaaggcagaaagctaatgtctgtctcaagatacaggacagctgtttgctcatcaacctcaactgtgtgtgcaactgaggaacatggctcaagaaactaatcacagccaagtgcctatgctttgttccactggctgtggattttatggaaaccctcgtacaaatggcatgtgttcagtatgctataaagaacatcttcaaagacagaatagtagtaatggtagaataagcccacctgcaacctctgtcagtagtctgtctgaatctttaccagttcaatgcacagatggcagtgtgccagaagcccagtcagcattagactctacatcttcatctatgcagcccagccctgtatcaaatcagtcacttttatcagaatctgtagcatcttctcaattggacagtacatctgtggacaaagcagtacctgaaacagaagatgtgcaggcttcagtatcagacacagcacagcagccatctgaagagcaaagcaagtctcttgaaaaaccgaaacaaaaaaagaatcgctgtttcatgtgcaggaagaaagtgggacttactgggtttgaatgccggtgtggaaatgtttactgtggtgtacaccgttactcagatgtacacaattgctcttacaattacaaagccgatgctgctgagaaaatcagaaaagaaaatccagtagttgttggtgaaaagatccaaaagatttgaactcctgctggaatacaaaattcttgagcatctgcaaactaaaaattgacttgaggttttttttttcctagtcattgggaatgtagagcagtgtatcttgcatgtcatcggaagaatagatttttgttttggttttgttttgaaaatgactctgaacatttatttccattgcaatttctgtggctgaggagacttaaactttacaagtattatccttttaagatcattttaattttagttgagtgcagagggcttttataacaaacgtgcagaaattttggagggctgtgatttttccagtattaaacatgcatgcattaatcttgcagtttattttctcattgtgtatgtatatatcgcttttctctgcagcacgatttctcttttgataatgccctttagggcacaactagttatcagtaactgaatgtatcttaatcattatggctgcttctgttttttcattaacaaaggttattcatatgttagcatatagtttctttgcacccactatttatgtctgaatcatttgtcacaagagagtgtgtgctgatgagattgtaagtttgtgtgtttaaacttttttttgagcgagggaagaaaaagctgtatgcatttcattgctgtctacaggtttctttcagattatgttcatgggtttgtgtgtatacaatatgaagaatgatctgaagtaattgtgctgtatttatgtttattcaccagtctttga

SEQ ID NO: 314847 - DNA, 1446 bp, Artificial Sequence
  derived and/or modified sequence
gctttggagtacagcttcaagtgaagttaatctgaggtgaagcaaacagaaaattgtggaggttttgttggtgtgcaactgaggaacatggctcaagaaactaatcacagccaagtgcctatgctttgttccactggctgtggattttatggaaaccctcgtacaaatggcatgtgttcagtatgctataaagaacatcttcaaagacagaatagtagtaatggtagaataagcccacctgcaacctctgtcagtagtctgtctgaatctttaccagttcaatgcacagatggcagtgtgccagaagcccagtcagcattagactctacatcttcatctatgcagcccagccctgtatcaaatcagtcacttttatcagaatctgtagcatcttctcaattggacagtacatctgtggacaaagcagtacctgaaacagaagatgtgcaggcttcagtatcagacacagcacagcagccatctgaagagcaaagcaagtctcttgaaaaaccgaaacaaaaaaagaatcgctgtttcatgtgcaggaagaaagtgggacttactgggtttgaatgccggtgtggaaatgtttactgtggtgtacaccgttactcagatgtacacaattgctcttacaattacaaagccgatgctgctgagaaaatcagaaaagaaaatccagtagttgttggtgaaaagatccaaaagatttgaactcctgctggaatacaaaattcttgagcatctgcaaactaaaaattgacttgaggttttttttttcctagtcattgggaatgtagagcagtgtatcttgcatgtcatcggaagaatagatttttgttttggttttgttttgaaaatgactctgaacatttatttccattgcaatttctgtggctgaggagacttaaactttacaagtattatccttttaagatcattttaattttagttgagtgcagagggcttttataacaaacgtgcagaaattttggagggctgtgatttttccagtattaaacatgcatgcattaatcttgcagtttattttctcattgtgtatgtatatatcgcttttctctgcagcacgatttctcttttgataatgccctttagggcacaactagttatcagtaactgaatgtatcttaatcattatggctgcttctgttttttcattaacaaaggttattcatatgttagcatatagtttctttgcacccactatttatgtctgaatcatttgtcacaagagagtgtgtgctgatgagattgtaagtttgtgtgtttaaacttttttttgagcgagggaagaaaaagctgtatgcatttcattgctgtctacaggtttctttcagattatgttcatgggtttgtgtgtatacaatatgaagaatgatctgaagtaattgtgctgtatttatgtttattcaccagtctttgatt

SEQ ID NO: 314848 - DNA, 891 bp, Artificial Sequence
  derived and/or modified sequence
ggccaatccagtggctctcctccgcggtcgcgtcataggccgaacaaccaaacagaaaagtttaataaacagcggacggaggggccggcggtggcggagccggagcaagcaggggttcggcggcattacctgtacccattcaccggcggctaccggcggcggcgcgcagcgtgtcaggcggagagacccgccgccaggtgtgcaactgaggaacatggctcaagaaactaatcacagccaagtgcctatgctttgttccactggctgtggattttatggaaaccctcgtacaaatggcatgtgttcagtatgctataaagaacatcttcaaagacagaatagtagtaatggtagaataagcccacctgcaacctctgtcagtagtctgtctgaatctttaccagttcaatgcacagatggcagtgtgccagaagcccagtcagcattagactctacatcttcatctatgcagcccagccctgtatcaaatcagtcacttttatcagaatctgtagcatcttctcaattggacagtacatctgtggacaaagcagtacctgaaacagaagatgtgcaggcttcagtatcagacacagcacagcagccatctgaagagcaaagcaagtctcttgaaaaaccgaaacaaaaaaagaatcgctgtttcatgtgcaggaagaaagtgggacttactgggtttgaatgccggtgtggaaatgtttactgtggtgtacaccgttactcagatgtacacaattgctcttacaattacaaagccgatgctgctgagaaaatcagaaaagaaaatccagtagttgttggtgaaaagatccaaaagatttgaactcctgctggaatacaaaattcttgagcatctgcaaactaaaaattgac

SEQ ID NO: 314849 - DNA, 579 bp, Artificial Sequence
  derived and/or modified sequence
atggacagggcccaccgtttgggtcaaacgaagcaggtgaccgtttataggctgatctgcaagggcaccatcgaggagaggattctgcaacgagcaaaggaaaagtcagaaattcagcgcatggtcatctccggaggcaatttcaaacccgacactctcaagcctaaggaagtggtgtcccttctcttagacgacgaggagctcgagaagaaactgcgacttcgccaggaagaaaaaaggcagcaagaggaaacaaaccgggtgaaggagcggaaacggaagagagagaaatatgcagaaaagaagaaaaaggaagacgaactagacggtaagcggcgtaaagagggagtcaacctggtaattcccttcgtcccaagcgctgacaattcaaatttaagcgcagatggcgacgatagtttcatatcagtggattccgccatgcctagccctttttctgagatttctattagtagcgaacttcataccgggagcatacccctcgatgaaagctcaagcctagctccagattcactggtgcgcaaacagggcaaaggcactaacccctctgggggccgatag

SEQ ID NO: 314850 - DNA, 5122 bp, Artificial Sequence
  derived and/or modified sequence
accagcaggccatggacagggcccaccgcttagggcagacaaagcaggttactgtgtaccggctcatctgtaaaggcaccattgaagaacgcattctgcaaagagccaaggagaagagtgagattcagcggatggtgatttcaggtgggaacttcaaaccagataccttgaaacccaaagaggtggttagtcttcttctagacgacgaagagttggagaagaaactgaggctgcggcaggaagagaaacggcaacaggaggaaaccaaccgagtgaaagagcgcaagcggaagcgggaaaagtatgcagagaagaagaaaaaagaagatgaattggatgggaaaaggagaaaagagggtgtgaacctggtgatcccatttgttccctcggctgataactccaacctctctgctgacggagatgactccttcattagcgtggactcagccatgccaagccctttcagtgagatctccatcagcagtgagctgcacactggctccattcccctggacgagagcagcagcctagccccagactctctggtccggaaacagggcaaaggcaccaacccctctggaggacggtaaccatctgggccctccgacttccttcaaccaaaccagggctagagtcctgacctgccagtggtctttggatggcttgccccgtgcagcatcttgcatcctgagtcagaagtggaaatgtccagcaggggaaggacaggcaggtggatggtgtgagcacttttatcatctgtgtctcatcaggagcatctggggtgcctgtaggaggaaggccacagggcatggatcagccccactgcatctcaagtgaactgtatagccaagtcttaaacctctcacggggcaagcctgacacagaccccctttagatgctcaggcatactgtttccatcccgattccactcttcggctctgacacgtcccttgcaaagtctccgcaggtgctgtgaagagccttccatggtagagatttctcttaagagtgtgatttctcatagggctagtaagggagattgtatacctgttgtccacagtcttcaggcagctccccaggtctctgaaccccagagtgtcatcattggagagagcagtgactgcgagagatggtggaggccgctaagcatggtagaggctagaggaagtctatccacaggcagttgtgttcccagcaattcctcccatcctgcatggttcacaccaagagaaccttcagatcctaccagcaaccgtagcaccttccacccaggggactcccagaagccagtagagagaccaggagccacctcaatcagcaggacagcctcactgcccctcttgcagagtcccctttgcccatcctgaatgcacagtctccctgctcatgcccttcagtcccctgcttggctgtatgcactgtctatattgcactgagagaggaagggacagcaggagtgaggtgaagagggcggagagagggggcaggctcggcaccggccctcccagcccggccagcctgagcttgctgccctccagtagagacagaggggcagtgtttgcatgggaggtgtttctgcctgtccctgcctgatgtccctggtggagcaggtacctccgggcgggcaagcctctgatttgcacacctgaaaatcgcggaattgagtttcgatagattgatttttaaaacttttttggagtagggggtataggggaatcatttaatttaaatcattaagattcccctgctcaaacccagattcctgtgtacagatgctatttagagggaatcagaaaaatgccaagccttttctctttgaatgtgctatttttataactgaacttgtacatatgtataaagagagacacatcttccttttactaactggataaaaaaatcttaaataaaatggagtgagataattttatgtaaattgaggtgtctgtggtctttgcagctgcccctccttggaggcaaactagagcccttggtggatgtggcaggatacagggaaagcagagccctcgcctgtgatcagagaggacaggggttggtgggacaaggagtggactgtgggtgtttccttagtagcagaattgattgggcttatgaatttgcctctggccatcagaaaggaagcttgaccaactgtctgacatgcagtggtcaacgcccttgtctccatggtgggctctttatgactcaggacttagaccccaggactgaggtgtgggcggcttggcctaggcgccattaagcagagctacatagtggtcatcttaatagtggcagtgttctcaaagttagctgcactcttaagaatcatgaaagaaaatggtgaaatacattcctaaggatgccagagacatccaggctgtgaaaacttaccttggtgatagttgggaaaagagccctagttcccagcctggcctggcagccagcgtttctctgactgggtgaaacactgataagctcttgtatcacttttgggtagggctcatgtggttcccaagtatgctggctgtgtggcctccctagccttgctcaccctgcacgctgttggtcagggtgggctggctcctgggcagctgatgcccaccacagtcacaaggatcagcctttcttcattgacatcaagtacattactagatactctggatcttgtttatcttgctggtgaacttgaccaaggcctcacacagaataaaccaacatcagaactaagcagctctgcctttacatgctatgtaaagatttttcataagaaaagatagtaatttgaaacctgaattgtcccttaaggcaacgcttctccagtgttaatgtgcacacaaatcaccttgagatcataacatgcaagttctgtttctgaaggtctaggttgaggcttgagactgagtttcttgagaagatcccaggtgatggccatgctgcttgctagtccttggactacccctggaataacaaggccctagggtgccttccagccctgccaagcaggaaaaatctctgctctttgcttatatgcccgcaccccagccaggaagcccggtgcaggaaatactttatttttcctcttacccagcttaatacacctgatgacagaaaatgaaatcctagcatttctagagaaattcaatcccttatatgttttctccatttttgttttgttttttcatttttaaactaactgttcatcattttctccatcacttcctgggtagcacctctgttgggcatgttaggtatgagagaaggcctcagatttgctactgtccctctcctgtgtggcctccaccaagatgcaatatgtcatgaagagtctgtgacccctggactcagtgtttcctgtgcctgtgtccttttattgtgaccaccagactcctggatcagtcatctttctcaactaattcctaagcccctctcagggggcatggagaccgtttggctgctctcccacgcttctctgagactaccagagagtcgcgaaacccccaactggggaggcagcgtgttgaccatgggtgcccagttcagccagcctcatggtgcacattcagaccacttagatggtggggtagggagaaggcaggttgtgttctagagaaagcagagacgtccggttgtcacgaaattgtgtgtccaagtactaaggcggcccactgcctcatcaaaggaccctgaggaagctgggtgcctcccttatctggcctcttcctgcgccctcatttctttcttgcttcaggtcctgggacttagctggcttccctttcctcttcaaaactgccaccacccactctctcgctccagtttctcccccaacccccacccccgtggcaagctgctgggggatggactcctggttctctcctagctgctgccagaagtgagcatcatgcttttcttttttttaaattaaggattttcttgctcatcacaacaaggacaccaggcaaaaacaatactgtatacagagaattacaaagcttgagatacttcacagtcctcacagaatccctgcctacagttcctggcacctttggtgagaaacaaggattcctgagggagaggctcctggactcttacctccttcctagagagctgagttctttcttccagaaaggcatatggaatgtgcatctgtgagtgcccacaaggcctctgctctcctgccacttgggatttcattgttctggcacacaaatctcaaagataaatatgtggcccaaggattggggaggcccctctgggtctgacttggcaacagcctcaggggaagaaggaagggggcacagaggttcaaagttggaggtggtggggagttttctaagtttgctcagctgatgcccccctaaagcagctctgggagagaatgcccggcctcagctcagaatgttccaccctcctaccacccccccagcacatcaccacaaaccccaccctgaactagaggcccaccccccaagctgttcctggctgccagagaagaaaggagctcccctcccatttcccagatgagaggtcccagaagacctatgctgctccatgccttgcacccttgaagagatggtgccagttacctggggatgtctgagcagagtggtggggagagttcaggtccaatggattgtcagtgcagttcagcttcagcagtcttagtttgccttcggcccggtggaattgggaagagcagcataaactcttacctagaatttttctgaatagctaagtctttcagagggctaacattttaacccggtattctaagcaccagaatttggcttggttagaactctcttttaaggatactgtgtcactgcatggctaaacagaacataccgaacataccttaacctttcctaagggcttggggtcatgtgggcatctggtgctctcaggcccactgggacgtactactgtttcccctggattaaatcatgccaacagctacactgccacaaattgtctgtgagacaggattttgctctgtcacccaggctggagtgcaatggtgcaataacagctcactgcagcctcgacctcccaggttcaagcaatcctccctgatcagcctctaccatagtgctggggttccagccacagttcttaagctctgaatagt

SEQ ID NO: 314851 - DNA, 579 bp, Artificial Sequence
  derived and/or modified sequence
atggaccgggcccaccggctgggccagaccaagcaggtgacagtgtaccgcctcatctgcaagggcaccatcgaggagcgcatcctgcagagggccaaggagaagtctgagatccagaggatggtgatcagcggcggcaacttcaagccagacaccctgaagcccaaggaggtggtgtccctgctgctggatgatgaggagctggagaagaagctgcggctgcggcaggaggagaagaggcagcaggaggagaccaacagagtgaaggagaggaagaggaagcgggagaagtatgcagagaagaagaagaaggaggatgagctggatggcaagaggaggaaggagggcgtgaacctggtgatcccctttgtgcccagcgctgacaacagcaacctgtctgcagatggagatgacagcttcatctctgtggacagcgccatgcccagccccttcagcgagatcagcatcagcagcgagctgcacacaggcagcatccccctggatgagagcagcagcctggccccagacagcctggtgaggaagcagggcaagggcaccaaccccagcggcggccgctag

SEQ ID NO: 314852 - DNA, 579 bp, Artificial Sequence
  derived and/or modified sequence
atggaccgggcccaccggctgggccagaccaagcaggtgaccgtgtaccgcctgatatgtaaaggaaccattgaggaacgcattttgcaaagagctaaggaaaagtctgaaattcaacggatggtgatctcaggtgggaactttaaacctgataccctcaagcccaaggaggttgtctcattgcttctcgatgatgaggaactggaaaagaagctgcggcttagacaggaagagaaaaggcagcaggaggaaacgaacagggttaaagaaagaaagagaaaacgggagaagtatgccgaaaaaaagaaaaaagaggacgagctcgatgggaagcggaggaaggaaggcgtgaacctcgttatccctttcgtcccatcggcagacaactccaatctctccgcagatggggacgattcattcatcagtgtggactccgccatgccttccccattctcagagataagcatttcttccgagctgcacacaggtagcatccccctggacgaaagctcatctctcgccccagactccttggtgcgcaaacagggcaagggcacaaacccatcggggggccgctag

SEQ ID NO: 314853 - DNA, 579 bp, Artificial Sequence
  derived and/or modified sequence
atggaccgagcccaccgccttggacaaacaaaacaagtaactgtctaccggctcatatgcaagggcacaatcgaggaacgcatcctgcagcgggcaaaagagaaaagtgagattcaacgtatggtcatttctggcggtaattttaaacccgacacactgaagccaaaagaggtcgtgtctttgctgttggacgatgaggaacttgagaagaaacttcgcctgaggcaggaagaaaagcgccaacaagaggaaacaaaccgagtcaaggagcggaagaggaagagagaaaaatatgcagagaaaaagaagaaagaggatgagctggacgggaagcggagaaaggaaggagtcaacctcgtgatccctttcgtgccgagcgctgataattccaacctctcggctgatggggacgactcctttatttctgtggatagcgcaatgccctctccattcagtgaaattagcatctccagcgagctccatacaggttccatccccctggacgaatccagtagcttagcccctgattcgctggtccggaagcaggggaagggtactaatcccagcggcggtaggtag

SEQ ID NO: 314854 - DNA, 579 bp, Artificial Sequence
  derived and/or modified sequence
atggacagagcccacagactgggccagaccaagcaggtgaccgtgtacagactgatctgcaagggcaccatcgaggagagaatcctgcagagagccaaggagaagagcgagatccagagaatggtgatcagcggcggcaacttcaagcccgacaccctgaagcccaaggaggtggtgagcctgctgctggacgacgaggagctggagaagaagctgagactgagacaggaggagaagagacagcaggaggagaccaacagagtgaaggagagaaagagaaagagagagaagtacgccgagaagaagaagaaggaggacgagctggacggcaagagaagaaaggagggcgtgaacctggtgatccccttcgtgcccagcgccgacaacagcaacctgagcgccgacggcgacgacagcttcatcagcgtggacagcgccatgcccagccccttcagcgagatcagcatcagcagcgagctgcacaccggcagcatccccctggacgagagcagcagcctggcccccgacagcctggtgagaaagcagggcaagggcaccaaccccagcggcggcagatag

SEQ ID NO: 314855 - protein, 995 aa, Artificial Sequence
  derived and/or modified sequence
MSQWTPEYNELYTLKVDMKSEIPSDAPKTQESLKGILLHPEPIGAAKSFPAGVEMINSKVGNEFSHLCDDSQKQEKEMNGNQQEQEKSLVVRKKRKSQQAGPSYVQNCVKENQGILGLRQHLGTPSDEDNDSSFSDCLSSPSSSLHFGDSDTVTSDEDKEVSVRHSQTILNAKSRSHSARSHKWPRTETESVSGLLMKRPCLHGSSLRRLPCRKRFVKNNSSQRTQKQKERILMQRKKREVLARRKYALLPSSSSSSENDLSSESSSSSSTEGEEDLFVSASENHQNNPAVPSGSIDEDVVVIEASSTPQVTANEEINVTSTDSEVEIVTVGESYRSRSTLGHSRSHWSQGSSSHASRPQEPRNRSRISTVIQPLRQNAAEVVDLTVDEDEPTVVPTTSARMESQATSASINNSNPSTSEQASDTASAVTSSQPSTVSETSATLTSNSTTGTSIGDDSRRTTSSAVTETGPPAMPRLPSCCPQHSPCGGSSQNHHALGHPHTSCFQQHGHHFQHHHHHHHTPHPAVPVSPSFSDPACPVERPPQVQAPCGANSSSGTSYHEQQALPVDLSNSGIRSHGSGSFHGASAFDPCCPVSSSRAAIFGHQAAAAAPSQPLSSIDGYGSSMVAQPQPQPPPQPSLSSCRHYMPPPYASLTRPLHHQASACPHSHGNPPPQTQPPPQVDYVIPHPVHAFHSQISSHATSHPVAPPPPTHLASTAAPIPQHLPPTHQPISHHIPATAPPAQRLHPHEVMQRMEVQRRRMMQHPTGLFVFCVSRRAHERPPPHPHRMHPNYGHGHHIHVPQTMSSHPRQAPERSAWELGIEAGVTAATYTPGALHPHLAHYHAPPRLHHLQLGALPLMVPDMAGYPHIRYISSGLDGTSFRGPFRGNFEELIHLEERLGNVNRGASQGTIERCTYPHKYKKRKLHCKQDGEEGTEEDTEEKCTICLSILEEGEDVRRLPCMHLFHQVCVDQWLITNKKCPICRVDIEAQLPSES

SEQ ID NO: 314856 - DNA, 2988 bp, Artificial Sequence
  derived and/or modified sequence
atgagccagtggacccccgagtacaacgagctgtacaccctgaaggtggacatgaagagcgagatccccagcgacgcccccaagacccaggagagcctgaagggcatcctgctgcaccccgagcccatcggcgccgccaagagcttccccgccggcgtggagatgatcaacagcaaggtgggcaacgagttcagccacctgtgcgacgacagccagaagcaggagaaggagatgaacggcaaccagcaggagcaggagaagagcctggtggtgagaaagaagagaaagagccagcaggccggccccagctacgtgcagaactgcgtgaaggagaaccagggcatcctgggcctgagacagcacctgggcacccccagcgacgaggacaacgacagcagcttcagcgactgcctgagcagccccagcagcagcctgcacttcggcgacagcgacaccgtgaccagcgacgaggacaaggaggtgagcgtgagacacagccagaccatcctgaacgccaagagcagaagccacagcgccagaagccacaagtggcccagaaccgagaccgagagcgtgagcggcctgctgatgaagagaccctgcctgcacggcagcagcctgagaagactgccctgcagaaagagattcgtgaagaacaacagcagccagagaacccagaagcagaaggagagaatcctgatgcagagaaagaagagagaggtgctggccagaagaaagtacgccctgctgcccagcagcagcagcagcagcgagaacgacctgagcagcgagagcagcagcagcagcagcaccgagggcgaggaggacctgttcgtgagcgccagcgagaaccaccagaacaaccccgccgtgcccagcggcagcatcgacgaggacgtggtggtgatcgaggccagcagcaccccccaggtgaccgccaacgaggagatcaacgtgaccagcaccgacagcgaggtggagatcgtgaccgtgggcgagagctacagaagcagaagcaccctgggccacagcagaagccactggagccagggcagcagcagccacgccagcagaccccaggagcccagaaacagaagcagaatcagcaccgtgatccagcccctgagacagaacgccgccgaggtggtggacctgaccgtggacgaggacgagcccaccgtggtgcccaccaccagcgccagaatggagagccaggccaccagcgccagcatcaacaacagcaaccccagcaccagcgagcaggccagcgacaccgccagcgccgtgaccagcagccagcccagcaccgtgagcgagaccagcgccaccctgaccagcaacagcaccaccggcaccagcatcggcgacgacagcagaagaaccaccagcagcgccgtgaccgagaccggcccccccgccatgcccagactgcccagctgctgcccccagcacagcccctgcggcggcagcagccagaaccaccacgccctgggccacccccacaccagctgcttccagcagcacggccaccacttccagcaccaccaccaccaccaccacaccccccaccccgccgtgcccgtgagccccagcttcagcgaccccgcctgccccgtggagagacccccccaggtgcaggccccctgcggcgccaacagcagcagcggcaccagctaccacgagcagcaggccctgcccgtggacctgagcaacagcggcatcagaagccacggcagcggcagcttccacggcgccagcgccttcgacccctgctgccccgtgagcagcagcagagccgccatcttcggccaccaggccgccgccgccgcccccagccagcccctgagcagcatcgacggctacggcagcagcatggtggcccagccccagccccagccccccccccagcccagcctgagcagctgcagacactacatgccccccccctacgccagcctgaccagacccctgcaccaccaggccagcgcctgcccccacagccacggcaacccccccccccagacccagccccccccccaggtggactacgtgatcccccaccccgtgcacgccttccacagccagatcagcagccacgccaccagccaccccgtggccccccccccccccacccacctggccagcaccgccgcccccatcccccagcacctgccccccacccaccagcccatcagccaccacatccccgccaccgccccccccgcccagagactgcacccccacgaggtgatgcagagaatggaggtgcagagaagaagaatgatgcagcaccccaccggcctgttcgtgttctgcgtgagcagaagagcccacgagagaccccccccccacccccacagaatgcaccccaactacggccacggccaccacatccacgtgccccagaccatgagcagccaccccagacaggcccccgagagaagcgcctgggagctgggcatcgaggccggcgtgaccgccgccacctacacccccggcgccctgcacccccacctggcccactaccacgccccccccagactgcaccacctgcagctgggcgccctgcccctgatggtgcccgacatggccggctacccccacatcagatacatcagcagcggcctggacggcaccagcttcagaggccccttcagaggcaacttcgaggagctgatccacctggaggagagactgggcaacgtgaacagaggcgccagccagggcaccatcgagagatgcacctacccccacaagtacaagaagagaaagctgcactgcaagcaggacggcgaggagggcaccgaggaggacaccgaggagaagtgcaccatctgcctgagcatcctggaggagggcgaggacgtgagaagactgccctgcatgcacctgttccaccaggtgtgcgtggaccagtggctgatcaccaacaagaagtgccccatctgcagagtggacatcgaggcccagctgcccagcgagagctag

SEQ ID NO: 314857 - DNA, 2988 bp, Artificial Sequence
  derived and/or modified sequence
atgtcacagtggacgccagagtataacgagttgtataccctgaaggtggatatgaaaagtgaaatccccagcgatgccccgaagacacaggagtcgttgaagggcattcttctgcatccagagcccattggcgccgctaagtctttccctgcgggcgtggaaatgatcaactccaaggtgggcaatgagtttagccatctctgtgacgactcgcagaagcaggagaaggagatgaatggcaatcagcaagagcaggagaaatctcttgtagtgcgaaaaaagcggaagagccagcaggctgggccttcctatgtgcagaactgtgtcaaagaaaaccaggggatcctgggacttcgtcagcatcttgggacccctagcgacgaagacaatgatagttccttcagcgactgcctgtcaagcccctccagctccctgcacttcggtgatagtgataccgtcacaagcgacgaagacaaagaggtcagtgtcagacactcgcagaccatactaaacgcaaagtcccgctctcattccgccaggtcgcataaatggccacgcaccgaaactgagtctgttagcggactgcttatgaaacggccctgccttcacgggtccagcttgcgtagactgccttgcagaaagcgcttcgtcaagaacaacagtagtcagaggacccagaaacagaaggaacggatactgatgcagagaaaaaaacgggaggttctggcccgcaggaaatacgccctcctgccaagctcctctagctcctcggaaaatgatttatcttcggagtccagttcctcatcatccacagagggcgaagaagacttgtttgtgtcagcatccgagaaccaccaaaacaaccccgctgtcccgtccggttcaatcgacgaagatgtggtggttatcgaggccagttctaccccgcaggtgaccgcgaatgaggaaattaacgtgacgtcaacagattccgaagtagaaatcgtgaccgttggagaaagttaccggtcacgctcaacactgggccacagtcgctcccattggagtcaggggtcgtcctcccatgctagtaggccacaggaaccacgcaacagaagcaggataagcaccgtgattcagccacttagacaaaacgcagccgaggtggttgatctgacagtcgatgaggacgaacccaccgtcgtccccacgaccagcgcacggatggagagtcaggccacctcagcctccatcaacaacagtaacccctccactagcgaacaggcctctgatactgcgtccgccgtgacttcgtcacagcccagtactgtcagtgaaacgtcagcgacgctgacgtctaacagcacaactgggacgagcattggcgacgacagcagacgcacaaccagcagcgcagttaccgagactgggcccccagcaatgcccaggcttccatcctgctgtccacagcacagcccttgtgggggaagcagccaaaaccatcacgcattgggacacccccatacctcctgcttccagcagcacgggcaccattttcagcatcaccatcaccaccaccacaccccccaccccgcagtgcccgtgtcgccatccttctccgatcccgcgtgccctgttgagcgccccccccaggttcaagcgccctgcggtgctaattcatcatccggcactagctatcacgaacaacaggccttgcccgtcgatctctcaaactctggcatacgcagccacggttccggcagttttcatggagcctcagctttcgatccctgctgtcctgtttcgtcttccagagctgcaatcttcggacaccaggccgctgcggcagcgccgagccagccgctgagttcaatagatggatacgggtcctccatggtggcccagccccagccccagccacctccccagcctagtctgtcaagctgtcgtcactacatgcctcctccctatgctagcctgactaggcctttgcaccaccaggcctccgcctgcccccactctcatggcaaccccccccctcagactcagcctccgcctcaagtagattatgtgatacctcatcccgttcacgcgtttcacagccagatcagtagccatgccacgtctcaccctgtggcgcctcccccgccaacccatctggcctctaccgcagctcccattccccaacatttaccaccaactcatcaacctatcagccaccatattcccgcaactgctccccccgcacaacgcctgcatcctcatgaggttatgcagcgaatggaagtgcaacgcagacggatgatgcaacaccctaccggactatttgttttctgcgtgtcccgcagggcccacgagcgccctcctcctcaccctcacaggatgcaccctaactatgggcacggccaccacatccatgttccacagactatgagttcacatcccaggcaggctcccgagagatctgcttgggaactaggtatagaagccggtgtcaccgccgctacttacaccccaggggctctccaccctcacctggctcactaccatgcccctccccgattacaccacctccaactgggggccctacctttgatggtgcctgatatggccggatacccacacatccgatacatttcaagcggactggatggaacatcctttcgggggccgtttcggggtaactttgaagaattaattcaccttgaggagagactaggtaatgtcaacaggggcgccagccagggaactatcgagcggtgcacttacccgcataagtataagaagcggaagctgcactgtaagcaggacggggaagaggggacagaggaagataccgaggagaagtgcaccatttgtttatcgatattggaagagggggaggacgtgcgaagactaccttgtatgcatctgtttcaccaagtatgtgttgatcaatggcttatcactaataaaaaatgtcccatctgtagagtggatatcgaggcccagttgcccagtgagagctag

SEQ ID NO: 314858 - DNA, 2988 bp, Artificial Sequence
  derived and/or modified sequence
atgagccagtggaccccagagtacaatgagctgtacaccctgaaggtggacatgaagtctgagatccccagtgatgcccccaagacccaggagagcctgaagggcatcctgctgcaccctgagcccatcggggccgccaagagcttccctgctggggtggagatgatcaacagcaaggtgggcaatgagttcagccacctgtgtgatgacagccagaagcaggagaaggagatgaatggaaaccagcaggagcaggagaagagcctggtggtgaggaagaagaggaagagccagcaggccggccccagctatgtgcagaactgtgtgaaggagaaccagggcatcctgggcctgcggcagcacctgggcacccccagtgatgaggacaatgacagcagcttcagtgactgcctgagcagccccagcagcagcctgcactttggagacagcgacacagtgaccagtgatgaggacaaggaggtgtctgtgcgccacagccagaccatcctgaatgccaagagccgcagccacagcgcccggagccacaagtggcccaggacagaaacagaatctgtgtctggcctgctgatgaagaggccctgcctgcacggcagcagcctgcggcggctgccctgcaggaagagatttgtgaagaacaacagcagccagaggacccagaagcagaaggagcgcatcctgatgcagaggaagaagcgggaggtgctggcccggaggaaatatgccctgctgcccagcagcagcagcagcagtgaaaatgacctgagcagcgagagcagcagcagcagcagcacagaaggagaggaggacctgtttgtgtctgccagcgagaaccaccagaacaacccagctgtgcccagcggcagcattgatgaagatgtggtggtgattgaggccagcagcaccccccaggtgacagccaatgaggagatcaacgtgaccagcacagacagcgaggtggagatcgtgacagtgggggagagctaccgcagccgcagcaccctgggccacagccgcagccactggagccagggcagcagcagccacgccagccggccccaggagcccaggaacagaagccgcatcagcaccgtcatccagcccctgcggcagaatgctgctgaggtggtggacctgactgtggatgaagatgagcccaccgtggtgcccaccaccagcgccaggatggagagccaggccaccagcgccagcatcaacaacagcaaccccagcaccagcgagcaggccagtgacacagccagcgctgtgaccagcagccagcccagcacagtgtctgagaccagcgccaccctgaccagcaacagcaccaccggcaccagcattggagatgacagcaggaggaccaccagcagcgctgtgacagaaacaggccccccagccatgccccggctgcccagctgctgcccccagcacagcccctgtggcggcagcagccagaaccaccacgccctgggccacccccacaccagctgcttccagcagcacggccaccacttccagcaccaccaccaccaccaccacaccccccaccctgctgtgcctgtgagccccagcttcagtgaccctgcctgccctgtggagcggcccccccaggtgcaggccccctgtggggccaacagcagcagcggcaccagctaccacgagcagcaggccctgcctgtggacctgagcaacagcggcatccgcagccacggcagcggcagcttccatggagccagcgcctttgacccctgctgccctgtgagcagcagcagagctgccatcttcggccaccaggccgctgctgctgcccccagccagcccctgagcagcattgatggctacggcagctccatggtggcccagccccagccccagcccccaccccagcccagcctgagcagctgccgccactacatgcccccaccctatgccagcctgacccggcccctgcaccaccaggccagcgcctgcccccacagccacggcaaccccccaccccagacccagcccccaccccaggtggactatgtgatcccccaccctgtgcacgccttccacagccagatcagcagccacgccaccagccaccctgtggcccctcctccacccacccacctggccagcacagctgcccccatcccccagcacctgccccccacccaccagcccatcagccaccacatcccagccacagcccccccagcccagaggctgcacccccatgaggtgatgcagaggatggaggtgcagaggaggaggatgatgcagcaccccaccggcctgtttgtgttctgtgtgtccagaagagcccacgagcggcccccaccccacccccacaggatgcaccccaactacggccacggccaccacatccacgtgccccagaccatgagcagccacccccggcaggcccctgagaggtctgcctgggagctgggcattgaagctggggtgacagctgccacctacacccctggggccctgcacccccacctggcccactaccacgccccaccccggctgcaccacctgcagctgggcgccctgcccctgatggtgcctgacatggccggctacccccacatccgctacatcagcagcggcctggatggcaccagcttccggggccccttccggggcaactttgaggagctgatccacctggaggagcggctgggcaatgtgaacagaggagccagccagggcaccatcgagcgctgcacctacccccacaagtacaagaagaggaagctgcactgcaagcaggatggagaggagggcacagaggaggacacagaggagaagtgcaccatctgcctgagcatcctggaggagggggaggatgtgcggcggctgccctgcatgcacctgttccaccaggtgtgtgtggaccagtggctgatcaccaacaagaagtgccccatctgccgggtggacatcgaggcccagctgcccagcgagagctag

SEQ ID NO: 314859 - DNA, 2988 bp, Artificial Sequence
  derived and/or modified sequence
atgagccagtggacccccgagtacaacgagctgtacaccctgaaggtggatatgaagtctgagataccttccgatgctcccaagacccaggaatctcttaaaggcatcctgttacaccctgaaccaataggggccgctaagtcctttccagccggagtagaaatgatcaattccaaagtgggtaacgagttctctcatctttgtgacgactcacagaagcaggagaaggaaatgaatggtaatcagcaagagcaggaaaagagcttagtggtgaggaaaaaaaggaaaagtcagcaggcaggtccttcttatgtacagaactgcgtaaaggagaatcagggaatcctcggtctacgccaacacctcgggacaccgtcggatgaggacaacgactctagcttctcggactgcctatcttcaccatccagtagtctgcactttggggactcagatacagttaccagcgatgaggataaagaggtgagcgtacgtcactcccagactatactgaacgccaagtccaggtcacactctgcgcgctctcacaagtggcccaggactgagactgagtctgtctctggcctgttaatgaagcggccctgtctgcacgggtcatcattgagacgcttgccgtgtaggaagaggtttgtgaaaaacaacagctctcagagaacgcagaagcagaaagagcgaatcctgatgcagcgcaagaagcgagaggtgctggccaggagaaaatacgctctgctgccttctagttcctcctcgagtgagaatgatctgtcttccgagtctagttcgagctcaagcaccgagggtgaagaagatttgttcgtgtctgcatccgaaaaccatcagaataaccctgctgtgccctctggttccatagatgaggacgtggtggttattgaggctagttcaaccccacaggtgaccgctaacgaagaaataaatgtaactagcaccgacagcgaggtggaaattgtaacggtgggcgagtcatataggtccaggtcaaccctaggccattctagaagccactggtctcagggcagctcctctcacgcctcaaggccacaggaaccacgcaatagatcaaggatttcgacagtcatccagccactgagacagaacgctgccgaagtagtggatctgaccgtggacgaggacgagcctacagttgtgccaacaacctccgccaggatggaaagccaggccacatctgcatctatcaataattcaaatcccagcaccagcgaacaggcctcagatactgccagtgccgtgacctcaagccagcccagcaccgtttcagaaacatctgccacgttgaccagcaacagtactaccggcaccagtattggcgacgacagcagaaggaccacctccagtgccgtgacggaaacaggtcctcctgcgatgcctcggctcccctcctgttgtccacaacattctccgtgcggcggttcttcacagaaccaccacgcactaggccacccccacaccagctgtttccagcagcatggacaccactttcagcaccaccaccatcaccaccacactcctcaccctgcagtgccagtctcgccttcgttttcggaccccgcctgtcccgtcgaacggcctccccaggtgcaagccccttgcggtgcaaattcatccagtggaacctcctatcatgagcagcaggccttgcctgtggacctatccaactctggcattcgttcccacggcagcggctcttttcacggagcttctgcattcgacccttgctgcccagtctcaagctctcgagccgccatctttgggcaccaggcggcagctgccgctccatcccaacccctgtcctccatagacggatacgggtcaagcatggtagcccaaccccagcctcagccccctcctcagccgtcgctgagcagctgtaggcattacatgccacctccatatgcttcccttaccaggccacttcaccatcaggcctcggcatgcccccactcccacggcaacccgcctcctcaaacgcaaccaccaccccaagttgattatgtcattccccacccggttcacgccttccactcacagatctcttcacatgcgacaagccatccggtcgccccgcctccgcccactcatcttgcttccaccgcagcccccattcctcagcacctcccccctacgcatcaaccaattagccaccacatcccggccaccgctccccctgcgcagcggcttcatcctcacgaagtaatgcagcggatggaagtgcagagacgaaggatgatgcagcacccaactggtctgttcgtgttttgtgtgagtcggagggcgcatgaacgtcccccgccacacccccatcggatgcaccctaattacggccacgggcaccacatccacgttccacagaccatgtcgtcgcatccccggcaagctcctgagagatcagcatgggaattgggtattgaggctggcgtaaccgcagctacatacaccccaggcgccctccatccgcatctcgcacattatcacgcgcccccccgcctccaccaccttcagttgggcgcattgcccctgatggtcccggatatggccggatacccgcatatccgctacatctcaagtggcctcgacggcacctcctttcgcggccctttccgcggtaatttcgaggagctgatccatctggaggagagacttggtaatgtgaacaggggcgcaagccagggcaccatcgaacgctgtacatatcctcacaagtacaagaagagaaaactccactgtaagcaggatggggaggaaggaacagaggaggacacggaggaaaagtgcacaatttgcctgtcaatcctcgaagagggagaggatgtgagaaggctgccttgcatgcacctcttccaccaagtttgtgtcgaccagtggctaattacaaacaaaaagtgccctatatgtagagttgacatcgaagctcagcttccaagcgaatcatag

SEQ ID NO: 314860 - DNA, 2988 bp, Artificial Sequence
  derived and/or modified sequence
atgtcacagtggacccccgaatacaatgagctatatactctgaaagttgatatgaagtcggaaatccccagcgacgcacccaaaacccaagagagcctgaaagggatactgctacaccccgaacccattggagccgcaaaatcgtttcccgctggggttgagatgattaactccaaggtgggtaatgaatttagccatttgtgcgatgatagccaaaagcaggaaaaggaaatgaacgggaatcaacaggagcaggaaaaatccctggtggtgaggaagaagcgtaagtcacagcaggcaggtccatcatacgtgcagaactgcgttaaggagaaccagggcattctaggcctgagacaacaccttggtacccccagcgatgaggataatgatagcagcttttctgactgcctcagctcccccagctctagcctgcacttcggagatagcgacacagttacttcagacgaggataaggaagtcagcgtgagacactcgcagacaatcctgaacgctaagagtagaagccacagcgcaagatctcacaagtggcctcggacagagacagagtccgtctctggattgctgatgaaaaggccatgtctccacgggtcctctctcagaaggctgccatgtaggaaacgattcgtaaagaacaacagcagccagagaacacaaaagcagaaagagaggatcttaatgcaaaggaaaaagagggaagtactggccaggaggaagtacgccttgctcccttccagtagctctagttcagagaacgatttgtcctccgaaagctcttcttcatcctctaccgaaggagaagaagacctgttcgtaagtgcaagtgagaaccatcagaacaaccccgctgtaccgagcggtagcattgatgaagacgtagtggtcatagaggcatctagcacacctcaggtcacagccaacgaagagatcaacgtcacctccaccgactcagaagtggaaatagttacggtcggcgagtcgtaccgctctagaagcactttaggccacagtcgctcgcactggagccagggctcttcgtctcatgcgtctaggccccaagagcctaggaaccgcagccgcatctccaccgtgattcagccacttcgacagaacgccgcagaagtggtcgatctgactgtagacgaggatgaacctacagtggtgccaacaacctcagcaagaatggagtcccaagcaaccagtgcatccatcaataactccaacccatccacaagtgagcaggcctccgataccgcatccgctgtgacgtcttcccagccctctacggtctccgagacgtctgccacactgactagtaactccactacaggaacgagtatcggggatgacagtaggcggactactagctccgcagtaacagagactggccctcccgctatgcctagactgcccagctgttgtccacagcatagtccatgcggtgggtctagccagaaccaccacgccttaggccatccccacacttcttgtttccaacagcatggccatcacttccagcaccaccaccatcaccaccatactccccatcctgctgtgcccgttagcccaagtttttcagatccagcatgtccagttgagaggcctcctcaagtgcaggctccgtgcggcgcaaacagttccagcggcacatcgtatcacgagcagcaggctttgcctgtggatctcagtaacagcggtattcgcagccacggtagcgggtcctttcatggcgcatccgcattcgacccctgctgtcccgtgagctctagtagggcggctatcttcggacatcaggctgccgctgcagctccgtcccagcctctgtcatccatcgatggatacggatcttctatggtcgcccagccccagccccagcccccacctcaaccgagcctgagcagttgtcggcactacatgccgccaccctatgcttcactgacgaggccactgcatcaccaagccagcgcctgtccgcactcccacggcaacccccctccgcagacacagcctccaccccaggtggactatgtgataccgcatccagtgcatgctttccattcacagatctctagccatgcaacatcgcacccggtggccccaccaccccctacgcacctcgcctccactgcggcacccattccccaacacctaccccctacccaccagcccatcagtcatcacattcccgctaccgcccctcctgctcagaggctccacccacacgaagtgatgcagcggatggaagtgcagcgtcgaagaatgatgcagcatcctacaggcctcttcgtgttctgtgtctcgcgcagagcccatgagcgacctccaccccatccacaccgaatgcaccctaattacggacatggacaccacatccatgtcccacagacgatgtcaagtcacccaagacaggcgcctgaaaggagcgcatgggaactcggaatagaggcaggggtgaccgcggcaacatacacgccaggggcactacatccgcacctggctcactaccatgcccctccacggttgcatcacctgcagttgggcgctttgcctctgatggtgccggacatggctggttatccacacatcaggtatatatcctccggcctggatgggacaagcttccggggaccatttagaggaaatttcgaggagctcatccacttggaagaacgcctgggcaacgtgaataggggagcttcgcaggggactattgaacgctgtacttacccccacaagtataagaaaaggaagttacattgtaagcaggatggagaggagggtactgaagaagacacagaagagaagtgcacgatctgtctttcaatacttgaggagggggaggacgttagacgactcccttgcatgcaccttttccatcaggtctgcgtagaccaatggcttattaccaacaagaaatgcccgatttgtagagtcgacatcgaggctcagctacctagcgaatcctag

SEQ ID NO: 314861 - protein, 994 aa, Artificial Sequence
  derived and/or modified sequence
MSQWTPEYNELYTLKVDMKSEIPSDAPKTQESLKGILLHPEPIGAAKSFPAGVEMINSKVGNEFSHLCDDSQKQEKEMNGNQQEQEKSLVVRKKRKSQQAGPSYVQNCVKENQGILGLRQHLGTPSDEDNDSSFSDCLSSPSSSLHFGDSDTVTSDEDKEVSVRHSQTILNAKSRSHSARSHKWPRTETESVSGLLMKRPCLHGSSLRRLPCRKRFVKNNSSQRTQKQKERILMQRKKREVLARRKYALLPSSSSSSENDLSSESSSSSSTEGEEDLFVSASENHQNNPAVPSGSIDEDVVVIEASSTPQVTANEEINVTSTDSEVEIVTVGESYRSRSTLGHSRSHWSQGSSSHASRPQEPRNRSRISTVIQPLRQNAAEVVDLTVDEDEPTVVPTTSARMESQATSASINNSNPSTSEQASDTASAVTSSQPSTVSETSATLTSNSTTGTSIGDDSRRTTSSAVTETGPPAMPRLPSCCPQHSPCGGSSQNHHALGHPHTSCFQQHGHHFQHHHHHHHTPHPAVPVSPSFSDPACPVERPPQVQAPCGANSSSGTSYHEQQALPVDLSNSGIRSHGSGSFHGASAFDPCCPVSSSRAAIFGHQAAAAAPSQPLSSIDGYGSSMVAQPQPQPPPQPSLSSCRHYMPPPYASLTRPLHHQASACPHSHGNPPPQTQPPPQVDYVIPHPVHAFHSQISSHATSHPVAPPPPTHLASTAAPIPQHLPPTHQPISHHIPATAPPAQRLHPHEVMQRMEVQRRRMMQHPTRAHERPPPHPHRMHPNYGHGHHIHVPQTMSSHPRQAPERSAWELGIEAGVTAATYTPGALHPHLAHYHAPPRLHHLQLGALPLMVPDMAGYPHIRYISSGLDGTSFRGPFRGNFEELIHLEERLGNVNRGASQGTIERCTYPHKYKKVTTDWFSQRKLHCKQDGEEGTEEDTEEKCTICLSILEEGEDVRRLPCMHLFHQVCVDQWLITNKKCPICRVDIEAQLPSES

SEQ ID NO: 314862 - DNA, 2985 bp, Artificial Sequence
  derived and/or modified sequence
atgagccagtggacccccgagtacaacgagctgtacaccctgaaggtggacatgaagagcgagatccccagcgacgcccccaagacccaggagagcctgaagggcatcctgctgcaccccgagcccatcggcgccgccaagagcttccccgccggcgtggagatgatcaacagcaaggtgggcaacgagttcagccacctgtgcgacgacagccagaagcaggagaaggagatgaacggcaaccagcaggagcaggagaagagcctggtggtgagaaagaagagaaagagccagcaggccggccccagctacgtgcagaactgcgtgaaggagaaccagggcatcctgggcctgagacagcacctgggcacccccagcgacgaggacaacgacagcagcttcagcgactgcctgagcagccccagcagcagcctgcacttcggcgacagcgacaccgtgaccagcgacgaggacaaggaggtgagcgtgagacacagccagaccatcctgaacgccaagagcagaagccacagcgccagaagccacaagtggcccagaaccgagaccgagagcgtgagcggcctgctgatgaagagaccctgcctgcacggcagcagcctgagaagactgccctgcagaaagagattcgtgaagaacaacagcagccagagaacccagaagcagaaggagagaatcctgatgcagagaaagaagagagaggtgctggccagaagaaagtacgccctgctgcccagcagcagcagcagcagcgagaacgacctgagcagcgagagcagcagcagcagcagcaccgagggcgaggaggacctgttcgtgagcgccagcgagaaccaccagaacaaccccgccgtgcccagcggcagcatcgacgaggacgtggtggtgatcgaggccagcagcaccccccaggtgaccgccaacgaggagatcaacgtgaccagcaccgacagcgaggtggagatcgtgaccgtgggcgagagctacagaagcagaagcaccctgggccacagcagaagccactggagccagggcagcagcagccacgccagcagaccccaggagcccagaaacagaagcagaatcagcaccgtgatccagcccctgagacagaacgccgccgaggtggtggacctgaccgtggacgaggacgagcccaccgtggtgcccaccaccagcgccagaatggagagccaggccaccagcgccagcatcaacaacagcaaccccagcaccagcgagcaggccagcgacaccgccagcgccgtgaccagcagccagcccagcaccgtgagcgagaccagcgccaccctgaccagcaacagcaccaccggcaccagcatcggcgacgacagcagaagaaccaccagcagcgccgtgaccgagaccggcccccccgccatgcccagactgcccagctgctgcccccagcacagcccctgcggcggcagcagccagaaccaccacgccctgggccacccccacaccagctgcttccagcagcacggccaccacttccagcaccaccaccaccaccaccacaccccccaccccgccgtgcccgtgagccccagcttcagcgaccccgcctgccccgtggagagacccccccaggtgcaggccccctgcggcgccaacagcagcagcggcaccagctaccacgagcagcaggccctgcccgtggacctgagcaacagcggcatcagaagccacggcagcggcagcttccacggcgccagcgccttcgacccctgctgccccgtgagcagcagcagagccgccatcttcggccaccaggccgccgccgccgcccccagccagcccctgagcagcatcgacggctacggcagcagcatggtggcccagccccagccccagccccccccccagcccagcctgagcagctgcagacactacatgccccccccctacgccagcctgaccagacccctgcaccaccaggccagcgcctgcccccacagccacggcaacccccccccccagacccagccccccccccaggtggactacgtgatcccccaccccgtgcacgccttccacagccagatcagcagccacgccaccagccaccccgtggccccccccccccccacccacctggccagcaccgccgcccccatcccccagcacctgccccccacccaccagcccatcagccaccacatccccgccaccgccccccccgcccagagactgcacccccacgaggtgatgcagagaatggaggtgcagagaagaagaatgatgcagcaccccaccagagcccacgagagaccccccccccacccccacagaatgcaccccaactacggccacggccaccacatccacgtgccccagaccatgagcagccaccccagacaggcccccgagagaagcgcctgggagctgggcatcgaggccggcgtgaccgccgccacctacacccccggcgccctgcacccccacctggcccactaccacgccccccccagactgcaccacctgcagctgggcgccctgcccctgatggtgcccgacatggccggctacccccacatcagatacatcagcagcggcctggacggcaccagcttcagaggccccttcagaggcaacttcgaggagctgatccacctggaggagagactgggcaacgtgaacagaggcgccagccagggcaccatcgagagatgcacctacccccacaagtacaagaaggtgaccaccgactggttcagccagagaaagctgcactgcaagcaggacggcgaggagggcaccgaggaggacaccgaggagaagtgcaccatctgcctgagcatcctggaggagggcgaggacgtgagaagactgccctgcatgcacctgttccaccaggtgtgcgtggaccagtggctgatcaccaacaagaagtgccccatctgcagagtggacatcgaggcccagctgcccagcgagagctag

SEQ ID NO: 314863 - DNA, 2985 bp, Artificial Sequence
  derived and/or modified sequence
atgtcccagtggacccccgaatacaacgagctctacacattaaaggttgacatgaagtctgagatcccctcagatgctcccaagacacaggaatctttgaaaggtattctgttgcatcccgaacccattggggcagcgaaatcctttccagcaggagtggaaatgattaattccaaagtcggaaatgaattcagtcacctgtgcgacgatagtcagaaacaggagaaggaaatgaatgggaaccagcaggaacaggagaagtcattggttgtgagaaagaagaggaaatcccagcaggcagggcccagttacgtacagaattgcgtcaaagaaaaccaggggattctgggcctgcggcagcatctgggcactccaagtgatgaggacaatgatagttccttctctgactgcctatccagcccgagctccagtttgcattttggagactccgacactgtcacctccgatgaggacaaggaggtaagtgtgagacattcccagacaatccttaatgcgaaaagtagatcccatagtgcacggagtcataaatggccacgcaccgaaacggagagcgtgtcaggactgctgatgaaaagaccttgcctgcacggctcctcactgaggaggctgccatgtcgaaagcgtttcgtgaagaacaacagtagtcagcgcacccagaagcagaaggaacgaattctgatgcagcgcaaaaagcgggaagtgctggcccgccgtaaatatgccctcttacccagctcttcctcatcaagcgagaacgatctgagtagtgaatcttcctcgagcagcagcaccgaaggtgaagaagacctctttgtatctgctagcgaaaaccaccagaacaacccggcagttccgagtggatcgatcgatgaggacgtggtggtgatcgaggcttcctctactccacaagtgacggctaacgaggagattaatgtgacctctacagactctgaggttgaaattgtaactgtgggagagtcctaccggtcgagatccaccttaggtcatagccgcagccactggtcccagggctcctcctctcatgcatcacggccacaggagccacggaataggagccgaatctcaacggtgatacaacccttacggcagaatgccgccgaagtggtggatctgaccgtggatgaggacgagcccaccgtcgtgcctaccacctccgcaaggatggaatcccaagccacaagcgccagcattaataatagtaacccgtctacatcagaacaggcctccgataccgcgtccgcagtcacctcttctcagccgagtactgtcagtgaaacgagcgctacactcacatcaaattctaccactggtacatcaataggtgatgacagcaggcgaacaacgtcatctgccgtcaccgaaacagggccaccggccatgccaaggctgcctagttgttgccctcagcattcgccctgtggcggctctagccagaaccatcacgctcttggccacccccacacatcatgtttccagcagcacggtcatcactttcagcaccaccaccaccaccaccatacaccacatcctgccgtgccagtgtccccgtcttttagcgaccccgcgtgtccagtcgagaggcctccccaggtacaggccccgtgtggagccaatagttccagtgggacgagctaccatgagcagcaagccttgcctgtagacctttcaaactcaggtatccgttcccacggctcagggagcttccatggagcctccgccttcgatccctgttgcccagttagttcaagcagggcagcgatattcggacaccaggctgccgcagcagccccaagccagccactgtcgagtatcgatggctatggtagctctatggtggcacaaccccagccccagccacccccgcagcccagtttgagctcctgtaggcattacatgcccccaccttatgccagtctgactcggcccctccaccaccaagcctccgcctgccctcattcacacggcaacccacccccccaaacacagcctcctccacaagtggattacgtgattccgcatccagtccatgccttccatagccagatatccagtcatgccacttctcatcctgtggcaccccctcccccaacacacctagcttcgacagcagcacctatcccccagcatctgccgcctacccatcagccgatttctcatcacattccagccacagccccccccgctcagcgtctccatccccacgaagttatgcagagaatggaggtacagcggcgccgtatgatgcagcatcccacccgtgctcatgagcgccctcctcctcacccgcaccgcatgcaccctaactacggacacggccatcacattcacgtgccccagaccatgtcctcccatccacggcaggcacccgaacgatctgcctgggaactgggcattgaggcgggtgtgactgctgctacctacactcctggagccctccacccccacctggcacactatcacgccccacctcgactgcatcatctccagctgggcgcgctgccacttatggtgccagatatggcaggctacccgcatataagatacatttcatctggcttagacgggacctcatttaggggacctttccgtgggaacttcgaagaactaattcacctggaagagaggctgggcaacgtgaaccggggagcgtcccaggggaccatcgagaggtgcacctatccacataagtacaaaaaggttacgacagattggttttcacagagaaaactccactgcaagcaagatggagaggagggcaccgaggaagacacagaggaaaagtgtaccatttgcctgagcatcctggaggaaggggaggatgtccggcggctgccctgcatgcatctttttcatcaagtctgtgtggatcagtggctgattaccaacaaaaaatgccctatttgccgggtggacatcgaggcccaactcccaagtgagagctag

SEQ ID NO: 314864 - DNA, 2985 bp, Artificial Sequence
  derived and/or modified sequence
atgagccagtggaccccagagtacaatgagctgtacaccctgaaggtggacatgaagtctgagatccccagtgatgcccccaagacccaggagagcctgaagggcatcctgctgcaccctgagcccatcggggccgccaagagcttccctgctggggtggagatgatcaacagcaaggtgggcaatgagttcagccacctgtgtgatgacagccagaagcaggagaaggagatgaatggaaaccagcaggagcaggagaagagcctggtggtgaggaagaagaggaagagccagcaggccggccccagctatgtgcagaactgtgtgaaggagaaccagggcatcctgggcctgcggcagcacctgggcacccccagtgatgaggacaatgacagcagcttcagtgactgcctgagcagccccagcagcagcctgcactttggagacagcgacacagtgaccagtgatgaggacaaggaggtgtctgtgcgccacagccagaccatcctgaatgccaagagccgcagccacagcgcccggagccacaagtggcccaggacagaaacagaatctgtgtctggcctgctgatgaagaggccctgcctgcacggcagcagcctgcggcggctgccctgcaggaagagatttgtgaagaacaacagcagccagaggacccagaagcagaaggagcgcatcctgatgcagaggaagaagcgggaggtgctggcccggaggaaatatgccctgctgcccagcagcagcagcagcagtgaaaatgacctgagcagcgagagcagcagcagcagcagcacagaaggagaggaggacctgtttgtgtctgccagcgagaaccaccagaacaacccagctgtgcccagcggcagcattgatgaagatgtggtggtgattgaggccagcagcaccccccaggtgacagccaatgaggagatcaacgtgaccagcacagacagcgaggtggagatcgtgacagtgggggagagctaccgcagccgcagcaccctgggccacagccgcagccactggagccagggcagcagcagccacgccagccggccccaggagcccaggaacagaagccgcatcagcaccgtcatccagcccctgcggcagaatgctgctgaggtggtggacctgactgtggatgaagatgagcccaccgtggtgcccaccaccagcgccaggatggagagccaggccaccagcgccagcatcaacaacagcaaccccagcaccagcgagcaggccagtgacacagccagcgctgtgaccagcagccagcccagcacagtgtctgagaccagcgccaccctgaccagcaacagcaccaccggcaccagcattggagatgacagcaggaggaccaccagcagcgctgtgacagaaacaggccccccagccatgccccggctgcccagctgctgcccccagcacagcccctgtggcggcagcagccagaaccaccacgccctgggccacccccacaccagctgcttccagcagcacggccaccacttccagcaccaccaccaccaccaccacaccccccaccctgctgtgcctgtgagccccagcttcagtgaccctgcctgccctgtggagcggcccccccaggtgcaggccccctgtggggccaacagcagcagcggcaccagctaccacgagcagcaggccctgcctgtggacctgagcaacagcggcatccgcagccacggcagcggcagcttccatggagccagcgcctttgacccctgctgccctgtgagcagcagcagagctgccatcttcggccaccaggccgctgctgctgcccccagccagcccctgagcagcattgatggctacggcagctccatggtggcccagccccagccccagcccccaccccagcccagcctgagcagctgccgccactacatgcccccaccctatgccagcctgacccggcccctgcaccaccaggccagcgcctgcccccacagccacggcaaccccccaccccagacccagcccccaccccaggtggactatgtgatcccccaccctgtgcacgccttccacagccagatcagcagccacgccaccagccaccctgtggcccctcctccacccacccacctggccagcacagctgcccccatcccccagcacctgccccccacccaccagcccatcagccaccacatcccagccacagcccccccagcccagaggctgcacccccatgaggtgatgcagaggatggaggtgcagaggaggaggatgatgcagcaccccacccgggcccacgagcggcccccaccccacccccacaggatgcaccccaactacggccacggccaccacatccacgtgccccagaccatgagcagccacccccggcaggcccctgagaggtctgcctgggagctgggcatcgaggccggcgtgacagctgccacctacacccctggggccctgcacccccacctggcccactaccacgccccaccccggctgcaccacctgcagctgggcgccctgcccctgatggtgcctgacatggccggctacccccacatccgctacatcagcagcggcctggatggcaccagcttccggggccccttccggggcaactttgaggagctgatccacctggaggagcggctgggcaatgtgaacagaggagccagccagggcaccatcgagcgctgcacctacccccacaagtacaagaaggtgaccacagactggttcagccagaggaagctgcactgcaagcaggatggagaggagggcacagaggaggacacagaggagaagtgcaccatctgcctgagcatcctggaggagggagaagatgtgcggcggctgccctgcatgcacctgttccaccaggtgtgtgtggaccagtggctgatcaccaacaagaagtgccccatctgccgggtggacatcgaggcccagctgcccagcgagagctag

SEQ ID NO: 314865 - DNA, 2985 bp, Artificial Sequence
  derived and/or modified sequence
atgagccagtggacccccgagtacaacgagctgtacaccctgaaggtggacatgaagagcgaaatcccatccgatgccccaaaaacccaagaatcgcttaagggaatcctgttgcaccccgagcccatcggcgccgcaaaatcatttccggctggcgttgaaatgattaatagcaaggtaggaaacgagttcagccacctttgcgacgactcacaaaaacaggagaaagagatgaacggaaatcagcaagagcaggagaaaagtctcgtagtcagaaagaaaaggaagtctcaacaggcaggcccgtcttatgttcagaactgcgtgaaggaaaaccaaggcattctggggttgagacagcatctcgggacaccctccgatgaggacaatgactctagtttctcagactgcctgtcgtcacccagctcatccctccacttcggagatagcgatacggttacgtctgatgaagataaggaagtgtccgtacggcactctcagaccatcctgaacgccaagagcagaagccactctgccagaagccacaagtggcccaggactgaaactgaaagcgtttccggtttactgatgaagcgtccgtgcctgcatgggtcctccctgcggagactgccctgtaggaagagattcgtgaagaacaacagcagtcaacggacacaaaaacagaaagagcgtatcttaatgcagcgcaagaaacgcgaagtcttggctcgccgcaaatatgcactgcttccatcttcatcatcatctagcgaaaacgaccttagcagcgagtcttcgagctcatcaagtaccgaaggtgaagaagatctgttcgtatccgcttccgaaaaccaccagaacaacccagctgtaccttcaggctccattgacgaggacgtggtagtgatcgaggcatcttctacaccccaggtgacagcgaatgaggagattaatgtgacctccacggactcagaggttgaaatcgttacagtgggcgagtcttatcggtcgcggagcaccctggggcacagtagatcacactggtctcagggctccagtagccatgcaagccgtcctcaggaacctcgaaaccgctctcgaatttctaccgtcatccagcccttacgacagaatgcagcagaggtggtggaccttacagtcgacgaggatgaaccaacagttgtgcctaccacttccgctaggatggaatcccaggccacctctgcatctattaacaattccaacccttctacaagcgaacaggcttctgacaccgcaagcgccgtaacctcttcgcaaccaagcacagtttcggagacctccgctactctgacgtctaattccactacagggacaagcatcggggacgactcacgacgaaccacttcctccgccgttacggagaccgggcccccagcaatgcccaggttgccttcttgttgcccacaacacagtccatgtggagggtcttcacagaaccaccacgcccttggccatccccacacaagttgtttccagcagcacggacaccatttccagcaccaccatcaccatcaccatacgcctcaccccgccgttcctgtgagcccttcattttccgatccggcctgtccagtggagagaccacctcaggttcaggcaccctgcggcgcaaacagctccagcgggacttcataccatgaacagcaggctttaccggtagatctcagcaatagcgggattcggtctcacggttccgggagttttcacggcgctagcgcctttgacccatgttgcccagtgtcaagcagtcgggctgctatctttggacaccaggctgcagctgctgccccaagtcagcctctatcctcaatcgatggatatggaagtagcatggtggctcaacctcagccccagccacctccccagcccagcctgtctagttgtcggcattacatgccaccaccatacgcttctctcacccgcccactccaccatcaggcctctgcctgtccacactcccatggaaatccaccacctcaaacacagcccccccctcaggtggactacgttattcctcatcctgtgcacgcatttcactcccagatctcgagccacgcaacctcacatccagtggccccacctccccccacccatctggcttctacagcggccccaattccacagcacctgccccccactcatcaacctatttcccatcacatccctgccactgccccacccgcacagagattgcacccccacgaagtcatgcagcggatggaagtgcagcggcggcgtatgatgcagcatcccacaagggcccatgagagacctcctccacacccacaccgcatgcatcccaactatggacacggacaccacattcatgtgcctcagaccatgtcatcccacccacgacaggcccctgaaaggtcggcttgggagttgggtatcgaagctggtgtgacggctgcaacctacacacccggggccctgcacccccatttggctcactatcatgctccccctagactgcaccacctgcagctgggagctctgccactgatggtgcccgacatggctggctacccccatatccggtatatcagctccggcctggatgggacatccttcaggggtccctttcgtggcaactttgaggagctgatccacctggaggaaaggttagggaatgtaaacagaggggcttcgcagggtactatcgaacgatgcacgtacccacacaaatataagaaagtcactaccgactggttttcccagcgtaaactccactgcaagcaagacggtgaggaagggactgaagaggacacagaggaaaagtgcacaatctgcctgagtatcctcgaggagggcgaggacgtccgccgcttaccttgtatgcacctattccaccaggtttgcgtggatcagtggctcattaccaacaaaaaatgcccgatctgccgcgtcgacatcgaggcacagctgccttctgagtcatag

SEQ ID NO: 314866 - DNA, 2985 bp, Artificial Sequence
  derived and/or modified sequence
atgagccagtggacacccgagtataacgaactgtataccctcaaagtggatatgaaatcagagatcccgtccgatgcccctaaaacgcaggaaagtctgaaaggtattctgcttcatccggagcctatcggcgctgccaagtcgttccccgcaggtgtggaaatgataaactctaaggtgggcaacgaattctcccatctctgcgatgactcccaaaaacaggagaaggagatgaacgggaatcagcaagaacaggaaaagagcctggtcgtgcggaagaagagaaaaagccagcaagcaggaccttcctacgtgcagaattgcgtgaaagagaaccagggcatccttggactgcgccaacacttgggcacaccgtccgatgaggataacgacagttctttcagcgactgcctgagcagccctagcagttcccttcactttggcgattcagataccgtcactagcgatgaagataaagaagtaagtgtgagacatagccaaaccatactgaacgctaaaagcaggtcccactccgccaggtctcataaatggccgagaaccgagaccgaaagtgtgtccggactcctgatgaagaggccatgcctccatggctcttcattgcgcagactgccttgtagaaagagattcgtaaaaaacaattccagtcagcgcactcagaaacagaaggagaggatactaatgcagcgtaagaagagagaagtgctagcgagacgcaaatacgccctccttcctagttcatcttcttcctccgagaacgacttgagttcagagtctagttcatcctctagtactgagggcgaagaagacctgttcgtgagcgcttctgagaaccaccagaacaatccagccgttccatcggggtccatagacgaagacgttgtagttatcgaggcttcttctaccccacaagtaacagcaaacgaggaaatcaatgtgacctccactgactcagaggtggagatagtgactgtcggcgagtcctaccggtcaaggtccactctgggacattcacgatcccactggtcccaaggcagtagttctcatgcgtctaggccacaagagcctcgtaaccgaagcaggatctcgaccgttatccagcctctgcgccagaatgctgccgaagttgtagatctgaccgtagacgaggatgagcccacagtcgtccctacgactagcgcaagaatggaatctcaggcaactagcgctagcattaataactcgaacccatctactagcgaacaggcctccgatacagcttctgccgtcaccagcagccaaccgagtaccgtcagcgaaacatcagctactcttacctctaactctacaactggcacgagcatcggcgatgactccagaaggaccactagttccgctgtcacagaaactggaccgccagccatgccgaggctgccctcctgttgcccgcagcactctccatgcggagggtccagtcagaaccaccacgcacttggccatccacacacgtcttgtttccaacagcatgggcatcactttcagcatcaccaccatcaccaccacaccccacatcctgctgttcctgtgagtcctagcttctcagatcctgcatgccctgtagaaaggcctcctcaggttcaggcaccatgcggagctaactcgtcgtccggcacttcttaccacgagcagcaggccttgcccgtggacctgagtaattctgggatcagaagccacggaagcggtagctttcatggcgctagtgcatttgacccttgctgccctgttagtagttcgagagcagctatttttggccaccaggcagcagcagctgcaccgtcacagccgctctcctcgatagacggctacggctctagcatggtggcacagccacaaccacagcctcctccccagccgagtctatcctcttgtcgccattacatgcccccaccctatgctagccttactcgacccctccaccatcaggcttccgcatgcccccactcgcacggaaatcccccaccacaaacacagccgcctccccaagtcgactatgtgataccccaccctgtgcatgccttccacagccagatctcttctcacgcgacatcccatcccgtagctccaccaccccctacacacctcgcttcaaccgctgctccaatcccgcagcacctgcctcccacacaccaacccatatcgcatcacattcctgccacagcccctcccgctcagcgactccacccgcacgaggtcatgcagcggatggaggttcaacgaaggaggatgatgcagcaccctacacgcgctcacgagcgcccacccccacatcctcaccggatgcatccaaactacggtcatggtcatcatatacacgtaccccagactatgtctagccaccctcgacaggcaccagagaggagcgcctgggagctggggatcgaggctggcgtgacagccgctacatacacacctggcgctctgcacccccaccttgcacattatcatgctcctcctcgcctgcaccacttacagttaggcgcactgcctctcatggtgcccgacatggccggttatccccatatcagatacatcagttcaggcctggacgggacctccttccgcggaccctttaggggcaattttgaggagctgattcatctcgaagagagacttggtaacgtgaataggggggctagtcagggaaccatcgagagatgcacctatccacataaatataagaaggtgactaccgactggttctctcagaggaagctgcactgtaaacaggatggcgaggagggcacagaagaggacacagaggagaaatgtaccatctgcctgtccatcctggaagagggtgaagacgtcaggcgattaccctgcatgcacctgtttcatcaggtgtgtgtcgatcagtggctgatcactaataaaaagtgcccaatctgtcgggttgacatcgaagcccagttgcctagcgagtcctag

SEQ ID NO: 314867 - DNA, 324 bp, Artificial Sequence
  derived and/or modified sequence
atgaccggcagaatggccaccctggagaagagccacagcagcgcctgctggagaaagagaagcagcagaacctgcgtggagcccgacagaacccaggacgccatccacgagcccagaggcctgagcagaagccacaccgtgctgagacacagacacttcgtgttcctgcccctgagcagcggcgcccaccccagcgtgccccccagaagaaagaactgcgccatgaagaacggcaagctgctgagaagctgcagcagcgtgagaagagccgccgacaagctggactggggcagattcttcctgcaggacctgcagagcgtgtag

SEQ ID NO: 314868 - protein, 986 aa, Artificial Sequence
  derived and/or modified sequence
MSQWTPEYNELYTLKVDMKSEIPSDAPKTQESLKGILLHPEPIGAAKSFPAGVEMINSKVGNEFSHLCDDSQKQEKEMNGNQQEQEKSLVVRKKRKSQQAGPSYVQNCVKENQGILGLRQHLGTPSDEDNDSSFSDCLSSPSSSLHFGDSDTVTSDEDKEVSVRHSQTILNAKSRSHSARSHKWPRTETESVSGLLMKRPCLHGSSLRRLPCRKRFVKNNSSQRTQKQKERILMQRKKREVLARRKYALLPSSSSSSENDLSSESSSSSSTEGEEDLFVSASENHQNNPAVPSGSIDEDVVVIEASSTPQVTANEEINVTSTDSEVEIVTVGESYRSRSTLGHSRSHWSQGSSSHASRPQEPRNRSRISTVIQPLRQNAAEVVDLTVDEDEPTVVPTTSARMESQATSASINNSNPSTSEQASDTASAVTSSQPSTVSETSATLTSNSTTGTSIGDDSRRTTSSAVTETGPPAMPRLPSCCPQHSPCGGSSQNHHALGHPHTSCFQQHGHHFQHHHHHHHTPHPAVPVSPSFSDPACPVERPPQVQAPCGANSSSGTSYHEQQALPVDLSNSGIRSHGSGSFHGASAFDPCCPVSSSRAAIFGHQAAAAAPSQPLSSIDGYGSSMVAQPQPQPPPQPSLSSCRHYMPPPYASLTRPLHHQASACPHSHGNPPPQTQPPPQVDYVIPHPVHAFHSQISSHATSHPVAPPPPTHLASTAAPIPQHLPPTHQPISHHIPATAPPAQRLHPHEVMQRMEVQRRRMMQHPTRAHERPPPHPHRMHPNYGHGHHIHVPQTMSSHPRQAPERSAWELGIEAGVTAATYTPGALHPHLAHYHAPPRLHHLQLGALPLMVPDMAGYPHIRYISSGLDGTSFRGPFRGNFEELIHLEERLGNVNRGASQGTIERCTYPHKYKKRKLHCKQDGEEGTEEDTEEKCTICLSILEEGEDVRRLPCMHLFHQVCVDQWLITNKKCPICRVDIEAQLPSES

SEQ ID NO: 314869 - protein, 131 aa, Artificial Sequence
  derived and/or modified sequence
MSQWTPEYNELYTLKVDMKSEIPSDAPKTQESLKGILLHPEPIGAAKSFPAGVEMINSKVGNEFSHLCDDSQKQEKEMNGNQQEQEKSLVVRKKRKSQQAGPSYVQNCVKENQGILGLRQHLGTPSDEDND

SEQ ID NO: 314870 - DNA, 2961 bp, Artificial Sequence
  derived and/or modified sequence
atgagccagtggacccccgagtacaacgagctgtacaccctgaaggtggacatgaagagcgagatccccagcgacgcccccaagacccaggagagcctgaagggcatcctgctgcaccccgagcccatcggcgccgccaagagcttccccgccggcgtggagatgatcaacagcaaggtgggcaacgagttcagccacctgtgcgacgacagccagaagcaggagaaggagatgaacggcaaccagcaggagcaggagaagagcctggtggtgagaaagaagagaaagagccagcaggccggccccagctacgtgcagaactgcgtgaaggagaaccagggcatcctgggcctgagacagcacctgggcacccccagcgacgaggacaacgacagcagcttcagcgactgcctgagcagccccagcagcagcctgcacttcggcgacagcgacaccgtgaccagcgacgaggacaaggaggtgagcgtgagacacagccagaccatcctgaacgccaagagcagaagccacagcgccagaagccacaagtggcccagaaccgagaccgagagcgtgagcggcctgctgatgaagagaccctgcctgcacggcagcagcctgagaagactgccctgcagaaagagattcgtgaagaacaacagcagccagagaacccagaagcagaaggagagaatcctgatgcagagaaagaagagagaggtgctggccagaagaaagtacgccctgctgcccagcagcagcagcagcagcgagaacgacctgagcagcgagagcagcagcagcagcagcaccgagggcgaggaggacctgttcgtgagcgccagcgagaaccaccagaacaaccccgccgtgcccagcggcagcatcgacgaggacgtggtggtgatcgaggccagcagcaccccccaggtgaccgccaacgaggagatcaacgtgaccagcaccgacagcgaggtggagatcgtgaccgtgggcgagagctacagaagcagaagcaccctgggccacagcagaagccactggagccagggcagcagcagccacgccagcagaccccaggagcccagaaacagaagcagaatcagcaccgtgatccagcccctgagacagaacgccgccgaggtggtggacctgaccgtggacgaggacgagcccaccgtggtgcccaccaccagcgccagaatggagagccaggccaccagcgccagcatcaacaacagcaaccccagcaccagcgagcaggccagcgacaccgccagcgccgtgaccagcagccagcccagcaccgtgagcgagaccagcgccaccctgaccagcaacagcaccaccggcaccagcatcggcgacgacagcagaagaaccaccagcagcgccgtgaccgagaccggcccccccgccatgcccagactgcccagctgctgcccccagcacagcccctgcggcggcagcagccagaaccaccacgccctgggccacccccacaccagctgcttccagcagcacggccaccacttccagcaccaccaccaccaccaccacaccccccaccccgccgtgcccgtgagccccagcttcagcgaccccgcctgccccgtggagagacccccccaggtgcaggccccctgcggcgccaacagcagcagcggcaccagctaccacgagcagcaggccctgcccgtggacctgagcaacagcggcatcagaagccacggcagcggcagcttccacggcgccagcgccttcgacccctgctgccccgtgagcagcagcagagccgccatcttcggccaccaggccgccgccgccgcccccagccagcccctgagcagcatcgacggctacggcagcagcatggtggcccagccccagccccagccccccccccagcccagcctgagcagctgcagacactacatgccccccccctacgccagcctgaccagacccctgcaccaccaggccagcgcctgcccccacagccacggcaacccccccccccagacccagccccccccccaggtggactacgtgatcccccaccccgtgcacgccttccacagccagatcagcagccacgccaccagccaccccgtggccccccccccccccacccacctggccagcaccgccgcccccatcccccagcacctgccccccacccaccagcccatcagccaccacatccccgccaccgccccccccgcccagagactgcacccccacgaggtgatgcagagaatggaggtgcagagaagaagaatgatgcagcaccccaccagagcccacgagagaccccccccccacccccacagaatgcaccccaactacggccacggccaccacatccacgtgccccagaccatgagcagccaccccagacaggcccccgagagaagcgcctgggagctgggcatcgaggccggcgtgaccgccgccacctacacccccggcgccctgcacccccacctggcccactaccacgccccccccagactgcaccacctgcagctgggcgccctgcccctgatggtgcccgacatggccggctacccccacatcagatacatcagcagcggcctggacggcaccagcttcagaggccccttcagaggcaacttcgaggagctgatccacctggaggagagactgggcaacgtgaacagaggcgccagccagggcaccatcgagagatgcacctacccccacaagtacaagaagagaaagctgcactgcaagcaggacggcgaggagggcaccgaggaggacaccgaggagaagtgcaccatctgcctgagcatcctggaggagggcgaggacgtgagaagactgccctgcatgcacctgttccaccaggtgtgcgtggaccagtggctgatcaccaacaagaagtgccccatctgcagagtggacatcgaggcccagctgcccagcgagagctag

SEQ ID NO: 314871 - DNA, 2961 bp, Artificial Sequence
  derived and/or modified sequence
atgtcacagtggacgccagaatataacgagctatacacacttaaggtcgacatgaaaagtgagatcccttcagacgcgccaaaaacacaggagtccctgaagggaatcctgctccaccctgagcccattggggccgcaaaatccttcccggcgggagtcgagatgatcaactcaaaggtcggtaacgagttttctcacctatgtgacgatagccaaaagcaggagaaggagatgaatggtaaccagcaagaacaggagaaaagtctcgttgtgcggaagaaacggaaatctcagcaggctggcccatcttatgttcagaactgtgtgaaagaaaaccaaggcattcttggtctgaggcaacacctaggcacccccagcgacgaagataatgacagctcttttagtgactgtctatcctctcccagcagtagcttacattttggggacagcgataccgttacgagcgatgaggacaaggaggttagcgttaggcactcccaaacgatcctgaatgccaagtctagaagccacagcgcccggtctcacaagtggccccgaactgagactgagtctgtgagcggactgctcatgaagcgcccttgcttgcacggcagtagtctaagacggttaccttgtcggaaacgattcgtgaaaaacaattctagccagaggacacagaaacaaaaggagcgcatcttaatgcaacgtaaaaagagagaggtcttggctcggcgcaaatacgccttgcttccatcaagctcctcgtcgtccgagaatgacctgagttccgaatcttccagctccagctccaccgagggagaggaggacctcttcgtaagcgcttctgaaaaccaccagaataaccctgcagttccatcggggtcaatcgatgaggacgtggtggtgattgaggcctctagcacaccgcaggtgaccgccaacgaagaaattaacgtaacatcaacagatagtgaagtcgagatcgtgacagtcggggaatcttacaggagccggagtactctaggccactcacgctcccactggtcccagggttcctcttcacacgcatcacggccccaagagccacggaaccggagcaggatctcgactgttattcagcccctgcgacaaaatgcggctgaggttgtggatctcactgttgatgaagacgagcctacggtggtgccgaccacttccgcacgcatggaaagccaggcaacttctgcctcgattaacaattccaatcccagcacttctgagcaagcctccgacacagccagcgctgtcacttcatcccagcctagcaccgtgagcgagacgtcggccactttgacatctaatagcaccacaggaacatctataggcgatgactctcggagaaccacctcctcagccgttactgaaaccggcccccctgcgatgcccagactgccctcttgctgcccccagcacagtccttgcggggggagcagtcagaaccaccacgcgcttggacaccctcacacaagctgcttccaacagcacgggcaccacttccaacaccatcaccaccaccaccataccccgcatcctgccgtgcccgtgtcacccagcttcagcgaccccgcctgtcccgtcgaacgcccccctcaggttcaggctccttgcggagccaacagttcatcagggacttcctatcatgaacaacaggcactgccggttgatctgagcaatagtggcatccgctcacacggtagcggctccttccacggagcctccgccttcgacccttgttgccctgtgtccagtagtcgtgccgccatattcggacatcaggctgccgcagccgcaccatctcaaccactctcctctattgatggatatggaagttcaatggttgcacagccacagccacagcccccgccacagccaagtctgagcagctgtcgccactacatgcctccaccatatgcatcccttaccaggcctctgcaccatcaggctagtgcatgtccacattcccacggtaatccccctccccagactcaaccgccacctcaggtcgattatgtgatcccacatccagtacatgcattccattcccagatcagctcccatgcaacatctcacccagtggcgcccccaccacctacgcacctggcctccaccgccgcccccatcccacaacatttgccgccaacgcatcaacccatttcacaccacattcctgccacagcccctccagcacaacgcttgcatccacatgaggtcatgcagcgaatggaggtccaaaggcggcggatgatgcaacaccccacaagggcccatgaaaggccgccccctcacccccacaggatgcaccctaactacggccatgggcatcacatccacgtcccgcagaccatgagctcccatcctagacaagctccggaacgctcggcatgggaattagggattgaggcaggagtaacagcggccacgtacactccaggagcgctccacccccacctggctcattatcatgcacccccacggctccatcacctccaacttggcgctctccctctgatggtcccggatatggcgggctacccgcacataaggtacattagcagcgggctggacgggacatcctttcgtggaccgtttagaggtaacttcgaggagctgatccacctcgaagagagactgggcaatgtgaatcgcggtgccagccagggcactattgaacgatgcacctatccccacaagtataaaaagcggaaactacactgtaagcaggacggggaagagggcaccgaagaggacacagaagagaagtgcacaatctgtctatccatcctagaagaaggcgaggatgtgcgccgtctgccctgtatgcacctgttccaccaggtgtgtgttgaccagtggttgatcacaaacaaaaagtgtccaatttgtagggtggatattgaagcccagctgccctcagagagctag

SEQ ID NO: 314872 - DNA, 2961 bp, Artificial Sequence
  derived and/or modified sequence
atgagccagtggaccccagagtacaatgagctgtacaccctgaaggtggacatgaagtctgagatccccagtgatgcccccaagacccaggagagcctgaagggcatcctgctgcaccctgagcccatcggggccgccaagagcttccctgctggggtggagatgatcaacagcaaggtgggcaatgagttcagccacctgtgtgatgacagccagaagcaggagaaggagatgaatggaaaccagcaggagcaggagaagagcctggtggtgaggaagaagaggaagagccagcaggccggccccagctatgtgcagaactgtgtgaaggagaaccagggcatcctgggcctgcggcagcacctgggcacccccagtgatgaggacaatgacagcagcttcagtgactgcctgagcagccccagcagcagcctgcactttggagacagcgacacagtgaccagtgatgaggacaaggaggtgtctgtgcgccacagccagaccatcctgaatgccaagagccgcagccacagcgcccggagccacaagtggcccaggacagaaacagaatctgtgtctggcctgctgatgaagaggccctgcctgcacggcagcagcctgcggcggctgccctgcaggaagagatttgtgaagaacaacagcagccagaggacccagaagcagaaggagcgcatcctgatgcagaggaagaagcgggaggtgctggcccggaggaaatatgccctgctgcccagcagcagcagcagcagtgaaaatgacctgagcagcgagagcagcagcagcagcagcacagaaggagaggaggacctgtttgtgtctgccagcgagaaccaccagaacaacccagctgtgcccagcggcagcattgatgaagatgtggtggtgattgaggccagcagcaccccccaggtgacagccaatgaggagatcaacgtgaccagcacagacagcgaggtggagatcgtgacagtgggggagagctaccgcagccgcagcaccctgggccacagccgcagccactggagccagggcagcagcagccacgccagccggccccaggagcccaggaacagaagccgcatcagcaccgtcatccagcccctgcggcagaatgctgctgaggtggtggacctgactgtggatgaagatgagcccaccgtggtgcccaccaccagcgccaggatggagagccaggccaccagcgccagcatcaacaacagcaaccccagcaccagcgagcaggccagtgacacagccagcgctgtgaccagcagccagcccagcacagtgtctgagaccagcgccaccctgaccagcaacagcaccaccggcaccagcattggagatgacagcaggaggaccaccagcagcgctgtgacagaaacaggccccccagccatgccccggctgcccagctgctgcccccagcacagcccctgtggcggcagcagccagaaccaccacgccctgggccacccccacaccagctgcttccagcagcacggccaccacttccagcaccaccaccaccaccaccacaccccccaccctgctgtgcctgtgagccccagcttcagtgaccctgcctgccctgtggagcggcccccccaggtgcaggccccctgtggggccaacagcagcagcggcaccagctaccacgagcagcaggccctgcctgtggacctgagcaacagcggcatccgcagccacggcagcggcagcttccatggagccagcgcctttgacccctgctgccctgtgagcagcagcagagctgccatcttcggccaccaggccgctgctgctgcccccagccagcccctgagcagcattgatggctacggcagctccatggtggcccagccccagccccagcccccaccccagcccagcctgagcagctgccgccactacatgcccccaccctatgccagcctgacccggcccctgcaccaccaggccagcgcctgcccccacagccacggcaaccccccaccccagacccagcccccaccccaggtggactatgtgatcccccaccctgtgcacgccttccacagccagatcagcagccacgccaccagccaccctgtggcccctcctccacccacccacctggccagcacagctgcccccatcccccagcacctgccccccacccaccagcccatcagccaccacatcccagccacagcccccccagcccagaggctgcacccccatgaggtgatgcagaggatggaggtgcagaggaggaggatgatgcagcaccccacccgggcccacgagcggcccccaccccacccccacaggatgcaccccaactacggccacggccaccacatccacgtgccccagaccatgagcagccacccccggcaggcccctgagaggtctgcctgggagctgggcatcgaggccggcgtgacagctgccacctacacccctggggccctgcacccccacctggcccactaccacgccccaccccggctgcaccacctgcagctgggcgccctgcccctgatggtgcctgacatggccggctacccccacatccgctacatcagcagcggcctggatggcaccagcttccggggccccttccggggcaactttgaggagctgatccacctggaggagcggctgggcaatgtgaacagaggagccagccagggcaccatcgagcgctgcacctacccccacaagtacaagaagaggaagctgcactgcaagcaggatggagaggagggcacagaggaggacacagaggagaagtgcaccatctgcctgagcatcctggaggagggagaagatgtgcggcggctgccctgcatgcacctgttccaccaggtgtgtgtggaccagtggctgatcaccaacaagaagtgccccatctgccgggtggacatcgaggcccagctgcccagcgagagctag

SEQ ID NO: 314873 - DNA, 2961 bp, Artificial Sequence
  derived and/or modified sequence
atgagccagtggacccccgagtacaacgagctgtacaccctgaaggtcgacatgaaaagcgaaatcccatctgatgccccaaagacccaggagtctctcaagggtatattgctccaccctgaaccaattggagcagccaagtcttttccggctggagtggaaatgatcaactcaaaggttgggaacgaatttagccatctgtgcgatgattcacagaagcaggaaaaggaaatgaacggaaaccagcaagagcaggaaaaatctcttgtcgtgcgcaaaaagcgaaaaagccagcaggctgggcccagctacgtgcaaaactgcgtcaaggagaaccaagggatcctgggccttaggcaacatctgggcactccctcggacgaagacaacgattctagtttctccgactgtctctcttccccctcatcatccctgcacttcggcgatagcgatactgttacaagcgacgaggacaaggaggtcagtgtgcgccatagtcagaccattctgaatgccaagagtcgcagccattctgcccgcagccataagtggccgaggacagaaaccgagtcagtatccggattactcatgaagcggccatgcttgcatggcagctctctgagaaggctgccgtgcaggaaacgcttcgtgaagaataatagttcccagagaacacagaagcaaaaggaaagaattttaatgcaaaggaaaaagcgggaggtgctggcaagacggaagtacgcccttcttcccagcagcagctccagtagcgagaacgacctgagctccgaatcttcgagctctagctcgactgaaggcgaggaagacttgttcgtcagtgctagcgagaatcatcaaaacaatccggccgtgccctccgggtccatagacgaggacgtggtcgttatcgaagccagttcaaccccgcaagtgactgctaatgaggagataaatgtcacgagtaccgactccgaggtggagattgtgacagtgggcgagtcatacagatccaggtccacacttggccacagtaggagccactggagccagggatccagttcccacgcctccagaccccaggaaccccggaacaggtctcggatttctactgtgatacagcctctgcggcagaacgcggcagaggtcgtggacctgacggtcgatgaggacgagcccactgtagtgcctacaacttctgctagaatggaaagccaagcaactagcgcttctattaacaattccaacccctctacctctgagcaggcgtctgacaccgctagcgctgttactagcagccagcccagtacagtgtcagaaacctccgcaacgttaacctctaactccacaaccggcacatctataggggacgatagtcggagaacaacttcatccgccgtgactgagaccggtcccccagcgatgcctcggttgccatcttgttgcccccagcactccccttgcggtggatcttcccaaaaccaccatgccctgggccaccctcacacgtcatgcttccaacaacacggacatcattttcagcaccatcaccatcaccatcatacccctcatccagccgttcccgtttctccttctttcagcgacccagcttgcccggtggaaagaccacctcaggtgcaagccccatgcggggccaacagctcctcaggaacctcttatcatgagcagcaggcactgccagttgacctgagcaattcaggcatacgctcccacggctctggctccttccatggtgcaagcgctttcgatccctgttgtcccgtctcttcaagtcgcgcagccattttcggccaccaggcggctgcagctgcaccttcgcagcccctgagtagcatcgatggctacggaagttcaatggttgcacaaccgcagccccaaccccctccacagccaagcctcagctcctgtcgtcactatatgcctcctccttacgcctccctgacacggcctttgcatcatcaggcctctgcctgcccgcacagccacggcaatccccccccccagacccagcctcctcctcaggtagactacgtcatcccacaccctgtgcacgctttccactcgcaaatctcatctcatgcaacaagccatccagtggctcccccacctccaacacatttagcttcaaccgctgccccaattcctcagcaccttcctccgactcaccaacccataagtcaccatatacctgccactgcacccccagcacaaagactgcaccctcacgaagtgatgcagagaatggaggtgcaacgtcggagaatgatgcagcaccccacacgggcacacgaacggcctcccccccatccgcaccggatgcaccccaattacgggcatggacaccacatccacgtgcctcagaccatgtcatcacacccgaggcaggccccagagaggtctgcctgggagttaggcatagaggccggggtcactgccgccacttataccccaggcgccctacaccctcatctggctcactatcatgccccacctagacttcatcacctgcagctgggagccttacctctaatggtgcccgatatggcgggttatcctcacataaggtatatctcttccggcctcgatgggacaagctttaggggcccattccgagggaactttgaagaactcatccatctcgaagaacggctgggaaatgtcaaccggggtgctagccaggggaccattgaaaggtgtacgtatccccataagtataagaagcggaagcttcattgcaagcaggatggtgaagaagggactgaagaagatacagaggaaaaatgcacgatatgcctctccattctggaagagggggaggacgtcagacggttgccgtgcatgcacctatttcatcaggtttgcgttgaccagtggctcataacaaacaagaaatgtcctatatgtcgagttgatatagaggcccagctaccgagtgagtcatag

SEQ ID NO: 314874 - DNA, 2961 bp, Artificial Sequence
  derived and/or modified sequence
atgtctcagtggacaccagaatataatgagctgtacaccctcaaagtcgacatgaaatccgagatcccctccgacgcccctaaaacacaggaatctctcaagggaatcttgctgcatcctgaacccatcggcgctgcaaagagctttccagctggagtggagatgattaactccaaagtggggaacgagttcagccacctctgcgatgattctcaaaagcaagaaaaagaaatgaatggaaatcagcaggaacaggagaagagcttagtggtgcggaagaagaggaagtcccagcaagcgggaccgtcctacgttcagaattgtgttaaagaaaatcagggcatcctaggactacggcaacacctgggaactccgtcggacgaagacaatgactcgtccttttctgattgcctgtcaagtccttcttctagtctgcatttcggagattcagacaccgtaacatcagatgaagacaaggaggtgagcgtccgacatagtcaaactatccttaatgccaaatcccgatcgcacagtgccaggtcacataagtggccgaggaccgagacagagagcgtgtctggcctgctgatgaaacgtccctgtctacacggctcctccctgcgcagactcccctgcaggaaaagatttgtgaagaacaattcgagtcagcggacccagaagcagaaggaaaggattctgatgcagaggaagaaaagagaggtgctcgcaagacggaagtatgccctgttgccctcatccagtagttctagtgagaacgatttatcctcagagagtagcagttcctcctccaccgaaggggaagaggatttgttcgtgagcgcctccgaaaatcaccagaataaccctgctgtcccttccggctcaatcgatgaagatgtggtggtgattgaggcctcatcgacaccccaggtcactgccaatgaggaaatcaacgtgacctcaaccgactccgaagtcgagatagttaccgttggggagtcataccgatcacgttcaacattgggccattcacgctcacactggagtcaaggcagtagttcccatgcttccagacctcaagaaccgaggaaccgatcacgcatctccacggttattcagcccctcaggcaaaacgccgcagaggtcgtcgacctgactgtagatgaggatgagcccacagtggtgcccacaaccagtgcccgaatggagtcacaagcaacgagtgctagcatcaataacagcaaccccagcaccagcgaacaggcctctgatactgccagtgccgttacaagcagtcaaccttctactgtgtccgaaacatctgccacgctgacctcaaactccacaactggaacttcgatcggagacgatagtcgaagaaccacatcgagcgccgtgactgagacaggtcctcccgcaatgccacgcctcccgtcctgttgtcctcagcattcaccttgtggcggatccagccagaaccaccacgccctgggacatcctcacacatcctgcttccagcaacatggtcatcatttccagcatcaccaccaccatcatcatacaccacaccctgcggttcctgttagtcctagcttcagtgatcccgcatgcccggtggaacggccacctcaagtacaggccccttgtggggctaactccagctcgggcactagctaccatgaacagcaagcactgcccgtggatctgagcaatagcggaattcggagtcatggtagcggaagcttccacggtgcttccgctttcgatccttgctgtccagtttcaagctcccgggcagctatcttcggtcatcaggctgcagctgcagcaccaagccagcctctcagttcaatcgatgggtatggctcaagtatggtcgcccaaccccagccacaacctccaccacaaccttctcttagcagttgccggcactatatgcccccaccttacgccagtctaactcgccctctgcatcatcaggcgtcagcttgtccccatagccatggaaacccccctccccagacacagccacctccgcaggtggactacgtgattccacacccggtccatgcttttcactcacaaatttctagccacgcaacttctcaccccgtggcaccccctccgccaacccaccttgcgagcactgctgcccctatcccgcagcacctgcccccaactcatcagccaattagccatcatattccagccaccgctcctccagcccaacggctgcacccccacgaagttatgcagagaatggaggtccagcggaggaggatgatgcaacaccccacccgagctcatgaacggcctccaccccaccctcatagaatgcatcctaactatggacacggtcaccacattcacgtgccgcagaccatgtcaagccatcccaggcaggcaccagagaggtccgcctgggagctggggatcgaagccggagtgaccgcggcaacatacacaccaggagctttgcacccccacctggcccactatcacgctccccctagactgcaccatttgcagctcggggctcttcctctgatggttcctgacatggccggttatccacacataaggtatatcagctctggcctggacggcactagctttagaggaccctttcgaggtaattttgaagagctgatccacctagaggagagactggggaatgtcaaccgaggggcatcccagggcacaatcgagaggtgcacttatccacacaagtataaaaagcgaaaattgcactgcaaacaggatggtgaggaaggtacggaggaagataccgaagagaaatgtaccatttgcctcagcattctcgaagagggagaagatgtgcggagactgccttgcatgcaccttttccaccaggtgtgtgtggatcagtggctaatcaccaacaagaagtgcccaatctgtcgggtcgacatcgaggcccaattgccttctgagtcctag

SEQ ID NO: 314875 - DNA, 396 bp, Artificial Sequence
  derived and/or modified sequence
atgagccagtggacccccgagtacaacgagctgtacaccctgaaggtggacatgaagagcgagatccccagcgacgcccccaagacccaggagagcctgaagggcatcctgctgcaccccgagcccatcggcgccgccaagagcttccccgccggcgtggagatgatcaacagcaaggtgggcaacgagttcagccacctgtgcgacgacagccagaagcaggagaaggagatgaacggcaaccagcaggagcaggagaagagcctggtggtgagaaagaagagaaagagccagcaggccggccccagctacgtgcagaactgcgtgaaggagaaccagggcatcctgggcctgagacagcacctgggcacccccagcgacgaggacaacgactag

SEQ ID NO: 314876 - DNA, 396 bp, Artificial Sequence
  derived and/or modified sequence
atgtctcaatggactccggagtacaatgaattatacaccctgaaagtcgatatgaaatctgaaattccctcagatgccccgaaaacacaggagagcctaaaggggatacttctccatcctgagcccatcggagccgctaaatcgttccctgcgggtgtggagatgattaacagtaaagttggtaacgagttcagccacctctgcgatgacagccagaagcaggagaaggaaatgaatgggaaccagcaggagcaggagaaatcactcgtggtcaggaagaagagaaaatctcagcaagccggaccaagctatgttcaaaactgtgtcaaagaaaaccaggggatcctaggcctgagacagcacctcggcaccccttctgacgaggacaacgattag

SEQ ID NO: 314877 - DNA, 396 bp, Artificial Sequence
  derived and/or modified sequence
atgagccagtggaccccagagtacaatgagctgtacaccctgaaggtggacatgaagtctgagatccccagtgatgcccccaagacccaggagagcctgaagggcatcctgctgcaccctgagcccatcggggccgccaagagcttccctgctggggtggagatgatcaacagcaaggtgggcaatgagttcagccacctgtgtgatgacagccagaagcaggagaaggagatgaatggaaaccagcaggagcaggagaagagcctggtggtgaggaagaagaggaagagccagcaggccggccccagctatgtgcagaactgtgtgaaggagaaccagggcatcctgggcctgcggcagcacctgggcacccccagtgatgaggacaatgactag

SEQ ID NO: 314878 - DNA, 396 bp, Artificial Sequence
  derived and/or modified sequence
atgagccagtggacccccgagtacaacgagctgtacaccctgaaggtcgacatgaaatccgaaatcccttcagatgctccaaagacccaggaaagtctgaagggaatactgctccaccctgagccgatcggggctgccaagagctttcccgcaggcgtagagatgattaatagcaaggtgggtaatgaattctcgcacctgtgcgatgactcacaaaagcaggagaaagagatgaacggtaatcagcaggaacaggagaaatctctggtagttaggaagaaaagaaaaagccagcaagcaggaccgagctacgtgcagaattgtgtgaaggagaaccagggcatcctgggcttgcgccagcaccttggcaccccctcagacgaggataatgactag

SEQ ID NO: 314879 - DNA, 396 bp, Artificial Sequence
  derived and/or modified sequence
atgtcacagtggacccctgaatacaacgagctgtatacccttaaggtcgatatgaagtctgaaattccttctgacgccccaaagacacaagaaagtctgaaaggcattctcctccatcccgagcccataggtgccgctaagtctttccctgccggagtcgagatgatcaactcaaaagttggaaatgagttttctcacctttgtgacgattcccagaagcaggaaaaggaaatgaacggcaaccagcaggagcaggagaaatccttggttgtgagaaagaagagaaaatcacaacaagcgggacccagctacgttcagaattgcgtgaaggagaaccagggcatcctaggtttgcgccagcacttagggacaccatctgacgaagataatgactag

SEQ ID NO: 314880 - DNA, 537 bp, Artificial Sequence
  derived and/or modified sequence
atgttgttaatcttactgtcagtggccttgttggcccttagctccgctgaatcttcctctgaggatgtgagccaggaagagagtctgttccttatttccgggaagcctgagggtcgtaggccacaaggcgggaatcagccccagagacccccccccccaccaggcaagccacagggacctccgcctcaaggaggaaatcagagccagggacctccgccacccccaggcaaaccggaagggagaccaccacagggaggtaaccagtcccagggacctccaccacaccctggaaaaccagagaggcccccccctcaaggaggaaatcagtcacagggtaagccccagggccctccccagcaagagggcaataagccacagggcccacccccgcccgggaagccccagggaccaccacctgccgggggcaacccacagcagccccaggccccacccgctggtaaaccccagggccccccacctccaccacaaggtggaagaccaccaaggcccgcacagggtcaacagccaccccagtag

SEQ ID NO: 314881 - protein, 302 aa, Artificial Sequence
  derived and/or modified sequence
MAGMSESSFLSKRPSTSEVNNVNPKKPKPSESVSGANSSAVLPSVKSPSVTSSQAMLAKGTNTSSNQSKNGTPFPRACPKCNIHFNLLDPLKNHMKYCCPDMINNFLGLAKTEFSSTVNKNTTIDSEKGKLIMLVNDFYYGKHEGDVQEEQKTHTTFKCFSCLKILKNNIRFMNHMKHHLELEKQSSESWENHTTCQHCYRQFPTPFQLQCHIESTHTPHEFSTICKICELSFETEHVLLQHMKDNHKPGEMPYVCQVCNYRSSSFSDVETHFRTSHENTKTCYARFASKLLKLQHHICIII

SEQ ID NO: 314882 - protein, 979 aa, Artificial Sequence
  derived and/or modified sequence
MGDNPFQPKSNSKMAELFMECEEEELEPWQKKVKEVEDDDDDEPIFVGEISSSKPAISNILNRVNPSSYSRGLKNGALSRGITAAFKPTSQHYTNPTSNPVPASPINFHPESRSSDSSVIVQPFSKPGYITNSSRVVSNKSSELLFDLTQDTGLSHYQGGPTLSMAGMSESSFLSKRPSTSEVNNVNPKKPKPSESVSGANSSAVLPSVKSPSVTSSQAMLAKGTNTSSNQSKNGTPFPRACPKCNIHFNLLDPLKNHMKYCCPDMINNFLGLAKTEFSSTVNKNTTIDSEKGKLIMLVNDFYYGKHEGDVQEEQKTHTTFKCFSCLKILKNNIRFMNHMKHHLELEKQSSESWENHTTCQHCYRQFPTPFQLQCHIESTHTPHEFSTICKICELSFETEHVLLQHMKDNHKPGEMPYVCQVCNYRSSSFSDVETHFRTSHENTKNLLCPFCLKVIKIATPYMHHYMKHQKKGIHRCTKCRLQFLTCKEKMDHKTQHHRTFIKPKQLEGLPPGTKVTIRASVGPLQSGASPTPSISASASTLQLSPPRTKNITAKNPAKSNTSKPNTVKSNASKPNTSKPNGSKSKYKPKISNMQKKQSTLASSNKKSKVNTALRNLRYRRGIHKCIECCSEIKDFANHFPTYVHCSFCRYNTSCSKAYVNHMMSFHSNRPSKRFCIFKKHSENLRGITLVCLNCDFLSDVSGLDNMATHLSQHKTHTCQVVMQKVSVCIPTSEHLSELKKEAPAKEQEPVSKEIARPNMAERETETSNSESKQDKAASSKEKNGCNANSFEGSSTTKSEESITVSDKENETCLADQETGSKNIVSCDSNIGADKVEKKKQIQHVCQEMELKMCQSSENIILSDQIKDHNSSEARFSSKNIKDLRLASDNVSIDQFLRKRHEPESVSSDVSEQGSIHLEPLTPSEVLEYEATEILQKGSGDPSAKTDEVVSDQTDDIPGGNNPSTTEATVDLEDEKERS

SEQ ID NO: 314883 - protein, 80 aa, Artificial Sequence
  derived and/or modified sequence
MGDNPFQPKSNSKMAELFMECEEEELEPWQKKVKEVEDDDDDEPIFVGEISSSKPAISNILNRVNPSSYSRGLKNGALSR

SEQ ID NO: 314884 - DNA, 2940 bp, Artificial Sequence
  derived and/or modified sequence
atgggcgacaaccccttccagcccaagagcaacagcaagatggccgagctgttcatggagtgcgaggaggaggagctggagccctggcagaagaaggtgaaggaggtggaggacgacgacgacgacgagcccatcttcgtgggcgagatcagcagcagcaagcccgccatcagcaacatcctgaacagagtgaaccccagcagctacagcagaggcctgaagaacggcgccctgagcagaggcatcaccgccgccttcaagcccaccagccagcactacaccaaccccaccagcaaccccgtgcccgccagccccatcaacttccaccccgagagcagaagcagcgacagcagcgtgatcgtgcagcccttcagcaagcccggctacatcaccaacagcagcagagtggtgagcaacaagagcagcgagctgctgttcgacctgacccaggacaccggcctgagccactaccagggcggccccaccctgagcatggccggcatgagcgagagcagcttcctgagcaagagacccagcaccagcgaggtgaacaacgtgaaccccaagaagcccaagcccagcgagagcgtgagcggcgccaacagcagcgccgtgctgcccagcgtgaagagccccagcgtgaccagcagccaggccatgctggccaagggcaccaacaccagcagcaaccagagcaagaacggcacccccttccccagagcctgccccaagtgcaacatccacttcaacctgctggaccccctgaagaaccacatgaagtactgctgccccgacatgatcaacaacttcctgggcctggccaagaccgagttcagcagcaccgtgaacaagaacaccaccatcgacagcgagaagggcaagctgatcatgctggtgaacgacttctactacggcaagcacgagggcgacgtgcaggaggagcagaagacccacaccaccttcaagtgcttcagctgcctgaagatcctgaagaacaacatcagattcatgaaccacatgaagcaccacctggagctggagaagcagagcagcgagagctgggagaaccacaccacctgccagcactgctacagacagttccccacccccttccagctgcagtgccacatcgagagcacccacaccccccacgagttcagcaccatctgcaagatctgcgagctgagcttcgagaccgagcacgtgctgctgcagcacatgaaggacaaccacaagcccggcgagatgccctacgtgtgccaggtgtgcaactacagaagcagcagcttcagcgacgtggagacccacttcagaaccagccacgagaacaccaagaacctgctgtgccccttctgcctgaaggtgatcaagatcgccaccccctacatgcaccactacatgaagcaccagaagaagggcatccacagatgcaccaagtgcagactgcagttcctgacctgcaaggagaagatggaccacaagacccagcaccacagaaccttcatcaagcccaagcagctggagggcctgccccccggcaccaaggtgaccatcagagccagcgtgggccccctgcagagcggcgccagccccacccccagcatcagcgccagcgccagcaccctgcagctgagcccccccagaaccaagaacatcaccgccaagaaccccgccaagagcaacaccagcaagcccaacaccgtgaagagcaacgccagcaagcccaacaccagcaagcccaacggcagcaagagcaagtacaagcccaagatcagcaacatgcagaagaagcagagcaccctggccagcagcaacaagaagagcaaggtgaacaccgccctgagaaacctgagatacagaagaggcatccacaagtgcatcgagtgctgcagcgagatcaaggacttcgccaaccacttccccacctacgtgcactgcagcttctgcagatacaacaccagctgcagcaaggcctacgtgaaccacatgatgagcttccacagcaacagacccagcaagagattctgcatcttcaagaagcacagcgagaacctgagaggcatcaccctggtgtgcctgaactgcgacttcctgagcgacgtgagcggcctggacaacatggccacccacctgagccagcacaagacccacacctgccaggtggtgatgcagaaggtgagcgtgtgcatccccaccagcgagcacctgagcgagctgaagaaggaggcccccgccaaggagcaggagcccgtgagcaaggagatcgccagacccaacatggccgagagagagaccgagaccagcaacagcgagagcaagcaggacaaggccgccagcagcaaggagaagaacggctgcaacgccaacagcttcgagggcagcagcaccaccaagagcgaggagagcatcaccgtgagcgacaaggagaacgagacctgcctggccgaccaggagaccggcagcaagaacatcgtgagctgcgacagcaacatcggcgccgacaaggtggagaagaagaagcagatccagcacgtgtgccaggagatggagctgaagatgtgccagagcagcgagaacatcatcctgagcgaccagatcaaggaccacaacagcagcgaggccagattcagcagcaagaacatcaaggacctgagactggccagcgacaacgtgagcatcgaccagttcctgagaaagagacacgagcccgagagcgtgagcagcgacgtgagcgagcagggcagcatccacctggagcccctgacccccagcgaggtgctggagtacgaggccaccgagatcctgcagaagggcagcggcgaccccagcgccaagaccgacgaggtggtgagcgaccagaccgacgacatccccggcggcaacaaccccagcaccaccgaggccaccgtggacctggaggacgagaaggagagaagctag

SEQ ID NO: 314885 - DNA, 2940 bp, Artificial Sequence
  derived and/or modified sequence
atgggggataacccctttcagcccaaatccaatagcaagatggcagagctgtttatggaatgcgaagaggaagagctagaaccctggcagaagaaagtgaaggaggtcgaagatgatgacgatgatgagcccatctttgtgggggaaatctcttccagtaagccagccatttctaacatcttgaacagagtgaacccatccagctattcccgtgggcttaagaatggagctctcagcagaggcatcacagctgcatttaaacctacctcccagcattacaccaatcccacatcgaatccggtgcccgcctcgcctatcaatttccatccggagtctcggtcaagcgacagtagcgttattgtacaacctttctctaaacctggatatataacaaacagctcccgcgtggtttccaacaagtccagcgagttattgttcgacctgacccaggacactggcctcagccattatcaggggggccctacattatctatggctgggatgtctgagagctcattcctatccaagagaccttcaaccagtgaggtgaacaatgttaatcccaaaaagcccaagccctctgagtctgtctccggagcaaactcctcagccgtcctgccctcagttaagagcccttccgtcacttcaagccaggccatgttggctaagggcactaacacttcctctaaccagtcaaagaacggcaccccttttccaagagcctgccctaaatgcaacattcactttaatctgcttgaccccctgaaaaatcacatgaaatattgctgtcctgatatgatcaacaatttccttggtcttgccaagaccgaattctcaagcactgtgaataagaacaccactattgatagcgagaaaggtaaacttatcatgcttgtgaatgatttttactatggaaaacacgagggcgacgtccaggaggagcaaaaaacccataccaccttcaagtgtttttcctgcctgaaaatcctgaaaaacaatatcagattcatgaaccacatgaagcatcatttagagttagaaaaacaatctagtgaaagctgggaaaaccatactacctgccagcactgttaccgccaatttcctacccccttccagcttcagtgccacatcgaatcaacccacacgccgcacgagttctctactatctgcaaaatttgcgaactgagctttgagacagagcacgtactgctacagcatatgaaggataatcataagccgggagaaatgccctatgtttgtcaagtatgtaattatcggtcctcatcattctctgatgtagagacgcacttccgtacatcacacgaaaacactaagaatctcctctgcccattctgcctaaaagtgataaagattgctacaccatacatgcatcattacatgaaacaccagaagaaagggattcatagatgcactaagtgccgtctacagtttctgacctgcaaagaaaagatggaccacaagacccagcaccaccggactttcataaagcctaaacagttagagggcctgccacctggaaccaaggtgacaatccgggctagtgtcggccccctgcagtctggtgctagccccactccctcaatttctgcttccgcctcgaccctgcagctgagtccgccaagaacgaaaaatatcactgcgaagaaccccgctaaatctaacacctcaaagcccaacacagtgaaaagtaatgcgtccaaacccaatacaagtaagccaaatgggagtaagtccaagtacaaaccgaagattagtaacatgcagaaaaagcagtccacgttagcctcatcgaataagaagtctaaggtcaatacagcactgcgaaatctgcggtaccgcaggggcatacacaagtgtatcgaatgttgttccgagataaaagacttcgccaaccacttcccaacttacgtgcactgtagtttctgccggtacaatacgtcatgttccaaggcctatgttaaccacatgatgtccttccatagtaacaggccctctaaacgattctgtattttcaaaaagcacagtgaaaacctgaggggtattaccctggtttgcctgaattgtgactttctgtccgacgtttcaggcctggataatatggcaactcacctgtcccagcacaaaacacatacttgccaggtggtgatgcagaaggtgagcgtctgtataccgacttctgagcaccttagcgagctgaagaaagaggcgccagctaaggaacaggagccagtgtcaaaggagatcgctcggcctaatatggcagagcgcgaaacagaaaccagtaactccgagtcaaagcaggacaaggcagcctcatctaaggagaagaatggctgcaacgcaaacagcttcgaaggaagctccactacaaaaagcgaagaaagcataacggtgtcagacaaggaaaatgaaacgtgtctcgctgaccaggaaacagggagcaagaacatcgtctcttgcgattccaacattggtgcagataaagtggagaagaaaaagcaaatacaacatgtttgccaggaaatggaactgaagatgtgccagtccagcgagaatattattctctccgaccagatcaaggaccacaacagcagtgaagcccgtttttccagcaagaacattaaggacttgaggcttgctagtgataatgtctctatagaccaattcttgagaaaacgacacgagcctgagagcgtatcctctgacgtctctgaacaaggcagcatccatctggaacccctgacaccgtccgaggtgcttgagtacgaggctaccgagatcctgcagaaggggagcggagatccctctgcgaagactgatgaagtggtcagcgaccaaactgacgacataccaggaggcaataacccttccacgaccgaagccaccgtagatctcgaggacgaaaaagagcggtcgtag

SEQ ID NO: 314886 - DNA, 2940 bp, Artificial Sequence
  derived and/or modified sequence
atgggagacaaccccttccagcccaagagcaacagcaagatggccgagctgttcatggagtgtgaggaggaggagctggagccctggcagaagaaggtgaaggaggtggaggatgatgatgatgatgagcccatctttgtgggggagatcagcagcagcaagccagccatcagcaacatcctgaacagagtgaaccccagcagctacagccggggcctgaagaatggagccctgagccggggcatcacagctgccttcaagcccaccagccagcactacaccaaccccaccagcaaccctgtgcctgccagccccatcaacttccaccctgagagccgcagcagtgacagcagcgtcatcgtgcagcccttcagcaagccaggctacatcaccaacagcagccgggtggtgagcaacaagagcagcgagctgctgtttgacctgacccaggacaccggcctgagccactaccagggcggccccaccctgtccatggccggcatgtctgagagcagcttcctgagcaagaggcccagcaccagcgaggtgaacaacgtgaaccccaagaagcccaagcccagcgagagcgtgtctggggccaacagcagcgctgtgctgcccagcgtgaagagccccagcgtgaccagcagccaggccatgctggccaagggcaccaacaccagcagcaaccagagcaagaatggcacccccttcccccgggcctgccccaagtgcaacatccacttcaacctgctggaccccctgaagaaccacatgaagtactgctgcccagacatgatcaacaacttcctgggcctggccaagacagagttcagcagcacagtgaacaagaacaccaccatcgacagcgagaagggcaagctgatcatgctggtgaatgacttctactacggcaagcatgaaggagatgtgcaggaggagcagaagacccacaccaccttcaagtgcttcagctgcctgaagatcctgaagaacaacatccgcttcatgaaccacatgaagcaccacctggagctggagaagcagagcagcgagagctgggagaaccacaccacctgccagcactgctaccggcagttccccacccccttccagctgcagtgccacatcgagagcacccacacccctcatgagttcagcaccatctgcaagatctgtgagctgagctttgaaacagaacatgtgctgctgcagcacatgaaggacaaccacaagccaggagagatgccctacgtgtgccaggtgtgcaactaccgcagcagcagcttcagtgatgtggagacccacttccgcaccagccatgagaacaccaagaacctgctgtgccccttctgcctgaaggtgatcaagatcgccaccccctacatgcaccactacatgaagcaccagaagaagggcatccaccgctgcaccaagtgccgcctgcagttcctgacctgcaaggagaagatggaccacaagacccagcaccacaggaccttcatcaagcccaagcagctggagggcctgcccccaggcaccaaggtgaccatccgggcctctgtgggccccctgcagagcggggccagccccacccccagcatcagcgccagcgccagcaccctgcagctgagcccccccaggaccaagaacatcacagccaagaacccagccaagagcaacaccagcaagcccaacacagtgaagagcaatgccagcaagcccaacaccagcaagcccaacggcagcaagagcaagtacaagcccaagatcagcaacatgcagaagaagcagagcaccctggccagcagcaacaagaagagcaaggtgaacacagccctgaggaacctgcgctaccgccggggcatccacaagtgcatcgagtgctgcagcgagatcaaggactttgccaaccacttccccacctacgtgcactgcagcttctgccgctacaacaccagctgcagcaaggcctacgtgaaccacatgatgtccttccacagcaaccggcccagcaagcgcttctgcatcttcaagaagcacagcgagaacctgcggggcatcaccctggtgtgcctgaactgtgacttcctgagtgatgtgtctggcctggacaacatggccacccacctgagccagcacaagacccacacctgccaggtggtgatgcagaaggtgtctgtgtgcatccccaccagcgagcacctgtctgagctgaagaaggaggccccagccaaggagcaggagcctgtgtccaaggagatcgcccggcccaacatggccgagcgggagacagagaccagcaacagcgagagcaagcaggacaaggccgccagcagcaaggagaagaatggctgcaatgccaacagctttgagggcagcagcaccaccaagtctgaggagagcatcaccgtgtctgacaaggaaaatgagacctgcctggccgaccaggagaccggcagcaagaacatcgtgtcctgtgacagcaacattggagctgacaaggtggagaagaagaagcagatccagcacgtgtgccaggagatggagctgaagatgtgccagagcagcgagaacatcatcctgagtgaccagatcaaggaccacaacagcagcgaggcccgcttcagcagcaagaacatcaaggacctgcggctggccagtgacaacgtgtccattgaccagttcctgaggaagagacatgagcctgagagcgtgtccagtgatgtgtctgagcagggcagcatccacctggagcccctgacccccagcgaggtgctggagtatgaggccacagagatcctgcagaagggcagcggggaccccagcgccaagacagatgaggtggtgtctgaccagacagatgacatccctgggggcaacaaccccagcaccacagaggccaccgtggacctggaggatgagaaggagaggagctag

SEQ ID NO: 314887 - DNA, 2940 bp, Artificial Sequence
  derived and/or modified sequence
atgggcgacaaccccttccagcccaagagcaacagcaagatggccgagctgtttatggagtgtgaggaagaggagttggagccctggcagaagaaggtcaaagaagtggaagacgatgatgacgacgagcccatttttgtgggggaaatttcctcttcaaagccagctatcagcaacattctcaatagagtcaacccttcctcatatagccggggcttgaagaacggggcattgtcacgcgggatcacagccgcctttaaaccaaccagccagcattacactaacccaacttcaaatcccgttccagcttcacccattaacttccatccagaatcccggagttctgattccagtgtcattgtgcagcccttctcaaaacccggctatataaccaattcatctcgggtggttagcaataagtcttctgagttgctgttcgaccttacgcaggacacagggctgagccactatcagggcggtcctactctcagcatggcaggtatgagcgagtcttcattcctctccaagcgaccctccaccagtgaggttaataacgtgaaccctaagaagccaaagccatcggagagtgtgtctggggcaaatagctcggccgtgctcccctccgttaagagtcccagtgtgacctcgtcccaggctatgctggccaagggcactaacacttcttctaaccagtctaagaacggaacacctttccccagggcttgtccgaagtgcaacatccactttaacctgctggatcctctgaaaaatcacatgaaatactgttgccccgacatgattaacaattttctgggactcgcgaaaacagagttctccagcacagttaataaaaatacaaccattgatagtgagaaggggaaactgattatgctggtaaacgatttttactacggcaaacatgagggagacgtgcaggaagaacagaagacgcatactacctttaaatgcttctcctgcttgaagattttaaaaaataacattagattcatgaatcatatgaaacaccacctcgagctggagaaacaaagctccgaaagctgggaaaaccatactacctgtcaacattgctacaggcagttcccgacaccattccagctgcagtgccacatcgagagcacccacactccacacgaattctcaaccatctgcaagatctgcgagcttagttttgagaccgaacatgtgctgctgcagcatatgaaggacaaccataagcctggagaaatgccctatgtctgtcaggtctgcaattaccggtcttcttcattcagtgatgtagaaacccactttagaaccagccatgaaaacacaaaaaacctgttgtgccccttctgtctgaaggtgattaaaattgccaccccctacatgcaccactacatgaaacaccagaaaaaaggcattcatagatgtacgaagtgccgtctgcagttcttgacttgcaaagagaagatggatcataagactcagcaccataggacgtttattaagcccaagcagctggaagggctcccccccgggaccaaagtcacaatcagggcatcggtggggcctttacaatctggcgcatcacccactccaagcatttccgcctctgcatcaacattacaattatcccccccccgcactaaaaatatcaccgcaaaaaaccctgccaagagcaacacctcaaagccaaatactgttaaatctaacgcctcaaaaccaaacaccagcaaacctaacggctcaaaatctaagtacaaacctaagattagcaacatgcagaagaagcagtcaaccctggcctcttctaataaaaaaagcaaagtgaatacagccctccgaaatcttaggtaccggcgcggtatccataaatgtattgagtgttgttccgagatcaaagacttcgcaaatcacttccctacatacgtccattgcagcttctgtagatacaacaccagttgttcaaaggcctatgtgaaccatatgatgagtttccacagcaatagaccttccaaacgcttctgtatttttaaaaaacattccgagaacctgagggggatcacattggtgtgtctcaactgtgatttcttaagcgatgtaagcggccttgataatatggcgacccatctcagccagcataagacacatacctgccaggtggtgatgcaaaaagtttcagtgtgcatccccacttccgaacacctgtcagaattaaagaaagaagccccggccaaagaacaagaaccagtcagcaaggaaatagccagacccaacatggctgagcgagagaccgaaacttctaacagtgaatctaagcaggacaaggctgcgtctagcaaggagaaaaacggatgcaatgctaactcctttgagggatcctcaactactaagagtgaagaatccattaccgtgtcagataaagaaaatgaaacatgtttggccgatcaggagacaggttccaagaatatcgtgtcctgcgactcgaatatcggagcagacaaggtcgaaaagaagaaacagatacagcacgtgtgccaggaaatggaattaaaaatgtgccagtcttctgagaacataatcttatccgatcaaattaaagaccataacagtagcgaggcccgtttctcaagcaagaacatcaaggacctgcggctcgcatcagacaatgttagtatcgatcaatttcttcgaaagcggcatgaacccgagtcagtgtctagcgacgttagtgagcagggctccatccaccttgagcccttgaccccttccgaggtgctggagtatgaggccacagaaatcctgcagaaagggagtggggatccctctgccaagacagacgaggtagtatctgaccagactgacgatatcccaggcggtaataatccatcgacgacagaagctaccgtggacctggaggacgagaaggagcgtagctag

SEQ ID NO: 314888 - DNA, 2940 bp, Artificial Sequence
  derived and/or modified sequence
atgggggacaatcctttccagcccaaatccaatagtaagatggcagaactgttcatggagtgtgaggaggaagagcttgaaccctggcagaagaaggttaaggaagtcgaggatgacgacgacgatgaaccaatttttgtcggggaaatatcgtcctccaagcccgctatctctaatatcctgaacagagtgaacccttccagctactctagagggctgaaaaacggcgcattgtcacgcggtataaccgccgcatttaagcccacatcccagcattacacaaatcccacaagcaaccctgtgccggctagccctattaacttccaccctgaaagccggtctagcgacagcagcgtaatagtccagccctttagtaaaccaggatatattacaaatagtagccgggtcgtgagcaacaagtccagtgagttgttgtttgacttgacccaggacaccggtctttctcactatcagggagggccaacactgagcatggctggaatgtcggaaagcagttttctgtccaagaggccctctacaagtgaggtgaataatgtcaatccgaaaaagcccaaaccaagcgaatctgtcagcggggctaactcatcagcagtgctgccttctgtgaaatcacctagcgtgaccagttcccaggccatgctggcgaagggaaccaatactagctccaaccagagtaagaatgggacaccttttccacgcgcatgtccaaaatgtaacatccatttcaatcttctggatccactgaagaatcatatgaagtactgttgtcccgacatgattaacaacttcctagggctagcaaagaccgaatttagtagtaccgttaacaaaaatactactatcgatagcgaaaagggcaaattgatcatgcttgtcaatgacttctactacggtaagcacgaaggcgacgttcaggaagagcagaagacacacacaacattcaagtgtttttcttgtttgaaaattctaaagaataacatccgcttcatgaaccacatgaaacaccatttggagttggagaagcagagcagtgagtcctgggagaaccacacgacctgccaacattgctaccgtcagtttccgactccttttcagctccagtgtcatatcgagagtactcataccccacatgagttcagcaccatctgcaagatctgtgaactctcctttgaaaccgaacatgttttgctgcaacatatgaaagataatcacaagcccggagaaatgccatatgtatgccaggtctgtaattataggtcgagcagcttttcagacgtggaaacacatttccgaaccagccacgagaatacaaaaaacctcttatgccctttttgtctgaaggtaattaagatagcaacaccatacatgcaccactacatgaagcaccaaaaaaaaggtattcacaggtgtaccaaatgtagattacagttcctgacatgcaaggaaaaaatggaccataagactcagcaccaccggaccttcatcaagcccaagcagctggagggattacccccagggactaaagttaccatacgtgcaagcgtcggacccctccaaagtggagccagccctactcctagcatctcagcttccgctagcacactgcaactcagccctccgcgaacaaagaatatcaccgcaaaaaatcccgcaaaatctaatacaagcaaacctaacaccgtgaaatcgaatgccagcaaacccaatacttcaaagccaaacggctccaagtcaaagtataagcccaagataagtaatatgcaaaaaaaacagtcaactctcgcctcttcaaacaagaaaagcaaggttaataccgcgctccggaatctcaggtatcgaaggggtatccacaagtgcatcgaatgttgctcggagatcaaggattttgccaaccacttccctacatatgtgcactgttccttctgtagatataacacttcgtgctctaaggcctacgtgaaccatatgatgtcttttcatagcaatagaccttctaaacgcttttgtattttcaagaagcatagcgagaatctccgcggtatcaccctagtctgtctgaactgcgacttcctgagcgatgtgtccgggctcgacaatatggcgacacacctgtcgcagcacaagacccacacttgccaagtggttatgcagaaggtgagcgtctgtataccaacttccgaacatttgtctgaactcaaaaaagaggcgcctgcaaaggagcaggaacccgtgagtaaggaaatcgccagaccaaacatggctgagcgagaaaccgagacatccaattcagaaagcaagcaggataaggccgctagttccaaggagaaaaatgggtgtaacgctaattcattcgaagggagctccaccacaaaatctgaggagtccattacagtatctgataaggaaaatgagacgtgtttggctgatcaggaaacgggttcaaagaacatcgtgagctgtgattcaaatatcggagcagacaaagttgagaaaaagaaacaaatccagcatgtgtgccaggaaatggaactcaagatgtgtcaatcttccgaaaatattattcttagcgatcaaatcaaggatcacaacagctccgaagctcgtttcagcagcaagaatataaaagacctgagactggcttctgacaatgtgtccattgaccagttccttcgcaagcgacatgaaccggagtccgtctcttctgacgtgtcagagcagggatctatccatctggagccactaactcctagtgaagttttggaatacgaggcaaccgaaatactccagaagggtagcggggatccctcagctaaaaccgacgaagtggtttctgaccagaccgacgacatcccgggaggtaataatccctcaactactgaagccaccgtggatctcgaggacgaaaaggaacggagctag

SEQ ID NO: 314889 - DNA, 4328 bp, Artificial Sequence
  derived and/or modified sequence
acggctcggctgccagctccgcaatgggagccgccgccgtcgccgcagtgtagtttttcgtgctcctccttttcctcctcctctttctcctcctcctcagggctccagtcaggccgatccgctccgctcacggaaggaaaacagaaataacttgctggcttgtctggagtcacatgtacttaggtgacaatttacagaaagtcatctctgcagcttgatgggcgacaacccttttcaaccaaaaagtaattcaaaaatggcagaactgtttatggaatgtgaagaagaggagctggaaccatggcagaagaaagtaaaagaagttgaggatgacgatgatgatgagccaatctttgttggcgagatatcaagttcaaaaccagcaatttcaaatattttgaacagagttaaccccagctcatattcaaggggactaaagaatggtgcactcagtcgaggtattactgctgcattcaagcctacaagtcaacactacacgaatccaacatcaaatccagtgcctgcctcaccaataaattttcatcctgagtctagatcttcagatagttctgttattgttcagcctttttctaaacctggttatataacaaactcatcacgagttgtgtctaataagtcatcagagttactgtttgacttgacccaggatacaggattatcacattaccaagggggaccaacactttctatggcaggtatgagtgaaagttcatttttatcaaaacgtccttctacttctgaagtaaataatgttaatccaaagaagcctaaacccagcgaaagtgtttctggagcaaattcctcagctgtattaccttcagttaaatctccttcagtgacttcttcccaggctatgctagcaaaaggtacaaatacctcatcaaatcagtctaaaaatggaacaccttttccaagagcttgtccaaagtgcaacattcatttcaatcttttggatcctttgaaaaatcacatgaagtattgttgtccagacatgataaataactttttgggactggctaaaacagaattttcaagtacagtaaataaaaacacaactattgattcagagaaaggaaaattgatcatgttagttaatgacttttattatggaaaacatgaaggagatgtccaggaggaacagaagactcacacaacctttaaatgcttcagttgcttgaaaattctaaaaaataacattaggtttatgaaccacatgaaacaccatttggaacttgagaagcagagcagtgagagctgggaaaaccataccacctgccagcactgctaccgtcagtttcccacaccatttcagttgcagtgtcacatcgaaagtacacatacgccccatgaattttctactatttgtaaaatctgtgaattgtcatttgaaacagaacatgttcttttacaacatatgaaggacaatcataaacctggtgaaatgccatatgtctgccaggtttgtaattatagatcatcatcattttctgatgtagaaactcattttagaacatcccatgaaaacactaagaacttgctatgcccgttttgcctcaaagttattaaaattgcaacaccatatatgcatcattatatgaagcatcagaaaaaaggaatacatcgttgtacaaaatgcaggctgcagtttttgacatgcaaggagaaaatggatcataagactcaacaccatcgaacatttataaaacctaaacaactagaaggattgcctcctggaacaaaagttactattcgagcttcagttggacctctgcaatcaggagcttcacctacaccttccattagtgcaagtgcttctacccttcagctctcacctccaaggactaaaaatataactgctaaaaatcctgcaaaatctaatacaagtaaacctaatacagtcaaatccaacgcaagtaaacctaatacaagtaagcctaatggaagtaaatctaaatacaaaccaaaaatctctaatatgcaaaagaaacaaagcacattggctagtagcaataaaaaaagtaaagtcaatacagcattgaggaatttaaggtatcgtcggggcattcacaaatgcattgagtgttgttccgaaataaaagattttgcaaaccactttcctacgtacgtccactgtagtttttgcagatacaacactagctgtagcaaagcctatgtaaatcatatgatgagctttcatagtaaccgtccaagcaaaaggttttgtatttttaagaagcattcagaaaatctccggggcattactctagtgtgccttaattgtgatttcctaagtgatgtttctggcttagataatatggctacacacttaagtcaacataaaactcatacttgccaagttgtaatgcagaaagtttctgtttgtatcccaacttctgagcacctttctgaattaaaaaaagaagctcccgcaaaggaacaagaacctgtgtctaaggaaattgcaagacctaacatggctgaaagagaaacagaaacatcaaattctgaaagtaaacaagataaagctgcttcttcaaaagaaaaaaatggatgtaatgcaaattcatttgaaggctcatcaacaacaaaaagtgaagaaagcataacagtttcagataaggaaaatgaaacctgtcttgcagaccaggaaactggctcaaaaaacatcgtcagttgtgattcaaatattggtgcagataaagtggaaaagaaaaaacaaatacaacacgtttgtcaggaaatggagttgaagatgtgccaaagttcagaaaacataatcttatctgatcagattaaagatcacaactccagtgaagccagattttcttcaaagaatattaaggatttgcgattagcatcagataatgtaagcattgatcagtttttgagaaaaagacatgaacctgaatctgttagttctgatgttagcgagcaaggcagtattcatttggaacctctgactccatccgaggtacttgagtatgaagccacagagattcttcagaaaggtagtggtgatccttcagccaagactgatgaagtagtgtctgatcaaacagatgacattcctggaggaaataaccctagcacaacagaggcaacagtagacctggaagacgaaaaagaaagaagttgaaattagtcattttaagtttcagtgtaccaacgataagggcatttggaacagtgctatcaggtgagctcagtggtgctgttgtaggttcagaaatggaaatatgtaagggaggtcacacatacactttacctgtatgttcaacctatgttatcaaacaaatcaattcaccaataatagcatgattagtagggattcccaaaaagtttttaaaaacacgaacaggattttaatgataattaaatttgcagtggaaaggtctcatttaatggttttcaaggaaatgggatttggttgctgacatgaattgatgatattagtaatatttataaagcctttcaaacttccatcaatcctaagctaaaaatctttattacctgtatatccttttcagttaactgagaggaagggatttggaaaccatgtacttttggggagtaattgattaaaaacaatggctgattggcattgttaatgaaggctttatttgtgaggatgatgctggtaaatggagcatgcttagagtactaaattgatctaatgagaatttggatgaacataaacttaattttggatttaatataacattccagtcagacgcatgtaaacagaatatttgaatctttgtacctccatacaagtgttagcctgccaggctgtaagcttaccttaattaaactttcagtgaaagtggaattattaagatataaatttatatttgtgctttttgtcagtgtgtaagctgtgtagaaattctttgatgtattagttgtattaatgtaaagtagaaacccattgttgaaactcctgtagctattatgcttttaatattgttttaatgatcttccttagaaataggcccataaaaatggtctggaagccaaaccaaagtatggtataatgtagatattgtaaagcagtaaactgaaaacatgtcctggcatgtattcagccatgtttaagtgacttttctgtaattgtaaaataaaaacttcaaatgggacctaaaacagtgatgtaaaagaactggttttggaaatttagcctaatttatctataagatggctgctaaattgatttttcagttctttttatcatctagaatataatagatatagaaatgaataatatgaagaacagtagtttgctttgaaatactaataaacttttattt

SEQ ID NO: 314890 - DNA, 2799 bp, Artificial Sequence
  derived and/or modified sequence
gacctcgacagggaacgcaagcaaaaccacacatttaaaacagacttggtaaaatcagctcgttatttaaagaaacggacgattcctttttctctcctggtttagtcttcgacccacaggccccttgcttctttcgaacggcggctgtatcccatgaccttttcactttccaagccaacggactgggggtcgttacacacgcggagggcccggaacgcacggctcctcgcctgcaaattccgagcagtccggattttggggctgcctcccggccacaccagccagcagctcgcacccacatggaggcagggccctggccctcgccccggaccggcgcgtggcggggcgcgtgggtcttcgagggcccgcgacgcggcgcacatgccggtgcccgcctcccgcgtcggcgagaagacagggagctcggacacggggaggctgacccggagcctacccatgaggcagcgcgccggctgcacgagagcccccccctttccacggctcggctgccagctccgcaatgggagccgccgccgtcgccgcagtgtagtttttcgtgctcctccttttcctcctcctctttctcctcctcctcagggctccagtcaggccgatccgctccgctcacggaaggaaaacagaaataacttgctggcttgtctggagtcacatggtaattcaaaaatggcagaactgtttatggaatgtgaagaagaggagctggaaccatggcagaagaaagtaaaagaagttgaggatgacgatgatgatgagccaatctttgttggcgagatatcaagttcaaaaccagcaatttcaaatattttgaacagagttaaccccagctcatattcaaggggactaaagaatggtgcactcagtcgaggtattactgctgcattcaagcctacaagtcaacactacacgaatccaacatcaaatccagtgcctgcctcaccaataaattttcatcctgagtctagatcttcagatagttctgttattgttcagcctttttctaaacctggttatataacaaactcatcacgagttgtgtctaataagtcatcagagttactgtttgacttgacccaggatacaggattatcacattaccaagggggaccaacactttctatggcaggtatgagtgaaagttcatttttatcaaaacgtccttctacttctgaagtaaataatgttaatccaaagaagcctaaacccagcgaaagtgtttctggagcaaattcctcagctgtattaccttcagttaaatctccttcagtgacttcttcccaggctatgctagcaaaaggtacaaatacctcatcaaatcagtctaaaaatggaacaccttttccaagagcttgtccaaagtgcaacattcatttcaatcttttggatcctttgaaaaatcacatgaagtattgttgtccagacatgataaataactttttgggactggctaaaacagaattttcaagtacagtaaataaaaacacaactattgattcagagaaaggaaaattgatcatgttagttaatgacttttattatggaaaacatgaaggagatgtccaggaggaacagaagactcacacaacctttaaatgcttcagttgcttgaaaattctaaaaaataacattaggtttatgaaccacatgaaacaccatttggaacttgagaagcagagcagtgagagctgggaaaaccataccacctgccagcactgctaccgtcagtttcccacaccatttcagttgcagtgtcacatcgaaagtacacatacgccccatgaattttctactatttgtaaaatctgtgaattgtcatttgaaacagaacatgttcttttacaacatatgaaggacaatcataaacctggtgaaatgccatatgtctgccaggtttgtaattatagatcatcatcattttctgatgtagaaactcattttagaacatcccatgaaaacactaagaacttgctatgcccgttttgcctcaaagttattaaaattgcaacaccatatatgcatcattatatgaagcatcagaaaaaaggaatacatcgttgtacaaaatgcaggctgcagtttttgacatgcaaggagaaaatggatcataagactcaacaccatcgaacatttataaaacctaaacaactagaaggattgcctcctggaacaaaagttactattcgagcttcagttggacctctgcaatcaggagcttcacctacaccttccattagtgcaagtgcttctacccttcagctctcacctccaaggactaaaaatataactgctaaaaatcctgcaaaatctaatacaagtaaacctaatacagtcaaatccaacgcaagtaaacctaatacaagtaagcctaatggaagtaaatctaaatacaaaccaaaaatctctaatatgcaaaagaaacaaagcacattggctagtagcaataaaaaaagtaaagtcaatacagcattgaggaatttaaggtatcgtcggggcattcacaaatgcattgagtgttgttccgaaataaaagattttgcaaaccactttcctacgtacgtccactgtagtttttgcagatacaacactagctgtagcaaagcctatgtaaatcatatgatgagctttcatagtaaccgtccaagcaaaaggttttgtatttttaagaagcattcagaaaatctccgatgcgtgggaggacaaatagaatgtgacttgcctaagttacacaagttggttgtggagccaagactgactctaggtcttctgactcctaacttttaa

SEQ ID NO: 314891 - DNA, 4405 bp, Artificial Sequence
  derived and/or modified sequence
acggctcggctgccagctccgcaatgggagccgccgccgtcgccgcagtgtagtttttcgtgctcctccttttcctcctcctctttctcctcctcctcagggctccagtcaggccgatccgctccgctcacggaaggaaaacagaaataacttgctggcttgtctggagtcacatggtaattcaaaaatggcagaactgtttatggaatgtgaagaagaggagctggaaccatggcagaagaaagtaaaagaagttgaggatgacgatgatgatgagccaatctttgttggcgagatatcaagttcaaaaccagcaatttcaaatattttgaacagagttaaccccagctcatattcaaggggactaaagaatggtgcactcagtcgaggtattactgctgcattcaagcctacaagtcaacactacacgaatccaacatcaaatccagtgcctgcctcaccaataaattttcatcctgagtctagatcttcagatagttctgttattgttcagcctttttctaaacctggttatataacaaactcatcacgagttgtgtctaataagtcatcagagttactgtttgacttgacccaggatacaggattatcacattaccaagggggaccaacactttctatggcaggtatgagtgaaagttcatttttatcaaaacgtccttctacttctgaagtaaataatgttaatccaaagaagcctaaacccagcgaaagtgtttctggagcaaattcctcagctgtattaccttcagttaaatctccttcagtgacttcttcccaggctatgctagcaaaaggtacaaatacctcatcaaatcagtctaaaaatggaacaccttttccaagagcttgtccaaagtgcaacattcatttcaatcttttggatcctttgaaaaatcacatgaagtattgttgtccagacatgataaataactttttgggactggctaaaacagaattttcaagtacagtaaataaaaacacaactattgattcagagaaaggaaaattgatcatgttagttaatgacttttattatggaaaacatgaaggagatgtccaggaggaacagaagactcacacaacctttaaatgcttcagttgcttgaaaattctaaaaaataacattaggtttatgaaccacatgaaacaccatttggaacttgagaagcagagcagtgagagctgggaaaaccataccacctgccagcactgctaccgtcagtttcccacaccatttcagttgcagtgtcacatcgaaagtacacatacgccccatgaattttctactatttgtaaaatctgtgaattgtcatttgaaacagaacatgttcttttacaacatatgaaggacaatcataaacctggtgaaatgccatatgtctgccaggtttgtaattatagatcatcatcattttctgatgtagaaactcattttagaacatcccatgaaaacactaagaacttgctatgcccgttttgcctcaaagttattaaaattgcaacaccatatatgcatcattatatgaagcatcagaaaaaaggaatacatcgttgtacaaaatgcaggctgcagtttttgacatgcaaggagaaaatggatcataagactcaacaccatcgaacatttataaaacctaaacaactagaaggattgcctcctggaacaaaagttactattcgagcttcagttggacctctgcaatcaggagcttcacctacaccttccattagtgcaagtgcttctacccttcagctctcacctccaaggactaaaaatataactgctaaaaatcctgcaaaatctaatacaagtaaacctaatacagtcaaatccaacgcaagtaaacctaatacaagtaagcctaatggaagtaaatctaaatacaaaccaaaaatctctaatatgcaaaagaaacaaagcacattggctagtagcaataaaaaaagtaaagtcaatacagcattgaggaatttaaggtatcgtcggggcattcacaaatgcattgagtgttgttccgaaataaaagattttgcaaaccactttcctacgtacgtccactgtagtttttgcagatacaacactagctgtagcaaagcctatgtaaatcatatgatgagctttcatagtaaccgtccaagcaaaaggttttgtatttttaagaagcattcagaaaatctccggggcattactctagtgtgccttaattgtgatttcctaagtgatgtttctggcttagataatatggctacacacttaagtcaacataaaactcatacttgccaagttgtaatgcagaaagtttctgtttgtatcccaacttctgagcacctttctgaattaaaaaaagaagctcccgcaaaggaacaagaacctgtgtctaaggaaattgcaagacctaacatggctgaaagagaaacagaaacatcaaattctgaaagtaaacaagataaagctgcttcttcaaaagaaaaaaatggatgtaatgcaaattcatttgaaggctcatcaacaacaaaaagtgaagaaagcataacagtttcagataaggaaaatgaaacctgtcttgcagaccaggaaactggctcaaaaaacatcgtcagttgtgattcaaatattggtgcagataaagtggaaaagaaaaaacaaatacaacacgtttgtcaggaaatggagttgaagatgtgccaaagttcagaaaacataatcttatctgatcagattaaagatcacaactccagtgaagccagattttcttcaaagaatattaaggatttgcgattagcatcagataatgtaagcattgatcagtttttgagaaaaagacatgaacctgaatctgttagttctgatgttagcgagcaaggcagtattcatttggaacctctgactccatccgaggtacttgagtatgaagccacagagattcttcagaaaggtagtggtgatccttcagccaagactgatgaagtagtgtctgatcaaacagatgacattcctggaggaaataaccctagcacaacagaggcaacagtagacctggaagacgaaaaagaaagaagttgaaattagtcattttaagtttcagtgtaccaacgataagggcatttggaacagtgctatcaggtgagctcagtggtgctgttgtaggttcagaaatggaaatatgtaagggaggtcacacatacactttacctgtatgttcaacctatgttatcaaacaaatcaattcaccaataatagcatgattagtagggattcccaaaaagtttttaaaaacacgaacaggattttaatgataattaaatttgcagtggaaaggtctcatttaatggttttcaaggaaatgggatttggttgctgacatgaattgatgatattagtaatatttataaagcctttcaaacttccatcaatcctaagctaaaaatctttattacctgtatatccttttcagttaactgagaggaagggatttggaaaccatgtacttttggggagtaattgattaaaaacaatggctgattggcattgttaatgaaggctttatttgtgaggatgatgctggtaaatggagcatgcttagagtactaaattgatctaatgagaatttggatgaacataaacttaattttggatttaatataacattccagtcagacgcatgtaaacagaatatttgaatctttgtacctccatacaagtgttagcctgccaggctgtaagcttaccttaattaaactttcagtgaaagtggaattattaagatataaatttatatttgtgctttttgtcagtgtgtaagctgtgtagaaattctttgatgtattagttgtattaatgtaaagtagaaacccattgttgaaactcctgtagctattatgcttttaatattgttttaatgatcttccttagaaataggcccataaaaatggtctggaagccaaaccaaagtatggtataatgtagatattgtaaagcagtaaactgaaaacatgtcctggcatgtattcagccatgtttaagtgacttttctgtaattgtaaaataaaaacttcaaatgggacctaaaacagtgatgtaaaagaactggttttggaaatttagcctaatttatctataagatggctgctaaattgatttttcagttctttttatcatctagaatataatagatatagaaatgaataatatgaagaacagtagtttgctttgaaatactaataaacttttatttaaaatgcttcatttttacttcttaaaatgtgctttggattcttaaattttgtttcactgaatgttcaatgttttaaatggcgattaaaatactctgctgtatatagtagtttttgagtaaatatttgcaataaaaatctgcccccg

SEQ ID NO: 314892 - DNA, 4902 bp, Artificial Sequence
  derived and/or modified sequence
gacctcgacagggaacgcaagcaaaaccacacatttaaaacagacttggtaaaatcagctcgttatttaaagaaacggacgattcctttttctctcctggtttagtcttcgacccacaggccccttgcttctttcgaacggcggctgtatcccatgaccttttcactttccaagccaacggactgggggtcgttacacacgcggagggcccggaacgcacggctcctcgcctgcaaattccgagcagtccggattttggggctgcctcccggccacaccagccagcagctcgcacccacatggaggcagggccctggccctcgccccggaccggcgcgtggcggggcgcgtgggtcttcgagggcccgcgacgcggcgcacatgccggtgcccgcctcccgcgtcggcgagaagacagggagctcggacacggggaggctgacccggagcctacccatgaggcagcgcgccggctgcacgagagcccccccctttccacggctcggctgccagctccgcaatgggagccgccgccgtcgccgcagtgtagtttttcgtgctcctccttttcctcctcctctttctcctcctcctcagggctccagtcaggccgatccgctccgctcacggaaggaaaacagaaataacttgctggcttgtctggagtcacatggtaattcaaaaatggcagaactgtttatggaatgtgaagaagaggagctggaaccatggcagaagaaagtaaaagaagttgaggatgacgatgatgatgagccaatctttgttggcgagatatcaagttcaaaaccagcaatttcaaatattttgaacagagttaaccccagctcatattcaaggggactaaagaatggtgcactcagtcgaggtattactgctgcattcaagcctacaagtcaacactacacgaatccaacatcaaatccagtgcctgcctcaccaataaattttcatcctgagtctagatcttcagatagttctgttattgttcagcctttttctaaacctggttatataacaaactcatcacgagttgtgtctaataagtcatcagagttactgtttgacttgacccaggatacaggattatcacattaccaagggggaccaacactttctatggcaggtatgagtgaaagttcatttttatcaaaacgtccttctacttctgaagtaaataatgttaatccaaagaagcctaaacccagcgaaagtgtttctggagcaaattcctcagctgtattaccttcagttaaatctccttcagtgacttcttcccaggctatgctagcaaaaggtacaaatacctcatcaaatcagtctaaaaatggaacaccttttccaagagcttgtccaaagtgcaacattcatttcaatcttttggatcctttgaaaaatcacatgaagtattgttgtccagacatgataaataactttttgggactggctaaaacagaattttcaagtacagtaaataaaaacacaactattgattcagagaaaggaaaattgatcatgttagttaatgacttttattatggaaaacatgaaggagatgtccaggaggaacagaagactcacacaacctttaaatgcttcagttgcttgaaaattctaaaaaataacattaggtttatgaaccacatgaaacaccatttggaacttgagaagcagagcagtgagagctgggaaaaccataccacctgccagcactgctaccgtcagtttcccacaccatttcagttgcagtgtcacatcgaaagtacacatacgccccatgaattttctactatttgtaaaatctgtgaattgtcatttgaaacagaacatgttcttttacaacatatgaaggacaatcataaacctggtgaaatgccatatgtctgccaggtttgtaattatagatcatcatcattttctgatgtagaaactcattttagaacatcccatgaaaacactaagaacttgctatgcccgttttgcctcaaagttattaaaattgcaacaccatatatgcatcattatatgaagcatcagaaaaaaggaatacatcgttgtacaaaatgcaggctgcagtttttgacatgcaaggagaaaatggatcataagactcaacaccatcgaacatttataaaacctaaacaactagaaggattgcctcctggaacaaaagttactattcgagcttcagttggacctctgcaatcaggagcttcacctacaccttccattagtgcaagtgcttctacccttcagctctcacctccaaggactaaaaatataactgctaaaaatcctgcaaaatctaatacaagtaaacctaatacagtcaaatccaacgcaagtaaacctaatacaagtaagcctaatggaagtaaatctaaatacaaaccaaaaatctctaatatgcaaaagaaacaaagcacattggctagtagcaataaaaaaagtaaagtcaatacagcattgaggaatttaaggtatcgtcggggcattcacaaatgcattgagtgttgttccgaaataaaagattttgcaaaccactttcctacgtacgtccactgtagtttttgcagatacaacactagctgtagcaaagcctatgtaaatcatatgatgagctttcatagtaaccgtccaagcaaaaggttttgtatttttaagaagcattcagaaaatctccggggcattactctagtgtgccttaattgtgatttcctaagtgatgtttctggcttagataatatggctacacacttaagtcaacataaaactcatacttgccaagttgtaatgcagaaagtttctgtttgtatcccaacttctgagcacctttctgaattaaaaaaagaagctcccgcaaaggaacaagaacctgtgtctaaggaaattgcaagacctaacatggctgaaagagaaacagaaacatcaaattctgaaagtaaacaagataaagctgcttcttcaaaagaaaaaaatggatgtaatgcaaattcatttgaaggctcatcaacaacaaaaagtgaagaaagcataacagtttcagataaggaaaatgaaacctgtcttgcagaccaggaaactggctcaaaaaacatcgtcagttgtgattcaaatattggtgcagataaagtggaaaagaaaaaacaaatacaacacgtttgtcaggaaatggagttgaagatgtgccaaagttcagaaaacataatcttatctgatcagattaaagatcacaactccagtgaagccagattttcttcaaagaatattaaggatttgcgattagcatcagataatgtaagcattgatcagtttttgagaaaaagacatgaacctgaatctgttagttctgatgttagcgagcaaggcagtattcatttggaacctctgactccatccgaggtacttgagtatgaagccacagagattcttcagaaaggtagtggtgatccttcagccaagactgatgaagtagtgtctgatcaaacagatgacattcctggaggaaataaccctagcacaacagaggcaacagtagacctggaagacgaaaaagaaagaagttgaaattagtcattttaagtttcagtgtaccaacgataagggcatttggaacagtgctatcaggtgagctcagtggtgctgttgtaggttcagaaatggaaatatgtaagggaggtcacacatacactttacctgtatgttcaacctatgttatcaaacaaatcaattcaccaataatagcatgattagtagggattcccaaaaagtttttaaaaacacgaacaggattttaatgataattaaatttgcagtggaaaggtctcatttaatggttttcaaggaaatgggatttggttgctgacatgaattgatgatattagtaatatttataaagcctttcaaacttccatcaatcctaagctaaaaatctttattacctgtatatccttttcagttaactgagaggaagggatttggaaaccatgtacttttggggagtaattgattaaaaacaatggctgattggcattgttaatgaaggctttatttgtgaggatgatgctggtaaatggagcatgcttagagtactaaattgatctaatgagaatttggatgaacataaacttaattttggatttaatataacattccagtcagacgcatgtaaacagaatatttgaatctttgtacctccatacaagtgttagcctgccaggctgtaagcttaccttaattaaactttcagtgaaagtggaattattaagatataaatttatatttgtgctttttgtcagtgtgtaagctgtgtagaaattctttgatgtattagttgtattaatgtaaagtagaaacccattgttgaaactcctgtagctattatgcttttaatattgttttaatgatcttccttagaaataggcccataaaaatggtctggaagccaaaccaaagtatggtataatgtagatattgtaaagcagtaaactgaaaacatgtcctggcatgtattcagccatgtttaagtgacttttctgtaattgtaaaataaaaacttcaaatgggacctaaaacagtgatgtaaaagaactggttttggaaatttagcctaatttatctataagatggctgctaaattgatttttcagttctttttatcatctagaatataatagatatagaaatgaataatatgaagaacagtagtttgctttgaaatactaataaacttttatttaaaatgcttcatttttacttcttaaaatgtgctttggattcttaaattttgtttcactgaatgttcaatgttttaaatggcgattaaaatactctgctgtatatagtagtttttgagtaaatatttgcaataaaaatctgcccccg

SEQ ID NO: 314893 - protein, 421 aa, Artificial Sequence
  derived and/or modified sequence
MLVNDFYYGKHEGDVQEEQKTHTTFKCFSCLKILKNNIRFMNHMKHHLELEKQSSESWENHTTCQHCYRQFPTPFQLQCHIESTHTPHEFSTICKICELSFETEHVLLQHMKDNHKPGEMPYVCQVCNYRSSSFSDVETHFRTSHENTKNLLCPFCLKVIKIATPYMHHYMKHQKKGIHRCTKCRLQFLTCKEKMDHKTQHHRTFIKPKQLEGLPPGTKVTIRASVGPLQSGASPTPSISASASTLQLSPPRTKNITAKNPAKSNTSKPNTVKSNASKPNTSKPNGSKSKYKPKISNMQKKQSTLASSNKKSKVNTALRNLRYRRGIHKCIECCSEIKDFANHFPTYVHCSFCRYNTSCSKAYVNHMMSFHSNRPSKRFCIFKKHSENLRCVGGQIECDLPKLHKLVVEPRLTLGLLTPNF

SEQ ID NO: 314894 - DNA, 1266 bp, Artificial Sequence
  derived and/or modified sequence
atgctggtgaacgacttctactacggcaagcacgagggcgacgtgcaggaggagcagaagacccacaccaccttcaagtgcttcagctgcctgaagatcctgaagaacaacatcagattcatgaaccacatgaagcaccacctggagctggagaagcagagcagcgagagctgggagaaccacaccacctgccagcactgctacagacagttccccacccccttccagctgcagtgccacatcgagagcacccacaccccccacgagttcagcaccatctgcaagatctgcgagctgagcttcgagaccgagcacgtgctgctgcagcacatgaaggacaaccacaagcccggcgagatgccctacgtgtgccaggtgtgcaactacagaagcagcagcttcagcgacgtggagacccacttcagaaccagccacgagaacaccaagaacctgctgtgccccttctgcctgaaggtgatcaagatcgccaccccctacatgcaccactacatgaagcaccagaagaagggcatccacagatgcaccaagtgcagactgcagttcctgacctgcaaggagaagatggaccacaagacccagcaccacagaaccttcatcaagcccaagcagctggagggcctgccccccggcaccaaggtgaccatcagagccagcgtgggccccctgcagagcggcgccagccccacccccagcatcagcgccagcgccagcaccctgcagctgagcccccccagaaccaagaacatcaccgccaagaaccccgccaagagcaacaccagcaagcccaacaccgtgaagagcaacgccagcaagcccaacaccagcaagcccaacggcagcaagagcaagtacaagcccaagatcagcaacatgcagaagaagcagagcaccctggccagcagcaacaagaagagcaaggtgaacaccgccctgagaaacctgagatacagaagaggcatccacaagtgcatcgagtgctgcagcgagatcaaggacttcgccaaccacttccccacctacgtgcactgcagcttctgcagatacaacaccagctgcagcaaggcctacgtgaaccacatgatgagcttccacagcaacagacccagcaagagattctgcatcttcaagaagcacagcgagaacctgagatgcgtgggcggccagatcgagtgcgacctgcccaagctgcacaagctggtggtggagcccagactgaccctgggcctgctgacccccaacttctag

SEQ ID NO: 314895 - DNA, 1266 bp, Artificial Sequence
  derived and/or modified sequence
atgttagtcaatgatttttactacgggaagcacgagggtgacgttcaggaagaacagaagacacacaccacttttaagtgcttcagctgcttgaagatcctgaagaacaacatccgtttcatgaatcacatgaagcaccacctcgaacttgagaaacagtcatccgaatcttgggagaatcacacaacgtgtcagcactgctaccgccaatttcctacccctttccagctgcagtgtcacatcgagtcaacacatacaccacacgaattttcaacgatctgcaagatctgtgagctgagcttcgagactgaacacgtcctgctgcagcacatgaaagacaatcataaacccggagagatgccatatgtttgtcaggtctgtaactacagaagtagcagtttctcggatgttgaaactcactttaggacaagccacgaaaacaccaaaaacttattgtgccctttctgtctgaaagtaattaaaatcgcgacaccatacatgcaccattacatgaagcatcagaagaagggcattcacagatgcacaaaatgccgtctacagtttctgacctgcaaagaaaagatggatcataagacgcagcatcataggacgtttatcaagccgaagcagttggagggactgccgccaggaaccaaagtaacaatacgggctagcgtaggacctctgcaatcgggagccagtccaaccccatccataagcgcatcggcgtcaacactgcagctgagtcctcctcgcaccaaaaacattaccgccaagaatcctgccaagtctaatacaagtaagcctaatacagtaaagtctaatgcctcaaaaccgaacacgtctaaacccaatggcagtaagtcaaagtataagccaaaaatatcaaacatgcaaaaaaagcaatccacgctggctagctctaataagaaatcaaaagtgaatacggccttgcgcaatttaaggtaccggagggggatacacaaatgcatcgagtgttgtagtgagatcaaggacttcgcgaatcactttcctacttatgtccactgctctttctgtcgctataatacctcctgctccaaggcctatgtcaatcacatgatgtccttccacagcaaccgaccgagcaagcgattttgcatctttaaaaagcatagcgaaaatcttcggtgtgttggcgggcagattgaatgtgacttgcccaaactgcataaacttgtcgtcgagccgcgacttactttaggcctgttgaccccaaacttctag

SEQ ID NO: 314896 - DNA, 1266 bp, Artificial Sequence
  derived and/or modified sequence
atgctggtgaatgacttctactacggcaagcatgaaggagatgtgcaggaggagcagaagacccacaccaccttcaagtgcttcagctgcctgaagatcctgaagaacaacatccgcttcatgaaccacatgaagcaccacctggagctggagaagcagagcagcgagagctgggagaaccacaccacctgccagcactgctaccggcagttccccacccccttccagctgcagtgccacatcgagagcacccacacccctcatgagttcagcaccatctgcaagatctgtgagctgagctttgaaacagaacatgtgctgctgcagcacatgaaggacaaccacaagccaggagagatgccctacgtgtgccaggtgtgcaactaccgcagcagcagcttcagtgatgtggagacccacttccgcaccagccatgagaacaccaagaacctgctgtgccccttctgcctgaaggtgatcaagatcgccaccccctacatgcaccactacatgaagcaccagaagaagggcatccaccgctgcaccaagtgccgcctgcagttcctgacctgcaaggagaagatggaccacaagacccagcaccacaggaccttcatcaagcccaagcagctggagggcctgcccccaggcaccaaggtgaccatccgggcctctgtgggccccctgcagagcggggccagccccacccccagcatcagcgccagcgccagcaccctgcagctgagcccccccaggaccaagaacatcacagccaagaacccagccaagagcaacaccagcaagcccaacacagtgaagagcaatgccagcaagcccaacaccagcaagcccaacggcagcaagagcaagtacaagcccaagatcagcaacatgcagaagaagcagagcaccctggccagcagcaacaagaagagcaaggtgaacacagccctgaggaacctgcgctaccgccggggcatccacaagtgcatcgagtgctgcagcgagatcaaggactttgccaaccacttccccacctacgtgcactgcagcttctgccgctacaacaccagctgcagcaaggcctacgtgaaccacatgatgtccttccacagcaaccggcccagcaagcgcttctgcatcttcaagaagcacagcgagaacctgcgctgtgtgggcggccagattgaatgtgacctgcccaagctgcacaagctggtggtggagccccggctgaccctgggcctgctgacccccaacttctag

SEQ ID NO: 314897 - DNA, 1266 bp, Artificial Sequence
  derived and/or modified sequence
atgctggtgaacgacttctactacggcaagcacgagggcgacgtgcaggaagaacagaaaacccatacgacctttaaatgcttttcatgtctgaagattctcaaaaataacatccgttttatgaatcatatgaagcaccatttggaactagaaaagcagtcaagcgagtcgtgggagaatcacaccacatgtcagcactgttatagacagttccctactccattccaactgcaatgccatattgaaagtactcataccccccacgaattcagtaccatctgtaaaatttgtgagctgagttttgagaccgagcatgttctcttgcagcacatgaaagacaatcataagcccggtgagatgccttatgtgtgccaggtttgcaactaccggtccagctcctttagcgacgtggaaacacactttcggaccagtcatgagaacactaaaaatctgctgtgtccattctgtctcaaggttatcaagatagccacaccatatatgcatcattatatgaaacaccaaaaaaaaggcatacacaggtgtacaaaatgtcgactgcagttcctgacatgtaaagagaaaatggatcacaagacacagcatcacagaaccttcatcaagcctaaacagctggaggggcttccacctggcaccaaggtgacgatcagagcttccgtgggtcctttgcagtctggagcttcaccgacaccgagcatctccgccagtgcctctacactgcagctgagccctccaaggacaaagaacattaccgcgaaaaaccctgccaaaagtaatacgtctaaacctaacaccgttaaatccaatgctagtaagccaaatacaagtaagcctaacgggagtaagtcgaagtacaaacctaaaatctcaaatatgcagaaaaagcagtcaaccctggcaagtagcaataagaaaagtaaggtgaataccgctctgaggaatctgagatatagacgcgggatccacaagtgcatcgagtgttgttccgaaataaaagacttcgccaaccatttccccacatatgtgcactgttccttttgccgctataatacctcttgttctaaagcatatgttaaccacatgatgagttttcactctaaccgtccatccaaaagattctgcatctttaagaaacattccgagaacctgagatgcgtgggggggcaaatcgagtgtgacctacccaagctgcacaagctggtggtggaaccccggctcaccctcggcctgcttacaccgaacttctag

SEQ ID NO: 314898 - DNA, 1266 bp, Artificial Sequence
  derived and/or modified sequence
atgctggtcaacgatttctactatggcaaacacgagggcgacgtgcaggaagagcaaaagactcatacaactttcaaatgtttcagctgcctgaaaattctgaaaaataacatcaggttcatgaatcatatgaaacatcacttggagctggagaaacagagttccgagagttgggagaatcatacaacctgtcagcattgctatagacagtttccaacaccatttcagctgcaatgccacatcgagtccacccacaccccccacgaattcagcacgatctgtaagatttgtgagctcagctttgaaactgagcacgtcctgctccagcacatgaaggacaatcataagcccggagagatgccatacgtttgtcaggtgtgcaattatagaagcagctccttctcagatgttgaaactcatttcagaacatctcatgaaaatacaaagaacctcctctgccctttttgcctcaaagtgataaaaatcgcaaccccctacatgcaccactatatgaagcaccagaaaaaggggatacacagatgcaccaagtgccggctccagttcctgacatgcaaggaaaaaatggaccataaaacacaacaccataggactttcattaaaccaaagcagttggaaggcttgccccctggcacaaaagtcacaatccgggctagtgtgggtcctctacagagcggggctagccccactccttcaatttccgccagcgccagcaccctgcaactgtcccccccacgcacaaagaacattaccgccaaaaatccggcaaagtctaatacgagtaaacctaacaccgttaagtctaatgcttctaaaccgaacacctcaaagcctaatggcagcaaatctaaatacaagcccaagataagtaacatgcaaaagaaacaaagcaccctggcgtcttctaataaaaagagcaaggtcaacacagcactacgaaacctcagatacaggcgaggaatacataaatgcatcgagtgttgttccgagattaaggactttgctaaccattttcccacgtacgtgcactgttccttctgtcggtacaacacatcttgcagcaaggcctatgtgaaccatatgatgagtttccacagtaatcgaccctccaaaagattctgtatcttcaagaaacactctgagaatctcagatgcgttgggggtcagatcgaatgcgatctgccgaagctacataagctggtggtcgaaccgagactcacactagggttactgactcctaacttctag

SEQ ID NO: 314899 - protein, 642 aa, Artificial Sequence
  derived and/or modified sequence
MRSITQGACRFIWEDKGYISGDHINLVSSSLSSFPILQRSSEEKILYSDRLSLERQKLTVCPIINGEDHLRLLNFQHNFITRIQNISNLQKLISLDLYDNQIEEISGLSTLRCLRVLLLGKNRIKKISNLENLKSLDVLDLHGNQITKIENINHLCELRVLNLARNFLSHVDNLNGLDSLTELNLRHNQITFVRDVDNLPCLQHLFLSFNNISSFDSVSCLADSSSLSDITFDGNPIAQESWYKHTVLQNMMQLRQLDMKRITEEERRMASVLAKKEEEKKRESHKQSLLKEKKRLTINNVARQWDLQQQRVANIATNEDRKDSDSPQDPCQIDGSTLSAFPEETGPLDSGLNNALQGLSVIDTYLVEVDGDTLSLYGSGALESLDRNWSVQTAGMITTVSFTFIEFDEIVQVLPKLKIKFPNSLHLKFKETNLVMLQQFNALAQLRRIDQLTIDPQGNPVVNFTLWKYYVLFRLSHFSMQKINGTEVTQNDMIMAERLFGILAHVASSELPQYRLISILGDARKKQFRYLLESKGKKPGIINEENNDSKRLVGENTNRATLNYTTRDFYNEKLEEIKEKKKFCKTYIEDLVKEATEINMKNEALQKLWPQMFIELVRDAVIEIRNKNSYMKLCLQQITDQK

SEQ ID NO: 314900 - DNA, 1929 bp, Artificial Sequence
  derived and/or modified sequence
atgagaagcatcacccagggcgcctgcagattcatctgggaggacaagggctacatcagcggcgaccacatcaacctggtgagcagcagcctgagcagcttccccatcctgcagagaagcagcgaggagaagatcctgtacagcgacagactgagcctggagagacagaagctgaccgtgtgccccatcatcaacggcgaggaccacctgagactgctgaacttccagcacaacttcatcaccagaatccagaacatcagcaacctgcagaagctgatcagcctggacctgtacgacaaccagatcgaggagatcagcggcctgagcaccctgagatgcctgagagtgctgctgctgggcaagaacagaatcaagaagatcagcaacctggagaacctgaagagcctggacgtgctggacctgcacggcaaccagatcaccaagatcgagaacatcaaccacctgtgcgagctgagagtgctgaacctggccagaaacttcctgagccacgtggacaacctgaacggcctggacagcctgaccgagctgaacctgagacacaaccagatcaccttcgtgagagacgtggacaacctgccctgcctgcagcacctgttcctgagcttcaacaacatcagcagcttcgacagcgtgagctgcctggccgacagcagcagcctgagcgacatcaccttcgacggcaaccccatcgcccaggagagctggtacaagcacaccgtgctgcagaacatgatgcagctgagacagctggacatgaagagaatcaccgaggaggagagaagaatggccagcgtgctggccaagaaggaggaggagaagaagagagagagccacaagcagagcctgctgaaggagaagaagagactgaccatcaacaacgtggccagacagtgggacctgcagcagcagagagtggccaacatcgccaccaacgaggacagaaaggacagcgacagcccccaggacccctgccagatcgacggcagcaccctgagcgccttccccgaggagaccggccccctggacagcggcctgaacaacgccctgcagggcctgagcgtgatcgacacctacctggtggaggtggacggcgacaccctgagcctgtacggcagcggcgccctggagagcctggacagaaactggagcgtgcagaccgccggcatgatcaccaccgtgagcttcaccttcatcgagttcgacgagatcgtgcaggtgctgcccaagctgaagatcaagttccccaacagcctgcacctgaagttcaaggagaccaacctggtgatgctgcagcagttcaacgccctggcccagctgagaagaatcgaccagctgaccatcgacccccagggcaaccccgtggtgaacttcaccctgtggaagtactacgtgctgttcagactgagccacttcagcatgcagaagatcaacggcaccgaggtgacccagaacgacatgatcatggccgagagactgttcggcatcctggcccacgtggccagcagcgagctgccccagtacagactgatcagcatcctgggcgacgccagaaagaagcagttcagatacctgctggagagcaagggcaagaagcccggcatcatcaacgaggagaacaacgacagcaagagactggtgggcgagaacaccaacagagccaccctgaactacaccaccagagacttctacaacgagaagctggaggagatcaaggagaagaagaagttctgcaagacctacatcgaggacctggtgaaggaggccaccgagatcaacatgaagaacgaggccctgcagaagctgtggccccagatgttcatcgagctggtgagagacgccgtgatcgagatcagaaacaagaacagctacatgaagctgtgcctgcagcagatcaccgaccagaagtag

SEQ ID NO: 314901 - DNA, 1929 bp, Artificial Sequence
  derived and/or modified sequence
atgaggagcataacacagggcgcctgccggttcatttgggaggataagggatacatttccggagatcatataaacctggtgagctcgtcgctgagctcattccccatactgcaaaggtctagcgaagagaagattctgtatagtgatcgtctgtcactggagagacagaagttaacagtttgccctattatcaacggcgaggatcacctacgccttctgaattttcagcataattttatcacacgcattcagaacatatcaaatttacagaagctcatcagcctcgatttgtacgataaccagattgaggaaatttcaggtctcagcacattacgttgtctgcgggtattgctcctcggaaagaacaggattaaaaagataagtaatctggagaacctgaagtcacttgatgtgttagacctgcacggtaaccagatcactaagatcgaaaatattaatcacctgtgtgagctccgggtcctgaatctcgccagaaatttcctctcccatgtggacaatttgaatgggttggattcactgactgagctcaaccttaggcacaatcagatcacttttgtgagggacgtggacaatctgccctgcctgcagcatctgtttctgtcatttaataacatctcaagtttcgacagcgtatcctgtctcgctgactctagctctctctcggacatcacgtttgatggaaaccctatcgcccaggaatcttggtacaagcatactgtactacagaacatgatgcagctgcgtcaactggatatgaagcggatcactgaagaggaaaggaggatggcatccgtcctagctaaaaaagaggaggagaagaaaagagaatctcataagcagagtctgcttaaggagaagaaaagactcaccataaacaacgtggccaggcagtgggatctgcagcagcagcgggtcgccaatattgctactaacgaggacaggaaggatagcgacagcccccaggacccgtgtcagattgacggcagcacgttgagtgccttccccgaggagaccggccccctggatagcgggcttaacaacgcacttcagggactcagcgtgattgatacctatcttgttgaagtcgacggcgacacgctgtcgctgtatgggtctggcgcgttagaaagcctggatagaaactggagcgtgcagaccgctgggatgataaccaccgtaagctttacattcatagagttcgacgagatcgttcaagtgttgcctaagcttaagatcaaatttccaaattccctccacctgaaattcaaagaaacaaacctcgtgatgttacagcagttcaatgccctggcccaacttcgaaggatcgaccagctgacgatagatcctcagggcaacccggtggtaaactttaccctgtggaagtactatgtcctgttccggctctcccacttctcaatgcagaaaattaatgggaccgaagtgacgcagaacgacatgattatggcagaaaggctttttgggattctggcccacgtcgcgtctagtgaactgcctcagtatcgactaatcagtattctgggggatgccagaaagaagcagtttagatatttactggaatcaaaggggaaaaagcccggtataattaacgaagagaacaatgactcgaagagattagtgggcgagaatacaaacagggccacattaaactacacaacaagagatttttacaacgagaaactagaagagatcaaggaaaagaagaagttctgcaagacatatattgaggatctcgtgaaagaggccaccgaaattaacatgaaaaatgaagctctccagaagttatggcctcaaatgtttatcgagctggtcagagatgctgttatcgagatacgcaataagaacagctatatgaaactgtgtctgcagcagataactgatcagaagtag

SEQ ID NO: 314902 - DNA, 1929 bp, Artificial Sequence
  derived and/or modified sequence
atgaggagcatcacccagggcgcctgccgcttcatctgggaggacaagggctacatcagcggggaccacatcaacctggtgagcagcagcctgagcagcttccccatcctgcagaggagcagcgaggagaagatcctgtacagcgaccggctgagcctggagcggcagaagctgactgtgtgccccatcatcaatggagaggaccacctgcggctgctgaacttccagcacaacttcatcacccgcatccagaacatcagcaacctgcagaagctgatcagcctggacctgtatgacaaccagatcgaggagatcagcggcctgagcaccctgcgctgcctgcgggtgctgctgctgggcaagaaccgcatcaagaagatcagcaacctggagaacctgaagagcctggatgtgctggacctgcacggcaaccagatcaccaagattgagaacatcaaccacctgtgtgagctgcgggtgctgaacctggccaggaacttcctgagccacgtggacaacctgaatggcctggacagcctgacagagctgaacctgcggcacaaccagatcacctttgtgagagatgtggacaacctgccctgcctgcagcacctgttcctgtccttcaacaacatcagcagctttgattctgtgtcctgcctggccgacagcagcagcctgagtgacatcacctttgatggcaaccccatcgcccaggagagctggtacaagcacacagtgctgcagaacatgatgcagctgcggcagctggacatgaagaggatcacagaggaggagaggaggatggcctctgtgctggccaagaaggaggaggagaagaagcgggagagccacaagcagagcctgctgaaggagaagaagaggctgaccatcaacaacgtggcccggcagtgggacctgcagcagcagagggtggccaacatcgccaccaatgaagacaggaaggacagcgacagcccccaggacccctgccagattgatggcagcaccctgagcgccttccctgaggagaccggccccctggacagcggcctgaacaatgccctgcagggcctgagcgtcatcgacacctacctggtggaggtggatggagacaccctgagcctgtatggcagcggggccctggagagcctggacaggaactggagcgtgcagacagctggcatgatcaccaccgtgtccttcaccttcattgaatttgatgagatcgtgcaggtgctgcccaagctgaagatcaagttccccaacagcctgcacctgaagttcaaggagaccaacctggtgatgctgcagcagttcaatgccctggcccagctgcggagaattgaccagctgaccatcgacccccagggcaaccctgtggtgaacttcaccctgtggaagtactacgtgctcttccggctgagccacttctccatgcagaagatcaatggaacagaggtgacccagaatgacatgatcatggccgagcggctgtttggcatcctggcccacgtggccagcagcgagctgccccagtaccgcctcatcagcatcctgggagatgccaggaagaagcagttccgctacctgctggagagcaagggcaagaagccaggcatcatcaatgaagaaaataatgacagcaagaggctggtgggggagaacaccaacagagccaccctgaactacaccacccgggacttctacaatgagaagctggaggagatcaaggagaagaagaagttctgcaagacctacatcgaggacctggtgaaggaggccacagagatcaacatgaagaatgaggccctgcagaagctgtggccccagatgttcatcgagctggtgagagatgctgtgattgagatccggaacaagaacagctacatgaagctgtgcctgcagcagatcacagaccagaagtag

SEQ ID NO: 314903 - DNA, 1929 bp, Artificial Sequence
  derived and/or modified sequence
atgcggagcatcacccagggcgcctgccggttcatctgggaggacaagggatatatctctggggatcacatcaacctcgtaagtagctcattgagctccttccctattctgcagcggtcgagcgaagaaaagatcctgtactcggatcgcctgtctctggagcggcagaagctcaccgtttgtccaatcatcaacggagaagaccacctccgtttattgaatttccagcataacttcatcactcggatccaaaatattagtaacctgcagaagctaattagcctggatctctacgataaccaaattgaggaaatatctggcctgagtactctgaggtgcttgcgggttttgctgctcggcaaaaatcggattaagaaaattagcaacctggagaacctcaagtcccttgacgtgcttgatctgcacggcaatcaaataacgaagatcgagaacattaatcatctttgtgaactgcgggtgttaaaccttgcacggaatttcctttctcatgttgataaccttaacggtttggactccctgacagagctgaacctgaggcataatcagattacattcgttagggacgtggacaatctcccatgcctccaacatttatttctatctttcaacaacatttcatccttcgattcagtgagttgcctagccgacagctcatctctgtccgatattacattcgatggaaaccccatcgcccaggaaagttggtacaaacacacagttttgcagaacatgatgcagctgagacagctggacatgaagcgtatcaccgaggaggagcgccggatggcgtccgtgctagcgaaaaaggaggaggagaagaaacgagagagtcacaagcagagcctgttaaaagaaaagaagagattgactataaataatgtggcgcgtcaatgggacctgcagcagcagcgcgtggctaatatcgctactaacgaagaccgtaaagattctgactcccctcaggatccatgtcagatcgatggcagcacactgtcagccttccctgaggagaccgggccgctggacagtggattgaacaacgccctccagggcctttcagtaatcgatacttacttagtggaagttgacggagacaccctgagcttatacggcagcggcgccttggaatccttggataggaactggtcagtccagacagcagggatgattaccacggtctcctttacttttatcgaattcgatgagatcgttcaagtgctgcctaagctgaagatcaaatttcctaatagcttgcatctgaagtttaaagagactaacctggtcatgcttcaacagttcaacgcgttagcccagctgcgacggatcgaccagttaaccatagatccacagggcaaccccgtggtgaatttcacattgtggaagtactacgtactgtttagattatcacactttagcatgcagaagatcaacggtacagaggtgacacagaatgacatgatcatggctgaacgcctcttcggaattctggcgcacgtcgccagcagcgagctgcctcagtacaggcttatctccatcctcggtgatgcccgtaaaaaacagttccggtatctgctagagagcaagggaaaaaaacctggaatcattaatgaagaaaacaatgatagtaaacgactggtaggcgaaaataccaatagagctactttgaactatactactagggacttttataacgaaaagctggaggaaattaaagagaagaagaaattttgcaagacatatatcgaagatctggtaaaggaagctaccgaaatcaacatgaaaaacgaggccctgcaaaagctatggccccaaatgttcatcgaactagtacgggatgctgtaatcgagatacgaaacaagaatagttatatgaagctttgcttgcagcagataacagaccagaagtag

SEQ ID NO: 314904 - DNA, 1929 bp, Artificial Sequence
  derived and/or modified sequence
atgcggtctatcacccaaggagcttgtcggttcatatgggaagacaagggctatatcagtggagaccacatcaacctcgtatccagctccctgagtagttttcctatccttcagcgcagctcggaagaaaagatcctatatagcgataggttgagcctggagaggcaaaagctgacagtgtgtcctatcatcaatggcgaggaccacctgcggctgttgaatttccagcataatttcatcacaaggatccagaacataagcaacttgcagaagctgatctcactggatctctatgataaccagatcgaggagatcagcggcctctctacactgcggtgtctgagggtactcctcttaggtaagaatagaatcaaaaagatttcaaatttggagaatctgaagagtctggatgtacttgaccttcacggaaatcaaatcaccaagatagagaatatcaatcacctatgtgagctaagggtcctcaatcttgctcggaactttctgagccacgtggacaatctgaacggcctggactccctcaccgaactgaacctccgccacaaccagattacattcgtgcgtgacgtcgacaacctgccatgcttacagcatctgttcctaagtttcaataatatttcaagctttgattcggtgtcctgcctggcagatagctcctctctgtctgatattacctttgacggaaacccaatcgcccaggagagttggtacaaacacaccgtgcttcaaaatatgatgcagctgagacaactcgacatgaagagaatcacagaggaggaaaggcggatggcctctgttcttgcaaagaaagaagaggagaagaaaagagaaagtcacaaacaaagtctgttgaaggagaaaaaaagactcacgataaacaatgttgccagacagtgggaccttcagcagcagagagtggctaacattgcaaccaacgaggaccgcaaagactcagacagccctcaagatccctgccaaattgacggaagcacgctgtctgctttccctgaggaaacagggcctttggattctgggctgaataatgctctgcagggcttatcagtgatcgatacttatcttgtggaagtagatggcgataccctgtccctgtacggcagtggcgctctagagagcctggatcgcaattggtcagtacagaccgcaggtatgatcacaactgtttcttttacgttcattgagttcgacgaaatcgtacaagtcctgccaaagctcaagataaaatttcctaattctttgcatctgaaattcaaggagacaaacttagtgatgctgcagcagttcaacgcactggcccagctccggcgtattgaccagctcacaatcgatccacaagggaatccagtggtgaatttcacgctgtggaagtactatgtgctgttccgactgtcacacttttcaatgcaaaaaatcaacggcactgaggtgactcaaaacgacatgatcatggccgagcgactgtttggcatcctagcacatgtagcctcttctgagttgccgcagtaccgtttgatctccatcctgggggatgcacgaaagaagcagtttcgctacctgctggaaagtaaaggaaagaaaccgggtatcatcaatgaggaaaataacgacagcaagagactcgtgggggagaacacaaaccgggcaacgctaaattacaccactcgcgacttttacaatgagaagctcgaagaaattaaagaaaagaagaagttctgcaagacctatatcgaagacctggttaaggaggccaccgagattaatatgaaaaatgaggccctacaaaaactttggccgcagatgttcatcgagctcgttcgggatgcggtgattgagattaggaataagaatagttatatgaagctgtgcctgcaacagattactgaccagaagtag

SEQ ID NO: 314905 - DNA, 2672 bp, Artificial Sequence
  derived and/or modified sequence
gaatctccgctgtagcgtcacctggaaggcagatctaacagagaacctggactgtctcctatcatgattcccgggaaatatcgctctgtttctggccgggctgcgaacaacgtgaactgcgggcttcatctggttattcaaacatcatcgcttcctgaaaaaaacaaagttgaattcaagctaaataaagacacatcgtcattccccggtagacttttacaacatgaccttgaaagaaactactcaagtaggcaagattttaccaagaatataaagaatgtaaaatgaggtccatcacccaaggagcttgtagatttatttgggaagacaagggctacatatctggtgatcatattaatttggtgagctcatcattgtcatcatttcctattcttcaacgttcttctgaagagaaaattctttactcagacaggttgagcctagaaagacaaaagctgaccgtatgtcctatcatcaatggggaagaccaccttcgtttgttgaactttcaacacaattttataactcggatacaaaatatttctaatctacagaagttaatatcgttggatttatatgataaccagattgaagaaattagtgggctttcgactctgagatgtcttcgtgtccttctgttggggaaaaacagaatcaagaaaatctcaaatctggagaatctaaaaagcttagatgtcttggatcttcatggaaatcagattaccaaaattgaaaatattaatcatttgtgtgagttgagagttttaaatcttgccaggaactttttaagtcatgttgataatcttaatgggctggattcactaactgaacttaacttgcgacacaatcaaatcactttcgtgagagatgtggataatttgccctgcctccaacatctctttctcagctttaacaatatatctagttttgacagtgtttcctgccttgctgactcttcttccctctcggacatcacctttgatggcaatcccatagctcaagagtcatggtacaaacacactgtccttcagaatatgatgcagctgcgccagctagatatgaagagaatcacggaagaagaaaggcgtatggcatctgttttagccaaaaaagaggaagagaagaagcgggaaagtcataaacaatctttgcttaaggagaagaaaaggttaacaattaacaacgtagctcgacagtgggacttgcaacaacaacgagtagccaatattgctacaaatgaagatagaaaagattctgactctcctcaggacccctgtcagattgatggaagcaccctctctgcattcccagaggaaacagggcctctagactcaggactcaacaatgctttacaaggtttatctgtcatagacacataccttgttgaagtggacggggatacactttccctatatggctcaggagcactggaatctctggataggaattggagtgttcaaacagcaggaatgatcacaacagtctccttcactttcatagaatttgatgaaatcgtccaagtgcttcctaaactgaagattaagtttcctaattctctgcaccttaaattcaaggaaacaaatcttgtaatgctgcagcaatttaacgcactagcccaactccgtcgtattgaccagttgacaattgatcctcaaggaaatccagttgtcaattttacactctggaaatactatgtactgtttaggctaagccatttcagtatgcagaaaataaatggaacagaggtgacacagaatgatatgataatggctgaaaggctctttggaatcctagcacatgtagcatcttctgagttaccccagtatcgtctgatttccattctgggtgatgccaggaaaaagcaatttcggtatctactagaatccaaaggaaaaaaacctggtattatcaacgaagaaaataatgacagcaaaagacttgtaggagaaaacacaaatcgtgctacattaaattatactacaagagacttttataatgaaaagctagaggaaataaaggaaaagaagaaattctgtaaaacatatatagaagaccttgtgaaggaagccacagaaatcaacatgaaaaatgaggctttgcagaagctttggccacagatgttcattgagcttgttagggatgcagtcatagaaattcgcaataaaaattcctatatgaagctctgcctacagcagataacagaccaaaaataaaaatggcctttagttacagttgattttggcagttttattttttgaaggttgaaaatatgcaggttatacatgttaaaacaacaacaacactatcctataaactagaaagactagtataaaagcattattgcccactgttctcatagctaaaagttaagaaggaaggaaggaaagcaggagaaaggaaggattaattgcctgtatgtgaggaccaaacaacctttgggaactaaacagttttcagagatggcgtggcactgcatccttggttcttgctttgattggtgccctgctatagcccaaagcacgtagtatttgctgatgattcagcatgagctgcatctacctacttttagctgataattttcagttatttccctttttattttatgtcatgatttcaaagccaaaaatatgttctttttatgagtgaagaataaacttactaacaaattagtc

SEQ ID NO: 314906 - protein, 148 aa, Artificial Sequence
  derived and/or modified sequence
MAGPFSRLLSARPGLRLLALAGAGSLAAGFLLRPEPVRAASERRRLYPPSAEYPDLRKHNNCMASHLTPAVYARLCDKTTPTGWTLDQCIQTGVDNPGHPFIKTVGMVAGDEETYEVFADLFDPVIQERHNGYDPRTMKHTTDLDASK

SEQ ID NO: 314907 - protein, 417 aa, Artificial Sequence
  derived and/or modified sequence
MAGPFSRLLSARPGLRLLALAGAGSLAAGFLLRPEPVRAASERRRLYPPSAEYPDLRKHNNCMASHLTPAVYARLCDKTTPTGWTLDQCIQTGVDNPGHPFIKTVGMVAGDEETYEVFADLFDPVIQERHNGYDPRTMKHTTDLDASKIRSGYFDERYVLSSRVRTGRSIRGLSLPPACTRAERREVERVVVDALSGLKGDLAGRYYRLSEMTEAEQQQLIDDHFLFDKPVSPLLTAAGMARDWPDARGIWHNNEKSFLIWVNEEDHTRVISMEKGGNMKRVFERFCRGLKEVERLIQERGWEFMWNERLGYILTCPSNLGTGLRAGVHIKLPLLSKDSRFPKILENLRLQKRGTGGVDTAATGGVFDISNLDRLGKSEVELVQLVIDGVNYLIDCERRLERGQDIRIPTPVIHTKH

SEQ ID NO: 314908 - protein, 254 aa, Artificial Sequence
  derived and/or modified sequence
MAGPFSRLLSARPGLRLLALAGAGSLAAGFLLRPEPVRAASERRRLYPPSAEYPDLRKHNNCMASHLTPAVYARLCDKTTPTGWTLDQCIQTGVDNPGHPFIKTVGMVAGDEETYEVFADLFDPVIRGLSLPPACTRAERREVERVVVDALSGLKGDLAGRYYRLSEMTEAEQQQLIDDHFLFDKPVSPLLTAAGMARDWPDARGIWHNNEKSFLIWVNEEDHTRVISMEKGGNMKRVFERFCRGLKEVVVGIK

SEQ ID NO: 314909 - protein, 168 aa, Artificial Sequence
  derived and/or modified sequence
MKHTTDLDASKIRSGYFDERYVLSSRVRTGRSIRGLSLPPACTRAERREVERVVVDALSGLKGDLAGRYYRLSEMTEAEQQQLIDDHFLFDKPVSPLLTAAGMARDWPDARGIWHNNEKSFLIWVNEEDHTRVISMEKGGNMKRVFERFCRGLKEVREDYVGELGGRT

SEQ ID NO: 314910 - protein, 103 aa, Artificial Sequence
  derived and/or modified sequence
MAGPFSRLLSARPGLRLLALAGAGSLAAGFLLRPEPVRAASERRRLYPPSAEYPDLRKHNNCMASHLTPAVYARLCDKTTPTGWTLDQCIQTGVDNPGHPFIK

SEQ ID NO: 314911 - protein, 129 aa, Artificial Sequence
  derived and/or modified sequence
MAGPFSRLLSARPGLRLLALAGAGSLAAGFLLRPEPVRAASERRRLYPPSAEYPDLRKHNNCMASHLTPAVYARLCDKTTPTGWTLDQCIQTGVDNPGHPFIKTVGMVAGDEETYEVFADLFDPVIQER

SEQ ID NO: 314912 - protein, 241 aa, Artificial Sequence
  derived and/or modified sequence
MAGPFSRLLSARPGLRLLALAGAGSLAAGFLLRPEPVRAASERRRLYPPSAEYPDLRKHNNCMASHLTPAVYARLCDKTTPTGWTLDQCIQTGVDNPGHPFIKTVGMVAGDEETYEVFADLFDPVIQERHNGYDPRTMKHTTDLDASKIRSGYFDERYVLSSRVRTGRSIRGLSLPPACTRAERREVERVVVDALSGLKGDLAGRYYRLSEMTEAEQQQLIDDHFLFDKPVSPLLTAAGMA

SEQ ID NO: 314913 - DNA, 447 bp, Artificial Sequence
  derived and/or modified sequence
atggcggggccattttccagattgctgagcgctcggccagggctgcgtcttcttgccctagccggcgccgggtcacttgcagcaggtttcctgctgcgtccagagccagtcagagctgcatcagagaggcggcgtctgtacccaccatctgctgagtaccctgatctgcgaaaacacaacaattgtatggcctcccatctcactcccgctgtctatgccagactgtgtgacaaaaccacacctactggctggaccctggaccagtgcatccaaacaggggtcgataaccctggtcatccctttattaagactgtgggcatggtggcgggcgatgaagagacatacgaagtcttcgctgatcttttcgatccagttattcaggaacggcacaacgggtatgaccctcggactatgaaacacaccactgacctggatgcctccaagtag

SEQ ID NO: 314914 - DNA, 1254 bp, Artificial Sequence
  derived and/or modified sequence
atggcgggccccttcagccgtctgttatctgcacgcccgggattgcggcttctcgcattagcaggggctggctcactggctgccggatttctcctcaggccagaaccagtccgggccgcgtccgagcgcagaaggttgtatcccccaagtgccgaatatcccgacctgcgcaaacacaataattgcatggccagccacctgaccccagcagtatatgctcgcctgtgtgataagaccactcccacaggctggaccctcgatcagtgcattcagacaggcgtggacaatccagggcaccccttcataaaaacagtcgggatggtagcaggagacgaggaaacgtacgaggtcttcgccgacttgttcgatccagtgatacaggaacgtcacaacggctacgacccaaggaccatgaagcacaccaccgatctcgacgcctccaaaatccggtccgggtacttcgacgagcgctacgtgctgagttcccgggttcggaccgggcggagcattcgaggcctgtccctgccacccgcatgcacgcgtgccgagcgccgcgaagtagaaagggtggtggtggatgcattgagtggtctgaagggggatttggcgggccggtattaccggctctcagaaatgacagaggccgagcagcaacaattaatcgacgatcacttcctatttgataaacccgtctctccccttttgactgcagcaggcatggccagggattggccagatgcccgcgggatctggcataataatgagaaatcatttctaatatgggtgaacgaggaggatcacacaagggtcataagcatggagaagggtggcaatatgaaacgagtgtttgagagattttgtcgaggtctgaaggaggtggaaaggctgattcaggaacgcgggtgggagttcatgtggaatgagaggttgggatacattctgacttgccctagcaacctgggcactggtctacgggccggagttcatattaagctccccctgctctccaaggactcccggtttccgaagattcttgagaacttgcgtctccagaaaaggggaactgggggggtagatacggccgctaccgggggagtgttcgacatcagcaatctggatcgcctagggaagagcgaagttgaactcgtgcagctggttattgacggtgtgaactatctgatcgattgtgaaagaaggctggagcgcggccaggacatccggattcccaccccagtgattcacacaaaacattag

SEQ ID NO: 314915 - DNA, 1254 bp, Artificial Sequence
  derived and/or modified sequence
atggccggcccattttctcggctcctgtccgcgcgcccaggacttaggttactcgcactcgcaggagcaggctccctggcggctggcttcctgcttaggccagagccagtcagagcggctagcgagagacgccgactctacccaccttctgccgagtaccccgacttgaggaaacataacaattgcatggcctcacatctcacccccgctgtttacgcacgactgtgcgataagacaaccccgacaggctggacccttgatcagtgcatccagacgggagtggacaaccctggacaccctttcatcaaaacggtgggcatggttgctggtgatgaggaaacatacgaagtttttgctgatctgtttgatccagtgattcaggaacggcacaatgggtatgatcccagaaccatgaaacacaccaccgacctggatgccagtaaaattagaagcggctactttgacgagcgttacgtgctgtctagccgagttcggacaggaaggtccattagaggtctcagcctgccaccagcctgtacgcgggcggaacggcgcgaagtagagcgcgttgtggtggatgctcttagcggactgaagggcgatttggcaggccgctattatcgcctatcggagatgacagaggcggagcagcaacagttaattgatgaccattttctcttcgacaaaccagtatctcctctgctgacagcagcgggaatggcaagagattggccagatgcccgcgggatctggcataacaacgagaagtccttcctgatctgggtaaatgaggaggaccataccagggttatttccatggagaaagggggtaatatgaaaagggtattcgaacggttctgtagggggctgaaagaagtggagaggcttatccaggagcgcggctgggagtttatgtggaatgagagattgggctacattctgacgtgcccctctaatctgggtacaggtctgagggccggggtacatatcaaacttcctctgctgtccaaggattcccgctttcctaagattctcgagaatctgcgcctgcagaaacggggaaccggcggggtagacacagccgcaaccggcggagtgttcgacatctcaaatcttgataggctcggcaaatccgaggtggaattagtacagctcgtaattgacggcgtgaattatctgatcgattgcgagcgtaggcttgaaaggggacaggacatcaggataccgacccctgtcatccatacaaagcactag

SEQ ID NO: 314916 - DNA, 765 bp, Artificial Sequence
  derived and/or modified sequence
atggctgggcccttcagcagactgctgtcagctcggcccgggctgcggttactggccctggcaggtgctggaagtcttgctgcagggttcttgctgaggcctgaacccgtccgggccgcatccgaacggagaagattgtatccgcctagtgctgaatatcctgatctcagaaaacacaacaactgcatggcttcgcacctcactcccgctgtctatgcccggctttgcgacaagactacccctactggttggacattagaccagtgtatccagacaggggtggacaacccgggccacccttttatcaaaaccgtgggcatggttgccggggatgaggaaacatacgaagtgttcgcagacctgttcgatcctgtaatccgagggttatccttgccccctgcctgcaccagggccgaacgtagggaagtggagcgggtggtggtggacgcattgtccggcctgaagggagatttagctgggagatactatcgtttgtcggaaatgacagaggccgaacagcaacagcttatagatgatcatttcctgtttgataaaccagtgagccctctcttgaccgctgctggaatggcgagagactggcctgacgcaagaggcatttggcataacaatgagaaatccttcctcatttgggtgaatgaagaggatcacaccagagtgatttcaatggagaaaggcggaaatatgaaacgtgtcttcgaacgtttttgccggggcttgaaggaggtcgtagtggggatcaagtag

SEQ ID NO: 314917 - DNA, 1254 bp, Artificial Sequence
  derived and/or modified sequence
atggcggggccattttctaggcttcttagtgctcgcccaggactaaggctgcttgcgctggccggtgccgggagtctggctgcagggttcttgttacgtccagaacctgtgagggccgcatccgagcgacggcgtctgtatccacccagcgccgagtatcccgacctgcggaagcataacaattgcatggccagccacctcactcctgccgtgtatgcccggctgtgcgataagactaccccgacaggatggactctcgaccagtgcatccagaccggggtggacaacccagggcaccctttcatcaagacagtgggcatggtggcaggcgacgaagaaacttatgaggtcttcgcagacctgttcgacccagtaatacaggagagacataatggatatgacccccggactatgaaacatacaactgacctcgacgcttctaagattagaagcgggtatttcgatgagaggtatgttctcagctccagggtgcgaactggtcgctcaatccggggattatctctgcctcctgcctgcactagggccgaaagacgcgaggtggaacgagtggtcgttgacgcgctcagcgggcttaagggcgaccttgcaggccgatactaccggcttagtgagatgaccgaagcagagcagcaacaactgattgatgatcatttcctattcgacaagccagtttccccactgctgactgctgcaggaatggcaagggattggcccgacgctagaggcatatggcacaataacgagaagtcatttctgatatgggtgaatgaagaggaccacacacgggttatcagcatggagaaagggggaaacatgaagcgagtgttcgaaagattttgcagaggactgaaggaggtggagcggctcatccaggagcgggggtgggagtttatgtggaacgagcggctcggatacatactgacgtgccctagcaatctgggtaccggcctgagggcaggagtccatatcaagcttccactactcagtaaagactcccgcttcccgaaaattctggaaaacttgcggttacaaaaacggggaacggggggcgttgacactgctgcaacgggtggggtatttgacatctccaaccttgataggctgggtaagagcgaggtagagctggtgcagctggtgattgacggagtcaactatttaattgattgtgaacggagactagaacgcggacaggatatccggatccctacacccgtgatacacactaaacactag

SEQ ID NO: 314918 - DNA, 312 bp, Artificial Sequence
  derived and/or modified sequence
atggctgggcccttttctcgtctgctaagtgccagaccaggtctgcgcttgcttgctctagcaggagccggctccctggcagccggtttccttctaagacccgaaccagtgagagccgccagcgaaaggagacggttgtaccctcctagtgccgaatacccagacctgcgcaaacacaacaactgcatggcttcccatctcacccccgccgtttatgctcggctgtgtgacaagacgacccccaccggatggacactggaccagtgtatccagaccggggttgataatcctggccatcccttcataaagtag

SEQ ID NO: 314919 - DNA, 390 bp, Artificial Sequence
  derived and/or modified sequence
atggccggacccttcagtaggttacttagcgccaggccaggcttacggctgctagccctagctggagccgggagccttgctgcagggtttcttctgaggccggaacccgtaagggcagcctcagaacgcagaagattgtaccctccttccgccgagtacccagatctcaggaaacacaacaactgcatggcatctcatctcacaccagccgtctacgctaggctgtgcgataagaccactccaaccggttggactttggaccaatgtattcagacaggagtcgacaaccctgggcacccctttattaagactgtgggtatggtggccggagatgaggaaacatatgaagtgtttgcagatctctttgacccagttatccaggagcggtag

SEQ ID NO: 314920 - DNA, 1254 bp, Artificial Sequence
  derived and/or modified sequence
atggccggcccattctcacgcttgctgagcgcaaggcctggattaagacttctggcactggctggtgccgggtcactggcagctggattcttgctgaggcctgagccggtgagggcagcgagtgaacggcggcgtttgtatccgccctccgccgaataccctgatctgaggaagcacaacaactgtatggccagtcatctgactcctgctgtctatgcacgcttatgtgataaaaccaccccaacaggctggactctggaccagtgtatccaaacaggcgtggataatcccggccatccattcattaaaaccgttggaatggttgccggggatgaggaaacttacgaagtttttgccgatctatttgaccccgtgattcaagaaagacacaatggttatgacccacgcactatgaagcatactaccgatctagacgcctcgaagataaggtcgggctacttcgatgagcgatatgtgcttagctctagggttaggacaggccggagcatccggggactgtccctcccacctgcttgcaccagggcagagagaagggaggtcgaacgtgtggttgtcgacgcgttatctggcctaaaaggcgatcttgccggtagatactaccgactctctgaaatgacagaggctgaacagcagcaattaatcgacgaccacttcctgttcgacaagcctgtcagccccctgttgacagctgccggaatggcacgtgactggccagatgctcggggcatctggcataacaatgaaaaatcgtttctcatttgggttaacgaggaagaccacacaagagtaataagtatggagaagggaggtaacatgaaaagagtcttcgagagattctgccgtgggctgaaagaggttgaacgccttatccaagaaagggggtgggagtttatgtggaatgagcgcctgggctatattctaacatgtccgtctaacttaggcacaggccttcgagctggagttcacatcaagctcccgttgctctcaaaagactctaggttcccaaagattttggaaaatctgaggctacagaaacgcgggacaggcggcgtggacaccgctgctaccggcggggtcttcgatatatcaaatcttgacaggctgggcaagagcgaagttgagctggtacagttggtgatagatggcgtcaattatctcatcgactgtgaaaggcggctagaacgtggccaggacataaggatacctacacctgtgatccatactaaacactag

SEQ ID NO: 314921 - DNA, 726 bp, Artificial Sequence
  derived and/or modified sequence
atggcgggcccttttagtagactgctgagcgctaggcccggcctgagattgttagcactggccggcgcaggttccttagctgcgggcttcctgctgcggccagagccagtacgcgctgcttctgaaaggaggaggctgtaccctccgagtgccgagtatccggacctccgtaagcacaacaactgtatggcgagccatttaaccccggcagtttatgcacggctgtgtgacaaaacaacaccaaccggatggacgctggatcaatgcatccagacaggggtggacaaccctggccatccttttatcaaaacagtcgggatggtcgccggggacgaagagacgtacgaagtgtttgctgatctgttcgatccagttatccaggagcgccataacggttacgacccacgtactatgaaacacaccacagacttggacgcttccaagatccgttccggctacttcgatgaacgttatgtactgtccagccgcgtccgcactggcagaagtatcagaggcttgtctctgcctcctgcatgcacacgggcggagaggcgcgaggtcgagcgggtagtcgtggatgctctctcgggcctcaaaggtgatctcgccggccgctactacaggttgagcgaaatgacagaggccgaacaacagcagctgattgatgaccactttttgtttgacaagccagtttccccactactcaccgctgctggaatggcctag

SEQ ID NO: 314922 - DNA, 447 bp, Artificial Sequence
  derived and/or modified sequence
atggccggccccttcagccggctgctgagcgcccggcccggcctgcggctgctggccctggccggggccggcagcctggccgccggcttcctgctgcggcctgagcctgtgcgggccgccagcgagcggcggcggctgtacccacccagcgctgagtacccagacctgaggaagcacaacaactgcatggccagccacctgaccccagctgtgtatgcccggctgtgtgacaagaccacccccaccggctggaccctggaccagtgcatccagacaggagtggacaaccctggccaccccttcatcaagacagtgggcatggtggccggagatgaggagacctatgaggtgtttgctgacctgtttgaccccgtcatccaggagcggcacaacggctatgaccccaggaccatgaagcacaccacagacctggatgccagcaagtag

SEQ ID NO: 314923 - DNA, 1254 bp, Artificial Sequence
  derived and/or modified sequence
atggccggccccttcagccggctgctgagcgcccggcccggcctgcggctgctggccctggccggggccggcagcctggccgccggcttcctgctgcggcctgagcctgtgcgggccgccagcgagcggcggcggctgtacccacccagcgctgagtacccagacctgaggaagcacaacaactgcatggccagccacctgaccccagctgtgtatgcccggctgtgtgacaagaccacccccaccggctggaccctggaccagtgcatccagacaggagtggacaaccctggccaccccttcatcaagacagtgggcatggtggccggagatgaggagacctatgaggtgtttgctgacctgtttgaccccgtcatccaggagcggcacaacggctatgaccccaggaccatgaagcacaccacagacctggatgccagcaagatccgcagcggctactttgatgagcgctacgtgctgagcagccgggtgaggacaggccgcagcatccggggcctgagcctgcccccagcctgcaccagggctgagcggcgggaggtggagcgggtggtggtggatgccctgagcggcctgaagggggacctggccggccgctactaccgcctgtctgagatgacagaagctgagcagcagcagctgattgatgaccacttcctgtttgacaagcctgtgagccccctgctgacagctgctggcatggcccgggactggccagatgcccggggcatctggcacaacaatgagaagagcttcctgatctgggtgaatgaggaggaccacaccagggtcatctccatggagaagggcggcaacatgaagagggtgtttgagcgcttctgccggggcctgaaggaggtggagcggctcatccaggagcggggctgggagttcatgtggaatgaaaggctgggctacatcctgacctgccccagcaacctgggcaccggcctgcgggccggcgtgcacatcaagctgcccctgctgagcaaggacagccgcttccccaagatcctggagaacctgcggctgcagaagaggggcactggaggagtggacacagctgccactggaggagtgtttgacatcagcaacctggaccggctgggcaagtctgaggtggagctggtgcagctggtgattgatggagtgaactacctgattgactgtgagcggcggctggagcggggccaggacatccgcatccccacccctgtgatccacaccaagcactag

SEQ ID NO: 314924 - DNA, 765 bp, Artificial Sequence
  derived and/or modified sequence
atggccggccccttcagccggctgctgagcgcccggcccggcctgcggctgctggccctggccggggccggcagcctggccgccggcttcctgctgcggcctgagcctgtgcgggccgccagcgagcggcggcggctgtacccacccagcgctgagtacccagacctgaggaagcacaacaactgcatggccagccacctgaccccagctgtgtatgcccggctgtgtgacaagaccacccccaccggctggaccctggaccagtgcatccagacaggagtggacaaccctggccaccccttcatcaagacagtgggcatggtggccggagatgaggagacctatgaggtgtttgctgacctgtttgaccccgtcatccggggcctgagcctgcccccagcctgcaccagggctgagcggcgggaggtggagcgggtggtggtggatgccctgagcggcctgaagggggacctggccggccgctactaccgcctgtctgagatgacagaagctgagcagcagcagctgattgatgaccacttcctgtttgacaagcctgtgagccccctgctgacagctgctggcatggcccgggactggccagatgcccggggcatctggcacaacaatgagaagagcttcctgatctgggtgaatgaggaggaccacaccagggtcatctccatggagaagggcggcaacatgaagagggtgtttgagcgcttctgccggggcctgaaggaggtggtggtgggcatcaagtag

SEQ ID NO: 314925 - DNA, 312 bp, Artificial Sequence
  derived and/or modified sequence
atggccggccccttcagccggctgctgagcgcccggcccggcctgcggctgctggccctggccggggccggcagcctggccgccggcttcctgctgcggcctgagcctgtgcgggccgccagcgagcggcggcggctgtacccacccagcgctgagtacccagacctgaggaagcacaacaactgcatggccagccacctgaccccagctgtgtatgcccggctgtgtgacaagaccacccccaccggctggaccctggaccagtgcatccagacaggagtggacaaccctggccaccccttcatcaagtag

SEQ ID NO: 314926 - DNA, 390 bp, Artificial Sequence
  derived and/or modified sequence
atggccggccccttcagccggctgctgagcgcccggcccggcctgcggctgctggccctggccggggccggcagcctggccgccggcttcctgctgcggcctgagcctgtgcgggccgccagcgagcggcggcggctgtacccacccagcgctgagtacccagacctgaggaagcacaacaactgcatggccagccacctgaccccagctgtgtatgcccggctgtgtgacaagaccacccccaccggctggaccctggaccagtgcatccagacaggagtggacaaccctggccaccccttcatcaagacagtgggcatggtggccggagatgaggagacctatgaggtgtttgctgacctgtttgaccccgtcatccaggagaggtag

SEQ ID NO: 314927 - DNA, 726 bp, Artificial Sequence
  derived and/or modified sequence
atggccggccccttcagccggctgctgagcgcccggcccggcctgcggctgctggccctggccggggccggcagcctggccgccggcttcctgctgcggcctgagcctgtgcgggccgccagcgagcggcggcggctgtacccacccagcgctgagtacccagacctgaggaagcacaacaactgcatggccagccacctgaccccagctgtgtatgcccggctgtgtgacaagaccacccccaccggctggaccctggaccagtgcatccagacaggagtggacaaccctggccaccccttcatcaagacagtgggcatggtggccggagatgaggagacctatgaggtgtttgctgacctgtttgaccccgtcatccaggagcggcacaacggctatgaccccaggaccatgaagcacaccacagacctggatgccagcaagatccgcagcggctactttgatgagcgctacgtgctgagcagccgggtgaggacaggccgcagcatccggggcctgagcctgcccccagcctgcaccagggctgagcggcgggaggtggagcgggtggtggtggatgccctgagcggcctgaagggggacctggccggccgctactaccgcctgtctgagatgacagaagctgagcagcagcagctgattgatgaccacttcctgtttgacaagcctgtgagccccctgctgacagctgctggcatggcctag

SEQ ID NO: 314928 - DNA, 447 bp, Artificial Sequence
  derived and/or modified sequence
atggccggccccttcagccggctgctgagcgcccggcccggcctgcgcttgcttgccctggctggcgcaggctctcttgcggccggattccttttgaggcctgaacccgtccgagctgcctcagaaagacgacgactgtacccaccatctgctgagtaccccgacttgcgcaaacataataactgtatggcaagccacctcacgccagctgtctacgctcggctgtgcgacaagaccaccccaaccgggtggacacttgaccagtgcattcagactggggttgataatcctggccatccattcattaaaactgtcgggatggtcgcaggtgatgaggaaacctatgaagtgttcgcggacctgtttgaccccgtgatccaggaacggcacaatggctatgaccccagaactatgaaacacactacggatctcgacgcgtctaagtag

SEQ ID NO: 314929 - DNA, 1254 bp, Artificial Sequence
  derived and/or modified sequence
atggccggccccttcagccggctgctgagcgcccggcccggcctgagacttctggccctggccggcgccggaagtctggcggccggctttcttctgagacccgaacccgtgagagcagcatccgaacggaggcggttgtatcccccctccgccgagtacccagacctgagaaagcataataattgcatggcatctcatctaacccccgcagtttacgctaggctatgcgataaaaccacaccaacgggttggactctcgatcagtgcatacagaccggcgtggacaacccaggacacccctttattaagaccgtcggtatggttgctggcgacgaggaaacatacgaggttttcgctgatcttttcgatcctgtcatacaagagagacacaacggttacgacccccggacgatgaaacataccaccgaccttgatgcctctaagatacggtcgggatacttcgatgaaaggtatgttctgagctctagggtgcgcaccgggaggtctatccggggactgagcctaccccctgcctgtaccagagccgagagaagagaggtggaacgagtggtggtggatgctctgagtggcttaaaaggcgatctcgctggccgttactataggctatcagagatgactgaagcggaacagcaacaactgattgacgaccactttttgttcgataagcctgtctcaccactgcttaccgccgcgggcatggcacgggactggcccgatgcacgcggtatctggcataacaatgaaaagagttttttgatctgggtgaatgaagaggatcacacgagggtgatatctatggagaagggggggaacatgaagcgcgtattcgagagattctgccggggtttaaaggaagtggagcgattgatacaagagaggggctgggaatttatgtggaacgaaagactagggtatattctgacttgtccttcaaacttagggaccggactccgagctggcgtgcatatcaaactgccacttttgagcaaggacagccgttttcccaagatccttgaaaatctcagactgcagaaaagagggacgggaggagtggataccgcggctactggcggcgtgttcgacatctccaacttagataggctggggaagtccgaggtggaactggtgcaactcgtgatcgatggggtgaactacctgatcgactgcgagcgtagattggagcgaggccaagatattagaatacccacccctgtgatccacaccaaacactag

SEQ ID NO: 314930 - DNA, 1254 bp, Artificial Sequence
  derived and/or modified sequence
atggccggccccttcagccggctgctgagcgcccggcccggcctgaggcttctggcactggccggggctggatctctcgctgccggtttcctgctcagacccgaaccagtccgcgccgcttcggaacgccggagattgtatcctccctcagccgagtatcccgacctgagaaagcacaacaactgcatggcatcgcatttgacgccagctgtctacgcccgattgtgtgataagactactccgactgggtggaccctcgaccaatgtattcagacaggggtagacaatcctggccacccattcattaagacagtcggcatggtcgctggcgacgaagagacctacgaagtgtttgcagacttattcgaccccgtgattcaagagcggcacaacgggtacgacccaaggacgatgaagcataccactgatctggacgcctccaagattcggagtggatattttgatgaaagatacgtgctgtcatcccgcgtgagaactggtagatccatccggggcctaagtttacctcccgcgtgtaccagagctgagcgacgggaagttgaaagggttgtggtggatgcccttagtgggttgaagggcgacttggctggccgctattatcgtctgtctgaaatgacggaggctgaacagcagcagctgatcgacgatcacttcctgtttgacaagccagtttcgccattactcacagcagccggaatggctcgggattggccggacgcgagggggatttggcataacaacgagaaaagtttccttatatgggttaatgaagaagatcacacacgcgttatcagtatggaaaaaggaggcaacatgaaacgtgtattcgagcgcttctgccgcggacttaaggaagtggagcggcttatccaagagcgaggttgggaatttatgtggaacgagcggctgggctacattcttacgtgtccaagtaacctcggtaccgggctgagagccggagtgcacatcaaactgcctctgctgtccaaagattctaggttccctaaaattcttgagaaccttagactgcagaagcggggaactggaggcgtcgatacggccgccaccgggggagttttcgatatctccaatttagaccgtctgggaaagtctgaggtggaactggtgcagctcgtcattgatggggttaactatctcattgactgtgaaagacggctcgaaagaggccaagatatcagaatcccgacaccagtcattcatactaagcattag

SEQ ID NO: 314931 - DNA, 765 bp, Artificial Sequence
  derived and/or modified sequence
atggccggccccttcagccggctgctgagcgcccggcccggcctgcggctgctcgctctggctggagcaggaagcctcgccgccgggtttctgctgagaccagagcctgttagggctgcgtccgaacggagacgcctatacccaccgtccgctgagtacccagacctgcggaaacacaataactgtatggcgtctcatctcacaccagcagtgtacgcgcgactgtgtgataaaaccactcccacggggtggacattggaccagtgcatccagacaggggtagataaccctggtcatccatttatcaaaaccgtcggcatggttgctggggacgaagagacctacgaggtgtttgccgacctgttcgaccccgtcatcagaggcctaagtctgcccccagcttgtaccagggccgagcgaagagaggtggagcgggtggtggtcgatgccctgagcgggttaaagggggacctggcggggagatactacagactgtcggagatgactgaggccgagcaacagcagctgattgacgaccattttctgtttgacaagccagtcagtcccttactcacagccgcggggatggcacgggactggcctgatgccagaggcatctggcataacaatgaaaaatccttcttaatttgggtgaacgaagaggaccacacccgcgttatttcaatggaaaaggggggaaacatgaagagggtgtttgaacgattttgcagggggctgaaggaagtcgtcgttggaatcaagtag

SEQ ID NO: 314932 - DNA, 1254 bp, Artificial Sequence
  derived and/or modified sequence
atggccggccccttcagccggctgctgagcgcccggcccggcctgcgcctgctggccctcgccggagccgggagtttagccgcgggctttctgttacgccccgagcctgttcgggcagccagcgagcgccggaggctttaccccccttctgcagagtacccagacttgcggaaacacaacaattgtatggccagccacctcactcccgccgtgtatgctaggctctgtgacaagaccacacccacaggctggacattggaccagtgcattcagaccggcgtagataaccccgggcatccctttattaagacagtgggcatggtcgccggagacgaggagacttacgaggtctttgcagacctgtttgatcccgtcatccaagaaaggcataatggctacgatcccaggacaatgaagcatacaacagatttggacgcatctaagattagatctgggtattttgatgagcgatacgttctgagctcaagggtgagaaccggaaggagtattagaggtctcagtttacccccagcatgtacaagggctgaaaggcgcgaagttgagcgcgtcgtagtcgatgccttgtccggcctaaaaggggatctggccgggcggtattacagactgtccgagatgaccgaagccgaacagcagcagttaatcgatgaccactttttattcgacaaaccggtaagccctctgttaactgcagccggcatggcaagggattggccagacgcaagaggcatatggcataacaacgaaaaaagttttctaatctgggtgaacgaagaggatcatacacgagtgatttcaatggaaaaagggggcaatatgaaacgtgtattcgaacgtttctgtagagggctgaaggaagttgagaggctgattcaggaaaggggttgggagttcatgtggaacgagcggctggggtatatcttgacctgcccttcaaacttggggactgggctgagggctggcgtacatattaaacttccactgttgtccaaggattctcgatttccgaagatcctcgaaaacctgcggctgcagaagcggggtacagggggcgtagatacagctgccaccgggggtgtcttcgatatcagtaatctcgaccgcctgggaaagtccgaggtggaactggttcagcttgttatagacggggtaaactaccttatcgattgcgagcgacggctcgagagagggcaggacatccggatcccgacacccgtgatccacactaaacactag

SEQ ID NO: 314933 - DNA, 312 bp, Artificial Sequence
  derived and/or modified sequence
atggccggccccttcagccggctgctgagcgcccggcccggcctgaggcttctggcgctcgctggagccgggagcctggccgccggcttcctcttgcgcccggagcccgtgcgggccgcttcggagcgccgccgcctttaccccccttcagccgagtaccccgacctgcgtaagcacaacaactgtatggccagtcatctgaccccggccgtgtatgcgcggctgtgtgacaagacgactcccacgggatggacgctcgatcaatgcattcagaccggcgtggataacccgggacaccccttcattaagtag

SEQ ID NO: 314934 - DNA, 390 bp, Artificial Sequence
  derived and/or modified sequence
atggccggccccttcagccggctgctgagcgcccggcccggcctgcgccttttagcactggccggcgcagggagcctcgccgccggatttctgttgcggccagagcccgtacgcgctgcgagcgagaggcggaggttgtaccccccctcagccgaatacccagacctccgcaagcacaataactgcatggcttcacacctcacacccgctgtctacgctaggctctgtgacaaaactaccccgacgggatggactcttgaccagtgtattcagacaggagtagacaaccccggccaccccttcatcaaaaccgtgggcatggtagctggagatgaagagacctacgaggtatttgctgacctgttcgatcccgtaatccaagaacgctag

SEQ ID NO: 314935 - DNA, 1254 bp, Artificial Sequence
  derived and/or modified sequence
atggccggccccttcagccggctgctgagcgcccggcccggcctgcggcttctggcactggccggcgctggatctttggcagctggatttctgctgaggcctgagccagttcgcgccgcgagcgagcgacggcggctttatccccccagtgcagaataccctgatctgcggaaacacaacaattgtatggccagtcacctcacccccgctgtgtacgcccgcctttgcgacaaaacaacacctaccggctggaccctggatcaatgcatccagacaggcgttgacaatccggggcacccatttatcaagactgtcggaatggttgccggagacgaagagacctatgaggtcttcgccgatctattcgaccctgtcatccaggaacgccataacgggtacgacccccggacaatgaagcacacgactgacctcgacgctagcaaaatacgctccggatattttgatgagcggtacgtgctcagtagtcgcgtgcgcaccggtcgatccattagaggcctgtctctgcctcctgcgtgtactcgagccgaaagacgcgaagtggagcgagtggtagttgatgcccttagcggactcaagggagacctggctggccgatattaccggcttagcgaaatgacggaggcggagcaacagcagcttattgacgatcattttctgttcgacaagcctgtgagcccgctgcttacagctgcgggcatggcccgggactggcctgatgctcggggcatctggcacaacaatgaaaaatcttttttaatatgggttaacgaagaagatcacacccgcgtgatatccatggaaaaggggggtaacatgaagagagtgttcgaacgcttctgtaggggacttaaagaggtggaaaggcttatccaagaacgaggctgggagttcatgtggaatgagcgtctcgggtatattctgacatgcccaagcaacctggggactgggctgcgcgcaggagttcacattaagttgccgcttttaagtaaggactcccgatttcctaaaattctagaaaacctccggttacaaaagaggggtaccgggggtgttgataccgctgccactggcggggtgttcgatatttctaacctggacaggctcggaaagtccgaggtcgagctcgtccagcttgtcatcgacggtgtcaactatctgatcgactgcgagaggaggttggagcgtgggcaggacattcgtatccctaccccagtgatccatacaaaacactag

SEQ ID NO: 314936 - DNA, 726 bp, Artificial Sequence
  derived and/or modified sequence
atggccggccccttcagccggctgctgagcgcccggcccggcctgcgcttgcttgcactcgcaggggctgggtcgctggccgctggatttctgctgagacccgaacccgtccgagccgccagcgagcgccggcgcctgtacccaccatccgcggaataccccgacctccgcaaacacaataattgcatggcaagtcacctgacaccagcagtctatgccaggttgtgcgacaagaccaccccaacagggtggaccctggaccagtgtatacagaccggagtcgataatccaggtcatcccttcataaaaactgtcggcatggtggctggtgatgaagagacttacgaagtattcgctgacctgtttgatcccgtaatccaggagaggcataacggatacgacccccggaccatgaaacatacaacggatttagacgccagcaagatacgctctggctatttcgatgagaggtatgtgttgtcgagtcgggtgcgcactggtagaagtattagggggctgtccctgccgcctgcatgtacaagggctgagaggcgggaggtggaacgagttgtagtcgacgcgctttctggcttaaagggagacttggctgggcggtattacaggttgagtgagatgacagaggccgaacagcagcagttaattgatgaccacttcctgttcgacaagccggtttcccctttgctgactgcggcagggatggcatag

SEQ ID NO: 314937 - DNA, 447 bp, Artificial Sequence
  derived and/or modified sequence
atggcagggcctttctctcgactactttcagctcgacctgggctcaggttactggctcttgccggagccggttccctggcagccggtttcttgctacgcccagagcccgtgagagccgcaagtgaaaggaggcggctgtatccacccagcgcggagtacccagacctgagaaagcacaacaattgtatggcctcccacttaacacccgcagtgtatgctcgcctctgtgataagactactcccactggatggacactggatcagtgtatacagaccggagtggataatcctggtcacccattcattaagactgtgggaatggtagctggggatgaggagacctacgaggtgtttgccgacctttttgatccagttattcaggaacggcacaacgggtacgaccctagaactatgaagcatacaacagatctagatgcatccaagtag

SEQ ID NO: 314938 - DNA, 1254 bp, Artificial Sequence
  derived and/or modified sequence
atggctggccctttttctaggttactaagcgctcgccctggactgagactgctggctttggctggcgctggcagtctcgctgcaggtttcctcctcagacctgaaccggtgagggctgccagcgagagaagacgtctgtaccctccttccgctgagtaccccgaccttcggaagcacaataattgtatggcctctcacctgactcccgctgtctatgcccgtctctgtgacaaaaccacaccaacaggctggactctggaccagtgcattcagacaggcgtcgacaaccccggacacccatttataaagactgtggggatggtcgcaggcgatgaggagacgtatgaggtattcgccgatctgtttgacccagtgatccaggagcggcacaatggttacgacccccgtaccatgaagcacactaccgacctagatgctagcaagattcggtcaggctactttgatgaacgctacgttctgagttcacgagttaggacaggtcggtctattcggggtctaagcctgcctccagcttgtacccgtgctgagcggagggaagtcgaaagagtggtggtcgacgccctgtctggtttaaagggggacctagcgggaagatattaccggttgagtgagatgaccgaggccgagcagcaacagctcatcgatgaccacttccttttcgacaagcctgtgtcaccgctgcttaccgcagcgggaatggctcgtgactggcccgacgccagggggatctggcacaacaacgaaaaatcctttctgatctgggtcaatgaagaagaccacacacgcgtgatcagcatggaaaaaggcggaaatatgaagagagtcttcgagagattttgtagaggactgaaagaagtggaacggcttattcaggaaagaggctgggagtttatgtggaatgagagactgggctatattctcacctgcccctcaaatctgggcacaggattgcgggctggggtacatatcaagttaccactgctcagcaaagactcaagattccccaagatactggaaaacctcagactccagaaacgcggaaccggaggagtggatacagctgccactggtggtgttttcgacatcagtaacctcgacagactagggaagagcgaagtggaactggtgcagctggtaatcgatggagtgaattatctgatcgactgtgaacgccgtttagagcgcggtcaggatattcgcattcccacacctgttatccataccaagcattag

SEQ ID NO: 314939 - DNA, 1254 bp, Artificial Sequence
  derived and/or modified sequence
atggctggaccgttcagtcggctgctctccgcacggcctggacttcgcctgcttgcgctagcaggagccggttctctcgccgcaggtttccttctgcggcctgagccggtacgcgcagcttccgaaaggagaaggttgtatcccccaagcgcagaatatcccgatctccggaagcataacaactgcatggcctcacacctaactcccgctgtctacgccagactatgtgacaagacgaccccaaccgggtggacactggatcagtgtattcaaacgggggtcgataacccagggcatccttttattaaaacagtcggcatggtggctggtgatgaggaaacttacgaagtgtttgccgacctgtttgatccagttatacaggaaagacacaatggctatgatcccaggaccatgaagcacactaccgacttagatgcctcaaaaattagatctggctacttcgacgagaggtacgttctttcttcacgagtgcgcacgggcaggagtatacgaggattatccctgccaccagcgtgcacacgcgcagagaggcgcgaggtggaaagagtcgtggttgacgctcttagtggcctgaagggcgacctcgcaggcagatattatcggctctccgagatgactgaggcggagcagcaacagctcattgacgaccactttttgttcgataagcccgtgtcccccctgttaaccgccgcaggcatggccagagactggcctgatgccagggggatctggcacaataacgaaaaatccttccttatctgggtaaacgaagaagatcacaccagagtcattagcatggagaagggcggtaatatgaagcgcgtgtttgaacgtttctgtagagggctgaaagaagttgagcggctaatccaggaacggggatgggagtttatgtggaatgagcgcctgggatacatcctcacttgccccagtaatctgggaacaggcctgcgcgcaggggtccacatcaagttgcctctgcttagcaaagactcccgctttccgaagattctggaaaacctgcggctgcaaaagagaggaaccgggggagttgataccgccgctactggcggagtttttgacatatcaaatctggatcgactgggtaaatctgaggttgagctcgtgcagttggtcattgatggcgtgaactacctcatagattgcgagcggagacttgaaagaggccaggatatccgaatccccacacctgttattcatacaaaacactag

SEQ ID NO: 314940 - DNA, 765 bp, Artificial Sequence
  derived and/or modified sequence
atggccggacccttttcacggctgttaagcgcacggcctggcctcagactcctcgcactggccggagcgggttcgctggcggcaggcttcctcctgagacccgagcccgtacgggcagcgagcgaacggagaaggctgtatccgccttcggccgagtatccggacttgcgaaagcacaataattgtatggcgtcacacctcacccccgcagtgtatgcacggctctgtgacaagacgaccccaaccggttggacactggatcagtgtatccaaaccggcgtcgacaacccgggtcaccccttcatcaagacagtggggatggtagcaggagacgaggagacttatgaggtgtttgcggatctgtttgaccccgtgattcgtggcctctccctgccccctgcctgcactagagctgagcgtcgcgaggtggaaagagtggttgttgacgcgctcagtggactcaagggcgacttggcgggaaggtactaccgcctcagcgagatgacggaggccgagcagcagcagcttatcgacgatcatttcttattcgacaagccagtgagccccttgctcacagctgccggaatggctcgcgactggccagacgcaaggggaatttggcacaacaacgaaaagagtttcctcatctgggtgaatgaagaagaccatacccgagtgatcagcatggagaaaggcggaaacatgaaacgcgtttttgagcggttttgcagggggctcaaggaggtggtagttggaatcaaatag

SEQ ID NO: 314941 - DNA, 1254 bp, Artificial Sequence
  derived and/or modified sequence
atggccggacctttctcccggctgctgtccgcgcgtcccggactgcgtctgttggctctcgcaggagccggttctctggctgccggattcctactgcgtccagagcctgtgcgcgcagcctcagagaggcggcgtttataccctccatctgcagagtatccggatctgcgaaagcacaacaactgtatggcatctcacctgactcctgcagtgtatgcccgattatgcgacaaaaccacaccaaccggctggaccttagatcagtgcatccagaccggtgttgacaaccccggacaccctttcatcaagacggtgggcatggtggctggggacgaggagacctacgaagtgttcgccgacttgttcgatccagtcatccaggagcgccataacggctacgatccaaggaccatgaagcacaccactgatctagatgcatccaaaattcgatctggatattttgacgagcggtacgtcttatccagcagggttaggacaggcaggtccattaggggtctgtccctcccccctgcttgtacaagggctgaacggagggaggtagagcgtgtggtcgtcgacgctctgagcgggctgaagggagatctagccggacggtactatcgattaagtgagatgacagaggctgaacagcaacagctgatagatgatcatttcctgttcgataaaccggtgtcaccccttttgaccgctgctggcatggcacgcgactggcctgatgcaaggggaatttggcataacaacgagaaaagcttccttatatgggtcaatgaggaggatcacacccgggtgatatccatggagaaaggtggtaatatgaagagagtgttcgaacggttttgtcggggtcttaaggaggtggaaagactcattcaagaaagaggctgggagtttatgtggaacgagcgcttaggctatattttgacctgcccgagcaacctcgggacaggcctgcgggcaggcgtccatatcaagctgcccctgctgtctaaagactccaggtttcctaagatactggagaatttgaggcttcagaagcggggtactggaggtgtggatacagcagccactgggggagtcttcgacatctctaacctcgaccgactagggaagtcagaagtggaactggtgcagctcgtcatcgacggcgtgaactacctgatcgactgtgaaagacgcctcgaaagaggccaggacattcgcattcccacacccgtgatacacacgaaacactag

SEQ ID NO: 314942 - DNA, 312 bp, Artificial Sequence
  derived and/or modified sequence
atggcaggtcctttctcccggttgctgtccgcacgcccaggcctgcgcttgctcgccttagccggagcaggctcccttgcggcaggcttccttttgcggcctgaacctgtgcgcgctgcatccgagagacggaggttatacccccctagcgccgagtatccggacctccgaaagcataacaactgcatggcctcacatctgacaccggcagtgtatgccaggctctgcgacaaaacaacacccacaggatggacattggatcagtgcattcagacaggggtggacaacccaggccaccctttcattaagtag

SEQ ID NO: 314943 - DNA, 390 bp, Artificial Sequence
  derived and/or modified sequence
atggccggacccttctctcgccttctgtcggcacgccctggcctaaggctccttgcactggccggagcaggatcgctggctgccggatttctcctgcgccctgagcccgtcagggctgctagtgagaggaggcgactataccccccaagtgcggaatacccagaccttaggaagcacaataattgtatggccagtcaccttacgcctgccgtatacgcacgtctctgtgacaaaaccacaccgacgggctggacactagatcagtgcattcaaactggcgtggacaatcccggtcatcctttcatcaagacagtcggaatggtggccggtgatgaagaaacttacgaggtcttcgccgatctcttcgaccctgtcatacaagagagatag

SEQ ID NO: 314944 - DNA, 1254 bp, Artificial Sequence
  derived and/or modified sequence
atggctgggccattttccaggctcctcagcgctaggccaggtctccggctacttgcgctggccggagccggatcacttgccgcagggttcctgctgaggcctgagcccgtgcgcgcagcttccgagcgaagacggctgtatccaccttcagccgagtacccggacctgcgcaagcacaataactgtatggcttcccatcttactcccgcagtgtacgccaggctgtgtgacaagaccactcccacaggctggactctggatcagtgcatccagacaggcgtggataacccaggacaccctttcattaaaactgttggaatggttgctggggatgaagagacctacgaagtgttcgctgatctgttcgatcccgtgatccaagagcgccacaacgggtacgaccccagaaccatgaaacatactaccgacctggacgccagcaagatcagaagcggctactttgacgaaaggtatgttcttagtagccgggtgagaactggccgatctatcaggggtttgtcgctgcctccggcttgcaccagagctgagcggagagaggtggaacgcgtagttgtggatgccctgtctggcctgaagggcgatttagctggaagatattacagacttagtgaaatgactgaggccgaacaacagcagctcattgacgatcacttcctgttcgacaagccggtttctcctctcctgactgccgctggtatggccagggactggcccgacgcacgaggcatatggcacaacaacgagaagtcgttcctcatctgggtgaacgaagaggatcatacaagggtgatctccatggaaaaaggcggaaacatgaaaagggtcttcgagaggttctgccggggactaaaagaagttgaaaggctgattcaggagaggggctgggaattcatgtggaatgagaggttagggtacattctgacctgcccctctaatctgggaacaggcctgcgcgcaggagtccatatcaagttacccctcttatccaaggacagccgttttccgaagattcttgagaatcttcgcttgcagaaacgcggtacaggtggagtggacactgcagccacaggtggagtatttgacatatcaaacctggacagactgggaaaatccgaggttgagttagtacagctagtaatcgacggagtaaactacctcatcgattgcgagcgaagactcgagcgaggacaggacatccggatacccacaccagtgatccacactaaacattag

SEQ ID NO: 314945 - DNA, 726 bp, Artificial Sequence
  derived and/or modified sequence
atggccggtcccttctcgcgcctgcttagcgcacgcccagggctgagacttctcgctttggcaggcgctgggtctctggccgctgggtttctgttgcgaccggaaccagtacgcgctgcgagcgaaaggagacggctgtatccgccaagcgctgagtatcccgacctccggaaacacaataactgcatggcatcacaccttactccagcagtgtatgcaaggttatgcgataagaccacgccaactggctggacgctggaccagtgtattcagactggcgtggacaatcccggacacccttttattaagacggtgggtatggtggcaggcgatgaggaaacctacgaggtgttcgctgatctatttgatccggtgattcaggaaagacataacggatatgaccctaggacaatgaagcacacaacggatctcgacgcctccaaaatccgtagtggctatttcgacgaacgctatgtcttaagttccagagtcaggaccggtagaagcatccgaggcctttcactgccacctgcttgcacccgcgcagagcgtcgtgaggttgagcgggtggttgtggacgccctatcaggtctgaaaggagacttggcaggcaggtattacaggctgtctgaaatgacggaagccgaacaacaacagcttatagacgaccatttcctgtttgataagccagtctcaccactccttacggctgccggaatggcctag

SEQ ID NO: 314946 - DNA, 759 bp, Artificial Sequence
  derived and/or modified sequence
accttctcctccagcacaggaactaggaactacggagagagaagccaagggagaggaggaggaggaaactaacgattccctgcccacccccacacccagcaccaccaacaggtgggcaagcttgccgagaaaacgcagagggcatcctgtgagcagcaaacacatctgagcctggaaaagacgcagagaagtaaaagatcaaagcctcggacctagctccggccctcggtctatccggttgcatcctccctccctgttccggatcttatcttgcgccagcgcctactccaggatcccgtagccagacctcaagccatggctggtcccttctcccgtctgctgtccgcccgcccgggactcaggctcctggctttggccggagcggggtctctagccgctgggtttctgctccgaccggaacctgtacgagctgccagtgaacgacggaggctgtatcccccgagcgctgagtacccagacctccgaaagcacaacaactgcatggccagtcacctgaccccagcagtctatgcacggctctgcgacaagaccacacccactggttggacgctagatcagtgtatccagactggcgtggacaaccctggccaccccttcatcaagactgtgggcatggtggctggagatgaggagacctatgaggtatttgctgacctgtttgaccctgtgatccaagagcgacacaatggatatgacccccggacaatgaagcacaccacggatctagatgccagtaaa

SEQ ID NO: 314947 - DNA, 1911 bp, Artificial Sequence
  derived and/or modified sequence
ccttgcacacccacagggtagacggatcgagtttcagcttaaaccgaggggtgtgggggaagggtgttgggttcagctagtccacgtgggtgctgtcctccacttggtgctgaaatctgggcggccacatccccggggcgggagggggctacatccccggctttagacgcgcgagtctcaggtcccgctaattacctggcgggtgctgcccacccctgccctcgcgcacctagcgcggtggcaggcgggaaggcggggcctgggggagccccacccctggagactgcggctggggcctccctctcctccgcccgcccgcctgccactagctcattgcgcctctcctgcagtctgattggcaccggctcccattccggctccagcctccaatccgacccccatttcggctgcagcctcggacctagctccggccctcggtctatccggttgcatcctccctccctgttccggatcttatcttgcgccagcgcctactccaggatcccgtagccagacctcaagccatggctggtcccttctcccgtctgctgtccgcccgcccgggactcaggctcctggctttggccggagcggggtctctagccgctgggtttctgctccgaccggaacctgtacgagctgccagtgaacgacggaggctgtatcccccgagcgctgagtacccagacctccgaaagcacaacaactgcatggccagtcacctgaccccagcagtctatgcacggctctgcgacaagaccacacccactggttggacgctagatcagtgtatccagactggcgtggacaaccctggccaccccttcatcaagactgtgggcatggtggctggagatgaggagacctatgaggtatttgctgacctgtttgaccctgtgatccaagagcgacacaatggatatgacccccggacaatgaagcacaccacggatctagatgccagtaaaatccgttctggctactttgatgagaggtatgtattgtcctctagagtcagaactggccgaagcatccgaggactcagtctgcctccagcttgcactcgagcagagcgacgagaggtggaacgtgttgtggtggatgcactgagtggcctgaagggtgacctggctggacgttactataggctcagtgagatgacagaggctgaacagcagcagcttattgatgaccactttctgtttgataagcctgtgtccccgttgctgactgcagcaggaatggctcgagactggccagatgctcgtggaatttggcacaacaatgagaagagcttcctgatctgggtgaatgaggaggatcatacacgggtgatctccatggagaagggtggtaacatgaagagagtgtttgaaagattctgccgaggcctcaaagaggtggagagacttatccaagaacgtggctgggagttcatgtggaatgagcgtttgggatacatcttgacctgtccatctaacctgggcactggacttcgggcaggagtgcacatcaaactgcccctgctaagcaaagatagccgcttcccaaagatcctggagaacctaagactccaaaagcgtggtactggaggagtggacactgctgccacaggcggtgtctttgatatttctaatttggaccgactaggcaaatcagaggtggagctggtgcaactggtcatcgatggagtaaactatttgattgattgtgaacggcgtctggagagaggccaggatatccgcatccccacacctgtcatccacaccaagcattaactccccatcgccagctgatgactcaagattccaaggagttctgctcattctaatgatggcccattctacttgctctggacctgccctcgcatcccctgcctccatcctagtaaagactccttgctatgctgca

SEQ ID NO: 314948 - DNA, 1779 bp, Artificial Sequence
  derived and/or modified sequence
cttcacctcactttaccttctcctccagcacaggaactaggaactacggagagagaagccaagggagaggaggaggaggaaactaacgattccctgcccacccccacacccagcaccaccaacaggtgggcaagcttgccgagaaaacgcagagggcatcctgtgagcagcaaacacatctgagcctggaaaagacgcagagaagtaaaagatcaaagtctgattggcaccggctcccattccggctccagcctccaatccgacccccatttcggctgcagcctcggacctagctccggccctcggtctatccggttgcatcctccctccctgttccggatcttatcttgcgccagcgcctactccaggatcccgtagccagacctcaagccatggctggtcccttctcccgtctgctgtccgcccgcccgggactcaggctcctggctttggccggagcggggtctctagccgctgggtttctgctccgaccggaacctgtacgagctgccagtgaacgacggaggctgtatcccccgagcgctgagtacccagacctccgaaagcacaacaactgcatggccagtcacctgaccccagcagtctatgcacggctctgcgacaagaccacacccactggttggacgctagatcagtgtatccagactggcgtggacaaccctggccaccccttcatcaagactgtgggcatggtggctggagatgaggagacctatgaggtatttgctgacctgtttgaccctgtgatccaagagcgacacaatggatatgacccccggacaatgaagcacaccacggatctagatgccagtaaaatccgttctggctactttgatgagaggtatgtattgtcctctagagtcagaactggccgaagcatccgaggactcagtctgcctccagcttgcactcgagcagagcgacgagaggtggaacgtgttgtggtggatgcactgagtggcctgaagggtgacctggctggacgttactataggctcagtgagatgacagaggctgaacagcagcagcttattgatgaccactttctgtttgataagcctgtgtccccgttgctgactgcagcaggaatggctcgagactggccagatgctcgtggaatttggcacaacaatgagaagagcttcctgatctgggtgaatgaggaggatcatacacgggtgatctccatggagaagggtggtaacatgaagagagtgtttgaaagattctgccgaggcctcaaagaggtggagagacttatccaagaacgtggctgggagttcatgtggaatgagcgtttgggatacatcttgacctgtccatctaacctgggcactggacttcgggcaggagtgcacatcaaactgcccctgctaagcaaagatagccgcttcccaaagatcctggagaacctaagactccaaaagcgtggtactggaggagtggacactgctgccacaggcggtgtctttgatatttctaatttggaccgactaggcaaatcagaggtggagctggtgcaactggtcatcgatggagtaaactatttgattgattgtgaacggcgtctggagagaggccaggatatccgcatccccacacctgtcatccacaccaagcattaactccccatcgccagctgatgactcaagattccaaggagttctgctcattctaatgatggcccattctacttgctctggacctgccctcgcatcccctgcctccatcctagtaaagactccttgctatgctgca

SEQ ID NO: 314949 - DNA, 982 bp, Artificial Sequence
  derived and/or modified sequence
tcttatcttgcgccagcgcctactccaggatcccgtagccagacctcaagccatggctggtcccttctcccgtctgctgtccgcccgcccgggactcaggctcctggctttggccggagcggggtctctagccgctgggtttctgctccgaccggaacctgtacgagctgccagtgaacgacggaggctgtatcccccgagcgctgagtacccagacctccgaaagcacaacaactgcatggccagtcacctgaccccagcagtctatgcacggctctgcgacaagaccacacccactggttggacgctagatcagtgtatccagactggcgtggacaaccctggccaccccttcatcaagactgtgggcatggtggctggagatgaggagacctatgaggtatttgctgacctgtttgaccctgtgatccgaggactcagtctgcctccagcttgcactcgagcagagcgacgagaggtggaacgtgttgtggtggatgcactgagtggcctgaagggtgacctggctggacgttactataggctcagtgagatgacagaggctgaacagcagcagcttattgatgaccactttctgtttgataagcctgtgtccccgttgctgactgcagcaggaatggctcgagactggccagatgctcgtggaatttggcacaacaatgagaagagcttcctgatctgggtgaatgaggaggatcatacacgggtgatctccatggagaagggtggtaacatgaagagagtgtttgaaagattctgccgaggcctcaaagaggttgttgtggggattaagtgaaatacaggtaaagtacttggtccacagtaagtgcttaataagtgttaaagtgttagctgcaatattattctggatggaagagtttccccccatgttcagcacataagatatccctggtggcatggttccttctgaactacaaacaggatccctttactcatgttg

SEQ ID NO: 314950 - DNA, 1779 bp, Artificial Sequence
  derived and/or modified sequence
cttcacctcactttaccttctcctccagcacaggaactaggaactacggagagagaagccaagggagaggaggaggaggaaactaacgattccctgcccacccccacacccagcaccaccaacaggtgggcaagcttgccgagaaaacgcagagggcatcctgtgagcagcaaacacatctgagcctggaaaagacgcagagaagtaaaagatcaaagtctgattggcaccggctcccattccggctccagcctccaatccgacccccatttcggctgcagcctcggacctagctccggccctcggtctatccggttgcatcctccctccctgttccggatcttatcttgcgccagcgcctactccaggatcccgtagccagacctcaagccatggctggtcccttctcccgtctgctgtccgcccgcccgggactcaggctcctggctttggccggagcggggtctctagccgctgggtttctgctccgaccggaacctgtacgagctgccagtgaacgacggaggctgtatcccccgagcgctgagtacccagacctccgaaagcacaacaactgcatggccagtcacctgaccccagcagtctatgcacggctctgcgacaagaccacacccactggttggacgctagatcagtgtatccagactggcgtggacaaccctggccaccccttcatcaagactgtgggcatggtggctggagatgaggagacctatgaggtatttgctgacctgtttgaccctgtgatccaagagcgacacaatggatatgacccccggacaatgaagcacaccacggatctagatgccagtaaaatccgttctggctactttgatgagaggtatgtattgtcctctagagtcagaactggccgaagcatccgaggactcagtctgcctccagcttgcactcgagcagagcgacgagaggtggaacgtgttgtggtggatgcactgagtggcctgaagggtgacctggctggacgttactataggctcagtgagatgacagaggctgaacagcagcagcttattgatgaccactttctgtttgataagcctgtgtccccgttgctgactgcagcaggaatggctcgagactggccagatgctcgtggaatttggcacaacaatgagaagagcttcctgatctgggtgaatgaggaggatcatacacgggtgatctccatggagaagggtggtaacatgaagagagtgtttgaaagattctgccgaggcctcaaagaggtggagagacttatccaagaacgtggctgggagttcatgtggaatgagcgtttgggatacatcttgacctgtccatctaacctgggcactggacttcgggcaggagtgcacatcaaactgcccctgctaagcaaagatagccgcttcccaaagatcctggagaacctaagactccaaaaacgtggtactggaggagtggacactgctgctacaggcggtgtctttgatatttctaatttggaccgactaggcaaatcagaggtggagctggtgcaactggtcatcgatggagtaaactatttgattgattgtgaacggcgtctggagagaggccaggatatccgcatccccacacctgtcatccacaccaagcattaactccccatcgccagctgatgactcaagattcccaggagttctgctcattctaatgatggcccattctacttgctctggacctgcccccgcatcccctgcctccatcctagtaaagactccttgctatgctgca

SEQ ID NO: 314951 - DNA, 593 bp, Artificial Sequence
  derived and/or modified sequence
gtttattccgcggtttccccgcggctgcccccgggagaccgaagaggtggctggggcaggccgaaagcagaggaaaggttgggcagtgtcacccttgcacacccacaggtctgattggcaccggctcccattccggctccagcctccaatccgacccccatttcggctgcagcctcggacctagctccggccctcggtctatccggttgcatcctccctccctgttccggatcttatcttgcgccagcgcctactccaggatcccgtagccagacctcaagccatggctggtcccttctcccgtctgctgtccgcccgcccgggactcaggctcctggctttggccggagcggggtctctagccgctgggtttctgctccgaccggaacctgtacgagctgccagtgaacgacggaggctgtatcccccgagcgctgagtacccagacctccgaaagcacaacaactgcatggccagtcacctgaccccagcagtctatgcacggctctgcgacaagaccacacccactggttggacgctagatcagtgtatccagactggcgtggacaaccctggccaccccttcatcaaga

SEQ ID NO: 314952 - DNA, 632 bp, Artificial Sequence
  derived and/or modified sequence
actttaccttctcctccagcacaggaactaggaactacggagagagaagccaagggagaggaggaggaggaaactaacgattccctgcccacccccacacccagcaccaccaacaggtgggcaagcttgccgagaaaacgcagagggcatcctgtgagcagcaaacacatctgagcctggaaaagacgcagagaagtaaaagatcaaagcgcctactccaggatcccgtagccagacctcaagccatggctggtcccttctcccgtctgctgtccgcccgcccgggactcaggctcctggctttggccggagcggggtctctagccgctgggtttctgctccgaccggaacctgtacgagctgccagtgaacgacggaggctgtatcccccgagcgctgagtacccagacctccgaaagcacaacaactgcatggccagtcacctgaccccagcagtctatgcacggctctgcgacaagaccacacccactggttggacgctagatcagtgtatccagactggcgtggacaaccctggccaccccttcatcaagactgtgggcatggtggctggagatgaggagacctatgaggtatttgctgacctgtttgaccctgtgatccaagagcga

SEQ ID NO: 314953 - DNA, 1747 bp, Artificial Sequence
  derived and/or modified sequence
agacgcgcgagtctcaggtcccgctaattacctggcgggtgctgcccacccctgccctcgcgcacctagcgcggtggcaggcgggaaggcggggcctgggggagccccacccctggagactgcggctggggcctccctctcctccgcccgcccgcctgccactagctcattgcgcctctcctgcagtctgattggcaccggctcccattccggctccagcctccaatccgacccccatttcggctgcagcctcggacctagctccggccctcggtctatccggttgcatcctccctccctgttccggatcttatcttgcgccagcgcctactccaggatcccgtagccagacctcaagccatggctggtcccttctcccgtctgctgtccgcccgcccgggactcaggctcctggctttggccggagcggggtctctagccgctgggtttctgctccgaccggaacctgtacgagctgccagtgaacgacggaggctgtatcccccgagcgctgagtacccagacctccgaaagcacaacaactgcatggccagtcacctgaccccagcagtctatgcacggctctgcgacaagaccacacccactggttggacgctagatcagtgtatccagactggcgtggacaaccctggccaccccttcatcaagactgtgggcatggtggctggagatgaggagacctatgaggtatttgctgacctgtttgaccctgtgatccaagagcgacacaatggatatgacccccggacaatgaagcacaccacggatctagatgccagtaaaatccgttctggctactttgatgagaggtatgtattgtcctctagagtcagaactggccgaagcatccgaggactcagtctgcctccagcttgcactcgagcagagcgacgagaggtggaacgtgttgtggtggatgcactgagtggcctgaagggtgacctggctggacgttactataggctcagtgagatgacagaggctgaacagcagcagcttattgatgaccactttctgtttgataagcctgtgtccccgttgctgactgcagcaggaatggctcgagactggccagatgctcgtggaatttggcacaacaatgagaagagcttcctgatctgggtgaatgaggaggatcatacacgggtgatctccatggagaagggtggtaacatgaagagagtgtttgaaagattctgccgaggcctcaaagaggtggagagacttatccaagaacgtggctgggagttcatgtggaatgagcgtttgggatacatcttgacctgtccatctaacctgggcactggacttcgggcaggagtgcacatcaaactgcccctgctaagcaaagatagccgcttcccaaagatcctggagaacctaagactccaaaaacgtggtactggaggagtggacactgctgctacaggcggtgtctttgatatttctaatttggaccgactaggcaaatcagaggtggagctggtgcaactggtcatcgatggagtaaactatttgattgattgtgaacggcgtctggagagaggccaggatatccgcatccccacacctgtcatccacaccaagcattaactccccatcgccagctgatgactcaagattcccaggagttctgctcattctaatgatggcccattctacttgctctggacctgcccccgcatcccctgcctccatcctagtaaagactccttgctatgctgca

SEQ ID NO: 314954 - DNA, 1116 bp, Artificial Sequence
  derived and/or modified sequence
cttcacctcactttaccttctcctccagcacaggaactaggaactacggagagagaagccaagggagaggaggaggaggaaactaacgattccctgcccacccccacacccagcaccaccaacaggtgggcaagcttgccgagaaaacgcagagggcatcctgtgagcagcaaacacatctgagcctggaaaagacgcagagaagtaaaagatcaaagtctgattggcaccggctcccattccggctccagcctccaatccgacccccatttcggctgcagcctcggacctagctccggccctcggtctatccggttgcatcctccctccctgttccggatcttatcttgcgccagcgcctactccaggatcccgtagccagacctcaagccatggctggtcccttctcccgtctgctgtccgcccgcccgggactcaggctcctggctttggccggagcggggtctctagccgctgggtttctgctccgaccggaacctgtacgagctgccagtgaacgacggaggctgtatcccccgagcgctgagtacccagacctccgaaagcacaacaactgcatggccagtcacctgaccccagcagtctatgcacggctctgcgacaagaccacacccactggttggacgctagatcagtgtatccagactggcgtggacaaccctggccaccccttcatcaagactgtgggcatggtggctggagatgaggagacctatgaggtatttgctgacctgtttgaccctgtgatccaagagcgacacaatggatatgacccccggacaatgaagcacaccacggatctagatgccagtaaaatccgttctggctactttgatgagaggtatgtattgtcctctagagtcagaactggccgaagcatccgaggactcagtctgcctccagcttgcactcgagcagagcgacgagaggtggaacgtgttgtggtggatgcactgagtggcctgaagggtgacctggctggacgttactataggctcagtgagatgacagaggctgaacagcagcagcttattgatgaccactttctgtttgataagcctgtgtccccgttgctgactgcagcaggaatggctc

SEQ ID NO: 314955 - DNA, 447 bp, Artificial Sequence
  derived and/or modified sequence
atggccggccccttcagcagactgctgagcgccagacccggcctgagactgctggccctggccggcgccggcagcctggccgccggcttcctgctgagacccgagcccgtgagagccgccagcgagagaagaagactgtacccccccagcgccgagtaccccgacctgagaaagcacaacaactgcatggccagccacctgacccccgccgtgtacgccagactgtgcgacaagaccacccccaccggctggaccctggaccagtgcatccagaccggcgtggacaaccccggccaccccttcatcaagaccgtgggcatggtggccggcgacgaggagacctacgaggtgttcgccgacctgttcgaccccgtgatccaggagagacacaacggctacgaccccagaaccatgaagcacaccaccgacctggacgccagcaagtag

SEQ ID NO: 314956 - DNA, 1254 bp, Artificial Sequence
  derived and/or modified sequence
atggccggccccttcagcagactgctgagcgccagacccggcctgagactgctggccctggccggcgccggcagcctggccgccggcttcctgctgagacccgagcccgtgagagccgccagcgagagaagaagactgtacccccccagcgccgagtaccccgacctgagaaagcacaacaactgcatggccagccacctgacccccgccgtgtacgccagactgtgcgacaagaccacccccaccggctggaccctggaccagtgcatccagaccggcgtggacaaccccggccaccccttcatcaagaccgtgggcatggtggccggcgacgaggagacctacgaggtgttcgccgacctgttcgaccccgtgatccaggagagacacaacggctacgaccccagaaccatgaagcacaccaccgacctggacgccagcaagatcagaagcggctacttcgacgagagatacgtgctgagcagcagagtgagaaccggcagaagcatcagaggcctgagcctgccccccgcctgcaccagagccgagagaagagaggtggagagagtggtggtggacgccctgagcggcctgaagggcgacctggccggcagatactacagactgagcgagatgaccgaggccgagcagcagcagctgatcgacgaccacttcctgttcgacaagcccgtgagccccctgctgaccgccgccggcatggccagagactggcccgacgccagaggcatctggcacaacaacgagaagagcttcctgatctgggtgaacgaggaggaccacaccagagtgatcagcatggagaagggcggcaacatgaagagagtgttcgagagattctgcagaggcctgaaggaggtggagagactgatccaggagagaggctgggagttcatgtggaacgagagactgggctacatcctgacctgccccagcaacctgggcaccggcctgagagccggcgtgcacatcaagctgcccctgctgagcaaggacagcagattccccaagatcctggagaacctgagactgcagaagagaggcaccggcggcgtggacaccgccgccaccggcggcgtgttcgacatcagcaacctggacagactgggcaagagcgaggtggagctggtgcagctggtgatcgacggcgtgaactacctgatcgactgcgagagaagactggagagaggccaggacatcagaatccccacccccgtgatccacaccaagcactag

SEQ ID NO: 314957 - DNA, 765 bp, Artificial Sequence
  derived and/or modified sequence
atggccggccccttcagcagactgctgagcgccagacccggcctgagactgctggccctggccggcgccggcagcctggccgccggcttcctgctgagacccgagcccgtgagagccgccagcgagagaagaagactgtacccccccagcgccgagtaccccgacctgagaaagcacaacaactgcatggccagccacctgacccccgccgtgtacgccagactgtgcgacaagaccacccccaccggctggaccctggaccagtgcatccagaccggcgtggacaaccccggccaccccttcatcaagaccgtgggcatggtggccggcgacgaggagacctacgaggtgttcgccgacctgttcgaccccgtgatcagaggcctgagcctgccccccgcctgcaccagagccgagagaagagaggtggagagagtggtggtggacgccctgagcggcctgaagggcgacctggccggcagatactacagactgagcgagatgaccgaggccgagcagcagcagctgatcgacgaccacttcctgttcgacaagcccgtgagccccctgctgaccgccgccggcatggccagagactggcccgacgccagaggcatctggcacaacaacgagaagagcttcctgatctgggtgaacgaggaggaccacaccagagtgatcagcatggagaagggcggcaacatgaagagagtgttcgagagattctgcagaggcctgaaggaggtggtggtgggcatcaagtag

SEQ ID NO: 314958 - DNA, 312 bp, Artificial Sequence
  derived and/or modified sequence
atggccggccccttcagcagactgctgagcgccagacccggcctgagactgctggccctggccggcgccggcagcctggccgccggcttcctgctgagacccgagcccgtgagagccgccagcgagagaagaagactgtacccccccagcgccgagtaccccgacctgagaaagcacaacaactgcatggccagccacctgacccccgccgtgtacgccagactgtgcgacaagaccacccccaccggctggaccctggaccagtgcatccagaccggcgtggacaaccccggccaccccttcatcaagtag

SEQ ID NO: 314959 - DNA, 390 bp, Artificial Sequence
  derived and/or modified sequence
atggccggccccttcagcagactgctgagcgccagacccggcctgagactgctggccctggccggcgccggcagcctggccgccggcttcctgctgagacccgagcccgtgagagccgccagcgagagaagaagactgtacccccccagcgccgagtaccccgacctgagaaagcacaacaactgcatggccagccacctgacccccgccgtgtacgccagactgtgcgacaagaccacccccaccggctggaccctggaccagtgcatccagaccggcgtggacaaccccggccaccccttcatcaagaccgtgggcatggtggccggcgacgaggagacctacgaggtgttcgccgacctgttcgaccccgtgatccaggagagatag

SEQ ID NO: 314960 - DNA, 726 bp, Artificial Sequence
  derived and/or modified sequence
atggccggccccttcagcagactgctgagcgccagacccggcctgagactgctggccctggccggcgccggcagcctggccgccggcttcctgctgagacccgagcccgtgagagccgccagcgagagaagaagactgtacccccccagcgccgagtaccccgacctgagaaagcacaacaactgcatggccagccacctgacccccgccgtgtacgccagactgtgcgacaagaccacccccaccggctggaccctggaccagtgcatccagaccggcgtggacaaccccggccaccccttcatcaagaccgtgggcatggtggccggcgacgaggagacctacgaggtgttcgccgacctgttcgaccccgtgatccaggagagacacaacggctacgaccccagaaccatgaagcacaccaccgacctggacgccagcaagatcagaagcggctacttcgacgagagatacgtgctgagcagcagagtgagaaccggcagaagcatcagaggcctgagcctgccccccgcctgcaccagagccgagagaagagaggtggagagagtggtggtggacgccctgagcggcctgaagggcgacctggccggcagatactacagactgagcgagatgaccgaggccgagcagcagcagctgatcgacgaccacttcctgttcgacaagcccgtgagccccctgctgaccgccgccggcatggcctag

SEQ ID NO: 314961 - protein, 725 aa, Artificial Sequence
  derived and/or modified sequence
MWKRSEQMKIKSGKCNMAAAMETEQLGVEIFETADCEENIESQDRPKLEPFYVERYSWSQLKKLLADTRKYHGYMMAKAPHDFMFVKRNDPDGPHSDRIYYLAMSGENRENTLFYSEIPKTINRAAVLMLSWKPLLDLFQATLDYGMYSREEELLRERKRIGTVGIASYDYHQGSGTFLFQAGSGIYHVKDGGPQGFTQQPLRPNLVETSCPNIRMDPKLCPADPDWIAFIHSNDIWISNIVTREERRLTYVHNELANMEEDARSAGVATFVLQEEFDRYSGYWWCPKAETTPSGGKILRILYEENDESEVEIIHVTSPMLETRRADSFRYPKTGTANPKVTFKMSEIMIDAEGRIQVDEVRRLVYFEGTKDSPLEHHLYVVSYVNPGEVTRLTDRGYSHSCCISQHCDFFISKYSNQKNPHCVSLYKLSSPEDDPTCKTKEFWATILDSAGPLPDYTPPEIFSFESTTGFTLYGMLYKPHDLQPGKKYPTVLFIYGGPQVQLVNNRFKGVKYFRLNTLASLGYVVVVIDNRGSCHRGLKFEGAFKYKMGQIEIDDQVEGLQYLASRYDFIDLDRVGIHGWSYGGYLSLMALMQRSDIFRVAIAGAPVTLWIFYDTGYTERYMGHPDQNEQGYYLGSVAMQAEKFPSEPNRLLLLHGFLDENVHFAHTSILLSFLVRAGKPYDLQIYPQERHSIRVPESGEHYELHLLHYLQENLGSRIAALKVI

SEQ ID NO: 314962 - protein, 782 aa, Artificial Sequence
  derived and/or modified sequence
MAAAMETEQLGVEIFETADCEENIESQDRPKLEPFYVERYSWSQLKKLLADTRKYHGYMMAKAPHDFMFVKRNDPDGPHSDRIYYLAMSGENRENTLFYSEIPKTINRAAVLMLSWKPLLDLFQATLDYGMYSREEELLRERKRIGTVGIASYDYHQGSGTFLFQAGSGIYHVKDGGPQGFTQQPLRPNLVETSCPNIRMDPKLCPADPDWIAFIHSNDIWISNIVTREERRLTYVHNELANMEEDARSAGVATFVLQEEFDRYSGYWWCPKAETTPSGGKILRILYEENDESEVEIIHVTSPMLETRRADSFRYPKTGTANPKVTFKMSEIMIDAEGRIIDVIDKELIQPFEILFEGVEYIARAGWTPEGKYAWSILLDRSQTRLQIVLISPELFIPVEDDVMERQRLIESVPDSVTPLIIYEETTDIWINIHDIFHVFPQSHEEEIEFIFASECKTGFRHLYKITSILKESKYKRSSGGLPAPSDFKCPIKEEIAITSGEWEVLGRHGSNIQVDEVRRLVYFEGTKDSPLEHHLYVVSYVNPGEVTRLTDRGYSHSCCISQHCDFFISKYSNQKNPHCVSLYKLSSPEDDPTCKTKEFWATILDSAGPLPDYTPPEIFSFESTTGFTLYGMLYKPHDLQPGKKYPTVLFIYGGPQVAIAGAPVTLWIFYDTGYTERYMGHPDQNEQGYYLGSVAMQAEKFPSEPNRLLLLHGFLDENVHFAHTSILLSFLVRAGKPYDLQIYPQERHSIRVPESGEHYELHLLHYLQENLGSRIAALKVI

SEQ ID NO: 314963 - DNA, 2822 bp, Artificial Sequence
  derived and/or modified sequence
aaagcctccgaggccaaggccgctgctactgccgccgctgcttcttagtgccgcgttcgccgcctgggttgtcaccggcgccgccgccgaggaagccactgcaaccaggaccggagtggaggcggcgcagcatgaagcggcgcaggcccgctccatagcgcacgtcgggacggtccgggcggggccggggggaaggaaaatgcaacatggcagcagcaatggaaacagaacagctgggtgttgagatatttgaaactgcggactgtgaggagaatattgaatcacaggatcggcctaaattggagcctttttatgttgagcggtattcctggagtcagcttaaaaagctgcttgccgataccagaaaatatcatggctacatgatggctaaggcaccacatgatttcatgtttgtgaagaggaatgatccagatggacctcattcagacagaatctattaccttgccatgtctggtgagaacagagaaaatacactgttttattctgaaattcccaaaactatcaatagagcagcagtcttaatgctctcttggaagcctcttttggatctttttcaggcaacactggactatggaatgtattctcgagaagaagaactattaagagaaagaaaacgcattggaacagtcggaattgcttcttacgattatcaccaaggaagtggaacatttctgtttcaagccggtagtggaatttatcacgtaaaagatggagggccacaaggatttacgcaacaacctttaaggcccaatctagtggaaactagttgtcccaacatacggatggatccaaaattatgccctgctgatccagactggattgcttttatacatagcaacgatatttggatatctaacatcgtaaccagagaagaaaggagactcacttatgtgcacaatgagctagccaacatggaagaagatgccagatcagctggagtcgctacctttgttctccaagaagaatttgatagatattctggctattggtggtgtccaaaagctgaaacaactcccagtggtggtaaaattcttagaattctatatgaagaaaatgatgaatctgaggtggaaattattcatgttacatcccctatgttggaaacaaggagggcagattcattccgttatcctaaaacaggtacagcaaatcctaaagtcacttttaagatgtcagaaataatgattgatgctgaaggaaggatcatagatgtcatagataaggaactaattcaaccttttgagattctatttgaaggagttgaatatattgccagagctggatggactcctgagggaaaatatgcttggtccatcctactagatcgctcccagactcgcctacagatagtgttgatctcacctgaattatttatcccagtagaagatgatgttatggaaaggcagagactcattgagtcagtgcctgattctgtgacgccactaattatctatgaagaaacaacagacatctggataaatatccatgacatctttcatgtttttccccaaagtcacgaagaggaaattgagtttatttttgcctctgaatgcaaaacaggtttccgtcatttatacaaaattacatctattttaaaggaaagcaaatataaacgatccagtggtgggctgcctgctccaagtgatttcaagtgtcctatcaaagaggagatagcaattaccagtggtgaatgggaagttcttggccggcatggatctaatatccaagttgatgaagtcagaaggctggtatattttgaaggcaccaaagactcccctttagagcatcacctgtacgtagtcagttacgtaaatcctggagaggtgacaaggctgactgaccgtggctactcacattcttgctgcatcagtcagcactgtgacttctttataagtaagtatagtaaccagaagaatccacactgtgtgtccctttacaagctatcaagtcctgaagatgacccaacttgcaaaacaaaggaattttgggccaccattttggattcagcaggtcctcttcctgactatactcctccagaaattttctcttttgaaagtactactggatttacattgtatgggatgctctacaagcctcatgatctacagcctggaaagaaatatcctactgtgctgttcatatatggtggtcctcaggttgctattgctggggccccagtcactctgtggatcttctatgatacaggatacacggaacgttatatgggtcaccctgaccagaatgaacagggctattacttaggatctgtggccatgcaagcagaaaagttcccctctgaaccaaatcgtttactgctcttacatggtttcctggatgagaatgtccattttgcacataccagtatattactgagttttttagtgagggctggaaagccatatgatttacagatctatcctcaggagagacacagcataagagttcctgaatcgggagaacattatgaactgcatcttttgcactaccttcaagaaaaccttggatcacgtattgctgctctaaaagtgatataattttgacctgtgtagaactctctggtatacactggctatttaaccaaatgaggaggtttaatcaacagaaaacacagaattgatcatcacattttgatacctgccatgtaacatctactcctgaaaataaatgtggtgccatgcaggggtctacggtttgtggtagtaatctaataccttaaccccacatgctcaaaatcaaatgatacatattcctgagagacccagcaataccataagaattactaaaaaaaaaaaaaaaaaaaa

SEQ ID NO: 314964 - DNA, 1061 bp, Artificial Sequence
  derived and/or modified sequence
ggaagtttgtggcggaggtgaggccgaggtgactgcagagcggctcgcgagagtctccctctgttgccaggctggagtgcagtggcgcgatctcggctcactgcaacctccgcctcctgagttcaagtgattctcctgcctcagcctcacaagtagctgggactacagggttttggactgataaagcaatggaagccactgaagagctttaagatgaggatggcatggagggaagataagtcacataatcagttctgtgatatgagcaacaatggaccagaagattttatctctagcagcagaaaaaacagcagacaaactgcaagaatttcttcaaaccctgagagaaggtgatttgactaatctccttcagaatcaagcagtgaaaggaaaagttgctggagcactcctgagagccatcttcaaaggttccccctgctctgaggaagctggaacacttaggagacgtaagatatacacttgttgtatccagttggtggaatcgggggatttgcagaaagaaatagcgtctgagatcataggattactgatgctggaggctcaccattttccaggaccattattggttgaattagccaatgagtttattagtgctgtcagagaaggcagcctagtgaatggaaaatctttggagttactacctatcattctcactgccctggctacgaaaaaggaaaatctggcttatggaaaaggtgtactgagtggggaagaatgtaagaaacagttgattaacaccctgtgttctggcaggtgggatcagcaatatgtaatccaactcacctccatgttcaaggatgtccctctgactgcagaagaggtggaatttgtggtggaaaaagcattgagcatgttctccaagatgaatcttcaagaaataccacctttggtctatcagcttctggttctctcctccaagggaagcagaaagagtgttttggaaggaatcatagccttcttcagtgcactagataagcagcacaatgaggaacagagtggtgacgagtgagtaatatagtgtagaaataaagatcattttt

SEQ ID NO: 314965 - DNA, 222 bp, Artificial Sequence
  derived and/or modified sequence
atgtttaaagatgttccactgactgctgaggaagtagaattcgtcgtggagaaagctttgtccatgttcagtaaaatgaatcttcaggagatcccaccccttgtgtatcagctgcttgtgctctcatcaaaggggagcaggaaaagcgtgctggagggtatcatcgccttcttttccgccttggacaaacagcataatgaggagcaatcaggagatgagtag

SEQ ID NO: 314966 - DNA, 222 bp, Artificial Sequence
  derived and/or modified sequence
atgttcaaggatgtgcccctgacagctgaggaggtggagtttgtggtggagaaggccctgtccatgttcagcaagatgaacctgcaggagatcccccccctggtgtaccagctgctggtgctgagcagcaagggcagcaggaagtctgtgctggagggcatcatcgccttcttcagcgccctggacaagcagcacaatgaggagcagagcggagatgaatag

SEQ ID NO: 314967 - DNA, 222 bp, Artificial Sequence
  derived and/or modified sequence
atgttcaaggacgtgcccctgaccgccgaggaggtggagttcgtggtggaaaaagcgctcagtatgttctcaaagatgaaccttcaggaaatcccccccctggtgtatcagctgttggtcctgagctctaagggctcacgcaaatctgttctggagggcatcatcgcgtttttttcagccctcgataagcagcacaatgaagaacaatctggggatgagtag

SEQ ID NO: 314968 - DNA, 222 bp, Artificial Sequence
  derived and/or modified sequence
atgtttaaggatgttccgctgaccgcagaagaggtggagtttgtggtcgagaaagccttgtcaatgttctctaagatgaatcttcaggaaatccccccactggtatatcagctgttagtgctgagttctaaaggctcccgcaagtcagtgctagaggggatcatcgcattctttagcgccttggacaagcagcacaacgaagaacagtctggcgacgagtag

SEQ ID NO: 314969 - DNA, 222 bp, Artificial Sequence
  derived and/or modified sequence
atgttcaaggacgtgcccctgaccgccgaggaggtggagttcgtggtggagaaggccctgagcatgttcagcaagatgaacctgcaggagatcccccccctggtgtaccagctgctggtgctgagcagcaagggcagcagaaagagcgtgctggagggcatcatcgccttcttcagcgccctggacaagcagcacaacgaggagcagagcggcgacgagtag

SEQ ID NO: 314970 - protein, 396 aa, Artificial Sequence
  derived and/or modified sequence
MDLDKPSVWGSLKQRTRPLLINLSKKKVKKNPSKPPDLRARHHLDRRLSLSVPDLLEAEALAPEGRPYSGPQSSYTSVPSSLSTAGIFPKSSSSSLKQSEEELDWSQEEASHLHVVETDSEEAYASPAERRRVSSNGIFDLQKTSLGGDAPEEPEKLCGSSDLNASMTSQHFEEQSVPGEASDGLSNLPSPFAYLLTIHLKEGRNLVVRDRCGTSDPYVKFKLNGKTLYKSKVIYKNLNPVWDEIVVLPIQSLDQKLRVKVYDRDLTTSDFMGSAFVILSDLELNRTTEHILKLEDPNSLEDDMGVIVLNLNLVVKQGDFKRHRWSNRKRLSASKSSLIRNLRLSESLKKNQLWNGIISITLLEGKNVSGGSMTEMFVQLKLGDQRYKSKDGHFGH

SEQ ID NO: 314971 - protein, 306 aa, Artificial Sequence
  derived and/or modified sequence
MGILDIEVWGKDNKKHEERLGTCKVDISALPLKQANCLELPLDSCLGALLMLVTLTPCAGVSVSDLCVCPLADLSERKQITQRYCLQNSLKDVKDVGILQVKVLKAADLLAADFSGKSDPFCLLELGNDRLQTHTVYKNLNPEWNKVFTFPIKDIHDVLEVTVFDEDGDKPPDFLGKVAIPLLSIRDGQPNCYVLKNKDLEQAFKGVIYLEMDLIYNPVKASIRTFTPREKRFVEDSRKLSKKILSRDVDRVKRITMAIWNTMQFLKSCFQWESTLRSTIAFAHRKEEPPLSMKCTLFSGDIGPSL

SEQ ID NO: 314972 - DNA, 2222 bp, Artificial Sequence
  derived and/or modified sequence
gagtcattgcagttttcagtagaggtgtacttctgagaagtggcttcttgggtcttcatgcagccatggatctggataaaccatctgtttggggctcattaaaacagcggaccaggccattgttgatcaacttgagcaagaagaaggtgaaaaagaacccaagtaagcccccagatctacgggcaaggcatcacttggaccgccgtctcagcctctctgtgcctgatctcctggaggctgaggccttggccccagagggccggccttactccgggccacagtcttcctacacctcggtgcccagcagtctgtccactgcagggatctttcccaagagcagcagtagctccttgaaacagtctgaagaagaattggattggagccaggaagaagccagtcacctccatgtggtggaaacagactcagaggaggcctatgcctctcctgctgagcggagacgggtgtccagcaacggcatctttgatcttcagaaaacttcccttggaggggatgcaccagaagagccagagaagctatgtggaagcagtgacctgaatgcttctatgacatctcaacattttgaagaacaatctgtaccgggggaagccagtgatggcttgagtaacctccccagcccttttgcgtacctcctcaccatacacctgaaggaaggccggaacctggttgtccgagatcgctgtggcacaagtgatccttatgtgaaatttaagctgaatgggaagacgctgtacaaaagtaaagtcatatataagaacttgaacccagtatgggatgagatagttgtattgccaatccaaagccttgatcaaaagctacgtgtgaaggtatatgatcgagatttaaccacatctgatttcatgggttctgcatttgtcattctcagtgatcttgagcttaacagaacaactgaacatattttaaaactggaagatccaaacagtttagaagatgacatgggagtgatcgtgttaaatttgaacctagtggtaaaacagggtgatttcaagagacaccgttggtcaaatcggaagcgattaagtgccagcaagtcctctttgatacgcaacctacggctctctgagtccttgaaaaagaaccaactctggaacgggattataagtataactttgttggaagggaagaatgtctcaggaggaagcatgacagagatgtttgtccagttaaaactgggagatcagaggtataaaagtaagacactgtgtaagagtgcaaatccgcagtggcaggaacagtttgactttcactacttctctgacaggatgggcattttggacattgaagtgtggggaaaggacaacaaaaagcatgaggaacgtctgggcacgtgtaaagtggatatctcggcactccctctgaagcaagccaactgcctggagctgccactggacagctgtctgggggctctccttatgttggtcacacttacaccctgtgcgggggtctccgtctctgatctgtgtgtctgccccttagcagacctcagcgaaagaaagcagattacccagcgatattgcttacagaactccctgaaagatgtgaaagacgtcggcattctacaagtgaaggttttaaaggcagcagatctcttagcggcagatttctcagggaagagtgacccattttgcttgttggagttaggcaatgaccgacttcagacgcataccgtctacaaaaacctcaaccctgaatggaacaaagtttttacatttcccattaaagatatccatgatgttttggaagtgacagtgtttgatgaagatggagataaacccccagattttcttggaaaagttgccattcccttgctgtccattagagatggacaaccgaattgttatgtactaaagaataaagatttagaacaagcttttaaaggagttatttacttagagatggaccttatatataatccggtgaaagcaagtattaggacttttactccccgggaaaagcgctttgttgaagacagccgcaagctgtccaaaaagatcttatcaagagatgtggaccgtgtgaaaagaatcactatggcaatatggaatacaatgcagttccttaaaagctgcttccagtgggaatccacattaagaagtacaatagcattcgcgcaccgcaaagaggaaccacccctgtctatgaaatgtacccttttctctggtgacattggcccatccttatga

SEQ ID NO: 314973 - DNA, 1191 bp, Artificial Sequence
  derived and/or modified sequence
atggacctggacaagcccagcgtgtggggcagcctgaagcagagaaccagacccctgctgatcaacctgagcaagaagaaggtgaagaagaaccccagcaagccccccgacctgagagccagacaccacctggacagaagactgagcctgagcgtgcccgacctgctggaggccgaggccctggcccccgagggcagaccctacagcggcccccagagcagctacaccagcgtgcccagcagcctgagcaccgccggcatcttccccaagagcagcagcagcagcctgaagcagagcgaggaggagctggactggagccaggaggaggccagccacctgcacgtggtggagaccgacagcgaggaggcctacgccagccccgccgagagaagaagagtgagcagcaacggcatcttcgacctgcagaagaccagcctgggcggcgacgcccccgaggagcccgagaagctgtgcggcagcagcgacctgaacgccagcatgaccagccagcacttcgaggagcagagcgtgcccggcgaggccagcgacggcctgagcaacctgcccagccccttcgcctacctgctgaccatccacctgaaggagggcagaaacctggtggtgagagacagatgcggcaccagcgacccctacgtgaagttcaagctgaacggcaagaccctgtacaagagcaaggtgatctacaagaacctgaaccccgtgtgggacgagatcgtggtgctgcccatccagagcctggaccagaagctgagagtgaaggtgtacgacagagacctgaccaccagcgacttcatgggcagcgccttcgtgatcctgagcgacctggagctgaacagaaccaccgagcacatcctgaagctggaggaccccaacagcctggaggacgacatgggcgtgatcgtgctgaacctgaacctggtggtgaagcagggcgacttcaagagacacagatggagcaacagaaagagactgagcgccagcaagagcagcctgatcagaaacctgagactgagcgagagcctgaagaagaaccagctgtggaacggcatcatcagcatcaccctgctggagggcaagaacgtgagcggcggcagcatgaccgagatgttcgtgcagctgaagctgggcgaccagagatacaagagcaaggacggccacttcggccactag

SEQ ID NO: 314974 - DNA, 1191 bp, Artificial Sequence
  derived and/or modified sequence
atggatcttgataagccgagcgtctggggtagcctgaaacagcgcaccaggcccctgcttatcaacctaagcaaaaaaaaggtaaaaaagaatccctcaaaacctcccgatctgagagcacgacaccatctggataggcgattgagcctctcggtgccagatcttttggaagctgaggcactagctcccgagggcaggccctactctggacctcagtcttcctacaccagcgtccccagctctcttagcacggcaggcatttttccaaaatccagctccagttctctgaagcagtctgaagaggagctcgattggtcacaagaggaggcttcccaccttcatgtggtggaaaccgattcagaggaagcctacgccagtccagccgagcggagacgagtgtcatccaatggcattttcgacttacagaaaaccagcctgggtggagacgcccccgaagagcccgagaagctatgcggcagcagcgacctgaacgccagtatgacctcccagcacttcgaagagcagtccgtgcccggtgaggccagtgacggtctgtcaaatctgccctccccattcgcctacttacttacaatccaccttaaggaaggccgcaatctggtagtgagggaccgttgcgggaccagcgatccttacgtgaaattcaaacttaacgggaaaactctctacaagagcaaagtgatatacaagaaccttaaccccgtctgggatgaaatcgtcgtgcttccaatccaaagtcttgatcagaaactacgagtcaaggtatatgatagagacctgactacctctgatttcatgggaagtgctttcgtcatcctgtcggacctggaactcaatcggaccacagagcacattttgaaactggaagacccaaatagccttgaggatgacatgggagtcattgtgctgaacttaaacctggtggtgaaacagggcgattttaaaagacatcgctggtctaaccgtaaaaggctttcagcatctaagagttccttaatccggaatctgcgcttgtctgagtcccttaagaaaaatcagctgtggaacggaattataagtattactctgttggagggaaaaaatgtctccggagggtctatgactgaaatgttcgttcaattgaagctgggagatcaaagatacaagtcaaaggacgggcactttgggcattag

SEQ ID NO: 314975 - DNA, 1191 bp, Artificial Sequence
  derived and/or modified sequence
atggacctggacaagcccagcgtgtggggcagcctgaagcagaggacccggcccctgctgatcaacctgagcaagaagaaggtgaagaagaaccccagcaagcccccagacctgcgggcccggcaccacctggaccggcggctgagcctgtctgtgcctgacctgctggaggccgaggccctggcccctgagggccggccctacagcggcccccagagcagctacacctctgtgcccagcagcctgagcacagctggcatcttccccaagagcagcagcagcagcctgaagcagagcgaggaggagctggactggagccaggaggaggccagccacctgcacgtggtggagacagacagcgaggaggcctatgccagccctgctgagaggagaagagtgagcagcaatggcatctttgacctgcagaagaccagcctgggcggagatgcccctgaggagcctgagaagctgtgtggcagcagtgacctgaatgcctccatgaccagccagcactttgaggagcagagcgtgcctggagaggccagtgatggcctgagcaacctgcccagcccctttgcctacctgctgaccatccacctgaaggagggcaggaacctggtggtgcgggacagatgtggcaccagtgacccctacgtgaagttcaagctgaatggcaagaccctgtacaagagcaaggtgatctacaagaacctgaaccctgtgtgggatgaaattgtggtgctgcccatccagagcctggaccagaagctgcgggtgaaggtgtatgaccgggacctgaccaccagtgacttcatgggcagcgccttcgtcatcctgagtgacctggagctgaacagaaccacagagcacatcctgaagctggaggaccccaacagcctggaggatgacatgggcgtgattgtgctgaacctgaacctggtggtgaagcagggcgacttcaagaggcaccgctggagcaacaggaagaggctgagcgccagcaagagcagcctcatccggaacctgcggctgtctgagagcctgaagaagaaccagctgtggaatggcatcatcagcatcaccctgctggagggcaagaatgtgtctgggggctccatgacagagatgtttgtgcagctgaagctgggggaccagcgctacaagagcaaggatggccacttcggccactag

SEQ ID NO: 314976 - DNA, 1422 bp, Artificial Sequence
  derived and/or modified sequence
gatgcccccgcccccgccgcgtcagggttgctccctgcgcttccgagtggcgactgcagcgggtccggtgcaggtgaggggcgcgcgcctgcccagctttgcagcccccgaacgcggcctcgcacaggagtcattgcagttttcagtagaggtgtacttctgagaagtggcttcttgggtcttcatgcagccatggatctggataaaccatctgtttggggctcattaaaacagcggaccaggccattgttgatcaacttgagcaagaagaaggtgaaaaagaacccaagtaagcccccagatctacgggcaaggcatcacttggaccgccgtctcagcctctctgtgcctgatctcctggaggctgaggccttggccccagagggccggccttactccgggccacagtcttcctacacctcggtgcccagcagtctgtccactgcagggatctttcccaagagcagcagtagctccttgaaacagtctgaagaagaattggattggagccaggaagaagccagtcacctccatgtggtggaaacagactcagaggaggcctatgcctctcctgctgagcggagacgggtgtccagcaacggcatctttgatcttcagaaaacttcccttggaggggatgcaccagaagagccagagaagctatgtggaagcagtgacctgaatgcttctatgacatctcaacattttgaagaacaatctgtaccgggggaagccagtgatggcttgagtaacctccccagcccttttgcgtacctcctcaccatacacctgaaggaaggccggaacctggttgtccgagatcgctgtggcacaagtgatccttatgtgaaatttaagctgaatgggaagacgctgtacaaaagtaaagtcatatataagaacttgaacccagtatgggatgagatagttgtattgccaatccaaagccttgatcaaaagctacgtgtgaaggtatatgatcgagatttaaccacatctgatttcatgggttctgcatttgtcattctcagtgatcttgagcttaacagaacaactgaacatattttaaaactggaagatccaaacagtttagaagatgacatgggagtgatcgtgttaaatttgaacctagtggtaaaacagggtgatttcaagagacaccgttggtcaaatcggaagcgattaagtgccagcaagtcctctttgatacgcaacctacggctctctgagtccttgaaaaagaaccaactctggaacgggattataagtataactttgttggaagggaagaatgtctcaggaggaagcatgacagagatgtttgtccagttaaaactgggagatcagaggtataaaagtaaggatgggcattttggacattgaagtgtggggaaaggacaacaaaaagcatgaggaacgtct

SEQ ID NO: 314977 - DNA, 1191 bp, Artificial Sequence
  derived and/or modified sequence
atggacctggacaagcccagcgtgtggggcagcctgaagcagcggacacgcccactgctaatcaatctttcaaagaagaaggtgaagaagaacccgagcaaacctcccgatctgagagcgaggcatcaccttgaccgacgcctctctctgagcgtccctgatctgttggaagctgaggctctagctccagagggtaggccgtatagtggcccacaaagcagttatacgtcagtgcctagcagcctctcaacagctggaatattccctaagagcagttcttccagcctgaaacagtccgaagaggaactggattggtcacaagaggaggcatctcatttgcacgtcgttgaaaccgattctgaagaggcctacgctagccccgccgagcgccggcgagtctccagtaatggcatttttgacctgcagaagacttcattaggaggagatgcaccagaagagccggagaagctgtgcggctcctctgatctgaacgcctctatgaccagccagcacttcgaggagcaaagcgtgccgggggaggcaagtgatggcttgagcaatctgcccagtccattcgcatatctgttgaccatccatctgaaggaaggcaggaaccttgtggtgagagacagatgcggcacatcagatccctatgtgaaattcaaactgaatgggaaaacattgtacaagagcaaggttatttacaagaatttgaaccccgtctgggacgagatcgtagtgctgcctattcagagcctggatcaaaaactgagagtcaaagtctatgacagggaccttacaacgtctgactttatgggcagcgctttcgtaattctgtccgatctcgaattgaatcggaccaccgagcatattctcaagctggaagaccctaattctctcgaggatgacatgggcgtgatcgttctcaacttaaatttagtggtaaagcagggagactttaaacggcatcgttggagtaatcgcaagagactgagcgcatccaaatcttctctgatcagaaatctgaggctgagcgagtcactgaaaaagaatcagctctggaatggaattatttccattacccttttggaaggaaagaatgtgtcggggggcagcatgactgagatgttcgtgcaattaaaactgggcgatcagcggtacaagtcaaaggatggccatttcggacactag

SEQ ID NO: 314978 - DNA, 1191 bp, Artificial Sequence
  derived and/or modified sequence
atggacttggataaacctagtgtgtgggggagcctgaagcaacgaaccaggcctctgctgattaatcttagcaagaagaaggttaaaaaaaatccaagcaagccccctgatctgcgcgcaagacatcatttagatcgtagactgtcactgtccgtcccagacttgctggaagccgaggctttggcccctgaggggaggccgtattctggaccccagtcttcctatacaagcgtaccttcctctttgtctaccgccggaatctttcctaaatccagctctagctcactcaagcaaagcgaggaggaactagattggtcacaagaggaggcctcacacctccacgtggtggaaacggattctgaagaggcctatgcctcaccggctgagcggcgacgtgtcagtagcaatggaatatttgacctccagaaaacttctttaggcggtgatgcccctgaggagcccgagaaactatgcgggtctagtgacttgaatgcctctatgactagccagcacttcgaagaacagagcgtgcctggagaggccagtgacggcttgtctaacctgccctctccatttgcttacttgctgaccatccatcttaaggagggccgaaacctggtcgtgagagataggtgtggcacatcggatccatacgtgaaatttaaattgaacggcaagacactgtacaagtccaaggtgatttataagaatctgaaccctgtctgggacgaaattgtggtgctgcctatacagtcgctggaccaaaaactgagagtgaaagtttacgaccgcgacttaactacatccgactttatggggagcgcgttcgttatcctatctgacctggagctgaatagaacgacagaacacatcctcaaactggaggaccccaatagtctagaggatgacatgggcgtaatcgtcttaaacctcaacctcgtggtcaaacagggcgacttcaagagacacaggtggtctaaccgaaaacgcttgtccgcgtccaaaagctctctaatcagaaatctccgcctgtctgagagtttgaagaagaaccagctgtggaatgggatcataagtatcacattgttagagggaaagaacgtgtccggcggatccatgacagaaatgttcgtccaactcaaactgggcgatcagcgatataaaagtaaagacggtcatttcggtcactag

SEQ ID NO: 314979 - protein, 373 aa, Artificial Sequence
  derived and/or modified sequence
MPSSTPTAGRTWAIWTHTYLPWQKRHTSRWPDGKSEAQDLDLLTLYLNLYCITPAAAPELPPLYVFVCELDSQRAPIPGSDAYNEGAGGAYMRNNRNQSIIVSGESGAGKTVSARYAMRYFATVSKSGSNAHVEDKVLASNPITEAVGNAKTTRNDNSSRFGKYTEISFDEQNQIIGANMSTYLLEKSRVVFQSENERNYHIFYQLCASAQQSEFKHLKLGSAEEFNYTRMGGNTVIEGVNDRAEMVETQKTFTLLGFKEDFQMDVFKILAAILHLGNVQITAVGNERSSVSEDDSHLKVFCELLGLESGRVAQWLCNRKIVTSSETVVKPMTRPQAVNARDALAKKIYAHLFDFIVERINQALQFSVLKPLM

SEQ ID NO: 314980 - protein, 430 aa, Artificial Sequence
  derived and/or modified sequence
MAVAELYTQYNRVWIPDPEEVWKSAEIAKDYRVGDKVLRLLLEDGTELDYSVNPESLPPLRNPDILVGENDLTALSYLHEPAVLHNLRIRFAESKLIYTYSGIILVAMNPYKQLPIYGDAIIHAYSGQNMGDMDPHIFAVAEEAYKQMARNNRNQSIIVSGESGAGKTVSARYAMRYFATVSKSGSNAHVEDKVLASNPITEAVGNAKTTRNDNSSRFGKYTEISFDEQNQIIGANMSTYLLEKSRVVFQSENERNYHIFYQLCASAQQSEFKHLKLGSAEEFNYTRMGGNTVIEGVNDRAEMVETQKTFTLLGFKEDFQMDVFKILAAILHLGNVQITAVGNERSSVSEDDSHLKVFCELLGLESGRVAQWLCNRKIVTSSETVVKPMTRPQAVNARDALAKKIYAHLFDFIVERINQALQFSVLKPLM

SEQ ID NO: 314981 - protein, 269 aa, Artificial Sequence
  derived and/or modified sequence
MAVAELYTQYNRVWIPDPEEVWKSAEIAKDYRVGDKVLRLLLEDGTELDYSVNPESLPPLRNPDILVGENDLTALSYLHEPAVLHNLRIRFAESKLIYTYSGIILVAMNPYKQLPIYGDAIIHAYSGQNMGDMDPHIFAVAEEAYKQMARNNRNQSIIVSGESGAGKTVSARYAMRYFATVSKSGSNAHVEDKVLASNPITEAVGNAKTTRNDNSSRFGKYTEISFDEQNQIIGANMSTYLLEKSRVVFQGVPKNLIIQEWEAILSLRV

SEQ ID NO: 314982 - DNA, 1122 bp, Artificial Sequence
  derived and/or modified sequence
atgcccagtagcacacctactgcagggagaacatgggcaatttggactcacacctatctcccctggcagaaaaggcacacctctcggtggcctgacgggaagagtgaagcccaggacctggacctgctgacgctgtatctgaacttgtactgtataactcctgcagccgccccagagctcccacctctatacgtgttcgtgtgcgagttagacagtcagcgcgctcctatccctgggtctgatgcctacaatgaaggagccgggggcgcctacatgcgcaacaatcgcaatcaatctatcattgtatccggggaaagtggcgcaggaaaaacagtgtcggcgcggtatgccatgcgctactttgccaccgtcagcaagagcggcagcaacgctcatgtggaggataaggtgcttgcatctaatcctataacggaggctgttggaaatgctaaaacaaccaggaacgacaacagctcaaggtttgggaaatatactgaaatctcctttgatgagcaaaatcagatcattggagcgaatatgtccacctacctcttggagaagagccgcgtggtgttccagtcagagaatgagcgaaattatcacatattctaccagctatgtgcctctgcacagcaaagtgagtttaaacatttgaaactgggaagtgctgaagaatttaactatacgcggatggggggcaacaccgtgatagaaggcgtaaatgacagggccgagatggtggaaactcagaaaactttcacattactggggtttaaggaagactttcaaatggatgtgtttaagattctcgccgccatcctgcacctggggaatgtacaaatcactgcggtggggaacgaacggtcttctgtgagtgaggacgatagccaccttaaggtattctgcgagctcctcggactcgagagtgggcgcgtggcccagtggctgtgtaacagaaagatcgtaacttcctctgaaacagtggtgaagcccatgacacgtccccaggctgtgaacgctagagacgctttggccaagaaaatttatgcacacctgtttgacttcatcgtcgaaaggatcaatcaggccctgcagttctcagttcttaaacctctgatgtag

SEQ ID NO: 314983 - DNA, 1293 bp, Artificial Sequence
  derived and/or modified sequence
atggcggtggccgagctgtacactcagtacaacagggtctggattcctgacccagaggaggtgtggaagtccgcggagatcgctaaagattacagagtcggtgataaggttctgcggctcctgctggaagatggtaccgaactcgactactccgtcaacccagagagtcttcctccacttcggaaccctgatatactggttggcgagaacgaccttacagcgctctcttaccttcacgaacccgccgtgcttcataacctaagaatacgattcgctgagagcaaactcatttacacctactctggcattattctcgtcgctatgaacccgtataagcagctccctatttatggtgatgctatcattcacgcgtacagcggtcagaatatgggagatatggatcctcacattttcgcagttgcagaagaagcatataaacaaatggcgaggaataacagaaaccagtcgattatcgtgtctggggagagtggcgctgggaaaactgtatccgcccgctatgcgatgcgatactttgccactgtgagcaaaagcggcagcaacgcccatgtcgaggataaggtgctggcttcaaatcccatcacggaggccgtgggcaacgcaaagactactcgcaatgacaacagctcccgatttgggaagtatactgaaataagctttgacgagcagaaccagatcattggcgccaatatgtctacttacttgctcgaaaaaagccgcgtggtgttccagtccgagaacgaacgtaactatcacatcttctaccagctgtgcgcctctgcccagcagtctgagtttaagcacctgaaactaggcagtgctgaggaattcaattacacccggatgggcgggaataccgtgatcgagggcgtgaatgacagggcagagatggtggaaacacagaagacctttaccctgctgggttttaaggaggacttccagatggacgttttcaaaattctagccgcgatcttgcacctaggaaatgtgcagataaccgccgtgggaaatgagaggtcctcggtctcagaagatgactctcatctgaaagtcttctgtgagctcctcggcctcgagtctggccgagtcgcccagtggttatgtaacagaaaaattgtgaccagtagtgaaacagttgtgaagcccatgacacgcccccaggctgtgaacgcccgggatgcgctggccaaaaagatctatgctcatctgttcgatttcatcgtggagcgaattaatcaggctttgcagtttagtgtgctaaagcctttgatgtag

SEQ ID NO: 314984 - DNA, 810 bp, Artificial Sequence
  derived and/or modified sequence
atggctgttgccgagctgtacacacaatataatcgggtgtggattcccgaccccgaggaagtctggaaaagtgccgagattgctaaggattaccgggtgggtgataaagtactaaggctacttctagaagatggaacagaacttgattactcagttaatcccgagtctctgccccctctccgaaacccagacatactggtgggagagaatgacctgaccgcgttaagctaccttcatgagccagctgtgcttcacaacctgcgcattaggtttgccgaatccaagctgatttacacttattccggtatcatactggtagccatgaatccctacaaacagttacccatctatggcgatgccatcatccatgcatacagcggacaaaacatgggtgatatggatcctcatattttcgccgttgctgaggaagcttacaagcaaatggcccgaaacaatcgcaatcagtccattattgttagtggcgagtccggagccggtaaaacggtgtccgcccggtatgcaatgagatacttcgccacggtgtccaagtcaggctctaacgcccatgtggaggataaggttttagcatccaaccctatcaccgaggccgttgggaatgccaaaactacgagaaacgacaatagcagtcgatttgggaaatacacagagatttcatttgacgaacagaatcaaattattggagctaacatgtccacctacctactcgaaaagagccgcgtcgtttttcagggtgtcccaaagaacttgattattcaggaatgggaggcaattttgagtctaagagtttag

SEQ ID NO: 314985 - DNA, 1122 bp, Artificial Sequence
  derived and/or modified sequence
atgcccagcagcacccccacagctggccgcacctgggccatctggacccacacctacctgccctggcagaagaggcacaccagccgctggccagatggcaagtctgaggcccaggacctggacctgctgaccctgtacctgaacctgtactgcatcaccccagctgctgcccctgagctgccccccctgtatgtgtttgtgtgtgagctggacagccagagggcccccatccctggcagtgatgcctacaatgaaggagctggaggagcctacatgaggaacaacagaaaccagagcatcatcgtgtctggagagagcggggccggcaagacagtgtctgcccgctatgccatgagatactttgccaccgtgtccaagagcggcagcaatgcccacgtggaggacaaggtgctggccagcaaccccatcacagaggccgtgggcaatgccaagaccaccagaaatgacaacagcagcagatttgggaagtacacagagatcagctttgatgagcagaaccagatcatcggggccaacatgagcacctacctgctggagaagagccgggtggtgttccagagtgaaaatgaaagaaactaccacatcttctaccagctgtgtgccagcgcccagcagagcgagttcaagcacctgaagctgggcagcgctgaggagttcaactacaccaggatgggcggcaacacagtgattgaaggagtgaatgacagagctgagatggtggagacccagaagaccttcaccctgctgggcttcaaggaggacttccagatggatgtgttcaagatcctggccgccatcctgcacctgggcaatgtgcagatcacagctgtgggcaatgaaagaagctctgtgtctgaagatgacagccacctgaaggtgttctgtgagctgctgggcctggagagcggccgggtggcccagtggctgtgcaacaggaagatcgtgaccagcagcgagaccgtggtgaagcccatgacccggccccaggccgtgaatgccagagatgccctggccaagaagatctatgcccacctgtttgacttcatcgtggagcgcatcaaccaggccctgcagttctctgtgctgaagcccctgatgtag

SEQ ID NO: 314986 - DNA, 1293 bp, Artificial Sequence
  derived and/or modified sequence
atggctgtggccgagctgtacacccagtacaacagagtgtggatcccagaccctgaggaggtgtggaagtctgctgagatcgccaaggactacagagtgggggacaaggtgctgcggctgctgctggaggatggaacagagctggactacagcgtgaaccctgagagcctgccccccctgagaaatccagacatcctggtgggagaaaatgacctgacagccctgagctacctgcacgagcctgctgtgctgcacaacctgcgcatccgctttgctgagagcaagctgatctacacctacagcggcatcatcctggtggccatgaacccctacaagcagctgcccatctatggagatgccatcatccacgcctacagcggccagaacatgggagacatggacccccacatctttgctgtggccgaggaggcctacaagcagatggccaggaacaacagaaaccagagcatcatcgtgtctggagagagcggggccggcaagacagtgtctgcccgctatgccatgagatactttgccaccgtgtccaagagcggcagcaatgcccacgtggaggacaaggtgctggccagcaaccccatcacagaagctgtgggcaatgccaagaccaccagaaatgacaacagcagcagatttgggaagtacacagagatcagctttgatgagcagaaccagatcattggagccaacatgagcacctacctgctggagaagagccgggtggtgttccagagtgaaaatgaaagaaactaccacatcttctaccagctgtgtgccagcgcccagcagagcgagttcaagcacctgaagctgggcagcgctgaggagttcaactacaccaggatgggcggcaacacagtcatcgagggcgtgaatgacagagctgagatggtggagacccagaagaccttcaccctgctgggcttcaaggaggacttccagatggatgtgttcaagatcctggccgccatcctgcacctgggcaatgtgcagatcacagctgtgggcaatgaaagaagctctgtgtctgaagatgacagccacctgaaggtgttctgtgagctgctgggcctggagagcggccgggtggcccagtggctgtgcaacaggaagatcgtgaccagcagcgagaccgtggtgaagcccatgacccggccccaggccgtgaatgccagagatgccctggccaagaagatctatgcccacctgtttgacttcatcgtggagcgcatcaaccaggccctgcagttctctgtgctgaagcccctgatgtag

SEQ ID NO: 314987 - DNA, 810 bp, Artificial Sequence
  derived and/or modified sequence
atggctgtggccgagctgtacacccagtacaacagagtgtggatcccagaccctgaggaggtgtggaagtctgctgagatcgccaaggactacagagtgggggacaaggtgctgcggctgctgctggaggatggaacagagctggactacagcgtgaaccctgagagcctgccccccctgagaaatccagacatcctggtgggagaaaatgacctgacagccctgagctacctgcacgagcctgctgtgctgcacaacctgcgcatccgctttgctgagagcaagctgatctacacctacagcggcatcatcctggtggccatgaacccctacaagcagctgcccatctatggagatgccatcatccacgcctacagcggccagaacatgggagacatggacccccacatctttgctgtggccgaggaggcctacaagcagatggccaggaacaacagaaaccagagcatcatcgtgtctggagagagcggggccggcaagacagtgtctgcccgctatgccatgagatactttgccaccgtgtccaagagcggcagcaatgcccacgtggaggacaaggtgctggccagcaaccccatcacagaagctgtgggcaatgccaagaccaccagaaatgacaacagcagcagatttgggaagtacacagagatcagctttgatgagcagaaccagatcattggagccaacatgagcacctacctgctggagaagagccgggtggtgttccagggcgtgcccaagaacctgatcatccaggagtgggaggccatcctgagcctgcgggtgtag

SEQ ID NO: 314988 - DNA, 770 bp, Artificial Sequence
  derived and/or modified sequence
gttggaaaactttgggcaagatggcccggcggtgatttccgcggcggtctctcctgcgcccggcctctgcggcgcaggcccagcccccgagcctcgcacgttcggcagccccggcctggccccggcccctcctgcccatggcggtggccgagctgtacacgcagggtctggattcccgatcctgaagaagtttggaagtctgctgaaatagccaaggactacagagttggtgacaaggtcctgcgactcctgctggaggatggaacggagctggattattctgtcaatccagaatctctgcctccacttcggaatcctgacatcctcgtgggcgagaatgacctcacggctctcagctatcttcacgagcccgcggtgctccacaacctcagaatccgctttgcagaatccaaactcatttacacctacagtggaatcattttggtggccatgaatccttacaagcagttgccaatatacggagatgccatcatccacgcctacagcgggcagaacatgggcgatatggacccacacatatttgccgtggcagaagaggcatacaagcagatggccagaaacaacagaaaccagtccataattgtaagtggggagtcaggtgctggaaagacagtgtcggctcgctatgccatgaggtactttgccaccgtcagcaaatcgggcagcaacgctcacgtggaagacaaggtcctggcatccaatcccatcaccgaggccgttggaaatgccaagaccacccgcaatgacaa

SEQ ID NO: 314989 - DNA, 1122 bp, Artificial Sequence
  derived and/or modified sequence
atgcccagcagcacccccaccgccggccggacctgggccatctggactcacacatatttaccatggcaaaagcggcacacttcaagatggcctgatggcaagagcgaagcgcaagaccttgatctgcttaccctttacctgaatctgtattgtattactcctgcagccgccccggaactgcctccactctacgtgttcgtctgcgagctcgacagtcaaagagccccaattcccggttccgacgcctacaacgagggcgccggcggcgcttacatgaggaataaccggaatcagtctataattgtttcgggggaatccggagcagggaagactgtgagcgcccgctatgcgatgcggtactttgccaccgtgagcaagagtggcagtaatgcccacgtggaggacaaggtcttggcctctaatcccatcaccgaagctgtgggaaacgccaagactacacggaatgacaactcttctaggtttgggaaatatactgagatttcgttcgatgagcagaaccagattattggcgccaatatgtccacttacctactagagaagagcagagtcgtgtttcaatctgagaatgaacggaattaccatatattttaccagctgtgcgcaagcgcccagcaatccgaatttaagcatctgaagctaggctcggcagaagaattcaactacacaagaatgggcggtaatacggtgattgaaggggtcaacgaccgagcagagatggttgagacacaaaagacgttcacactgctcgggttcaaagaggactttcaaatggacgtcttcaaaatcctggcagctatactacacttgggaaatgtacaaatcacagcagtgggaaacgagcgctccagcgtgagcgaagacgactcccacctgaaggtattttgcgaacttctgggcctcgaatctggaagggtcgcacagtggctgtgtaaccgcaagatcgtaacctccagtgagactgtcgttaagccgatgactagacctcaggcagtcaacgccagagacgctttagcgaagaagatctacgctcatttgtttgatttcatcgtggagaggattaaccaggcactgcagttcagcgtgctgaaacctctaatgtag

SEQ ID NO: 314990 - DNA, 1293 bp, Artificial Sequence
  derived and/or modified sequence
atggccgtggccgagctgtacacccagtacaaccgggtgtggatcccggatcccgaagaagtgtggaagtctgccgaaatcgcaaaggattacagggtaggcgataaagtcctcaggctgctgttggaagacggtacagaactggactacagcgtgaatcctgagtccttgccgcccctcagaaacccagatatccttgtgggcgagaacgacctgacagccctgtcgtacctgcacgagccggcagtccttcataaccttcgcattcgctttgccgaaagcaaacttatttacacttattctgggattatcctcgtggcaatgaacccctataaacagctccctatttacggggacgctattattcacgcttactcaggccaaaatatgggcgacatggacccccacatctttgctgtggctgaggaagcatacaagcagatggcccgaaacaatcgaaaccagagtataattgtgtctggcgagtctggtgccgggaagacagtatccgcccggtatgctatgagatatttcgcaacagtttcaaagtcagggtcaaacgcgcacgtcgaggacaaggtgctggcttccaatcccattacagaagccgtggggaatgctaaaacaactaggaacgataactctagtcgctttgggaagtacaccgaaattagttttgatgaacagaatcagataatcggagctaacatgagcacgtatttgctcgagaagtcgcgcgtcgtctttcagagcgagaatgagcgcaattaccacattttttatcaactctgtgcatctgcccaacagagcgaattcaaacatctaaaactgggtagcgccgaagaattcaattacactcgtatgggaggcaacactgtgattgaaggagtgaatgacagagccgagatggtagagacccaaaaaacattcacgctgctgggatttaaggaggatttccaaatggatgtattcaagatccttgccgctatcctgcacctgggaaacgttcagataaccgcagtagggaacgaacgaagttcagtgtccgaggatgatagtcatctgaaggtgttttgtgaattgctcgggctggaatccggacgcgtcgctcagtggctctgcaacaggaaaattgtaacatcttctgagaccgtggttaagcccatgacacggcctcaggcggtcaatgccagagacgccctggccaagaaaatctacgcccacctttttgatttcattgtcgagagaatcaatcaggcactgcagttctctgtgctgaagccactgatgtag

SEQ ID NO: 314991 - DNA, 810 bp, Artificial Sequence
  derived and/or modified sequence
atggccgtggccgagctgtacacccagtacaaccgggtgtggatccccgaccctgaggaggtatggaagtccgccgagatcgccaaggactacagggtgggggacaaagtgctcagactgctgcttgaggatggaaccgagctcgattactcagtgaatccagagagccttcctcccctgaggaacccagatattctcgtcggcgaaaacgacctgactgcgctgagctacttacatgaaccagccgttctccacaacctgaggatccggtttgctgagtctaaactcatctatacttactctggaatcattttagtggctatgaatccctacaagcagttgcctatttacggggacgccattattcacgcttatagtgggcagaatatgggagatatggatccccacattttcgccgtcgcggaagaagcatataaacagatggcccgaaataaccgaaaccaaagcatcattgtgtctggcgaaagtggggctgggaaaacagtttctgccagatatgcaatgcggtacttcgctacagtctccaagtcaggatctaacgctcacgtggaggataaggtgctcgcaagtaatcccataacagaagcggttggcaatgcaaaaacgacaagaaacgacaattcaagtcgcttcgggaaatatacagagatttccttcgatgagcaaaatcagattattggcgctaacatgtccacatatctgctagagaaatcccgtgtagtgttccagggcgtacctaagaacctgatcattcaagaatgggaagcaatccttagcctccgggtgtag

SEQ ID NO: 314992 - DNA, 1122 bp, Artificial Sequence
  derived and/or modified sequence
atgccctctagcacacctactgctgggcgaacatgggctatctggacccacacatacctgccgtggcaaaaaaggcacacaagtaggtggcccgacgggaaatccgaagctcaagacctagaccttctgaccctctacttgaatctgtactgtataactccggcagcagctcccgagctccctcccctgtacgtcttcgtctgcgaactagactcacagagggctcccatccctggaagcgacgcatataacgaaggggctgggggagcatatatgcgaaacaatcgcaaccagtctattatcgtgagtggagagtccggcgctggtaagaccgtctccgccagatatgccatgagatattttgccacagtgtctaagagtgggagtaacgcccacgttgaagacaaagtccttgcctctaatccaataactgaggcagtcggcaatgctaagactactcggaacgacaactcctcaagatttgggaaatacaccgagattagcttcgacgaacagaatcaaattataggcgctaatatgtcgacctacctgttagagaaaagcagagtcgtgttccagtcggaaaatgagcggaactaccatattttctaccaattgtgtgcctccgctcagcagagcgagtttaaacacctgaaacttgggtcagcagaggagtttaattacacgcgtatgggtggtaatacagtgatcgaaggggtgaatgatcgcgctgagatggtggaaacacagaagacatttactctcctgggtttcaaagaggattttcagatggacgtgttcaagatactggccgctatcctccacctgggaaatgtgcaaatcaccgctgtgggaaatgagaggtcctctgtgagcgaagatgattcccatctcaaagtgttctgcgagctacttgggctggaatccgggagagttgcccagtggctatgcaatcggaagatagttacatctagtgagaccgtcgtgaaaccgatgactcggcctcaggcagtgaacgccagagacgcgcttgctaaaaagatttatgcacaccttttcgactttattgtggagcgaattaaccaggcattacaatttagcgtgcttaaacccctcatgtag

SEQ ID NO: 314993 - DNA, 1293 bp, Artificial Sequence
  derived and/or modified sequence
atggccgtcgccgaactctatacgcagtataatcgtgtgtggatccccgatcccgaggaggtttggaagtcggccgaaatcgcaaaagactatagagtcggcgacaaagtccttcgattgctgttggaggatggcacagagttggattacagtgtcaaccccgaaagccttcccccactgcggaaccccgacatccttgttggcgaaaacgacttaaccgccttgagttacctccacgagcccgctgtgttgcataatcttcggatacgcttcgcagaatcaaaactaatctatacgtactccggcatcatcctggttgccatgaacccctacaaacaactcccaatctatggcgatgcaatcattcacgcctacagtggacagaatatgggagacatggatcctcatatctttgctgtcgctgaggaagcatacaagcagatggccaggaataacaggaatcagtccattatcgtatctggtgaaagtggtgccggtaaaaccgtctccgcacgatatgctatgaggtattttgcaaccgtgagcaaatctggaagtaatgcacacgtggaggacaaggtgttagcaagcaatccgataaccgaggccgtaggcaacgcgaagactacacgtaacgataactcaagcagatttgggaaatacacagaaatatctttcgatgaacagaatcaaattattggtgccaatatgtctacgtacctccttgaaaagtcccgtgtagtcttccaatcagagaacgaaagaaattatcacatcttctaccagctgtgtgcatctgcacagcaaagcgaatttaaacatctgaaactgggatccgcagaggaattcaactacaccagaatgggcggaaacacagtgatagaaggtgttaacgaccgggcagagatggtggaaacacagaagacttttactctgctgggtttcaaagaagatttccaaatggacgttttcaagatccttgcagccatcctccacctcgggaatgttcagataacagctgtcggaaatgaacgcagctcagtgtccgaggatgacagccacctcaaagtattctgtgagctactaggcctagagtccggacgtgttgcacagtggctgtgtaaccgtaaaatcgtaacatcctcagaaacagtggtaaagcccatgacacgccctcaggcagtcaacgctcgcgacgccctggcgaagaaaatctatgctcatttgtttgactttatagtggagaggatcaaccaagcactgcagttttcagtgctcaagccactgatgtag

SEQ ID NO: 314994 - DNA, 810 bp, Artificial Sequence
  derived and/or modified sequence
atggctgtggctgagctgtacactcagtacaaccgggtgtggatccccgatcctgaagaagtgtggaaaagtgccgagattgccaaggattatagggtcggcgataaggtgctcagactcctgctcgaggatggcacagagctcgattattctgtgaacccagaatccttaccccctctgcgcaaccctgacatcctcgtcggtgaaaacgatctgacagccctttcctatctgcacgagccggcagtcttacataacctgcggattcggttcgcagagtccaagttgatttacacctacagcgggatcattcttgtggcaatgaatccttataaacagctgcccatttatggcgatgctattatacacgcatactcgggacagaatatgggggacatggatccccatatcttcgcagtggcagaagaagcatataaacagatggccagaaataataggaatcagagtatcatagtcagcggcgaatcgggcgctgggaagaccgtctccgctagatacgccatgcgctacttcgcaaccgtgtccaaatctggttcaaatgcgcacgtggaggataaggtcctggctagcaatcctatcactgaagcagtggggaatgcgaagaccacacgcaatgataatagttcccgcttcggaaagtacacagaaatttctttcgatgagcaaaatcaaataattggtgcaaacatgagtacttatctgctggagaagtctagggtagtgtttcagggagtgcccaaaaacctgatcattcaggagtgggaagccatactaagcctgagggtctag

SEQ ID NO: 314995 - DNA, 1122 bp, Artificial Sequence
  derived and/or modified sequence
atgcccagcagcacccccaccgccggcagaacctgggccatctggacccacacctacctgccctggcagaagagacacaccagcagatggcccgacggcaagagcgaggcccaggacctggacctgctgaccctgtacctgaacctgtactgcatcacccccgccgccgcccccgagctgccccccctgtacgtgttcgtgtgcgagctggacagccagagagcccccatccccggcagcgacgcctacaacgagggcgccggcggcgcctacatgagaaacaacagaaaccagagcatcatcgtgagcggcgagagcggcgccggcaagaccgtgagcgccagatacgccatgagatacttcgccaccgtgagcaagagcggcagcaacgcccacgtggaggacaaggtgctggccagcaaccccatcaccgaggccgtgggcaacgccaagaccaccagaaacgacaacagcagcagattcggcaagtacaccgagatcagcttcgacgagcagaaccagatcatcggcgccaacatgagcacctacctgctggagaagagcagagtggtgttccagagcgagaacgagagaaactaccacatcttctaccagctgtgcgccagcgcccagcagagcgagttcaagcacctgaagctgggcagcgccgaggagttcaactacaccagaatgggcggcaacaccgtgatcgagggcgtgaacgacagagccgagatggtggagacccagaagaccttcaccctgctgggcttcaaggaggacttccagatggacgtgttcaagatcctggccgccatcctgcacctgggcaacgtgcagatcaccgccgtgggcaacgagagaagcagcgtgagcgaggacgacagccacctgaaggtgttctgcgagctgctgggcctggagagcggcagagtggcccagtggctgtgcaacagaaagatcgtgaccagcagcgagaccgtggtgaagcccatgaccagaccccaggccgtgaacgccagagacgccctggccaagaagatctacgcccacctgttcgacttcatcgtggagagaatcaaccaggccctgcagttcagcgtgctgaagcccctgatgtag

SEQ ID NO: 314996 - DNA, 1293 bp, Artificial Sequence
  derived and/or modified sequence
atggccgtggccgagctgtacacccagtacaacagagtgtggatccccgaccccgaggaggtgtggaagagcgccgagatcgccaaggactacagagtgggcgacaaggtgctgagactgctgctggaggacggcaccgagctggactacagcgtgaaccccgagagcctgccccccctgagaaaccccgacatcctggtgggcgagaacgacctgaccgccctgagctacctgcacgagcccgccgtgctgcacaacctgagaatcagattcgccgagagcaagctgatctacacctacagcggcatcatcctggtggccatgaacccctacaagcagctgcccatctacggcgacgccatcatccacgcctacagcggccagaacatgggcgacatggacccccacatcttcgccgtggccgaggaggcctacaagcagatggccagaaacaacagaaaccagagcatcatcgtgagcggcgagagcggcgccggcaagaccgtgagcgccagatacgccatgagatacttcgccaccgtgagcaagagcggcagcaacgcccacgtggaggacaaggtgctggccagcaaccccatcaccgaggccgtgggcaacgccaagaccaccagaaacgacaacagcagcagattcggcaagtacaccgagatcagcttcgacgagcagaaccagatcatcggcgccaacatgagcacctacctgctggagaagagcagagtggtgttccagagcgagaacgagagaaactaccacatcttctaccagctgtgcgccagcgcccagcagagcgagttcaagcacctgaagctgggcagcgccgaggagttcaactacaccagaatgggcggcaacaccgtgatcgagggcgtgaacgacagagccgagatggtggagacccagaagaccttcaccctgctgggcttcaaggaggacttccagatggacgtgttcaagatcctggccgccatcctgcacctgggcaacgtgcagatcaccgccgtgggcaacgagagaagcagcgtgagcgaggacgacagccacctgaaggtgttctgcgagctgctgggcctggagagcggcagagtggcccagtggctgtgcaacagaaagatcgtgaccagcagcgagaccgtggtgaagcccatgaccagaccccaggccgtgaacgccagagacgccctggccaagaagatctacgcccacctgttcgacttcatcgtggagagaatcaaccaggccctgcagttcagcgtgctgaagcccctgatgtag

SEQ ID NO: 314997 - DNA, 810 bp, Artificial Sequence
  derived and/or modified sequence
atggccgtggccgagctgtacacccagtacaacagagtgtggatccccgaccccgaggaggtgtggaagagcgccgagatcgccaaggactacagagtgggcgacaaggtgctgagactgctgctggaggacggcaccgagctggactacagcgtgaaccccgagagcctgccccccctgagaaaccccgacatcctggtgggcgagaacgacctgaccgccctgagctacctgcacgagcccgccgtgctgcacaacctgagaatcagattcgccgagagcaagctgatctacacctacagcggcatcatcctggtggccatgaacccctacaagcagctgcccatctacggcgacgccatcatccacgcctacagcggccagaacatgggcgacatggacccccacatcttcgccgtggccgaggaggcctacaagcagatggccagaaacaacagaaaccagagcatcatcgtgagcggcgagagcggcgccggcaagaccgtgagcgccagatacgccatgagatacttcgccaccgtgagcaagagcggcagcaacgcccacgtggaggacaaggtgctggccagcaaccccatcaccgaggccgtgggcaacgccaagaccaccagaaacgacaacagcagcagattcggcaagtacaccgagatcagcttcgacgagcagaaccagatcatcggcgccaacatgagcacctacctgctggagaagagcagagtggtgttccagggcgtgcccaagaacctgatcatccaggagtgggaggccatcctgagcctgagagtgtag

SEQ ID NO: 314998 - DNA, 1167 bp, Artificial Sequence
  derived and/or modified sequence
atggacatcaagggccagttctggaacgacgacgacagcgagggcgacaacgagagcgaggagttcctgtacggcgtgcagggcagctgcgccgccgacctgtacagacacccccagctggacgccgacatcgaggccgtgaaggagatctacagcgagaacagcgtgagcatcagagagtacggcaccatcgacgacgtggacatcgacctgcacatcaacatcagcttcctggacgaggaggtgagcaccgcctggaaggtgctgagaaccgagcccatcgtgctgagactgagattcagcctgagccagtacctggacggccccgagcccagcatcgaggtgttccagcccagcaacaaggagggcttcggcctgggcctgcagctgaagaagatcctgggcatgttcaccagccagcagtggaagcacctgagcaacgacttcctgaagacccagcaggagaagagacacagctggttcaaggccagcggcaccatcaagaagttcagagccggcctgagcatcttcagccccatccccaagagccccagcttccccatcatccaggacagcatgctgaagggcaagctgggcgtgcccgagctgagagtgggcagactgatgaacagaagcatcagctgcaccatgaagaaccccaaggtggaggtgttcggctacccccccagcccccaggccggcctgctgtgcccccagcacgtgggcctgcccccccccgccagaaccagccccctggtgagcggccactgcaagaacatccccaccctggagtacggcttcctggtgcagatcatgaagtacgccgagcagagaatccccaccctgaacgagtactgcgtggtgtgcgacgagcagcacgtgttccagaacggcagcatgctgaagcccgccgtgtgcaccagagagctgtgcgtgttcagcttctacaccctgggcgtgatgagcggcgccgccgaggaggtggccaccggcgccgaggtggtggacctgctggtggccatgtgcagagccgccctggagagccccagaaagagcatcatcttcgagccctaccccagcgtggtggaccccaccgaccccaagaccgtggccttcatggtggagctggaccccagaaccaccccccacagcgacggccccgactag

SEQ ID NO: 314999 - DNA, 1167 bp, Artificial Sequence
  derived and/or modified sequence
atggacatcaagggacagttctggaacgacgacgacagtgaaggagacaacgaatccgaggaatttctgtacggtgtacaggggagctgtgcggccgatctctatcggcaccctcagttggacgctgatattgaggccgtgaaagaaatatactctgaaaactcggtgtctatccgtgagtacggcactattgacgacgtggatatcgacctccacatcaatatctctttcctcgatgaggaagtgagcacagcctggaaagtgctccggacagagccaattgtgcttcgccttaggttctctctgtctcaatacctggatggccccgaacccagcatcgaggtcttccagccttcaaacaaggaaggatttgggctggggctacagttaaagaagatcctcggtatgttcacctctcagcagtggaaacacctttcaaacgactttttgaagactcagcaagaaaagagacacagttggtttaaggcaagcggcaccataaaaaagttcagggcgggcctttctatcttcagcccgattccaaaatcccccagcttccctataattcaagacagcatgttaaaaggcaagctgggggtgccagaactgcgcgtcggtaggctcatgaaccggagcatctcttgcactatgaagaatcccaaggtcgaggtctttgggtacccaccatcgcctcaggctggcctgctgtgtcctcagcatgttgggctgccacctccagctagaacttctcccctggttagtggtcactgcaaaaacatcccgactttggaatacgggttcttagtacagattatgaagtatgcagaacagagaatccccacactaaacgagtactgtgtagtctgcgatgagcaacatgtcttccagaatggctccatgctgaaacccgccgtatgtactcgagaattatgcgtttttagcttctacacattaggagtgatgtcgggcgcagcagaggaggtcgccacaggagcagaggttgtggacctgcttgtggctatgtgtcgcgcagctctcgaaagcccaaggaaaagtattattttcgagccttatccaagtgtggttgacccaacagatcccaaaactgtagcctttatggtcgagctcgacccacggacaaccccccactcagatggccctgattag

SEQ ID NO: 315000 - DNA, 1167 bp, Artificial Sequence
  derived and/or modified sequence
atggacatcaagggccagttctggaatgatgatgattctgagggggacaatgaaagtgaggagttcctgtatggagtgcagggcagctgtgccgctgacctgtaccgccacccccagctggatgctgacatcgaggccgtgaaggagatctacagtgaaaattctgtgtccatccgggagtatggcaccattgatgatgtggacatcgacctgcacatcaacatctccttcctggatgaggaggtgtccacagcctggaaggtgctgaggacagagcccatcgtgctgcggctgcgcttcagcctgagccagtacctggatggccctgagcccagcattgaggtgttccagcccagcaacaaggagggcttcggcctgggcctgcagctgaagaagatcctgggcatgttcaccagccagcagtggaagcacctgagcaatgacttcctgaagacccagcaggagaagaggcacagctggttcaaggccagcggcaccatcaagaagttccgggccggcctgagcatcttcagccccatccccaagagccccagcttccccatcatccaggacagcatgctgaagggcaagctgggcgtgcctgagctgcgggtgggccgcctgatgaacagaagcatcagctgcaccatgaagaaccccaaggtggaggtgtttggctacccacccagcccccaggccggcctgctgtgcccccagcacgtgggcctgcccccaccagcccggaccagccccctggtgtctggccactgcaagaacatccccaccctggagtatggcttcctggtgcagatcatgaagtatgcagagcagaggatccccaccctgaatgagtactgtgtggtgtgtgatgagcagcacgtgttccagaatggctccatgctgaagccagctgtgtgcacccgggagctgtgtgtgttctccttctacaccctgggcgtgatgtctggagctgctgaggaggtggccaccggggctgaggtggtggacctgctggtggccatgtgccgggccgccctggagagccccaggaagagcatcatctttgagccctaccccagcgtggtggaccccacagaccccaagacagtggccttcatggtggagctggaccccaggaccaccccccacagtgatggccctgactag

SEQ ID NO: 315001 - DNA, 1167 bp, Artificial Sequence
  derived and/or modified sequence
atggacatcaagggccagttctggaacgacgacgacagcgagggcgacaacgagtcagaagaatttctgtatggtgtgcagggatcctgcgcagcagacttgtatcggcatccgcaactggatgcagacatcgaggctgtcaaggagatatactcagagaattcagtcagtatacgggagtatgggaccatcgacgacgtggatatcgatctgcacataaacatttcattcctcgacgaagaagtgtccacagcctggaaggtactgagaacagagcctattgtgctcaggctacggttttctctctctcagtacctcgacgggcctgaaccgtccattgaggtgtttcaaccttcaaacaaagaaggatttggcttgggcctacaattaaagaagatactgggcatgtttacgagtcagcagtggaaacatctgtcaaacgacttcctgaaaacacagcaggaaaagaggcatagttggttcaaggcctcggggacaatcaaaaaattccgtgccggactatcaatttttagtccaatccctaaatcaccatcattccctatcatacaggactcaatgctgaaagggaagttgggtgtgcccgaactccgagtggggcgtctcatgaaccgatctatttcctgcacaatgaagaatccaaaagtggaagtgtttggctatccacctagccctcaggccgggcttttatgtccccagcacgtgggccttcctccaccagctcggacatcacctctggtatccggacactgtaagaatatccctaccctggagtacggatttctggtacagattatgaagtacgcggaacagaggattccaaccctaaacgagtattgcgtggtctgcgatgaacagcatgtgttccagaatggctcaatgttgaagccagccgtctgcaccagggagctttgtgtgttctcattttatacactcggcgtgatgagcggggccgccgaagaggtggccacaggcgcggaggttgtggaccttttggtcgccatgtgcagagcagcactggagagccccagaaaatccatcatcttcgaaccttatccctctgtggtggatcccactgaccctaaaacagttgccttcatggtggagcttgatcccaggactacaccacactctgacggacccgactag

SEQ ID NO: 315002 - DNA, 1626 bp, Artificial Sequence
  derived and/or modified sequence
caacagaaaccaagcagcaacagcccttggaaagaggctaaatttttcttgacttctgcagcaacaaagaccgtgaaaagttggcacttctggcctaacgctgccgtcatcctacccctcaccccagggcaacccaggctggacatttagtgcctccctctttattcctctgtgatcatccagatcagcacttgactgtttattttcaaatctcacgaacctcaccccaagatcttcacattctggatctcagctgctcttgaaggacagtgacttgttaccaccgcaacagcagagcctgccatccccaacagatcaccagttgtccctgacatcgtgccctaccttgtctccctttgtggtctcctaaatgcccatctcgttggccttggttcggctagtggtatggaggggtgctgcctagcactgacctgagagtgtgtgtgacccactgacccaatggacatcaaaggccagttctggaatgatgacgactcggagggagataatgaatcagaggaatttctctatggcgttcaggggagctgtgcagctgacctgtatcgacacccacagcttgatgcagacattgaagccgtgaaggagatctacagtgagaactctgtatccatcagagaatatggaactatcgatgacgtggacattgacctccacatcaacatcagcttcctcgatgaggaagtctctacagcctggaaggtcctccggacagaacctattgtgttgaggctgcgattttctctctcccagtacctagatggaccagaaccatccattgaggttttccagccatcaaataaggaaggatttgggctgggtcttcagttgaaaaagatcctgggtatgtttacatcccaacaatggaaacatctgagcaatgatttcttgaagacccagcaggagaagaggcacagttggttcaaggcaagtggtaccatcaagaagttccgagctggcctcagcatcttttcacccatccccaagtctcccagtttccctatcatacaggactccatgctgaaaggcaaactaggtgtaccagagcttcgggttgggcgcctcatgaaccgttccatctcctgtaccatgaagaaccccaaagtggaagtgtttggctaccctcccagcccccaggcaggtctcctgtgccctcagcacgtgggcctccctcccccagcacggacctctcctttggtcagtggtcactgcaagaacattcccactctggagtatggattcctcgttcagatcatgaagtatgcagaacagaggattccaacattgaatgagtactgtgtggtgtgtgatgagcagcatgtcttccaaaatggatctatgctgaagccagctgtctgtactcgtgaactatgcgttttctccttctacacactgggcgtcatgtctggagctgcagaggaggtggccactggagcagaggtggtggatctgctggtggccatgtgtagggcagctttagagtcccctagaaagagcatcatctttgagccttatccctctgtggtggaccccactgatcccaagactgtggccttcatggtagagcttgacccaagaactactccacattcggatggcccagactga

SEQ ID NO: 315003 - DNA, 1167 bp, Artificial Sequence
  derived and/or modified sequence
atggatattaagggacaattctggaacgacgacgacagcgagggcgacaatgagtctgaggagttcctgtacggtgtgcagggatcatgcgctgcagatctgtaccggcatccccagctagacgcagatatcgaagccgtcaaggagatctatagtgagaactctgtgtcaatacgcgagtatggtaccattgatgatgtcgacattgatttgcatattaacataagctttctggacgaagaggtcagcacagcctggaaggtcctgaggactgagcccatcgtgttacgactccgcttttccctgtcccagtacctcgacggtcctgaaccaagcattgaggtattccagccatcaaacaaagagggattcggcctcggtttgcagctcaaaaaaatactcggcatgttcacatcacaacaatggaagcacctgagcaatgacttcctgaaaacacagcaggagaaacggcatagctggttcaaggcctcaggcaccattaaaaaatttcgcgcaggactgtcaattttctccccaatcccaaagagcccaagttttccaatcatccaagacagcatgttaaaaggaaagctcggcgtcccagagcttcgcgtgggacgcttaatgaaccgtagtataagttgcaccatgaaaaacccaaaggtggaggtcttcggctatccgccttcgccacaggccggattgctttgtccccagcatgtgggcctaccaccccctgcaaggacctctccccttgtgtcaggtcactgcaagaatataccgaccctggaatacggctttctagtacagattatgaaatacgccgagcagaggatccccactctgaacgaatattgcgtggtatgcgatgaacagcatgtctttcagaacggatccatgctcaagccagcagtgtgcaccagggaactctgcgtgttcagcttttataccctgggtgtaatgtctggagccgctgaggaggtggctacaggagctgaggtcgtcgatctgctggtcgcgatgtgtagggctgctctggagtcccccaggaagtcaatcattttcgaaccctaccctagcgtcgtcgaccctactgacccaaaaaccgtggccttcatggtcgagctggacccaaggaccactccacactcagacggacccgattag

SEQ ID NO: 315004 - protein, 249 aa, Artificial Sequence
  derived and/or modified sequence
MFTSQQWKHLSNDFLKTQQEKRHSWFKASGTIKKFRAGLSIFSPIPKSPSFPIIQDSMLKGKLGVPELRVGRLMNRSISCTMKNPKVEVFGYPPSPQVSGHCKNIPTLEYGFLVQIMKYAEQRIPTLNEYCVVCDEQHVFQNGSMLKPAVCTRELCVFSFYTLGVMSGAAEEVATGAEVVDLLVAMCRAALESPRKSIIFEPYPSVVDPTDPKTLAFNPKKKNYERLQKALDSVMSIREMTQGCRNCIK

SEQ ID NO: 315005 - DNA, 750 bp, Artificial Sequence
  derived and/or modified sequence
atgttcaccagccagcagtggaagcacctgagcaacgacttcctgaagacccagcaggagaagagacacagctggttcaaggccagcggcaccatcaagaagttcagagccggcctgagcatcttcagccccatccccaagagccccagcttccccatcatccaggacagcatgctgaagggcaagctgggcgtgcccgagctgagagtgggcagactgatgaacagaagcatcagctgcaccatgaagaaccccaaggtggaggtgttcggctacccccccagcccccaggtgagcggccactgcaagaacatccccaccctggagtacggcttcctggtgcagatcatgaagtacgccgagcagagaatccccaccctgaacgagtactgcgtggtgtgcgacgagcagcacgtgttccagaacggcagcatgctgaagcccgccgtgtgcaccagagagctgtgcgtgttcagcttctacaccctgggcgtgatgagcggcgccgccgaggaggtggccaccggcgccgaggtggtggacctgctggtggccatgtgcagagccgccctggagagccccagaaagagcatcatcttcgagccctaccccagcgtggtggaccccaccgaccccaagaccctggccttcaaccccaagaagaagaactacgagagactgcagaaggccctggacagcgtgatgagcatcagagagatgacccagggctgcagaaactgcatcaagtag

SEQ ID NO: 315006 - DNA, 750 bp, Artificial Sequence
  derived and/or modified sequence
atgtttactagccagcagtggaaacatctttccaacgactttctgaagacacagcaagaaaaaaggcactcatggtttaaagctagcggcaccatcaagaaatttagagcggggctgagcatttttagtcctattcccaaaagccctagcttccctataattcaggactccatgctcaaaggcaagcttggcgttcccgagctgagagtcggcaggctcatgaaccgcagcatatcttgtaccatgaagaacccaaaggtcgaggtgttcggttacccaccctcaccacaggtgtctggtcactgtaagaatatcccaaccctggagtacggatttctggttcagatcatgaaatacgccgaacagcgcatccccactctgaatgaatattgcgtcgtttgcgatgaacagcacgtgtttcagaacggcagcatgcttaagcccgcagtgtgtaccagggagctgtgtgtcttctccttctatacgctaggcgtgatgtccggagcagccgaagaggtcgctacaggtgccgaggtagtagacctgctggtggctatgtgccgggccgccttagaaagcccaaggaagtctatcatctttgaaccctatccttccgtggtggatcccaccgatccaaagaccctggcttttaatcccaagaagaagaattatgaacgcctccagaaggccctcgactcagtaatgagcatacgcgaaatgacacagggatgcagaaattgcatcaagtag

SEQ ID NO: 315007 - DNA, 750 bp, Artificial Sequence
  derived and/or modified sequence
atgttcaccagccagcagtggaagcacctgagcaatgacttcctgaagacccagcaggagaagaggcacagctggttcaaggccagcggcaccatcaagaagttccgggccggcctgagcatcttcagccccatccccaagagccccagcttccccatcatccaggacagcatgctgaagggcaagctgggcgtgcctgagctgcgggtgggccgcctgatgaacagaagcatcagctgcaccatgaagaaccccaaggtggaggtgtttggctacccacccagcccccaggtgtctggccactgcaagaacatccccaccctggagtatggcttcctggtgcagatcatgaagtatgcagagcagaggatccccaccctgaatgagtactgtgtggtgtgtgatgagcagcacgtgttccagaatggctccatgctgaagccagctgtgtgcacccgggagctgtgtgtgttctccttctacaccctgggcgtgatgtctggagctgctgaggaggtggccactggagctgaggtggtggacctgctggtggccatgtgcagagctgccctggagagccccaggaagagcatcatctttgagccctaccccagcgtggtggaccccacagaccccaagaccctggccttcaaccccaagaagaagaactatgaaaggctgcagaaggccctggacagcgtgatgagcatccgggagatgacccagggctgcaggaactgcatcaagtag

SEQ ID NO: 315008 - DNA, 750 bp, Artificial Sequence
  derived and/or modified sequence
atgttcaccagccagcagtggaagcacctgagcaacgacttcctgaagacccaacaagagaaacggcactcttggttcaaggcttctggaacaattaagaagttccgcgctgggctgagcatcttctctccaatacccaaatccccctccttccccatcattcaggactctatgcttaaggggaagctgggcgtgccagagctccgggttggaagattgatgaacaggagcatttcttgcactatgaagaaccccaaagtggaggtctttggataccctccttctccccaggtttccggacactgcaagaatataccaaccctggaatacggttttctggtgcagatcatgaaatacgccgaacagcgaatccctacactcaacgaatactgtgttgtttgtgatgagcagcatgtgttccagaatggctccatgctgaaacccgctgtgtgcacacgagagctctgcgttttttcgttctacactctgggagtgatgagcggagcggccgaagaggtggccacaggggctgaggttgtcgacctgctggtggctatgtgtagagcggcgctggagtctccgcgcaagagcatcatattcgaaccataccctagcgttgtggatccaacagatccgaaaaccctcgctttcaatcctaagaagaagaattatgagagactccagaaggctctcgattccgtcatgtccatccgagagatgacccagggatgtcggaattgcatcaagtag

SEQ ID NO: 315009 - DNA, 750 bp, Artificial Sequence
  derived and/or modified sequence
atgtttacctcgcagcagtggaagcacttgtcaaacgactttctgaaaactcagcaggaaaagagacacagttggttcaaggccagtggaacaatcaaaaaattccgcgcaggactgtccatcttctcacctatcccgaaatctcctagctttccaattattcaagattctatgcttaaaggcaaacttggcgttcccgaactgagggtgggtcgactgatgaataggagtatctcgtgcacaatgaaaaacccaaaggtggaagtttttggctatcccccatccccacaagtgtctggtcactgtaagaacattccgactctagaatacggatttttagtccagataatgaaatacgctgaacagaggatccctaccctgaatgagtactgtgtcgtgtgtgacgaacagcacgtgtttcagaacggaagtatgctaaaacctgcagtttgcacaagggaactgtgcgttttttctttctacaccttaggagtaatgtctggggctgccgaagaagtcgccacaggggcagaggtggttgacctgctcgtggccatgtgccgtgcagcccttgagtctccacgaaagtctattatattcgagccatatcctagcgtggtggaccccacagaccctaaaaccctggcattcaatcccaagaagaagaattacgaaaggctgcagaaagcgctggatagtgtaatgtcaatccgggaaatgacacagggatgccgaaattgtatcaaatag

SEQ ID NO: 315010 - protein, 1747 aa, Artificial Sequence
  derived and/or modified sequence
MDGVSSEANEENDNIERPVRRRHSSILKPPRSPLQDLRGGNERVQESNALRNKKNSRRVSFADTIKVFQTESHMKIVRKSEMEETETGENLLLIQNKKLEDNYCEITGMNTLLSAPIHTQMQQKEFSIIEHTRERKHANDQTVIFSDENQMDLTSSHTVMITKGLLDNPISEKSTKIDTTSFLANLKLHTEDSRMKKEVNFSVDQNTSSENKIDFNDFIKRLKTGKCSAFPDVPDKENFEIPIYSKEPNSASSTHQMHVSLKEDENNSNITRLFREKDDGMNFTQCHTANIQTLIPTSSETNSRESKGNDITIYGNDFMDLTFNHTLQILPATGNFSEIENQTQNAMDVTTGYGTKASGNKTVFKSKQNTAFQDLSINSADKIHITRSHIMGAETHIVSQTCNQDARILAMTPESIYSNPSIQGCKTVFYSSCNDAMEMTKCLSNMREEKNLLKHDSNYAKMYCNPDAMSSLTEKTIYSGEENMDITKSHTVAIDNQIFKQDQSNVQIAAAPTPEKEMMLQNLMTTSEDGKMNVNCNSVPHVSKERIQQSLSNPLSISLTDRKTELLSGENMDLTESHTSNLGSQVPLAAYNLAPESTSESHSQSKSSSDECEEITKSRNEPFQRSDIIAKNSLTDTWNKDKDWVLKILPYLDKDSPQSADCNQEIATSHNIVYCGGVLDKQITNRNTVSWEQSLFSTTKPLFSSGQFSMKNHDTAISSHTVKSVLGQNSKLAEPLRKSLSNPTPDYCHDKMIICSEEEQNMDLTKSHTVVIGFGPSELQELGKTNLEHTTGQLTTMNRQIAVKVEKCGKSPIEKSGVLKSNCIMDVLEDESVQKPKFPKEKQNVKIWGRKSVGGPKIDKTIVFSEDDKNDMDITKSYTIEINHRPLLEKRDCHLVPLAGTSETILYTCRQDDMEITRSHTTALECKTVSPDEITTRPMDKTVVFVDNHVELEMTESHTVFIDYQEKERTDRPNFELSQRKSLGTPTVICTPTEESVFFPGNGESDRLVANDSQLTPLEEWSNNRGPVEVADNMELSKSATCKNIKDVQSPGFLNEPLSSKSQRRKSLKLKNDKTIVFSENHKNDMDITQSCMVEIDNESALEDKEDFHLAGASKTILYSCGQDDMEITRSHTTALECKTLLPNEIAIRPMDKTVLFTDNYSDLEVTDSHTVFIDCQATEKILEENPKFGIGKGKNLGVSFPKDNSCVQEIAEKQALAVGNKIVLHTEQKQQLFAATNRTTNEIIKFHSAAMDEKVIGKVVDQACTLEKAQVESCQLNNRDRRNVDFTSSHATAVCGSSDNYSCLPNVISCTDNLEGSAMLLCDKDEEKANYCPVQNDLAYANDFASEYYLESEGQPLSAPCPLLEKEEVIQTSTKGQLDCVITLHKDQDLIKDPRNLLANQTLVYSQDLGEMTKLNSKRVSFKLPKDQMKVYVDDIYVIPQPHFSTDQPPLPKKGQSSINKEEVILSKAGNKSLNIIENSSAPICENKPKILNSEEWFAAACKKELKENIQTTNYNTALDFHSNSDVTKQVIQTHVNAGEAPDPVITSNVPCFHSIKPNLNNLNGKTGEFLAFQTVHLPPLPEQLLELGNKAHNDMHIVQATEIHNINIISSNAKDSRDEENKKSHNGAETTSLPPKTVFKDKVRRCSLGIFLPRLPNKRNCSVTGIDDLEQIPADTTDINHLETQPVSSKDSGIGSVAGKLNLSPSQYINEENLPVYPDEINSSDSINIETEPKKNVGTRRRRYS

SEQ ID NO: 315011 - DNA, 5244 bp, Artificial Sequence
  derived and/or modified sequence
atggacggtgtcagtagcgaagccaacgaggagaatgacaacatcgaaaggccagttcggagacggcactccagtattctcaagcctccacgctcccctttacaggatttgcggggaggcaacgagcgagtgcaggaatcaaatgccctgcgaaataaaaaaaattcccgacgggtgtcgttcgccgatacaataaaggtctttcaaaccgagagccacatgaaaattgtgaggaagagtgaaatggaggagacagagaccggggagaacttgttgctaatccaaaacaaaaagttggaagataactattgcgagattacaggaatgaatacgctcctttctgctcccattcatactcagatgcagcaaaaggaattcagtattattgaacacacccgcgaacggaagcacgccaacgaccaaacagtgatcttcagtgatgaaaaccagatggatctgacttcctcacatactgtcatgattaccaagggactgctggataatccgatctccgagaaatctaccaagatcgatactaccagctttctggcgaatctcaaattacatacagaggacagtagaatgaaaaaagaggtgaatttctccgtagaccaaaacactagcagcgaaaataagattgattttaatgacttcattaaacgtcttaaaaccggtaagtgtagcgcttttccggacgtgccagacaaggagaatttcgagatcccgatttatagcaaggagcctaattccgcctcatccacccaccaaatgcatgtgtcactgaaagaagacgaaaacaattctaatatcacaagactattccgcgaaaaggatgacgggatgaactttactcaatgccacacagctaacatccaaaccctgatcccaacaagtagcgagactaattctcgcgagtcaaaaggcaatgacatcactatatacggaaacgacttcatggacctgacttttaaccatactctgcagatcctccctgcaactggcaacttttcagagatcgagaaccaaacacagaacgccatggacgtcactacaggctatggtacgaaggcaagcggaaacaaaacagtgttcaaatccaagcaaaacaccgcttttcaggacctctccataaactccgcggacaagatccacatcacaaggagtcacatcatgggggcggaaacgcatatcgtcagccagacctgcaaccaagatgccagaatcctggccatgacccccgagtcaatttattctaaccccagcatacagggctgcaaaacagttttctattcttcctgcaatgacgcgatggaaatgacaaagtgcctcagtaatatgcgtgaggagaaaaatcttcttaaacacgactcaaactacgcgaagatgtactgcaatcctgatgcaatgtcctcacttacagagaaaacgatatattctggggaggagaacatggatattaccaagtcacacacggtggccattgataatcaaatcttcaaacaagatcagagcaacgtacagattgcggccgccccaacccccgagaaagaaatgatgctccagaatttgatgacgaccagcgaggatggcaagatgaatgtcaattgcaacagcgtgccacacgtgtctaaggaaagaatccagcaatcactgagcaatccactgagtatatctctcactgaccgcaaaaccgaactcttgagtggtgagaacatggatctgaccgaaagtcacacttccaatctgggttcacaagttccgctggccgcctataacctggcccctgaatctaccagcgagtcccacagccagagtaaatctagctcggacgaatgcgaagaaataaccaaaagccgcaatgagcctttccagcgctcagatattattgccaaaaactcactgacagacacctggaataaagataaggactgggtcctgaagatcctgccatacctggacaaagacagccctcagtcagctgactgtaaccaggagatcgccacctctcacaatatcgtctactgtggaggagtgcttgacaagcagattacaaatcggaatacagtcagctgggagcaaagcctatttagcactacaaaaccgctattctcatcaggacagttttctatgaaaaaccacgacaccgccattagctcacataccgtgaaatctgtcctgggccaaaatagcaaacttgccgagcccttgcggaagtccctgagtaaccctaccccagactactgtcacgacaaaatgattatctgttcagaagaggaacagaacatggatctgactaaatcccatacggtcgtgatcggattcggaccatctgagcttcaagaacttggtaaaacgaacctcgaacacacgacagggcagctgacaaccatgaataggcagatcgccgtgaaggtcgagaaatgtggtaagagcccaattgagaaatcaggagtattaaagagcaattgtattatggacgtactcgaagatgagtcagtgcagaagcccaagtttccaaaagaaaaacagaatgtaaagatatgggggcgcaagtccgtgggagggcctaagatagataagacaatcgtgttttcagaggacgacaaaaatgacatggatatcaccaagtcttacacaatcgagatcaaccatcgcccgttacttgaaaagagggactgtcaccttgtaccgcttgccggtacgtccgagaccatcctgtatacctgcaggcaggacgatatggagattacccggagccacaccaccgctctcgaatgtaagaccgtaagccctgacgagatcacgaccaggccgatggataagactgtggtgttcgtagacaaccatgttgaactagagatgaccgaatcccatactgtcttcattgactaccaggaaaaagagaggaccgacagacctaactttgaactttcccaaaggaagtcccttgggacacctactgtaatttgcactcctactgaagaatcagtgttctttccaggaaacggcgagtctgatagactagtggccaatgattcccagctcacacccctggaggagtggtccaacaatagaggccccgtggaggtcgccgacaatatggaactgtctaagagtgccacttgcaaaaacataaaagatgttcaatcgccaggatttttaaatgagccgttatccagcaaatcccagcgccgcaagagtctcaaactgaaaaatgataagactatcgtgttttcagagaaccacaaaaacgatatggatatcacccaaagttgcatggtggaaattgacaacgagtctgcgttagaggacaaggaagatttccacctcgctggcgcatcgaagactattctgtattcttgcggacaagatgatatggaaattacgcggtcacacacaacggcacttgaatgtaagaccctgctgccaaatgaaattgcaatacgcccaatggataaaacggtactgtttaccgacaactacagcgatctggaagttactgacagccacactgtcttcatcgattgtcaagccacagaaaaaatacttgaggaaaatcctaagttcgggatcgggaagggaaagaatcttggggtgtcattcccgaaagacaattcctgtgtccaggagatcgctgaaaagcaggcgttagctgtggggaacaaaatagtgcttcacaccgagcagaagcaacagctattcgccgctaccaaccgcaccactaatgaaatcataaagtttcatagcgctgccatggatgagaaagtcatcggcaaagttgtcgaccaggcttgcaccttagagaaagcccaggtggagagctgtcagctcaataaccgggaccggaggaacgtagactttaccagcagccatgctaccgcagtctgcggcagtagcgacaactacagttgtttgcctaatgtgatttcatgtacggataacctggagggtagcgcaatgttgctctgcgacaaggatgaggaaaaagccaattactgccccgtgcaaaacgacctggcttacgccaatgatttcgcgagtgagtattatctggaatccgaggggcagcctctctctgccccgtgcccacttcttgaaaaagaagaagtaattcagacctcaaccaaaggtcagcttgactgcgtgatcaccctgcacaaggatcaggatctaataaaggatcctcgcaatttgctagcgaaccaaacactagtgtattcccaggacttgggggagatgacgaagctcaacagtaaacgcgtgtcatttaagctccccaaagatcagatgaaggtttacgtagacgacatttatgttatccctcaaccgcactttagcaccgatcagcccccgctgcctaaaaaggggcaatccagtattaataaggaagaggtgattctatccaaagcaggaaacaaatcgcttaatattattgaaaattcgagtgctcctatctgtgaaaacaagcccaagatcctcaacagtgaggagtggtttgctgccgcgtgcaagaaggagctgaaagaaaatatccaaactacaaactacaacactgctctggacttccacagcaatagtgatgtcacaaaacaggtcatccagacccacgtcaatgctggggaggccccagatccggtgatcacctctaatgtcccgtgcttccattcgattaagccaaatcttaataatctcaatggcaaaaccggcgaattcctggcttttcagaccgtgcacctgcccccactgcctgagcagcttctggagctcggtaacaaggcccataatgatatgcacattgtgcaggccacagagattcacaatatcaacatcatcagttctaatgctaaggattctcgagatgaggaaaacaaaaaatcccacaatggcgcggaaaccacatccctcccccctaagactgtctttaaggataaagtcaggcggtgcagcctcgggatttttctgccacggctgccaaataagcgtaactgtagcgtcacaggcatcgacgacctcgagcagatcccagctgacaccacagacatcaaccacctagaaacacagcccgtcagcagtaaagactccgggattggctcagtagctggaaagctgaacctctccccttcccaatatatcaatgaggagaatcttcccgtctacccagatgaaatcaatagttcagattctataaatatagaaacggaacctaagaaaaacgtcggcacgcggcgccgccggtactcatag

SEQ ID NO: 315012 - DNA, 5244 bp, Artificial Sequence
  derived and/or modified sequence
atggatggagtgagcagcgaggccaatgaagaaaatgacaacatcgagaggcctgtgagaagaagacacagcagcatcctgaagcccccaagaagccccctgcaggacctgcggggcggcaatgaaagagtgcaggagagcaatgccctgaggaacaagaagaacagcagaagagtgtcctttgctgacaccatcaaggtgttccagacagagagccacatgaagatcgtgaggaagtctgagatggaggagacagaaacaggagagaacctgctgctgatccagaacaagaagctggaggacaactactgtgagatcaccggcatgaacaccctgctgagcgcccccatccacacccagatgcagcagaaggagttcagcatcatcgagcacacccgggagaggaagcacgccaatgaccagaccgtcatcttcagtgatgagaaccagatggacctgaccagcagccacacagtgatgatcaccaagggcctgctggacaaccccatcagcgagaagagcaccaagattgacaccaccagcttcctggccaacctgaagctgcacacagaggacagcaggatgaagaaggaggtgaacttctctgtggaccagaacaccagcagcgagaacaagattgacttcaatgacttcatcaagaggctgaagacaggcaagtgcagcgccttcccagatgtgcctgacaaggaaaattttgagatccccatctacagcaaggagcccaacagcgccagcagcacccaccagatgcacgtgtccctgaaggaggatgagaacaacagcaacatcaccaggctcttccgggagaaggatgatggcatgaacttcacccagtgccacacagccaacatccagaccctcatccccaccagcagcgagaccaacagccgggagagcaaaggaaatgacatcaccatctatggaaatgacttcatggacctgaccttcaaccacaccctgcagatcctgcctgccactggaaacttcagcgagattgagaaccagacccagaatgccatggatgtgaccaccggctacggcaccaaggccagcggcaacaagacagtgttcaagagcaagcagaacacagccttccaggacctgagcatcaacagcgctgacaagatccacatcaccaggagccacatcatgggcgctgagacccacatcgtgtcccagacctgcaaccaggatgcccgcatcctggccatgaccccagagagcatctacagcaaccccagcatccagggctgcaagacagtgttctacagcagctgcaatgatgccatggagatgaccaagtgcctgagcaacatgagggaggagaagaacctgctgaagcatgacagcaactatgccaagatgtactgcaacccagatgccatgagcagcctgacagagaagaccatctacagcggggaggagaacatggacatcaccaagagccacacagtggccatcgacaaccagatcttcaagcaggaccagagcaatgtgcagattgctgctgcccccaccccagagaaggagatgatgctgcagaacctgatgaccaccagtgaagatggcaagatgaatgtgaactgcaacagcgtgccccacgtgtccaaggagcgcatccagcagagcctgagcaaccccctgagcatcagcctgacagacaggaagacagagctgctgagcggggagaacatggacctgacagagagccacaccagcaacctgggcagccaggtgcccctggccgcctacaacctggcccctgagagcaccagcgagagccacagccagagcaagagcagcagtgatgaatgtgaggagatcaccaagagcagaaatgagcccttccagaggagtgacatcatcgccaagaacagcctgacagacacctggaacaaggacaaggactgggtgctgaagatcctgccctacctggacaaggacagcccccagagcgctgactgcaaccaggagatcgccaccagccacaacatcgtgtactgcggcggcgtgctggacaagcagatcaccaacagaaacacagtgtcctgggagcagagcctcttcagcaccaccaagcccctcttcagcagcggccagttctccatgaagaaccacgacacagccatcagcagccacacagtgaagtctgtgctgggccagaacagcaagctggccgagcccctgaggaagagcctgagcaaccccaccccagactactgccacgacaagatgatcatctgcagcgaggaggagcagaacatggacctgaccaagagccacacagtggtgattggcttcggccccagcgagctgcaggagctgggcaagaccaacctggagcacaccaccggccagctgaccaccatgaaccggcagattgctgtgaaggtggagaagtgtgggaagagccccatcgagaagagcggcgtgctgaagagcaactgcatcatggatgtgctggaggatgagagcgtgcagaagcccaagttccccaaggagaagcagaatgtgaagatctggggcaggaagtctgtgggcggccccaagattgacaagaccatcgtgttttctgaagatgacaagaatgacatggacatcaccaagagctacaccatcgagatcaaccaccggcccctgctggagaagagggactgccacctggtgcccctggccggcaccagcgagaccatcctgtacacctgccggcaggatgacatggagatcaccaggagccacaccacagccctggagtgcaagacagtgtccccagatgagatcaccacccggcccatggacaagacagtggtgtttgtggacaaccacgtggagctggagatgacagagagccacacagtgttcatcgactaccaggagaaggagaggacagaccggcccaactttgagctgagccagaggaagagcctgggcacccccaccgtcatctgcacccccacagaggagagcgtcttcttccctggaaatggagagagtgaccggctggtggccaatgacagccagctgacccccctggaggagtggagcaacaacagaggccctgtggaggtggccgacaacatggagctgagcaagagcgccacctgcaagaacatcaaggatgtgcagagccctggcttcctgaatgagcccctgagcagcaagagccagaggaggaagagcctgaagctgaagaatgacaagaccatcgtgttttctgagaaccacaagaatgacatggacatcacccagagctgcatggtggagattgacaatgaaagtgccctggaggacaaggaggacttccacctggccggggccagcaagaccatcctgtacagctgtggccaggatgacatggagatcaccaggagccacaccacagccctggagtgcaagaccctgctgcccaatgagatcgccatccggcccatggacaagacagtgctcttcacagacaactacagcgacctggaggtgacagacagccacacagtgttcatcgactgccaggccacagagaagatcctggaggagaaccccaagtttggaattggcaagggcaagaacctgggcgtgtccttccccaaggacaacagctgtgtgcaggagattgctgagaagcaggccctggccgtgggcaacaagatcgtgctgcacacagagcagaagcagcagctgtttgctgccaccaacagaaccaccaatgagatcatcaagttccacagcgctgccatggatgagaaggtgattggcaaggtggtggaccaggcctgcaccctggagaaggcccaggtggagagctgccagctgaacaacagagacagaagaaatgtggacttcaccagcagccacgccacagctgtgtgtggcagcagtgacaactacagctgcctgcccaacgtcatcagctgcacagacaacctggagggcagcgccatgctgctgtgtgacaaggatgaggagaaggccaactactgccctgtgcagaatgacctggcctatgccaatgactttgccagcgagtactacctggagagcgagggccagcccctgagcgccccctgccccctgctggagaaggaggaggtgatccagaccagcaccaagggccagctggactgtgtgatcaccctgcacaaggaccaggacctgatcaaggaccccaggaacctgctggccaaccagaccctggtgtacagccaggacctgggggagatgaccaagctgaacagcaagagggtgtccttcaagctgcccaaggaccagatgaaggtgtatgtggatgacatctacgtgatcccccagccccacttcagcacagaccagccccccctgcccaagaagggccagagcagcatcaacaaggaggaggtgatcctgagcaaggccggcaacaagagcctgaacatcatcgagaacagcagcgcccccatctgtgagaacaagcccaagatcctgaacagcgaggagtggtttgctgctgcctgcaagaaggagctgaaggagaacatccagaccaccaactacaacacagccctggacttccacagcaacagtgatgtgaccaagcaggtgatccagacccacgtgaatgctggggaggccccagaccctgtgatcaccagcaatgtgccctgcttccacagcatcaagcccaacctgaacaacctgaatggcaagacaggagagttcctggccttccagacagtgcacctgccccccctgcctgagcagctgctggagctgggcaacaaggcccacaatgacatgcacatcgtgcaggccacagagatccacaacatcaacatcatcagcagcaatgccaaggacagcagagatgaggagaacaagaagagccacaacggggctgagaccaccagcctgccccccaagacagtgttcaaggacaaggtgcggcgctgcagcctgggcatcttcctgccccggctgcccaacaagaggaactgcagcgtgactggaattgatgacctggagcagatcccagctgacaccacagacatcaaccacctggagacccagcctgtgagcagcaaggacagcggcatcggctctgtggccggcaagctgaacctgagccccagccagtacatcaatgaggagaacctgcctgtgtacccagatgagatcaacagcagtgacagcatcaacattgaaacagagcccaagaagaatgtgggcaccaggagaagacgctacagctag

SEQ ID NO: 315013 - DNA, 5244 bp, Artificial Sequence
  derived and/or modified sequence
atggacggcgtgagcagcgaggccaacgaggagaacgacaacatcgagagacctgtcaggcgacgccatagttccatccttaaaccaccacggagtcccttacaggatttgcgtggcggcaacgaaagggtgcaggaaagcaatgcactgaggaacaagaagaactccaggcgggtgtctttcgccgacactataaaagtgttccagactgaatcccacatgaagatcgttagaaagagcgagatggaagagactgaaacaggcgaaaatttactcctcattcagaacaagaaactggaagataattactgtgaaataactggtatgaatacattgctcagcgcaccaatccatacccagatgcagcagaaggaattctccatcattgagcatacaagagagcgaaaacatgctaacgatcagactgtgatattttccgacgaaaatcaaatggaccttacctcgtcacacaccgtcatgataacaaagggcttgctggacaaccccatcagtgaaaagtcaaccaaaatagatactacctctttcctcgcaaatctgaaactgcatacggaagacagccgcatgaaaaaagaagtaaacttttcagtcgaccagaatacttccagtgaaaacaagatcgattttaacgacttcatcaagcggttaaagaccggtaaatgtagtgcgtttccagacgtaccagataaagagaattttgagatcccaatttactccaaagagcccaatagcgcatctagtacccatcaaatgcatgtgtcacttaaggaggacgaaaataactccaacatcacccgccttttcagagagaaggatgatgggatgaatttcacccagtgccatactgctaacatacagactcttatcccgacatcctctgaaaccaactctcgcgaatctaaagggaacgatataacaatctatggtaatgacttcatggatctcacgttcaaccatacacttcagattctgcctgccaccggtaacttttccgagattgagaaccagacacagaatgccatggacgtcaccaccggctacggcaccaaagccagtggcaataagacagtttttaaatctaagcaaaacactgccttccaggacctgagtattaattccgcagacaaaatacacataacccgatcacacatcatgggcgcagaaacccatattgtgtctcagacgtgcaaccaggacgcccgcatacttgccatgacaccagagtcaatttactctaatccgtcgatccagggttgcaagaccgttttctactcaagctgtaatgacgcgatggagatgaccaaatgcctctctaatatgcgcgaggaaaaaaatctgcttaagcatgattccaactacgctaagatgtactgtaatccagacgccatgtcatctctcaccgaaaaaactatctatagcggagaagaaaatatggatattaccaaaagccacaccgtggctatagataaccaaatttttaaacaggatcaatccaatgtgcaaatcgccgcggcacctactcccgagaaagagatgatgcttcaaaatctgatgaccacaagcgaggacggaaagatgaatgtgaactgcaacagtgtgccgcacgtgagtaaagaacggatccagcagtccttaagcaaccccttgagcatctccttgactgatcgcaaaactgagttactttccggagaaaacatggatttaaccgaatcccatacatcaaatctggggtcacaggtaccactcgccgcttacaatctggccccggagtctacaagtgagtcccactctcagagcaagtcatcgagcgatgagtgcgaagagataacaaagtcgaggaatgagcctttccagaggagcgatattatagctaaaaatagcctcacagacacatggaacaaagataaggattgggttctcaaaattctcccgtatctggacaaggactctccccagagcgccgattgcaatcaagaaatcgcgacgtcacacaacatcgtgtactgtggaggcgtgctggacaagcagatcacgaaccgcaataccgtgtcctgggagcaaagcctgtttagtacaacgaagcctcttttttcttccggccaattttcaatgaagaatcatgacacagccatcagttcacataccgtgaaatccgttctcggacagaacagcaaacttgcagagcccctcagaaaaagtttgagtaaccctacccctgattactgccacgacaaaatgattatttgttccgaggaggaacagaatatggatcttactaagtcgcacacagtggtgattggcttcggccccagtgagctgcaggagttagggaagaccaaccttgagcatacaaccggccagctcaccacaatgaatcgccagattgcagtcaaggtcgagaaatgcgggaaaagtcctatcgaaaaatccggcgtgctaaagtccaactgtatcatggatgtgctggaggatgagtctgttcagaagcctaaattcccaaaggagaaacagaatgttaaaatctggggaagaaaatcagtcggtggccccaaaattgataaaacaatagttttcagcgaggacgacaaaaacgatatggacatcacaaagtcgtacacgatcgagattaaccatcgccctctcttagagaagagagactgccacttggtgcctctcgctgggacatccgaaactattctgtatacatgccgccaggacgacatggaaatcacccgctctcatacaactgctctggaatgcaagactgtgtctccggatgaaattactacaaggcccatggacaaaacggtggtctttgtcgataatcacgtggagctagaaatgacagagagtcataccgtgttcatagactatcaggagaaagagagaaccgatagacccaattttgagcttagccagcggaaatctttagggacacctaccgtgatttgcacgcccacagaggagagcgtcttctttccagggaatggggaatctgaccgacttgtggccaatgattcccagctaaccccactggaggaatggagcaataaccggggccccgtggaagtagctgataatatggagttgtctaagagtgcgacttgtaaaaacataaaggacgtgcaatccccagggttcttaaatgagccactctcaagcaagagccagcggcgtaaatctctgaagctgaagaatgacaagacaattgttttctctgagaaccacaaaaatgacatggatattactcaatcttgtatggtggagatagacaacgagtctgctctggaggacaaagaggattttcaccttgccggtgcctccaagacaatcctctacagctgcggccaggatgatatggagatcacacggtctcatacaacggcccttgagtgtaaaacacttctgcccaacgaaattgccatccggcccatggacaaaaccgtactcttcacagacaactatagcgatctggaggtgaccgacagccacacagttttcatcgactgtcaggccaccgaaaaaatcttggaggaaaatcctaagttcggaattgggaaaggtaagaatctgggtgtgagttttcccaaggacaactcctgcgtgcaagagattgcagagaaacaggctcttgccgttggcaacaagattgtgttacatacagaacaaaaacagcagctgttcgccgcaaccaaccggaccaccaatgaaatcatcaagtttcactccgctgccatggacgagaaagttatcggaaaggtcgtcgatcaggcctgcaccctggagaaggcccaggtggagtcgtgtcagctcaacaatcgcgacagacgaaatgtcgattttacttccagtcacgcgaccgcggtgtgtggatcttcagacaactatagttgtctacccaacgtcattagttgcaccgataatctggaaggctctgccatgttgctgtgcgataaggacgaggagaaggccaactactgtccagtgcagaacgacctcgcatacgctaatgactttgctagtgaatattatctggagtcagaaggtcagccgctgagcgcaccctgtccgctcctggaaaaagaagaggttatccagacaagtaccaaggggcaattggattgcgttattacgctgcacaaagatcaggatctcattaaagatccaagaaacctgttggccaatcagaccctggtgtatagccaggacctgggagaaatgaccaaattgaactccaagagagtttccttcaagttacctaaggatcagatgaaggtctatgtcgatgacatttatgtgattcctcagccccatttcagtactgatcagccccctctgccaaaaaaggggcagtcaagtatcaacaaagaagaagttatcctgtccaaagctggaaacaaatccctaaatattatcgaaaacagttccgcgcctatctgtgagaacaaacctaagattttaaacagtgaagaatggtttgccgccgcatgtaaaaaggagctgaaggagaatatacagaccaccaactacaacactgcactcgacttccatagcaacagcgatgtcactaaacaggttatccagacccacgtgaacgctggcgaagcccctgatcctgttattacctctaacgtgccctgtttccattcaattaaaccgaacctgaataacctgaacggaaagactggggagttcctcgcttttcaaactgtgcatttgcctcctctccctgaacagctcctagagctggggaacaaggcacacaacgacatgcatatagtgcaggctacggagatacacaacataaatatcatcagttccaatgctaaagactctcgcgacgaggagaataagaaaagccataacggggctgaaactacctccctcccccccaagaccgtctttaaagacaaggtcaggcggtgctctttaggtatattcctacctagacttcccaacaaaagaaactgctcagttaccgggatagatgatctagaacagatccctgccgacactacagatatcaaccacttggagacccagccggtctcctccaaggactccgggatcggttctgtggctggcaaactcaacctttctcccagtcagtatattaacgaagagaacctccctgtctatcccgatgaaattaactcatcagacagtataaacatcgagactgagccgaagaaaaacgttggtacccggagaaggcggtactcctag

SEQ ID NO: 315014 - DNA, 5243 bp, Artificial Sequence
  derived and/or modified sequence
atggacggggtctcaagcgaggccaacgaggagaacgataacatcgaacggcctgttcgtcggcgacattcttcaatcctaaaacctcctcgcagcccacttcaggacttgcgcggtggaaatgagcgggtgcaggagtctaatgctctgcgaaataaaaagaattccaggcgggtgtcattcgccgacactatcaaggtgtttcaaacagaaagtcatatgaaaattgtgaggaaatcggaaatggaggaaacagagacaggggagaacttgctgttgattcagaacaaaaagttagaagataactactgtgaaataacagggatgaacacactgctatccgctcccatccatacgcaaatgcaacaaaaagagttcagcatcatcgaacacacccgcgagaggaagcatgcaaatgaccagacagtaatcttctctgatgaaaaccagatggatctcacaagcagccacacagtcatgatcactaaagggctgctcgacaatcctatcagcgagaaatccaccaaaatcgacacgacaagttttctagcaaatctgaagctccatactgaagacagccgaatgaagaaagaagtgaacttcagcgtggatcagaacacaagctctgagaacaaaatcgactttaatgacttcattaaacgactgaaaaccggaaaatgttcagctttccccgatgtgcccgataaggaaaactttgagataccaatctattccaaagagcctaatagtgccagctctactcaccagatgcatgtgagtctgaaagaagatgaaaacaatagtaacataaccaggttatttagagaaaaggacgatggcatgaactttactcaatgccacacggccaacatccagacactgattcccactagctctgaaacaaactcacgcgagagtaagggcaatgatattactatttatggaaacgactttatggacctgacctttaatcacacactccagatcctcccagcgacaggaaatttttccgaaattgagaatcaaacccagaatgcaatggacgtgactaccggttacggaacaaaagccagcggcaacaaaactgtgtttaaatcaaagcagaatacagcctttcaagacctctccattaactcagctgacaagatacacattactaggagccacatcatgggtgctgaaacacatattgtctcccagacctgtaatcaggacgcgagaatactggctatgacacctgaatctatctactcaaatccctccatccagggctgcaagaccgtgttttactcctcttgtaacgacgcaatggagatgactaaatgcctgtccaatatgcgggaagagaagaaccttttaaaacacgattccaactatgctaaaatgtactgtaacccagatgccatgtctagcctgaccgaaaagactatatacagcggtgaagaaaatatggacatcactaaatcccatacggtcgccatcgataatcagatcttcaagcaagaccagtccaatgtgcagattgctgcggcacccacccccgaaaaggaaatgatgcttcagaaccttatgacaactagtgaggacggaaaaatgaacgtgaactgtaacagtgtgccacatgtttctaaggagcgcatacagcagagcctctccaaccccctgtctatctcactgacagaccggaaaactgagctgctctctggcgagaatatggatctgactgaatcacacaccagcaatttgggatcacaggtgcctctggctgcttacaacttagccccagaatctaccagcgagtcccactcccagtctaaatcgtccagcgatgaatgtgaggaaataacgaagagcaggaacgagccttttcagcgcagcgacatcatcgctaagaactccctcacagacacgtggaacaaagataaggactgggtgctgaagatacttccataccttgataaagattcaccgcagagcgctgactgcaaccaggaaatcgccactagccacaacattgtctattgcggaggagtgttggacaaacagattacaaatcggaacacagtgtcctgggagcagtcactgttctctacaactaagcctttgttctcatcaggccagttttcaatgaagaaccacgatacagcaatttctagccatactgtgaagtccgttttaggccagaacagcaagttggcagagcctctccgcaagtccctttcaaacccaactcccgattactgccatgataagatgatcatctgttcggaggaggagcagaatatggacctaacaaaatcgcataccgtggttattgggtttgggcctagtgagctgcaggagctgggtaaaaccaatctcgagcacaccaccggacagctgacaaccatgaaccgccagatcgccgtcaaggtggaaaagtgtggcaaatcccccatcgagaagtcgggcgtccttaaatccaactgcatcatggatgtgcttgaggatgaatctgtgcagaaacctaagttccccaaggaaaaacagaacgtaaaaatttggggaaggaaatctgtcggcggaccaaagatcgataagacaattgtcttctccgaggatgacaagaacgatatggacatcaccaaatcctatacaattgaaattaaccatcgccctttgctggagaaaagggactgtcacctggtccctctagcaggaacatccgagaccattttgtatacttgccgccaggatgacatggagataacgcgctcacacacaacagctctagagtgtaaaacggtcagtcccgacgagatcaccacccggcctatggacaaaacagtggtattcgttgacaatcatgtcgagctggaaatgacagaatcccacaccgtgtttatcgattatcaggagaaagaacggactgatcgcccaaatttcgagctcagccaaagaaaaagtctaggaactccaacagtgatttgcacaccaactgaagaaagcgtcttttttcccggaaacggcgagagcgatcggttggtggccaatgacagtcagctcacaccattggaagaatggtccaacaacaggggccctgtcgaggtggcagacaatatggagctctccaagtccgctacttgtaagaatatcaaagatgtgcagagcccgggtttccttaacgagcccctgtctagcaagagtcaacgtagaaagagcctgaagctaaaaaacgacaaaacgattgtattcagcgaaaatcacaagaacgatatggatattactcagagctgtatggtggagattgataacgaatcggcgctcgaggacaaagaggacttccacctggcaggggctagcaagactattctgtattcctgtggccaagatgatatggaaatcacccgctcacatactaccgctctggagtgcaagaccttgctgcctaacgaaattgccatccgccctatggacaagaccgtcctgttcaccgataactactctgaccttgaggtaactgactctcacacggtgtttatagattgtcaggctacggaaaagatcctggaagaaaaccctaagttcggaatcggtaagggaaaaaacctgggcgtcagttttccaaaggataactcttgtgtacaggaaatcgccgaaaaacaggccctagctgtaggcaataaaattgtgctgcataccgagcaaaagcagcagttattcgctgcaaccaaccgaaccactaacgagattattaagttccactccgcggcaatggatgagaaggttatcgggaaagtcgttgaccaggcctgtacgctggaaaaagctcaagttgagtcatgtcaactgaataatcgggatcgcagaaatgtggacttcacctccagtcacgccactgccgtgtgcgggtctagtgacaattactcttgtctgccaaatgtgatctcgtgcacggacaatttggagggcagcgccatgctgctgtgcgacaaggacgaagaaaaagcaaattactgtccggtgcagaatgatctcgcttacgccaacgacttcgcttcagaatactatctggagtcagaaggacaaccactctccgctccgtgtccactgctggaaaaggaggaggtgattcagacgagcacaaaagggcaattggactgcgtcatcaccctccacaaagatcaggatctgatcaaggatccacggaacctactggctaaccagaccttagtatattctcaagatctgggagaaatgaccaaattgaactctaaacgcgtatccttcaagctccctaaagaccagatgaaggtttacgttgacgacatatatgtgatccctcagccccattttagtactgatcagcctcccttacctaaaaaaggccagtcaagcattaacaaggaggaagtcattttgagcaaggcaggcaacaaaagcctaaacatcatcgagaacagctccgccccaatttgcgagaataaacccaaaatcttaaatagtgaagaatggttcgcagccgcatgcaaaaaagagctaaaagaaaacatccaaactactaattacaatactgcactcgacttccacagcaacagtgacgtgactaagcaggtgatccagacacacgtcaacgctggggaagctcctgatcctgttatcactagcaacgtcccctgcttccatagtatcaaacctaacctgaataatctgaacggcaaaaccggagagttcctggcctttcagactgtacacctgccaccactacctgaacagttactcgagttgggaaacaaggctcataacgacatgcacatcgtacaggcaacagagattcataatattaatatcattagtagcaatgccaaagattccagagacgaagaaaataaaaaatcccataatggagctgagacaacctcactgccccctaaaaccgtgttcaaggataaggtgcggaggtgttctctcggtatcttcttacccagactccctaacaaacggaactgttccgtgactggtattgacgatttagagcaaatacccgcagacacgacggatatcaatcacttggagacgcaacctgtatccagtaaggattctggtattgggagcgtggcgggaaagctgaacttgtccccaagccagtacattaacgaagagaacctccctgtgtacccagacgagattaattcctctgactccattaatatcgaaactgagccgaagaaaaacgtgggaacacgtagaaggaggtatagcta

SEQ ID NO: 315015 - DNA, 5634 bp, Artificial Sequence
  derived and/or modified sequence
aagcaatcgaaagaagatggccgctcccacgattgtgggggaggtctccactggggaggggcagaggaaattcggtcgaaaaagagataaagctgaaggaaataaaattggcacggagtctgggaaagtagtttccctaaaggagtcttagaaatagggttggtctggaacctaaggggcggagccgacgcgtagagccgctttgcgcgtgcgcatcacctaggcggttagatttgaatacttcactgaggcgagccgggcgttgtgagcggactgctagaggcggctgtctgtttccgctctaaggaaactcagagcgtgtggaccccaaacaagtctgcgcaaaatttgtcgaggaggtttgccgcggcagaaaagttttcttcaaaaatggatggggtgtcttcagaggctaatgaagaaaatgacaatatagagagacctgttagaagacggcattcttcaatattgaaacccccaaggagtcctcttcaggacctcagaggtgggaatgaaagagttcaggaatccaatgctttgagaaataagaaaaactctcgtcgagtcagctttgcagatactataaaggtattccagacggagtctcatatgaaaatagtgagaaagtcagaaatggaagaaacagaaacaggagaaaatcttcttttgatacagaataagaaattagaagataattactgtgaaattactgggatgaacacattgctttctgctcccattcatacccagatgcaacagaaggagttttcaattatagaacatacccgtgaaaggaaacatgcaaatgaccagacagtcattttttcagatgaaaaccagatggacctgacatcaagtcacactgtaatgattaccaaaggccttttagataatcccataagtgaaaagtccaccaagatagataccacatcatttctagctaatttaaagcttcacaccgaggactcaagaatgaaaaaagaagtaaatttttccgtggatcaaaacacttcttcagaaaataaaatagatttcaatgacttcataaaaagattgaaaacaggaaaatgtagtgcttttcctgatgtgcctgataaagaaaattttgagatacctatttattccaaggaaccgaacagtgcctcttctacacatcaaatgcatgtatctcttaaggaagatgaaaataacagtaatattactaggctctttagagaaaaagatgatgggatgaatttcacccagtgtcatacagccaatattcagacattgattcccacatccagtgagaccaactcacgggaatctaaaggtaatgatattacaatttatggcaatgactttatggacttgacatttaaccacactttgcagatcttacctgcaacaggtaatttttctgaaatagaaaatcaaactcagaatgccatggatgtaacaacaggttatggaactaaagcttcaggaaataaaacagtttttaagagtaaacaaaatactgcttttcaagacctttccataaactctgcagacaaaatacatattaccagaagtcatattatgggggcagaaactcacatagtctcacagacttgtaatcaggatgccagaatattagccatgaccccagaatctatatattctaatccatctattcaaggttgtaagactgttttctattctagttgtaatgatgccatggaaatgaccaaatgtctctcaaatatgagagaggagaaaaatttgctaaagcatgacagtaattatgctaaaatgtattgcaatccagatgctatgtcttctctcacagagaaaactatttattccggagaggagaacatggacattaccaagagtcatacagttgcaatagataatcaaatttttaaacaagatcaatcaaatgtgcaaatagcagctgcaccaacacccgaaaaagaaatgatgctccaaaatcttatgaccacatcagaagatgggaaaatgaatgtaaattgtaactcagttcctcatgtatctaaggaaagaatacagcagagcctgtcaaatcctttgtctatttcattgactgatagaaagactgaactcttatcaggtgaaaatatggatttgactgaaagtcacacaagtaacttaggaagtcaggttcctcttgcagcttataatctagcaccggagagtaccagtgaatctcactctcagagcaaaagctcttcagatgaatgtgaagaaattaccaaaagtcgtaatgaaccatttcagcgatcagacataatagccaaaaacagcttaaccgacacctggaacaaagacaaagattgggttttgaagattttgccctaccttgataaagattctcctcagtcagctgattgtaatcaggagatagcaacaagccataatatagtctactgtggtggagttcttgataaacaaataactaatagaaatacagtatcatgggaacaatctttgttttctaccacaaagccattattttcatcaggacagttctctatgaaaaatcatgatactgctataagtagtcatacagtgaaatctgtactaggccagaattctaaactggctgagccactgaggaaaagtttaagcaatcccacacctgactattgccatgacaagatgattatatgttcagaggaagagcaaaatatggatctaacaaagagccacactgtcgtcattggatttggtccttctgaactacaagaacttggtaaaactaatttagaacacactactggccagctaacaacaatgaacagacagatagctgtaaaagttgaaaaatgtggtaaaagtcccatagaaaaaagtggagtgcttaaatctaactgtattatggatgtgttagaggacgaaagtgtacagaaacctaaatttccaaaggaaaagcaaaatgtcaaaatttggggaaggaaaagtgttggtggaccaaaaattgataagactattgtattttcagaagacgataagaatgatatggatatcactaagagttatacaatagaaataaaccatagacctttattagagaaacgtgattgtcatttggtgccattggcaggaacttctgaaactattttatatacatgtaggcaggatgacatggagatcactagaagtcacacaactgccttagaatgtaaaactgtctcaccagatgaaataactactaggcctatggacaaaactgtagtgtttgtagataatcatgttgaactagaaatgacagagtcccatactgttttcattgactaccaagaaaaggaaagaacagacagacctaactttgaactatcccaaaggaaaagcctaggaacaccaacagtgatatgtactcctactgaggagagtgttttctttccaggaaatggtgaaagtgaccgtctagtagcaaatgacagccagctaacccctctggaggaatggtctaataataggggccctgtagaggtagctgataacatggaattgtctaaatcagccacttgcaaaaacatcaaagatgtacaaagtcctggatttctgaatgaacctctatcaagcaaaagtcagagaagaaaaagccttaagctaaaaaatgacaagaccattgtattttcagagaatcataaaaatgatatggatattacccagagttgtatggtggaaatagataacgaaagtgccctggaggataaagaggacttccatttggcaggggcttctaaaactattttgtattcatgtgggcaggatgacatggagatcactaggagtcacacaactgccttagaatgtaaaactctcctgccaaatgaaatagctattaggcccatggacaaaaccgtattgttcacagataattacagtgatctggaagtcaccgattcccatactgttttcattgactgtcaagccacagagaaaatacttgaagaaaaccctaaatttggaataggaaaaggaaaaaacttgggtgtttcctttcctaaggataatagctgtgttcaagaaatcgctgaaaaacaagcactggctgtaggaaacaaaatagttcttcacaccgagcaaaagcaacaactctttgctgctactaatagaactactaatgaaatcatcaaatttcatagtgctgctatggatgaaaaggtcatagggaaagttgtagaccaggcctgtacattggaaaaagcgcaagttgaaagctgtcagttaaataatagagatagaagaaatgtggactttacaagtagtcatgcaactgctgtttgtggatccagtgataattattcctgtttaccaaatgttatttcctgtactgataatttggagggtagtgccatgctcttatgtgataaagatgaggaaaaagccaattattgcccagtgcaaaatgatcttgcttatgcaaatgattttgccagtgaatattacttggaatctgagggacagcctctctctgctccttgtcctttgttagagaaggaagaagttattcaaaccagtaccaaaggacagttagactgtgttataacactgcacaaagatcaagatctgattaaggatccacgaaatctattggctaatcaaactttagtatatagtcaagatctgggggagatgactaaacttaattcaaagcgagtatcttttaagcttccaaaggatcaaatgaaagtctatgttgatgacatttatgttattcctcagcctcatttctcaaccgaccaacctccattacctaaaaaaggacagagtagtatcaataaagaagaagtaatactgtctaaagctggaaataagagtttaaatattatagaaaattcctctgcacccatatgtgaaaacaagcccaaaatactcaatagtgaggaatggtttgctgcagcctgtaaaaaagaactgaaggaaaatattcaaacaactaactataatacagctctagatttccacagtaactcagacgtaactaagcaagtcattcaaactcatgtcaatgctggagaagcaccagatcctgtaattacatctaatgttccatgttttcatagtatcaaaccaaatctgaataatttgaatggaaaaactggagagtttttagcctttcaaactgttcatctaccaccccttccagagcaattacttgaattaggaaataaggcacacaatgatatgcatatagtgcaagctacagaaatacataatattaacataatctccagcaatgctaaagatagtagagatgaggaaaataaaaagtctcataatggagctgaaaccacctctctaccgccaaagacagtttttaaagataaagtaaggagatgttctttgggaatctttttgcctagattgcccaacaagagaaattgtagtgtcactggtattgatgacctggaacagattccagcagacacaactgatataaatcacttagaaactcagccggtctctagcaaagattcaggcattggatctgttgcaggtaaactgaacctaagtccttctcaatatataaatgaggaaaatcttcctgtatatcctgatgagatcaattcttcagactctattaacatagaaactgagccaaaaaagaacgtgggtacaagaagaagaagatattcataa

SEQ ID NO: 315016 - DNA, 5244 bp, Artificial Sequence
  derived and/or modified sequence
atggacggcgtgagcagcgaggccaacgaggagaacgacaacatcgagagacccgtgagaagaagacacagcagcatcctgaagccccccagaagccccctgcaggacctgagaggcggcaacgagagagtgcaggagagcaacgccctgagaaacaagaagaacagcagaagagtgagcttcgccgacaccatcaaggtgttccagaccgagagccacatgaagatcgtgagaaagagcgagatggaggagaccgagaccggcgagaacctgctgctgatccagaacaagaagctggaggacaactactgcgagatcaccggcatgaacaccctgctgagcgcccccatccacacccagatgcagcagaaggagttcagcatcatcgagcacaccagagagagaaagcacgccaacgaccagaccgtgatcttcagcgacgagaaccagatggacctgaccagcagccacaccgtgatgatcaccaagggcctgctggacaaccccatcagcgagaagagcaccaagatcgacaccaccagcttcctggccaacctgaagctgcacaccgaggacagcagaatgaagaaggaggtgaacttcagcgtggaccagaacaccagcagcgagaacaagatcgacttcaacgacttcatcaagagactgaagaccggcaagtgcagcgccttccccgacgtgcccgacaaggagaacttcgagatccccatctacagcaaggagcccaacagcgccagcagcacccaccagatgcacgtgagcctgaaggaggacgagaacaacagcaacatcaccagactgttcagagagaaggacgacggcatgaacttcacccagtgccacaccgccaacatccagaccctgatccccaccagcagcgagaccaacagcagagagagcaagggcaacgacatcaccatctacggcaacgacttcatggacctgaccttcaaccacaccctgcagatcctgcccgccaccggcaacttcagcgagatcgagaaccagacccagaacgccatggacgtgaccaccggctacggcaccaaggccagcggcaacaagaccgtgttcaagagcaagcagaacaccgccttccaggacctgagcatcaacagcgccgacaagatccacatcaccagaagccacatcatgggcgccgagacccacatcgtgagccagacctgcaaccaggacgccagaatcctggccatgacccccgagagcatctacagcaaccccagcatccagggctgcaagaccgtgttctacagcagctgcaacgacgccatggagatgaccaagtgcctgagcaacatgagagaggagaagaacctgctgaagcacgacagcaactacgccaagatgtactgcaaccccgacgccatgagcagcctgaccgagaagaccatctacagcggcgaggagaacatggacatcaccaagagccacaccgtggccatcgacaaccagatcttcaagcaggaccagagcaacgtgcagatcgccgccgcccccacccccgagaaggagatgatgctgcagaacctgatgaccaccagcgaggacggcaagatgaacgtgaactgcaacagcgtgccccacgtgagcaaggagagaatccagcagagcctgagcaaccccctgagcatcagcctgaccgacagaaagaccgagctgctgagcggcgagaacatggacctgaccgagagccacaccagcaacctgggcagccaggtgcccctggccgcctacaacctggcccccgagagcaccagcgagagccacagccagagcaagagcagcagcgacgagtgcgaggagatcaccaagagcagaaacgagcccttccagagaagcgacatcatcgccaagaacagcctgaccgacacctggaacaaggacaaggactgggtgctgaagatcctgccctacctggacaaggacagcccccagagcgccgactgcaaccaggagatcgccaccagccacaacatcgtgtactgcggcggcgtgctggacaagcagatcaccaacagaaacaccgtgagctgggagcagagcctgttcagcaccaccaagcccctgttcagcagcggccagttcagcatgaagaaccacgacaccgccatcagcagccacaccgtgaagagcgtgctgggccagaacagcaagctggccgagcccctgagaaagagcctgagcaaccccacccccgactactgccacgacaagatgatcatctgcagcgaggaggagcagaacatggacctgaccaagagccacaccgtggtgatcggcttcggccccagcgagctgcaggagctgggcaagaccaacctggagcacaccaccggccagctgaccaccatgaacagacagatcgccgtgaaggtggagaagtgcggcaagagccccatcgagaagagcggcgtgctgaagagcaactgcatcatggacgtgctggaggacgagagcgtgcagaagcccaagttccccaaggagaagcagaacgtgaagatctggggcagaaagagcgtgggcggccccaagatcgacaagaccatcgtgttcagcgaggacgacaagaacgacatggacatcaccaagagctacaccatcgagatcaaccacagacccctgctggagaagagagactgccacctggtgcccctggccggcaccagcgagaccatcctgtacacctgcagacaggacgacatggagatcaccagaagccacaccaccgccctggagtgcaagaccgtgagccccgacgagatcaccaccagacccatggacaagaccgtggtgttcgtggacaaccacgtggagctggagatgaccgagagccacaccgtgttcatcgactaccaggagaaggagagaaccgacagacccaacttcgagctgagccagagaaagagcctgggcacccccaccgtgatctgcacccccaccgaggagagcgtgttcttccccggcaacggcgagagcgacagactggtggccaacgacagccagctgacccccctggaggagtggagcaacaacagaggccccgtggaggtggccgacaacatggagctgagcaagagcgccacctgcaagaacatcaaggacgtgcagagccccggcttcctgaacgagcccctgagcagcaagagccagagaagaaagagcctgaagctgaagaacgacaagaccatcgtgttcagcgagaaccacaagaacgacatggacatcacccagagctgcatggtggagatcgacaacgagagcgccctggaggacaaggaggacttccacctggccggcgccagcaagaccatcctgtacagctgcggccaggacgacatggagatcaccagaagccacaccaccgccctggagtgcaagaccctgctgcccaacgagatcgccatcagacccatggacaagaccgtgctgttcaccgacaactacagcgacctggaggtgaccgacagccacaccgtgttcatcgactgccaggccaccgagaagatcctggaggagaaccccaagttcggcatcggcaagggcaagaacctgggcgtgagcttccccaaggacaacagctgcgtgcaggagatcgccgagaagcaggccctggccgtgggcaacaagatcgtgctgcacaccgagcagaagcagcagctgttcgccgccaccaacagaaccaccaacgagatcatcaagttccacagcgccgccatggacgagaaggtgatcggcaaggtggtggaccaggcctgcaccctggagaaggcccaggtggagagctgccagctgaacaacagagacagaagaaacgtggacttcaccagcagccacgccaccgccgtgtgcggcagcagcgacaactacagctgcctgcccaacgtgatcagctgcaccgacaacctggagggcagcgccatgctgctgtgcgacaaggacgaggagaaggccaactactgccccgtgcagaacgacctggcctacgccaacgacttcgccagcgagtactacctggagagcgagggccagcccctgagcgccccctgccccctgctggagaaggaggaggtgatccagaccagcaccaagggccagctggactgcgtgatcaccctgcacaaggaccaggacctgatcaaggaccccagaaacctgctggccaaccagaccctggtgtacagccaggacctgggcgagatgaccaagctgaacagcaagagagtgagcttcaagctgcccaaggaccagatgaaggtgtacgtggacgacatctacgtgatcccccagccccacttcagcaccgaccagccccccctgcccaagaagggccagagcagcatcaacaaggaggaggtgatcctgagcaaggccggcaacaagagcctgaacatcatcgagaacagcagcgcccccatctgcgagaacaagcccaagatcctgaacagcgaggagtggttcgccgccgcctgcaagaaggagctgaaggagaacatccagaccaccaactacaacaccgccctggacttccacagcaacagcgacgtgaccaagcaggtgatccagacccacgtgaacgccggcgaggcccccgaccccgtgatcaccagcaacgtgccctgcttccacagcatcaagcccaacctgaacaacctgaacggcaagaccggcgagttcctggccttccagaccgtgcacctgccccccctgcccgagcagctgctggagctgggcaacaaggcccacaacgacatgcacatcgtgcaggccaccgagatccacaacatcaacatcatcagcagcaacgccaaggacagcagagacgaggagaacaagaagagccacaacggcgccgagaccaccagcctgccccccaagaccgtgttcaaggacaaggtgagaagatgcagcctgggcatcttcctgcccagactgcccaacaagagaaactgcagcgtgaccggcatcgacgacctggagcagatccccgccgacaccaccgacatcaaccacctggagacccagcccgtgagcagcaaggacagcggcatcggcagcgtggccggcaagctgaacctgagccccagccagtacatcaacgaggagaacctgcccgtgtaccccgacgagatcaacagcagcgacagcatcaacatcgagaccgagcccaagaagaacgtgggcaccagaagaagaagatacagctag

SEQ ID NO: 315017 - DNA, 327 bp, Artificial Sequence
  derived and/or modified sequence
atgctggccaagggagctgaggagggccgcagcggcggccccaggcctgccatcaccctgcccggcagcctgcacttcacctgtgacctgaagaccagcccctactgcctgaccagggctgagctgatggagcacctgcccctgcgggtggccgtgcacagcatgagcccctgccacaggagctgcttctgtggggagctgaagaggggccacccctggaacaccccccaggtgagcagcttccccagcagcaccaccagcctgagccacagctgcaccaccagccacctggactgcagccagcaggtggagagcggcagcaagtag

SEQ ID NO: 315018 - DNA, 327 bp, Artificial Sequence
  derived and/or modified sequence
atgctggccaagggcgccgaggagggccggagcggcggcccccggcctgctataactttgcctgggtctctgcattttacttgcgatctgaagacttctccatattgtcttacccgcgcagagttaatggagcacctgcctctgcgcgtcgccgtgcatagcatgtccccctgtcatcgtagctgcttctgtggcgaacttaagcggggccacccttggaatactccgcaggtgagctcattcccctcttctactaccagcttgagccattcttgtaccacatcccacctggactgctcacaacaggtggaatcaggctctaaatag

SEQ ID NO: 315019 - DNA, 327 bp, Artificial Sequence
  derived and/or modified sequence
atgctcgctaagggagccgaagagggcagaagcggcggtccacgccctgccataacactgcccggatccttacactttacctgcgacctgaagacatccccttactgtcttactcgggcagagctgatggaacatttgcccctgcgcgtggcagtccatagcatgtccccctgccataggtcttgtttctgcggggagctcaaacgcggacacccctggaacacccctcaggtgagttctttcccctcctctaccacctcactctcccactcttgcaccacgtcacacttggattgctcccaacaagtggagtcaggatcaaagtag

SEQ ID NO: 315020 - DNA, 327 bp, Artificial Sequence
  derived and/or modified sequence
atgctggcgaaaggcgcagaggagggtagaagcggaggacctcggccagcaattacccttcctggtagtcttcacttcacatgcgatctgaagacctccccttactgcctgacccgcgcagaactgatggaacatctgccgctgcgcgttgcggtacacagtatgagcccttgccacagaagctgcttctgcggagaacttaaaaggggtcacccttggaacaccccccaggtgagctcttttccgtcgtcgactacttccctgagccactcatgcacaacatcacatttggattgcagtcaacaagttgagtcaggttctaagtag

SEQ ID NO: 315021 - DNA, 390 bp, Artificial Sequence
  derived and/or modified sequence
atggccgctgctacgtgggacaaagaatcaaagtgtcgccttagtaggggccactgtcaccatcgccgccaccagtcgttgccagtagggcttaccttacgatatagcgctcctgcttcacatcagcctaaatgttttacatccaaacatgggactcggccttcgcagcgcaaaccgtcgctaagagtctcgggccattactccccacattcactgttccctggacacggcaggcgaggagcctgcgtcgccagaagtcgccgctttgccggacacatgcaactaacctggaagctgaagagaaagaagccaggccgtaccgccagctcagaagagcacaaaaagcaggggagagggtgcgccggtcgccgcttgatcaagtcaacatag

SEQ ID NO: 315022 - DNA, 390 bp, Artificial Sequence
  derived and/or modified sequence
atggctgctgccacctgggacaaggagagcaaatgtcggctgagccggggccactgccaccaccggcggcaccagagcctgcctgtgggcctgaccctgcgctacagcgccccagccagccaccagcccaagtgcttcaccagcaagcacggcacccggcccagccagaggaagcccagcctgcgggtgtctggccactacagcccccacagcctcttccctggccacggccggcggggggcctgtgtggcccggagcagaagatttgctggccacatgcagctgacctggaagctgaagaggaagaagccaggccgcacagccagcagcgaggagcacaagaagcagggccggggctgtgccggcagaagactcatcaagagcacctag

SEQ ID NO: 315023 - protein, 347 aa, Artificial Sequence
  derived and/or modified sequence
MLGKIHLLEGDLDKAIEVYKKAVEFSPENTELLTTLGLLYLQLGIYQKAFEHLGNALTYDPTNYKAILAAGSMMQTHGDFDVALTKYRVVACAVPESPPLWNNIGMCFFGKKKYVAAISCLKRANYLAPFDWKILYNLGLVHLTMQQYASAFHFLSAAINFQPKMGELYMLLAVALTNLEDIENAKRAYAEAVHLDKCNPLVNLNYAVLLYNQGEKKNALAQYQEMEKKVSLLKDNSSLEFDSEMVEMAQKLGAALQVGEALVWTKPVKDPKSKHQTTSTSKPASFQQPLGSNQALGQAMSSAAAYRTLPSGAGGTSQFTKPPSLPLEPEPAVESSPTETSEQIREK

SEQ ID NO: 315024 - DNA, 1044 bp, Artificial Sequence
  derived and/or modified sequence
atgctgggaaagatccatctgctggaaggagacctggataaagccatcgaagtttacaagaaagctgtggagtttagccctgagaacacggaattgctgacaacactggggctgttatacctgcaactgggaatttatcagaaggccttcgaacacctgggcaacgcccttacatatgatcccacaaattacaaggccattttagccgctgggtctatgatgcagacacacggtgacttcgacgtggcgcttacaaaataccgagttgttgcgtgcgccgtgccagagtcgcctcctctgtggaacaatattggaatgtgtttcttcggaaagaaaaaatacgtggcagcaatttcatgtttaaaaagggcgaactatctcgctccctttgactggaagattttatacaatttaggcctggtccatctcacaatgcaacaatacgcgagcgcattccacttcctgtcagcggctatcaacttccagcctaaaatgggcgaattgtacatgctgctggctgtcgctctaaccaacttagaggatatcgagaatgccaaacgtgcgtacgcagaagctgtacatcttgataagtgcaatcctctagtgaatctcaattacgccgttctgctgtacaatcagggcgagaaaaaaaacgcactcgctcagtaccaggagatggagaagaaggtttctctcctaaaggataatagctctttagagtttgattccgaaatggtggagatggcgcagaagttgggagctgcactgcaagtgggagaggccttggtgtggacgaagcctgtgaaagaccccaagagtaaacaccaaacaaccagcacaagtaagcccgcatcttttcagcagcctctggggtctaaccaggccctgggacaggccatgtcctctgccgccgcttataggaccctgccgagcggtgccggagggacctctcagttcacaaaacctccatctttgcccctggagccagagcccgccgtcgagtcatcacctacagagacaagtgaacagatcagagaaaagtag

SEQ ID NO: 315025 - DNA, 1044 bp, Artificial Sequence
  derived and/or modified sequence
atgctgggcaagatccacctgctggagggggacctggacaaggccatcgaggtgtacaagaaggctgtggagttcagccctgagaacacagagctgctgaccaccctgggcctgctgtacctgcagctgggcatctaccagaaggcctttgagcacctgggcaatgccctgacctatgaccccaccaactacaaggccatcctggccgccggctccatgatgcagacccatggagactttgatgtggccctgaccaagtacagagtggtggcctgtgctgtgcctgagagcccccccctgtggaacaacatcggcatgtgcttcttcggcaagaagaagtatgtggccgccatcagctgcctgaagagggccaactacctggccccctttgactggaagatcctgtacaacctgggcctggtgcacctgaccatgcagcagtatgccagcgccttccacttcctgtctgctgccatcaacttccagcccaagatgggagagctgtacatgctgctggccgtggccctgaccaacctggaggacattgaaaatgccaagagggcctatgcagaggccgtgcacctggacaagtgcaaccccctggtgaacctgaactatgctgtgctgctgtacaaccagggcgagaagaagaatgccctggcccagtaccaggagatggagaagaaggtgtccctgctgaaggacaacagcagcctggagtttgattctgagatggtggagatggcccagaagctgggcgccgccctgcaggtgggggaggccctggtgtggaccaagcctgtgaaggaccccaagagcaagcaccagaccaccagcaccagcaagccagccagcttccagcagcccctgggcagcaaccaggccctgggccaggccatgagcagcgctgctgcctaccgcaccctgcccagcggggccggcggcaccagccagttcaccaagccacccagcctgcccctggagcctgagcctgctgtggagagcagccccacagagaccagcgagcagatccgggagaagtag

SEQ ID NO: 315026 - DNA, 1044 bp, Artificial Sequence
  derived and/or modified sequence
atgctgggcaagatccacctgctggagggcgacctggacaaggccattgaagtgtacaagaaggccgtggagtttagccccgagaatactgagcttcttacaactctggggctgctgtacctgcagctaggaatttatcagaaggcctttgaacatctcgggaatgcactaacctatgatcccactaattacaaagctattcttgccgcgggcagcatgatgcagacacatggagatttcgatgtcgcgctcaccaaatatagagtggtggcatgcgcagtgcctgagtccccccccctgtggaataacatcggcatgtgcttcttcgggaaaaagaaatatgtggcagccatctcttgcctgaagcgggctaattaccttgctccgtttgactggaagattctctacaacttgggtttagtccacctcacaatgcagcaatacgcctcagcattccactttctgagcgcggccatcaactttcaacctaaaatgggcgaactgtacatgctgctggccgtggccttaaccaatcttgaggatatagagaatgcaaagagagcctatgccgaagcagttcaccttgataagtgtaacccgctggtcaatctaaattatgctgttctactgtacaaccagggagagaaaaagaacgcacttgcccagtaccaggagatggagaagaaggtcagccttctcaaagataactcgagtctggagttcgactccgaaatggttgagatggcgcagaagctcggtgccgcactgcaggtgggcgaggccttagtctggaccaagccggtgaaagacccaaagtcaaagcatcaaaccaccagcacgtccaagccagcctcttttcaacaacccttgggctcaaaccaggctctggggcaggcaatgtcttcagccgctgcctacagaaccctcccgtcgggcgctgggggtacatctcagttcaccaagccaccttctcttccactggaacctgagccagctgtggaatcgtcacctacggagacttcagaacaaattcgcgaaaaatag

SEQ ID NO: 315027 - DNA, 1044 bp, Artificial Sequence
  derived and/or modified sequence
atgttggggaagatccacctgctggagggcgatctcgacaaggcaatcgaggtttataaaaaagcggtcgaattctctcccgagaacaccgaactgttaacaactctcggcctgctgtacctgcaactaggtatttaccagaaagctttcgagcatctgggcaatgccctgacctacgacccgaccaattataaggccattctcgctgccggtagcatgatgcagacccatggtgacttcgacgtagctttgaccaagtatcgagttgtggcatgcgccgttccggaaagtcctccactctggaacaacatcggaatgtgtttttttggtaagaagaaatacgtggccgcaatttcatgccttaagcgggctaattacctggcacccttcgattggaaaattctttacaacctgggcctggtgcaccttaccatgcagcagtatgcctcagcctttcattttctgtcggctgccattaatttccagccaaaaatgggagaactgtacatgctcctggccgttgccttaacaaatctggaagacatcgagaacgctaagagggcttacgcagaggccgtgcatctggataagtgtaatcccttggtgaacctgaactacgcggttctgctgtataatcaaggcgagaagaaaaacgctctggctcagtaccaggagatggagaagaaagtgtcactgcttaaggacaatagttcactcgagtttgactctgagatggtcgaaatggcccagaagttaggagctgctctccaggtcggcgaggcactggtgtggacaaagcctgtgaaagatcccaagtcaaaacatcagaccacctcaacttccaaacccgcttctttccagcagcctttggggagcaaccaggcccttgggcaggctatgtcaagtgccgctgcctataggacactcccctccggggcaggtggaacatcacagtttacaaagccacccagtctgccactggaaccagagcctgccgtcgaatcgtcccccacagaaacgagcgagcaaattagagagaaatag

SEQ ID NO: 315028 - DNA, 1044 bp, Artificial Sequence
  derived and/or modified sequence
atgctgggcaagatccacctgctggagggcgacctggacaaggccatcgaggtgtacaagaaggccgtggagttcagccccgagaacaccgagctgctgaccaccctgggcctgctgtacctgcagctgggcatctaccagaaggccttcgagcacctgggcaacgccctgacctacgaccccaccaactacaaggccatcctggccgccggcagcatgatgcagacccacggcgacttcgacgtggccctgaccaagtacagagtggtggcctgcgccgtgcccgagagcccccccctgtggaacaacatcggcatgtgcttcttcggcaagaagaagtacgtggccgccatcagctgcctgaagagagccaactacctggcccccttcgactggaagatcctgtacaacctgggcctggtgcacctgaccatgcagcagtacgccagcgccttccacttcctgagcgccgccatcaacttccagcccaagatgggcgagctgtacatgctgctggccgtggccctgaccaacctggaggacatcgagaacgccaagagagcctacgccgaggccgtgcacctggacaagtgcaaccccctggtgaacctgaactacgccgtgctgctgtacaaccagggcgagaagaagaacgccctggcccagtaccaggagatggagaagaaggtgagcctgctgaaggacaacagcagcctggagttcgacagcgagatggtggagatggcccagaagctgggcgccgccctgcaggtgggcgaggccctggtgtggaccaagcccgtgaaggaccccaagagcaagcaccagaccaccagcaccagcaagcccgccagcttccagcagcccctgggcagcaaccaggccctgggccaggccatgagcagcgccgccgcctacagaaccctgcccagcggcgccggcggcaccagccagttcaccaagccccccagcctgcccctggagcccgagcccgccgtggagagcagccccaccgagaccagcgagcagatcagagagaagtag

SEQ ID NO: 315029 - DNA, 729 bp, Artificial Sequence
  derived and/or modified sequence
atggccatgcagatgcagctggaggccaacgccgacaccagcgtggaggaggagagcttcggcccccagcccatcagcagactggagcagtgcggcatcaacgccaacgacgtgaagaagctggaggaggccggcttccacaccgtggaggccgtggcctacgcccccaagaaggagctgatcaacatcaagggcatcagcgaggccaaggccgacaagatcctgctgctgagccacagatacggcctgagcggcagcgacgtgctggacaacgtggcctacgccagagccttcaacaccgaccaccagacccagctgctgtaccaggccagcgccatgatggtggagagcagatacgccctgctgatcgtggacagcgccaccgccctgtacagaaccgactacagcggcagaggcgagctgagcgccagacagatgcacctggccagattcctgagaatgctgctgagactggccgacgagttcggcgtggccgtggtgatcaccaaccaggtggtggcccaggtggacggcgccgccatgttcgccgccgaccccaagaagcccatcggcggcaacatcatcgcccacgccagcaccaccagactgtacctgagaaagggcagaggcgagaccagaatctgcaagatctacgacagcccctgcctgcccgaggccgaggccatgttcgccatcaacgccgacggcgtgggcgacgccaaggactag

SEQ ID NO: 315030 - DNA, 729 bp, Artificial Sequence
  derived and/or modified sequence
atggccatgcagatgcagctggaggccaacgccgacaccagcgtggaggaggagagcttcggcccccagcccatcagcagactggagcagtgcggcatcaacgccaacgacgtgaagaagctggaggaggccggcttccacaccgtggaggccgtggcctacgcccccaagaaggagctgatcaacatcaagggcatcagcgaggccaaggccgacaagatcctggccgtggccgagagatacggcctgagcggcagcgacgtgctggacaacgtggcctacgccagagccttcaacaccgaccaccagacccagctgctgtaccaggccagcgccatgatggtggagagcagatacgccctgctgatcgtggacagcgccaccgccctgtacagaaccgactacagcggcagaggcgagctgagcgccagacagatgcacctggccagattcctgagaatgctgctgagactggccgacgagttcggcgtggccgtggtgatcaccaaccaggtggtggcccaggtggacggcgccgccatgttcgccgccgaccccaagaagcccatcggcggcaacatcatcgcccacgccagcaccaccagactgtacctgagaaagggcagaggcgagaccagaatctgcaagatctacgacagcccctgcctgcccgaggccgaggccatgttcgccatcaacgccgacggcgtgggcgacgccaaggactag

SEQ ID NO: 315031 - DNA, 729 bp, Artificial Sequence
  derived and/or modified sequence
atggcaatgcagatgcagttggaggcaaacgctgacacctcagtggaagaggaaagtttcggaccccagcctatcagtagactggaacagtgtgggataaatgcaaacgatgtgaaaaaactggaggaggccggcttccacactgtggaggccgtcgcctatgcgcccaagaaggaactcattaacatcaaaggcatcagcgaggctaaagctgacaagatacttcttctgtcccaccgttacgggcttagcgggagcgacgtactggacaacgtggcatacgcccgcgcttttaacacagaccatcagactcagctgctgtaccaggcgagtgccatgatggtggagtccaggtacgcgctccttatcgtcgacagcgctactgccttatatcggaccgactattccggacgcggggagctttccgctcgccagatgcacttagccagatttctacggatgctgctcagactggctgatgagttcggagtcgcagtagtaatcactaatcaagtcgtggcacaggtggacggggccgcaatgttcgcagccgaccctaagaaacctatcggcggaaatattattgcacacgcgtctacaaccagattatacctgaggaaaggtaggggtgaaacaagaatctgtaaaatttacgattcaccgtgtctgcctgaggccgaggcaatgttcgcaatcaacgccgatggagtcggggatgccaaagattag

SEQ ID NO: 315032 - DNA, 729 bp, Artificial Sequence
  derived and/or modified sequence
atggcaatgcagatgcagttagaggcaaatgcggacactagcgttgaggaggagagcttcggcccccagcccatttccaggctggagcagtgcggaatcaacgcaaatgacgtgaaaaagctcgaggaggcgggctttcatacggtcgaggcagtcgcttacgctcctaaaaaagagttgattaatatcaaaggaatctccgaagccaaggcagataaaatcctagccgtggccgagcgctacggcttatcagggagcgatgtgctggacaacgttgcctacgccagggctttcaatacagatcatcagacccagctgctgtaccaggcttccgcgatgatggtggagagccgatatgccctcttgatcgtggactcagccacagctctctatcgcactgattatagcggcaggggcgaattgtccgcacggcagatgcatctagcgcgttttcttaggatgcttctgaggctggctgatgagttcggtgtggcagtggtgattactaatcaggtagttgctcaggtcgatggcgctgctatgtttgcagctgacccaaagaagcccatcggcggcaatattattgctcatgcctctacaacaagactttacctgcgaaaaggccggggagagactcgtatctgtaagatttacgactcaccctgtctcccagaagctgaggcgatgtttgctattaatgcggacggcgtcggagatgccaaggattag

SEQ ID NO: 315033 - DNA, 729 bp, Artificial Sequence
  derived and/or modified sequence
atggccatgcagatgcagctggaggccaatgctgacacctctgtggaggaggagagctttggcccccagcccatcagccggctggagcagtgtggcatcaatgccaatgatgtgaagaagctggaggaggccggcttccacacagtggaggccgtggcctatgcccccaagaaggagctgatcaacatcaagggcatcagcgaggccaaggctgacaagatcctgctgctgagccacagatatggcctgagcggcagtgatgtgctggacaacgtggcctatgcccgggccttcaacacagaccaccagacccagctgctgtaccaggccagcgccatgatggtggagagccgctatgccctgctgattgtggacagcgccacagccctgtacagaacagactacagcggccgcggggagctgagcgcccggcagatgcacctggcccgcttcctgaggatgctgctgcggctggctgatgaatttggagtggccgtggtgatcaccaaccaggtggtggcccaggtggatggagctgccatgtttgctgctgaccccaagaagcccatcggcggcaacatcatcgcccacgccagcaccacccggctgtacctgaggaagggccgcggggagacccgcatctgcaagatctatgacagcccctgcctgcctgaggccgaggccatgtttgccatcaatgctgatggagtgggagatgccaaggactag

SEQ ID NO: 315034 - DNA, 729 bp, Artificial Sequence
  derived and/or modified sequence
atggccatgcagatgcagctggaggccaatgctgacacctctgtggaggaggagagctttggcccccagcccatcagccggctggagcagtgtggcatcaatgccaatgatgtgaagaagctggaggaggccggcttccacacagtggaggccgtggcctatgcccccaagaaggagctgatcaacatcaagggcatcagcgaggccaaggctgacaagatcctggccgtggccgagagatatggcctgagcggcagtgatgtgctggacaacgtggcctatgcccgggccttcaacacagaccaccagacccagctgctgtaccaggccagcgccatgatggtggagagccgctatgccctgctgattgtggacagcgccacagccctgtacagaacagactacagcggccgcggggagctgagcgcccggcagatgcacctggcccgcttcctgaggatgctgctgcggctggctgatgaatttggagtggccgtggtgatcaccaaccaggtggtggcccaggtggatggagctgccatgtttgctgctgaccccaagaagcccatcggcggcaacatcatcgcccacgccagcaccacccggctgtacctgaggaagggccgcggggagacccgcatctgcaagatctatgacagcccctgcctgcctgaggccgaggccatgtttgccatcaatgctgatggagtgggagatgccaaggactag

SEQ ID NO: 315035 - DNA, 729 bp, Artificial Sequence
  derived and/or modified sequence
atggccatgcagatgcagctggaggccaacgccgacaccagcgtggaagaggagtcttttggtccccagccgatttctcgccttgagcagtgcggaattaacgcaaatgatgttaagaagttggaggaagcaggcttccacaccgtggaggctgtggcctacgcacccaagaaagagctgattaacatcaaaggcatctccgaggccaaagccgataaaatccttctactgagccacaggtacgggctgtcgggtagcgacgtgctggacaatgtcgcgtatgctcgtgcatttaacacagatcatcagacccagcttttatatcaggccagcgccatgatggttgagagtcgttacgccctgctgatcgttgacagcgctactgccctctaccgcactgattacagcgggcgcggagagttgtctgctagacaaatgcatctggccagattcttaaggatgttgttaaggcttgccgacgagttcggagtcgcagtggtcataactaatcaggtggtggctcaggttgatggggctgctatgttcgccgccgacccaaaaaaacctatcggcgggaatatcattgcgcacgcaagcacaactagactgtacctccgcaaagggcgtggagagacccgcatctgcaagatctacgattccccttgcctgcccgaggccgaggccatgttcgctatcaacgcagacggagtgggggacgccaaggactag

SEQ ID NO: 315036 - DNA, 729 bp, Artificial Sequence
  derived and/or modified sequence
atggccatgcagatgcagctggaggccaacgccgacaccagcgtggaggaggaatccttcggaccccagcctatctctcggctggaacagtgcggtataaacgcaaacgacgtgaagaagttagaggaggccggcttccacactgtcgaggccgtcgcatacgctccgaagaaggagcttataaacattaaggggatctcggaagcaaaagctgataagattcttgctgtggctgagcggtacggactttcaggctcagatgttctagataatgtggcatacgctcgcgcattcaataccgatcatcagacccagctactgtaccaagcctccgcaatgatggtggaatcgcgatacgctttactgatcgtcgactccgccaccgcgttgtatagaaccgactactccggccgcggcgaactgtctgccaggcagatgcacctggcgcgatttctgcgcatgttgctacggttggccgacgaattcggcgttgcggtcgtgataacgaatcaagttgtggctcaggtcgatggggcagcaatgttcgctgcggatccgaagaagcccataggcggaaacatcatcgcgcatgcgtctacaactagattgtatttgcgaaagggaaggggagagaccagaatatgtaagatttatgactccccttgcctccccgaagccgaggctatgttcgccataaacgccgatggagtcggggatgctaaagactag

SEQ ID NO: 315037 - DNA, 729 bp, Artificial Sequence
  derived and/or modified sequence
atggccatgcagatgcagctggaggcgaatgcagatacctccgtcgaagaggagtcttttggaccgcaaccaatctcgcggttggaacaatgtggcatcaacgcaaacgacgtgaaaaaactcgaggaggccggtttccacactgtggaggcagttgcatacgcccctaagaaggaactcattaacataaagggaatcagcgaagccaaagccgacaaaatcttgttactgagccataggtatggactttccggctcagatgttttggacaacgtggcatatgcgagagcgtttaataccgaccaccagacacagttgctttatcaggccagcgccatgatggtagagtcccggtatgccctcctgatcgtggacagcgccaccgctctgtacagaacggactatagcggacgcggtgagcttagcgcgcgtcagatgcacctcgcacgattcctccgtatgctgctccggttagccgacgagttcggcgtagccgttgtaatcacgaaccaagtagttgcccaggtcgatggggctgcaatgtttgccgctgatcctaagaaacccattggaggcaacatcatcgcacacgcctctacaacgaggctgtatctgcgcaagggccgaggtgagactcggatttgcaagatctacgattctccctgtttacctgaggccgaggccatgttcgccatcaatgcagacggcgtcggggacgccaaggattag

SEQ ID NO: 315038 - DNA, 729 bp, Artificial Sequence
  derived and/or modified sequence
atggccatgcagatgcaattagaagccaatgcagatacctcagtagaagaagagtccttcggcccacagcccatcagccgcctggaacagtgtgggattaacgccaacgatgtgaagaaactcgaggaagcagggttccacaccgtcgaagctgtcgcttacgcccctaagaaagaactcattaacatcaaaggaatttccgaagctaaagctgacaaaatcttggcagttgccgaaagatatggtctctccgggagcgacgtcttggacaatgtggcttacgccagagcatttaacaccgatcatcagacccaacttctgtaccaagcctccgctatgatggttgagtccagatatgccctgctcatcgtggattctgccacagcactgtatagaactgactactcaggaaggggtgaactttctgctcgccagatgcacctcgcaaggtttctgcggatgttactcagactcgctgatgagttcggcgtcgccgtagtgattactaatcaagttgtcgctcaggttgacggcgcagccatgtttgcagctgaccctaagaaacccataggagggaatatcatcgctcatgcctccaccactcggctttatttaaggaagggtcgaggggaaacccgcatatgtaaaatctacgattccccctgcctccctgaagctgaggcaatgttcgcaattaatgctgacggcgtgggcgacgccaaagactag

SEQ ID NO: 315039 - DNA, 2008 bp, Artificial Sequence
  derived and/or modified sequence
gttacgtcgacgcgggcgtgaccctgggcgagagggtttggcgggaattctgaaagccgctggcggaccgcgcgcagcggccagagaccgagccctaaggagagtgcggcgcttcccgaggcgtgcagctgggaactgcaactcatctgggttgtgcgcagaaggctggggcaagcgagtagagaagtggagcgtaagccaggggcgttgggggccgtgcgggtcgggcgcgtgccacgcccgcggggtgaagtcggagcgcggggcctgctggagagaggagcgctgcggaccgagtaatggcaatgcagatgcagcttgaagcaaatgcagatacttcagtggaagaagaaagctttggcccacaacccatttcacggttagagcagtgtggcataaatgccaacgatgtgaagaaattggaagaagctggattccatactgtggaggctgttgcctatgcgccaaagaaggagctaataaatattaagggaattagtgaagccaaagctgataaaattctgctcctctctcataggtatggtctctctggcagtgatgtcctggataatgtagcatatgctcgagcgttcaacacagaccaccagacccagctcctttatcaagcatcagccatgatggtagaatctaggtatgcactgcttattgtagacagtgccaccgccctttacagaacagactactcgggtcgaggtgagctttcagccaggcagatgcacttggccaggtttctgcggatgcttctgcgactcgctgatgagtttggtgtagcagtggtaatcactaatcaggtggtagctcaagtggatggagcagcgatgtttgctgctgatcccaaaaaacctattggaggaaatatcatcgcccatgcatcaacaaccagattgtatctgaggaaaggaagaggggaaaccagaatctgcaaaatctacgactctccctgtcttcctgaagctgaagctatgttcgccattaatgcagatggagtgggagatgccaaagactgaatcattgggtttttcctctgttaaaaaccttaagtgctgcagcctaatgagagtgcactgctccctggggttctctacaggcctcttcctgttgtgactgccaggataaagcttccgggaaaacagctattatatcagcttttctgatggtataaacaggagacaggtcagtagtcacaaactgatctaaaatgtttattccttctgtagtgtattaatctctgtgtgttttctttggttttggaggaggggtatgaagtatctttgacatggtgccttaggaatgacttgggtttaacaagctgtctactggacaatcttatgtttccaagagaactaaagctggagagacctgacccttctctcacttctaaattaatggtaaaataaaatgcctcagctatgtagcaaagggaatgggtctgcacagattctttttttctgtcagtaaaactctcaagcaggtttttaagttgtctgtctgaatgatcttgtgtaaggttttggttatggagtcttgtgccaaacctactaggccattagcccttcaccatctacctgcttggtctttcattgctaagactaactcaagataatcctagagtcttaaagcatttcaggccagtgtggtgtcttgcgcctgtactcccagcactttgggaggccgaggcaggtggatcgcttgagcccaggagttttaagtccagcttggccaaggtggtgaaatcccatctctacaaaaaatgcagaacttaatctggacacactgttacacgtgcctgtagtcccagctactcgatagcctgaggtgggagaatcacttaagcctggaaggtggaagttgcagtgagtcgagattgcactgctgcattccagccagggtgacagagtgagaccatgtttcaaacaagaaacatttcagagggtaagtaaacagatttgattgtgaggcttctaataaagtagttattagtagtgaa

SEQ ID NO: 315040 - DNA, 1397 bp, Artificial Sequence
  derived and/or modified sequence
ggaattctgaaagccgctggcggaccgcgcgcagcggccagagaccgagccctaaggagagtgcggcgcttcccgaggcgtgcagctgggaactgcaactcatctgggttgtgcgcagaaggctggggcaagcgagtagagaagtggagcgtaagccaggggcgttgggggccgtgcgggtcgggcgcgtgccacgcccgcggggtgaagtcggagcgcggggcctgctggagagaggagcgctgcggaccgagtaatggcaatgcagatgcagcttgaagcaaatgcagatacttcagtggaagaagaaagctttggcccacaacccatttcacggttagagcagtgtggcataaatgccaacgatgtgaagaaattggaagaagctggattccatactgtggaggctgttgcctatgcgccaaagaaggagctaataaatattaagggaattagtgaagccaaagctgataaaattctggcagtggctgagaggtatggtctctctggcagtgatgtcctggataatgtagcatatgctcgagcgttcaacacagaccaccagacccagctcctttatcaagcatcagccatgatggtagaatctaggtatgcactgcttattgtagacagtgccaccgccctttacagaacagactactcgggtcgaggtgagctttcagccaggcagatgcacttggccaggtttctgcggatgcttctgcgactcgctgatgagtttggtgtagcagtggtaatcactaatcaggtggtagctcaagtggatggagcagcgatgtttgctgctgatcccaaaaaacctattggaggaaatatcatcgcccatgcatcaacaaccagattgtatctgaggaaaggaagaggggaaaccagaatctgcaaaatctacgactctccctgtcttcctgaagctgaagctatgttcgccattaatgcagatggagtgggagatgccaaagactgaatcattgggtttttcctctgttaaaaaccttaagtgctgcagcctaatgagagtgcactgctccctggggttctctacaggcctcttcctgttgtgactgccaggataaagcttccgggaaaacagctattatatcagcttttctgatggtataaacaggagacaggtcagtagtcacaaactgatctaaaatgtttattccttctgtagtgtattaatctctgtgtgttttctttggttttggaggaggggtatgaagtatctttgacatggtgccttaggaatgacttgggtttaacaagctgtctactggacaatcttatgtttccaagagaactaaagctggagagacctgacccttctctcacttctaaattaatggtaaaataaaatgcctcagctatgtagcaaa

SEQ ID NO: 315041 - protein, 317 aa, Artificial Sequence
  derived and/or modified sequence
MSEGVGTFRMVPEEEQELRAQLEQLTTKDHGPVFGPCSQLPRHTLQKAKDELNEREETREEAVRELQEMVQAQAASGEELAVAVAERVQEKDSGFFLRFIRARKFNVGRAYELLRGYVNFRLQYPELFDSLSPEAVRCTIEAGYPGVLSSRDKYGRVVMLFNIENWQSQEITFDEILQAYCFILEKLLENEETQINGFCIIENFKGFTMQQAASLRTSDLRKMVDMLQDSFPARFKAIHFIHQPWYFTTTYNVVKPFLKSKLLERVFVHGDDLSGFYQEIDENILPSDFGGTLPKYDGKAVAEQLFGPQAQAENTAF

SEQ ID NO: 315042 - DNA, 954 bp, Artificial Sequence
  derived and/or modified sequence
atgtccgagggcgtgggaacctttcgtatggtgccagaagaggagcaggaactcagggcacagttggagcaattaacaacaaaggaccacggaccagttttcggaccgtgtagtcagcttccccgccacacattgcagaaggcaaaggatgagctgaatgaacgagaagagaccagagaagaagcagtgagagaactgcaagaaatggtacaggcccaggccgccagcggagaagagctggctgtcgcggtggcagagcgggtgcaggaaaaagatagtggatttttcctccggtttatcagggctcgcaaatttaacgtggggagagcctacgagcttctcagaggttatgtgaacttccgactgcaatatccagagctgttcgacagtctctccccagaagccgtgcgatgtacaatcgaggcaggatatccaggcgtcttatctagccgtgacaaatatggccgcgtggtgatgctcttcaacatcgaaaattggcagagtcaggaaattacattcgatgagatattgcaggcttattgctttatactggagaaactgctggagaatgaggaaactcagatcaatggattttgcataattgagaattttaagggattcaccatgcaacaggcggcgtccctgcgcacctcagaccttcggaagatggtagatatgttgcaagattcctttcccgccaggttcaaggctatccattttatccaccaaccctggtacttcacaaccacctacaacgtcgttaagccgtttttaaaatcgaagctcttggaacgggtgtttgtgcacggggatgatctcagtggattctaccaggagattgacgaaaacatcctacctagtgactttggaggcacgctcccaaagtatgacggtaaagcagtggcagaacagctgtttggaccacaggcccaggctgagaacactgctttttag

SEQ ID NO: 315043 - DNA, 954 bp, Artificial Sequence
  derived and/or modified sequence
atgtctgagggcgtgggcaccttcaggatggtgcctgaggaggagcaggagctgcgggcccagctggagcagctgaccaccaaggaccacggccctgtgtttggcccctgcagccagctgcccaggcacaccctgcagaaggccaaggatgagctgaatgaaagagaggagacccgggaggaggccgtgcgggagctgcaggagatggtgcaggcccaggccgccagcggggaggagctggccgtggccgtggccgagcgggtgcaggagaaggacagcggcttcttcctgcgcttcatccgggccaggaagttcaacgtgggccgggcctatgagctgctgcggggctacgtgaacttccggctgcagtacccagagctgtttgacagcctgagccctgaggccgtgcgctgcaccatcgaggccggctacccaggagtgctgagcagccgggacaagtatggccgggtggtgatgctgttcaacatcgagaactggcagagccaggagatcacctttgatgagatcctgcaggcctactgcttcatcctggagaagctgctggagaatgaggagacccagatcaatggcttctgcatcatcgagaacttcaagggcttcaccatgcagcaggccgccagcctgcggaccagtgacctgaggaagatggtggacatgctgcaggacagcttccctgcccgcttcaaggccatccacttcatccaccagccctggtacttcaccaccacctacaacgtggtgaagcccttcctgaagagcaagctgctggagcgggtgtttgtgcatggagatgacctgagcggcttctaccaggagattgatgagaacatcctgcccagcgactttggaggcaccctgcccaagtatgatggcaaggctgtggccgagcagctgtttggcccccaggcccaggctgaaaatacagccttctag

SEQ ID NO: 315044 - DNA, 954 bp, Artificial Sequence
  derived and/or modified sequence
atgagcgagggcgtgggcaccttccggatggtgcccgaggaggagcaggagcttcgcgcgcagctcgagcaactgacaacgaaggaccatggtcctgtgtttggcccctgttcacaactgcccagacacactctccaaaaggccaaagacgagctgaatgaacgagaggaaactcgtgaggaggccgtgcgggagctgcaggagatggtgcaggcacaggctgccagcggcgaagaactggctgtagctgtcgccgagcgcgtccaggaaaaggactccgggtttttcttgaggtttattagagccagaaaattcaatgtaggccgcgcctacgaacttctacgtgggtatgtgaacttcagactgcagtatccggagctcttcgattcactgtctccggaggccgtgcgatgcactattgaagccgggtatccgggtgtacttagtagcagagataaatacggtagagtagtgatgctgttcaacatcgaaaactggcagagccaggaaatcacattcgacgaaatcctgcaggcctactgtttcattttggagaagttgttagagaacgaggagacgcagattaacggcttctgtatcattgagaactttaagggatttaccatgcagcaggctgcttcgctgcgcacgtctgatctgaggaaaatggtggacatgctccaggatagcttccccgcccgtttcaaagcgatacatttcatccaccagccatggtacttcaccacaacctacaacgtggtaaagcctttcctgaagagcaagctcctggaaagggtgtttgtccacggagatgacctgagcggtttctatcaggagatcgacgagaacatcttgccctccgacttcggcggtactttaccaaaatatgatggcaaagccgtcgctgagcagctgtttgggcctcaggctcaggccgagaataccgccttctag

SEQ ID NO: 315045 - DNA, 954 bp, Artificial Sequence
  derived and/or modified sequence
atgtcggaaggggtgggtaccttccggatggtgcccgaagaagagcaggagctccgggctcagctggagcagctgaccacaaaggatcacggccctgtattcgggccatgctctcagctgccacgccacactcttcagaaagccaaggacgaacttaacgagagggaggaaacccgagaagaagctgtaagggagctgcaggaaatggtacaagcacaggctgccagtggggaggaactggccgtggcagtcgcggaaagggtgcaggagaaggattctggcttcttcctccgatttataagagcccgtaaatttaacgtcggcagagcttacgagctcctgagaggatacgtgaactttcgcctgcagtatcctgaattgtttgactctctgagtcccgaggcggtgaggtgtacaatcgaggcaggttaccctggggtgctaagtagcagggataagtacggaagggtggtgatgctgtttaacattgaaaattggcagtctcaggagatcaccttcgacgagattctgcaggcttactgctttatccttgaaaaactcctggaaaatgaggagacgcagataaacgggttttgtataatagaaaattttaaagggttcactatgcaacaagccgcttctctcagaacttccgatctcagaaagatggttgatatgttgcaagattccttccctgctcggtttaaggcgatacatttcatacaccagccgtggtactttaccactacgtataatgtagtgaaaccattcttaaaatcgaagctcctcgagcgggtttttgtgcatggcgatgatctttccggattttatcaggagatcgacgagaacattctcccttctgatttcggagggaccctgccaaaatatgatgggaaggctgtcgcggaacagttatttggcccacaagcccaggccgagaacacagccttttag

SEQ ID NO: 315046 - DNA, 1752 bp, Artificial Sequence
  derived and/or modified sequence
gagcccgatttaacggaaactgtgggcggtgagaagttccttatgacacactaatcccaacctgctgaccggaccacgcctccagcggagggaacctctagagctccaggacattcaggtaccaggtagccccaaggaggagctgccgacctggcagggaacaaccaagactggggttaaatctcacagcctgcaagtggaagagaagaacttgaacccaggtccaacttttgcgccacagcaggctgcctcttggtcctgacaggaagtcacaacttggccctgacttcctatcctagggaaggggccggctggagaggccaggacagagaaagcagatcccttctttttccaaggactctgtgtcttccataggcaacatgtcagaaggggtgggcacgttccgcatggtacctgaagaggaacaggagctccgtgcccaactggagcagctcacaaccaaggaccatggacctgtctttggcccgtgcagccagctgccccgccacaccttgcagaaggccaaggatgagctgaacgagagagaggagacccgggaggaggcagtgcgagagctgcaggagatggtgcaggcgcaggcggcctcgggggaggagctggcggtggccgtggcggagagggtgcaagagaaggacagcggcttcttcctgcgcttcatccgcgcacggaagttcaacgtgggccgtgcctatgagctgctcagaggctatgtgaatttccggctgcagtaccctgagctctttgacagcctgtccccagaggctgtccgctgcaccattgaagctggctaccctggtgtcctctctagtcgggacaagtatggccgagtggtcatgctcttcaacattgagaactggcaaagtcaagaaatcacctttgatgagatcttgcaggcatattgcttcatcctggagaagctgctggagaatgaggaaactcaaatcaatggcttctgcatcattgagaacttcaagggctttaccatgcagcaggctgctagtctccggacttcagatctcaggaagatggtggacatgctccaggattccttcccagcccggttcaaagccatccacttcatccaccagccatggtacttcaccacgacctacaatgtggtcaagcccttcttgaagagcaagctgcttgagagggtctttgtccacggggatgacctttctggtttctaccaggagatcgatgagaacatcctgccctctgacttcgggggcacgctgcccaagtatgatggcaaggccgttgctgagcagctctttggcccccaggcccaagctgagaacacagccttctgaaaacatctcctgccagctgaactgtagttagaatctctgggcctctcctcaactgtcctggacccaaggctaggaaagggctgcttgagatgactgtggtccccccttagactccctaagcccgagtgagctcaggtgtcaccctgttctcaagttgggggatgggtaataaaggagggggaattcccttgaacaagaagaactggggatagttatatttccacctgcccttgaagctttaagacagtgatttttgtgtaaggttgtatttcaaagactcgaattcattttctcagtcatttcctttgtaacagagttttacgacttagagtctgtgaaaacaggcaaggagcccgggttaaaatatccccctattcgcccccaaaatgcaataaaagaagataaaagagagaggata

SEQ ID NO: 315047 - DNA, 954 bp, Artificial Sequence
  derived and/or modified sequence
atgagcgagggcgtgggcaccttcagaatggtgcccgaggaggagcaggagctgagagcccagctggagcagctgaccaccaaggaccacggccccgtgttcggcccctgcagccagctgcccagacacaccctgcagaaggccaaggacgagctgaacgagagagaggagaccagagaggaggccgtgagagagctgcaggagatggtgcaggcccaggccgccagcggcgaggagctggccgtggccgtggccgagagagtgcaggagaaggacagcggcttcttcctgagattcatcagagccagaaagttcaacgtgggcagagcctacgagctgctgagaggctacgtgaacttcagactgcagtaccccgagctgttcgacagcctgagccccgaggccgtgagatgcaccatcgaggccggctaccccggcgtgctgagcagcagagacaagtacggcagagtggtgatgctgttcaacatcgagaactggcagagccaggagatcaccttcgacgagatcctgcaggcctactgcttcatcctggagaagctgctggagaacgaggagacccagatcaacggcttctgcatcatcgagaacttcaagggcttcaccatgcagcaggccgccagcctgagaaccagcgacctgagaaagatggtggacatgctgcaggacagcttccccgccagattcaaggccatccacttcatccaccagccctggtacttcaccaccacctacaacgtggtgaagcccttcctgaagagcaagctgctggagagagtgttcgtgcacggcgacgacctgagcggcttctaccaggagatcgacgagaacatcctgcccagcgacttcggcggcaccctgcccaagtacgacggcaaggccgtggccgagcagctgttcggcccccaggcccaggccgagaacaccgccttctag

SEQ ID NO: 315048 - DNA, 592 bp, Artificial Sequence
  derived and/or modified sequence
gcggactatgacttagttgcgttacaccctttcttgacaaaacctaacttgcgcagaaaacaagatgagattggcatggctttatttgttttttttgttttgttttggttttttttttttttttggcttgactcaggatttaaaaactggaacggtgaaggtgacagcagtcggttggagcgagcatcccccaaagttcacaatgtggccgaggactttgattgcacattgttgtttttttaatagtcattccaaatatgagatgcgttgttacaggaagtcccttgccatcctaaaagccaccccacttctctctaaggagaatggcccagtcctctcccaagtccacacaggggaggtgatagcattgctttcgtgtaaattatgtaatgcaaaatttttttaatcttcgccttaatacttttttattttgttttattttgaatgatgagccttcgtgcccccccttcccccttttttgtcccccaacttgagatgtatgaaggcttttggtctccctgggagtgggtggaggcagccagggcttacctgtacactgacttgagaccagttgaataaaagtgcacacctt

SEQ ID NO: 315049 - protein, 599 aa, Artificial Sequence
  derived and/or modified sequence
MLVRRRQLWPDCVRGRPGLPSPVDFLAGDRPRAVPAAVFMVLLSSLCLLLPDEDALPFLTLASAPSQDGKTEAPRGAWKILGLFYYAALYYPLAACATAGHTAAHLLGSTLSWAHLGVQVWQRAECPQVPKIYKYYSLLASLPLLLGLGFLSLWYPVQLVRSFSRRTGAGSKGLQSSYSEEYLRNLLCRKKLGSSYHTSKHGFLSWARVCLRHCIYTPQPGFHLPLKLVLSATLTGTAIYQVALLLLVGVVPTIQKVRAGVTTDVSYLLAGFGIVLSEDKQEVVELVKHHLWALEVCYISALVLSCLLTFLVLMRSLVTHRTNLRALHRGAALDLSPLHRSPHPSRQAIFCWMSFSAYQTAFICLGLLVQQIIFFLGTTALAFLVLMPVLHGRNLLLFRSLESSWPFWLTLALAVILQNMAAHWVFLETHDGHPQLTNRRVLYAATFLLFPLNVLVGAMVATWRVLLSALYNAIHLGQMDLSLLPPRAATLDPGYYTYRNFLKIEVSQSHPAMTAFCSLLLQAQSLLPRTMAAPQDSLRPGEEDEGMQLLQTKDSMAKGARPGASRGRARWGLAYTLLHNPTLQVFRKTALLGANGAQP

SEQ ID NO: 315050 - DNA, 2004 bp, Artificial Sequence
  derived and/or modified sequence
atgagcagccagcccgccggcaaccagaccagccccggcgccaccgaggactacagctacggcagctggtacatcgacgagccccagggcggcgaggagctgcagcccgagggcgaggtgcccagctgccacaccagcatcccccccggcctgtaccacgcctgcctggccagcctgagcatcctggtgctgctgctgctggccatgctggtgagaagaagacagctgtggcccgactgcgtgagaggcagacccggcctgcccagccccgtggacttcctggccggcgacagacccagagccgtgcccgccgccgtgttcatggtgctgctgagcagcctgtgcctgctgctgcccgacgaggacgccctgcccttcctgaccctggccagcgcccccagccaggacggcaagaccgaggcccccagaggcgcctggaagatcctgggcctgttctactacgccgccctgtactaccccctggccgcctgcgccaccgccggccacaccgccgcccacctgctgggcagcaccctgagctgggcccacctgggcgtgcaggtgtggcagagagccgagtgcccccaggtgcccaagatctacaagtactacagcctgctggccagcctgcccctgctgctgggcctgggcttcctgagcctgtggtaccccgtgcagctggtgagaagcttcagcagaagaaccggcgccggcagcaagggcctgcagagcagctacagcgaggagtacctgagaaacctgctgtgcagaaagaagctgggcagcagctaccacaccagcaagcacggcttcctgagctgggccagagtgtgcctgagacactgcatctacaccccccagcccggcttccacctgcccctgaagctggtgctgagcgccaccctgaccggcaccgccatctaccaggtggccctgctgctgctggtgggcgtggtgcccaccatccagaaggtgagagccggcgtgaccaccgacgtgagctacctgctggccggcttcggcatcgtgctgagcgaggacaagcaggaggtggtggagctggtgaagcaccacctgtgggccctggaggtgtgctacatcagcgccctggtgctgagctgcctgctgaccttcctggtgctgatgagaagcctggtgacccacagaaccaacctgagagccctgcacagaggcgccgccctggacctgagccccctgcacagaagcccccaccccagcagacaggccatcttctgctggatgagcttcagcgcctaccagaccgccttcatctgcctgggcctgctggtgcagcagatcatcttcttcctgggcaccaccgccctggccttcctggtgctgatgcccgtgctgcacggcagaaacctgctgctgttcagaagcctggagagcagctggcccttctggctgaccctggccctggccgtgatcctgcagaacatggccgcccactgggtgttcctggagacccacgacggccacccccagctgaccaacagaagagtgctgtacgccgccaccttcctgctgttccccctgaacgtgctggtgggcgccatggtggccacctggagagtgctgctgagcgccctgtacaacgccatccacctgggccagatggacctgagcctgctgccccccagagccgccaccctggaccccggctactacacctacagaaacttcctgaagatcgaggtgagccagagccaccccgccatgaccgccttctgcagcctgctgctgcaggcccagagcctgctgcccagaaccatggccgccccccaggacagcctgagacccggcgaggaggacgagggcatgcagctgctgcagaccaaggacagcatggccaagggcgccagacccggcgccagcagaggcagagccagatggggcctggcctacaccctgctgcacaaccccaccctgcaggtgttcagaaagaccgccctgctgggcgccaacggcgcccagccctag

SEQ ID NO: 315051 - DNA, 1800 bp, Artificial Sequence
  derived and/or modified sequence
atgctggtgagaagaagacagctgtggcccgactgcgtgagaggcagacccggcctgcccagccccgtggacttcctggccggcgacagacccagagccgtgcccgccgccgtgttcatggtgctgctgagcagcctgtgcctgctgctgcccgacgaggacgccctgcccttcctgaccctggccagcgcccccagccaggacggcaagaccgaggcccccagaggcgcctggaagatcctgggcctgttctactacgccgccctgtactaccccctggccgcctgcgccaccgccggccacaccgccgcccacctgctgggcagcaccctgagctgggcccacctgggcgtgcaggtgtggcagagagccgagtgcccccaggtgcccaagatctacaagtactacagcctgctggccagcctgcccctgctgctgggcctgggcttcctgagcctgtggtaccccgtgcagctggtgagaagcttcagcagaagaaccggcgccggcagcaagggcctgcagagcagctacagcgaggagtacctgagaaacctgctgtgcagaaagaagctgggcagcagctaccacaccagcaagcacggcttcctgagctgggccagagtgtgcctgagacactgcatctacaccccccagcccggcttccacctgcccctgaagctggtgctgagcgccaccctgaccggcaccgccatctaccaggtggccctgctgctgctggtgggcgtggtgcccaccatccagaaggtgagagccggcgtgaccaccgacgtgagctacctgctggccggcttcggcatcgtgctgagcgaggacaagcaggaggtggtggagctggtgaagcaccacctgtgggccctggaggtgtgctacatcagcgccctggtgctgagctgcctgctgaccttcctggtgctgatgagaagcctggtgacccacagaaccaacctgagagccctgcacagaggcgccgccctggacctgagccccctgcacagaagcccccaccccagcagacaggccatcttctgctggatgagcttcagcgcctaccagaccgccttcatctgcctgggcctgctggtgcagcagatcatcttcttcctgggcaccaccgccctggccttcctggtgctgatgcccgtgctgcacggcagaaacctgctgctgttcagaagcctggagagcagctggcccttctggctgaccctggccctggccgtgatcctgcagaacatggccgcccactgggtgttcctggagacccacgacggccacccccagctgaccaacagaagagtgctgtacgccgccaccttcctgctgttccccctgaacgtgctggtgggcgccatggtggccacctggagagtgctgctgagcgccctgtacaacgccatccacctgggccagatggacctgagcctgctgccccccagagccgccaccctggaccccggctactacacctacagaaacttcctgaagatcgaggtgagccagagccaccccgccatgaccgccttctgcagcctgctgctgcaggcccagagcctgctgcccagaaccatggccgccccccaggacagcctgagacccggcgaggaggacgagggcatgcagctgctgcagaccaaggacagcatggccaagggcgccagacccggcgccagcagaggcagagccagatggggcctggcctacaccctgctgcacaaccccaccctgcaggtgttcagaaagaccgccctgctgggcgccaacggcgcccagccctag

SEQ ID NO: 315052 - DNA, 2004 bp, Artificial Sequence
  derived and/or modified sequence
atgtcctcccagccggccggcaatcagacctcacccggggctacggaggattattcctacggctcctggtatatagacgagcctcagggaggggaagaactgcagcctgaaggagaggtgccgtcatgtcacacatccatccctcctggcctgtaccacgcttgtttagcttcattgtctattcttgtgcttctacttctagccatgctcgttcggcgacgccaactctggccagactgtgtgcgcggcaggcctggcctgccatcccctgtggacttcttggcgggggaccggcccagggccgtcccagccgcagtgttcatggtgctgctcagttcactttgtctgcttctccctgacgaagatgccctgccttttcttacactggcctctgccccttctcaggatggcaaaacagaggcacctcggggcgcctggaagatcctgggcctgttctattatgcagccctgtattatccactggcagcctgtgcgactgcggggcacaccgccgcccatctcctgggttccactttgtcctgggcccacctgggcgttcaggtctggcagagagccgaatgcccccaggtgcccaagatatacaagtactactcactgctcgccagcctgcctttgctactcggcttaggatttttgtccctgtggtatcctgtgcagcttgtcaggagcttctccaggaggacgggggcaggctcaaagggcctgcaatcgtcttacagcgaggaatacttgagaaatctattatgccgcaagaagctggggagtagctaccatacatctaaacatggattcttaagttgggcacgcgtgtgtctgcgccattgtatttacacaccgcaacccgggtttcatcttccactgaaactggtgctttcagctactctcactggaaccgccatctaccaagtcgcactgctacttctggtgggcgtcgtgcccactatccagaaggtaagggcaggagtgactacagatgtctcctacctcctggcaggtttcggcattgtgctcagcgaggacaaacaggaggttgtggaactcgtgaaacatcacctgtgggcattagaggtgtgctacatctctgcgctagtgctgagctgcctcctcacctttcttgtgcttatgaggtcccttgtgacgcacaggaccaacttaagagcgctccacaggggggcagcattggatctcagtccccttcatcgaagtccacatccctctaggcaagccattttttgctggatgagttttagcgcgtaccaaaccgcctttatttgccttggactgctcgttcagcagatcatcttctttcttggcactaccgcccttgcgttcttggtcttgatgccggtactgcacgggagaaatctgctcctatttcggagtctggaatcctcatggccgttctggctgacattagccctagcagtcattctgcaaaatatggccgcccattgggtgtttctcgagacccatgatggacacccacagctcactaacagacgggtgctctatgctgcaacctttctgctgttccctttgaatgtgctcgtgggagccatggtggctacctggcgggtcctgctgagcgccctgtacaacgccatacaccttggccaaatggatctttctctgcttccacccagagccgccactctcgacccaggttactacacctaccgtaattttctgaagattgaagtttcacagtcccatcctgctatgaccgctttttgcagtctcttgcttcaggcccagagtctcctgccacgcacaatggccgccccacaagacagtctcagacccggcgaagaggacgaaggaatgcagctgttgcaaacaaaggacagcatggcaaaaggggcccggcccggcgcctctagaggcagagcgcgctggggattagcttacacactgttacacaacccgactctccaggtgtttcgcaagaccgccctgctcggtgcgaacggggcgcagccatag

SEQ ID NO: 315053 - DNA, 2004 bp, Artificial Sequence
  derived and/or modified sequence
atgagtagccagccggcggggaatcagacctctcccggggcgactgaggactattcctatggttcatggtacattgatgaaccccaggggggcgaagagctccagcccgaaggggaagtgccaagctgtcacacaagcatcccccccggactgtaccacgcctgtttagcctctttatctatcctggtcctgcttctgttggccatgttagtgagacgtaggcagctgtggccagattgcgtgcgtggaaggcccgggctcccttctccggtggatttcctggcaggagacagacctcgagcggtgccggccgctgttttcatggtgttgctcagcagtctgtgtttactcttaccagatgaggacgccttacctttccttaccctggcgagcgccccatcccaggacggcaagacagaggctccgcgaggggcttggaaaatcctcggactgttctattacgctgccctgtattatcctctggccgcttgtgcaactgccggacacaccgcagcccaccttctgggctctacactgagctgggcccatctcggtgtgcaggtgtggcaaagggccgagtgcccacaggtgcccaagatttacaagtactattctctgttggcgtccctcccattactgctcggcttggggttcctgtcactatggtacccagtccaactggtccgttccttctcccgccgaacaggggctgggagcaaaggactgcagtcatcctattctgaggaatacctgagaaacctgctatgtaggaaaaaactgggtagcagctaccacacttccaagcacggttttttgtcctgggccagggtgtgtctgagacattgcatttacactccccagccgggttttcaccttccgctaaaactggtactgtctgccactttgactgggactgctatctaccaagttgccttactccttctagtgggagtggtgccaactatccagaaggttcgggccggggtcaccaccgatgtgtcctatcttctggccggcttcggtatagtgctgagcgaggataaacaggaagtggtcgaacttgtgaaacatcacttatgggctttggaagtctgctacatctctgcacttgtgttatcctgtcttctgacattcctagtgctgatgcgctcactagtaacccatagaacgaacttaagggccctgcaccgaggtgctgcactcgacctctcccccctccatagatccccacatccttccaggcaggcaattttctgttggatgtcatttagcgcataccagaccgccttcatttgccttggcctcctcgtccagcaaatcattttctttcttgggaccacagctctcgctttcctcgtcctgatgccagtgctacatggccggaacctattactcttccgcagcctggagtccagttggcctttttggcttacgttggctctcgctgtgatcctccagaacatggccgctcattgggtgtttctcgagactcacgacgggcatcctcagttaacaaacaggcgggtgttgtacgcagctaccttcctactattccctcttaatgtactggttggtgctatggttgccacttggagagttctcctttctgccctttacaacgccatacacttggggcaaatggacttgtctttgctgccccctagggctgctactttggacccaggatactacacctaccgaaactttttaaagattgaggtgagccagtcacatcccgccatgacagctttctgctctcttctgttgcaagcacagtccctgctgccgcgtacaatggcagccccccaggattctctgcggccaggggaggaggacgagggaatgcagctgcttcagaccaaagattctatggcgaagggtgctagacccggtgcatctcgcggcagagcaagatggggactcgcctataccctgcttcataaccccactctccaggtgttccgcaagacagcccttttaggggccaatggagcccagccctag

SEQ ID NO: 315054 - DNA, 1800 bp, Artificial Sequence
  derived and/or modified sequence
atgctggttcgaaggagacagctatggccagactgtgtgaggggtcggccaggcctgcccagcccggtagatttcttggccggagacagaccccgggcagtccccgcagctgttttcatggttctcctctcgtccctgtgtctgctcctgccagacgaagatgcactgccattcctcaccctcgcatccgccccatcacaagatggtaagactgaagcgccacgcggcgcttggaaaatcctgggcttattttattacgcagctctgtactatccactagctgcctgtgctactgcaggccatactgctgcccatctgttaggctctacactgagctgggctcacctcggcgtccaggtttggcagcgggcagaatgcccccaggtccctaaaatctataagtactattctttactggccagccttcccttattgctggggttgggcttcctgtccctgtggtatccagtgcagcttgtgcggtccttctcacggagaactggcgcaggaagcaagggactgcagtcaagctacagcgaagagtacttgcgaaatctcttgtgcagaaagaaactgggcagcagctaccacaccagcaagcacggttttctctcgtgggctcgagtctgcctcagacattgtatctatacaccacagcccgggttccacctcccactgaaattggtgctctcagcgacccttaccgggaccgccatctaccaggtagcacttctgctgcttgtcggcgtagttcccaccatccaaaaagtgagggccggtgttactacggatgtatcttatctgttggccggatttggtatagtgctcagcgaggataagcaggaagtcgtcgagcttgttaagcaccacttatgggcgctggaagtctgctacattagcgctctggtgcttagttgtctcctgaccttcctggttctgatgcggtctcttgtcacacacaggactaatttacgtgcgctccaccgaggagccgctctggatcttagccctcttcaccgctccccacacccgtccaggcaggctattttctgttggatgagttttagcgcgtatcagactgccttcatctgcctggggctgctcgtgcaacaaatcatcttttttctggggaccaccgctttggcctttttagtgttgatgcccgtactgcatggtaggaacttactgctgttccggtccctggagtcctcttggcctttctggctgaccctagccctggcagtcatcttacaaaatatggcggctcattgggttttcctggaaactcacgacggccaccctcagcttactaaccgccgcgtgctgtacgccgcaaccttcctcttgttccctctaaatgttcttgttggggccatggtggccacctggcgtgtgctgctgtccgcactttacaatgccatccacttgggccagatggatctcagcctgctcccaccgcgcgcagctactttggaccctggatattacacttacaggaatttcctgaaaattgaagtgagtcagagtcacccagcaatgaccgccttctgctctcttctgctgcaggcccaaagcctacttccgcggaccatggctgcaccacaagatagtttacgtccaggggaagaagacgaaggcatgcagctcctgcaaacgaaggactcaatggcaaaaggcgcacgccccggcgcgagtcgaggacgtgcacgttggggtcttgcttacacactgctgcacaaccccaccctgcaagtgtttcgcaaaacggctcttttgggggcaaacggcgcgcagccctag

SEQ ID NO: 315055 - DNA, 2004 bp, Artificial Sequence
  derived and/or modified sequence
atgagcagccagcctgctggcaaccagaccagccctggggccacagaggactacagctatggctcctggtacattgatgagccccagggcggggaggagctgcagcctgagggggaggtgcccagctgccacaccagcatccccccaggcctgtaccacgcctgcctggccagcctgagcatcctggtgctgctgctgctggccatgctggtgagaagacggcagctgtggccagactgtgtgcggggccggcccggcctgcccagccctgtggacttcctggccggggaccggcccagggctgtgcctgctgctgtgttcatggtgctgctgagcagcctgtgcctgctgctgcctgatgaagatgccctgcccttcctgaccctggccagcgcccccagccaggacggcaagacagaggcccccaggggggcctggaagatcctgggcctcttctactatgctgccctgtactaccccctggccgcctgtgccacagctggccacacagctgcccacctgctgggcagcaccctgtcctgggcccacctgggcgtgcaggtgtggcagagagcagaatgtccccaggtgcccaagatctacaagtactacagcctgctggccagcctgcccctgctgctgggcctgggcttcctgagcctgtggtaccctgtgcagctggtgcgctccttcagcagaagaactggagctggcagcaagggcctgcagagcagctacagcgaggagtacctgaggaacctgctgtgcaggaagaagctgggcagcagctaccacaccagcaagcacggcttcctgtcctgggcccgggtgtgcctgcggcactgcatctacaccccccagcccggcttccacctgcccctgaagctggtgctgagcgccaccctgactggaacagccatctaccaggtggccctgctgctgctggtgggcgtggtgcccaccatccagaaggtgcgggccggcgtgaccacagatgtgtcctacctgctggccggcttcggcatcgtgctgtctgaggacaagcaggaggtggtggagctggtgaagcaccacctgtgggccctggaggtgtgctacatcagcgccctggtgctgagctgcctgctgaccttcctggtgctgatgaggagcctggtgacccacaggaccaacctgcgggccctgcacagaggagctgccctggacctgagccccctgcacaggagcccccaccccagccggcaggccatcttctgctggatgtccttcagcgcctaccagacagccttcatctgcctgggcctgctggtgcagcagatcatcttcttcctgggcaccacagccctggccttcctggtgctgatgcctgtgctgcatggaagaaacctgctgctcttccgcagcctggagagctcctggcccttctggctgaccctggccctggccgtcatcctgcagaacatggccgcccactgggtgttcctggagacccatgatggccacccccagctgaccaacagaagagtgctgtatgctgccaccttcctgctcttccccctgaatgtgctggtgggcgccatggtggccacctggagggtgctgctgagcgccctgtacaatgccatccacctgggccagatggacctgagcctgctgcccccccgggccgccaccctggaccccggctactacacctacagaaacttcctgaagattgaggtgtcccagagccacccagccatgacagccttctgcagcctgctgctgcaggcccagagcctgctgcccaggaccatggccgccccccaggacagcctgcggcctggagaagaagatgagggcatgcagctgctgcagaccaaggacagcatggccaagggggcccggcctggggccagccggggccgggcccgctggggcctggcctacaccctgctgcacaaccccaccctgcaggtgttcaggaagacagccctgctgggcgccaatggagcccagccctag

SEQ ID NO: 315056 - DNA, 1800 bp, Artificial Sequence
  derived and/or modified sequence
atgctggtgagaagacggcagctgtggccagactgtgtgcggggccggcccggcctgcccagccctgtggacttcctggccggggaccggcccagggctgtgcctgctgctgtgttcatggtgctgctgagcagcctgtgcctgctgctgcctgatgaagatgccctgcccttcctgaccctggccagcgcccccagccaggacggcaagacagaggcccccaggggggcctggaagatcctgggcctcttctactatgctgccctgtactaccccctggccgcctgtgccacagctggccacacagctgcccacctgctgggcagcaccctgtcctgggcccacctgggcgtgcaggtgtggcagagagcagaatgtccccaggtgcccaagatctacaagtactacagcctgctggccagcctgcccctgctgctgggcctgggcttcctgagcctgtggtaccctgtgcagctggtgcgctccttcagcagaagaactggagctggcagcaagggcctgcagagcagctacagcgaggagtacctgaggaacctgctgtgcaggaagaagctgggcagcagctaccacaccagcaagcacggcttcctgtcctgggcccgggtgtgcctgcggcactgcatctacaccccccagcccggcttccacctgcccctgaagctggtgctgagcgccaccctgactggaacagccatctaccaggtggccctgctgctgctggtgggcgtggtgcccaccatccagaaggtgcgggccggcgtgaccacagatgtgtcctacctgctggccggcttcggcatcgtgctgtctgaggacaagcaggaggtggtggagctggtgaagcaccacctgtgggccctggaggtgtgctacatcagcgccctggtgctgagctgcctgctgaccttcctggtgctgatgaggagcctggtgacccacaggaccaacctgcgggccctgcacagaggagctgccctggacctgagccccctgcacaggagcccccaccccagccggcaggccatcttctgctggatgtccttcagcgcctaccagacagccttcatctgcctgggcctgctggtgcagcagatcatcttcttcctgggcaccacagccctggccttcctggtgctgatgcctgtgctgcatggaagaaacctgctgctcttccgcagcctggagagctcctggcccttctggctgaccctggccctggccgtcatcctgcagaacatggccgcccactgggtgttcctggagacccatgatggccacccccagctgaccaacagaagagtgctgtatgctgccaccttcctgctcttccccctgaatgtgctggtgggcgccatggtggccacctggagggtgctgctgagcgccctgtacaatgccatccacctgggccagatggacctgagcctgctgcccccccgggccgccaccctggaccccggctactacacctacagaaacttcctgaagattgaggtgtcccagagccacccagccatgacagccttctgcagcctgctgctgcaggcccagagcctgctgcccaggaccatggccgccccccaggacagcctgcggcctggagaagaagatgagggcatgcagctgctgcagaccaaggacagcatggccaagggggcccggcctggggccagccggggccgggcccgctggggcctggcctacaccctgctgcacaaccccaccctgcaggtgttcaggaagacagccctgctgggcgccaatggagcccagccctag

SEQ ID NO: 315057 - DNA, 2004 bp, Artificial Sequence
  derived and/or modified sequence
atgagcagccagcccgccggcaaccagaccagccccggcgccaccgaagactactcttatggctcctggtatatcgacgaacctcaagggggagaagagctgcagcctgagggggaagtgcccagttgccacacatctatcccaccagggttatatcatgcctgcttggccagtctttctatattggtcctactgctgctggctatgctggtaaggcgaaggcagctatggccagactgcgtgcgcggccggcccggtctcccctcccctgtggactttctggccggcgaccgcccccgggcggtgcctgcggcagttttcatggtgctgctgtccagtttgtgtctgctgttgcccgatgaggacgcacttccttttttgacgctcgcatccgcgccttcccaggacggcaagactgaggccccccgaggggcgtggaaaattcttgggcttttttactatgctgcgctctactaccctctggccgcctgcgccactgctggtcatactgcagctcacctgttaggctctacgttaagttgggcacatctgggagtacaagtttggcagagggccgagtgtccccaggtgcctaagatctacaagtattactcactcctggcttctctgccactattgctggggctcggctttctgtctctctggtatccagtacagctggtcagatccttttctaggagaactggggctgggtcgaaaggtttgcagtccagctatagtgaggaatatctgagaaacttactgtgcagaaagaagctcggcagctcttatcacacttctaaacacggctttctgtcctgggccagggtgtgcctgagacactgtatatataccccacagcccggttttcatttgccactgaagctggttctgtccgccacactcactgggacagccatatatcaggtggctctgcttctgctggtgggcgtggttccaactattcagaaagtcagggccggggtgacaaccgatgtcagctatctgctcgcaggtttcggtatcgtcctgtccgaagacaagcaggaggtggtagagctcgtgaagcaccacttgtgggcccttgaagtgtgctatatctctgcccttgtgctgtcctgtttactgacttttctggtgctgatgcggtccctggtgacgcatcgaacaaacttgcgggccctgcataggggggcagctctggaccttagtcccttacatagatccccacaccccagtcggcaagcaatcttttgctggatgagcttttcagcctaccaaaccgccttcatatgcctcgggttactcgtgcagcagatcatattcttcctcgggactacagccctggccttcctggtgctcatgccagttctccatgggagaaacctcctgttattcaggagcctcgaatcttcctggccattctggttgacactggccctcgcagtgatactgcaaaacatggccgctcattgggtgttcctcgagacccacgatggtcatcctcagttgacgaacaggcgagtgttgtatgccgctacatttcttctgtttcctctaaacgtgctggtcggcgccatggtcgctacatggagggtcttgttatctgctttgtataacgctatccacctcggccagatggacctatccttgttaccccctcgtgccgctactcttgatcccggttattacacttatcgaaacttcctgaaaatagaggtgtcgcagagccacccggcaatgactgcattctgctctctgctccttcaggcccagtcactcctgccccggaccatggcggcaccacaggactcacttcgccccggtgaggaagatgagggtatgcagctgctgcagaccaaagattctatggccaaaggcgcgcggccaggggcctcccgcggccgagctaggtggggcctcgcttacacactgctgcacaaccctacactacaggtgtttcggaagacggcgcttctcggtgccaatggagcacagccatag

SEQ ID NO: 315058 - DNA, 2004 bp, Artificial Sequence
  derived and/or modified sequence
atgagcagccagcccgccggcaaccagaccagccccggcgccaccgaggactattcttacggctcttggtatatcgacgagcctcagggcggcgaggagctgcagcccgagggagaggttccgtcatgtcatacaagcattcctccggggttgtatcatgcgtgcttggccagtctctctatattggtgcttctcctgctggctatgctcgttagacggcgccaactctggcctgattgtgttaggggacgacctggactgccctcccctgtcgacttccttgccggcgatcggcctagagccgttcctgcagcagtgttcatggtcctgctgagcagtctgtgtctgcttctacctgacgaagatgccctcccctttcttacccttgcatctgcgccgagccaggacggaaaaactgaagctccaaggggagcttggaaaatacttggccttttttattacgccgccctttattacccactagccgcctgtgcaacagccggacacacagccgcgcacctcctcgggtcgaccctatcctgggctcacctaggtgttcaggtgtggcagagggccgaatgcccgcaggtaccgaagatctacaaatactactctttactcgcatcactgccgctcctgctcgggctgggcttcctctccctgtggtaccccgtgcaactcgtgcggtcattttcacgacggaccggtgccgggagcaaaggtctgcagagctcatatagcgaagagtacctgcgaaatctcctgtgcagaaagaagttgggctccagttaccatacttctaagcacgggtttctctcttgggcccgggtatgcctgcgccactgcatctacacaccacaaccaggatttcacctccctctcaaattggtcctaagtgccactctgaccggaacagccatatatcaggtggctcttctgctcttagtaggtgtggtaccaactattcagaaggtgcgggcaggcgttaccaccgatgtaagctatctacttgccgggttcgggattgtgctgtccgaagacaagcaagaggtcgttgagctggtaaagcaccacctgtgggcactggaggtgtgttacatctcggccctggtgctcagttgcttgttaacatttctcgtcctgatgagaagtcttgttacccaccgcacaaacttgcgtgccttgcaccgcggggctgcattggacctctctccactccaccggtccccccatcctagtcgccaggccattttttgctggatgtctttcagcgcctaccaaacggccttcatctgcttgggtctgctagtgcagcagattatcttttttctgggcaccactgctctcgcttttcttgtactaatgcctgttctgcatggcagaaaccttttgctctttagatccttggaatctagttggcctttctggctgacactggccctcgctgtgattctccaaaacatggcagcccattgggtctttctcgaaacgcatgacggacaccctcagttaacaaatagacgggtcctttacgcggcgaccttcctgctcttccctcttaacgtgctggtgggagccatggtggccacgtggagagtcctattgagtgctctgtataacgcgattcacctcggacagatggacctcagcttgctgcctccacgggccgcaacgctggaccccggctactacacctacagaaacttcttgaagatagaggtgtcccagagccacccagctatgactgccttttgctccctcctcttgcaggcacagagccttctccctcggaccatggcggctccccaggattctctgcggcccggcgaagaagatgaaggaatgcagctgctgcaaaccaaagactctatggcaaagggtgcaagacctggtgccagtcggggacgggcccgatggggcttggcctatacactgcttcacaatcccactcttcaggtcttccgaaagacggcgctactgggtgccaatggggcccagccttag

SEQ ID NO: 315059 - DNA, 1800 bp, Artificial Sequence
  derived and/or modified sequence
atgctggtgcggcggcggcagctgtggcccgactgcgtgcggggcagacctggactgccctctcccgtcgattttttagctggggatcgtccgagggccgttcccgccgcagtgttcatggtcctgcttagcagcctatgcttgctgctgcctgacgaggacgccttgccctttttgaccctcgctagcgctccttctcaggatggcaaaaccgaagcccctcggggcgcctggaagatcctcggactgttttactatgcagctctgtattacccgctggccgcctgtgcaacggctggtcacaccgccgctcatctcctggggagcacactgtcatgggcccatcttggtgtgcaggtgtggcagcgcgctgagtgtcctcaggtgccaaaaatctacaaatactattcactcctggctagcctcccactgctgcttggactgggctttctgagcctctggtaccccgtacaactagtccgctcattctctcggcgaacaggcgccgggtctaaaggcctccagtctagttactccgaggagtatctgcgcaatttgctgtgccggaaaaagttaggatcctcttaccacaccagcaaacatggatttctgtcctgggccagagtctgtcttcgccattgtatttacaccccccaacccggattccatctacctctcaagctcgtgttatccgcgactctgaccggaacggccatttaccaggtcgccctgttgttattagtgggcgtagtgcctactatccagaaggttagggccggcgtgaccacagatgtttcctacctcctcgcgggctttggaattgtgctgagtgaggataagcaggaggtggttgagctggtgaaacaccacctgtgggctctggaagtgtgctacatttccgctctcgtactcagttgcctgctgacttttttggtgttaatgagaagtctggtcactcaccgaaccaatctgcgggcactgcatcgcggcgctgccttggatttgtcacccctccatcgttctccccacccatcgcgtcaggccattttctgttggatgtccttctcagcgtaccagaccgccttcatatgcctgggcctgctggtccagcagataattttcttcctgggaactactgccctggcattcttggtgctcatgcctgtgctgcacggaagaaaccttctcctctttcggtcactggaatccagctggcccttttggttgaccctggccttagccgttattttgcagaatatggctgcacattgggtgtttctggaaacgcatgatggccatccccagcttacaaatagaagagttctgtacgcagctacctttctgctttttcctcttaatgtgctcgtaggcgctatggttgctacctggagggtcctcctctcagcactgtacaatgctattcacctcggacaaatggacctgagccttcttcccccgcgtgccgccaccctcgatcctggctattatacatataggaacttcctcaagattgaagtgtctcagtctcacccagcgatgaccgccttctgctcccttttattacaggcccagtccctattgcccaggacaatggcagcgccccaggattctcttaggccaggagaagaggacgaaggaatgcagctgctgcagacgaaggattctatggctaaaggggcacggccgggtgcgtcacgcggacgggcacgctggggccttgcctacacccttctgcacaaccccacactccaggtctttcgcaagaccgccctacttggcgctaacggtgcccagccttag

SEQ ID NO: 315060 - DNA, 2004 bp, Artificial Sequence
  derived and/or modified sequence
atgtcctcacagccagcaggcaatcagacttcgccaggcgctaccgaggactactcatacggctcctggtatatcgatgagcctcaaggtggagaggagctacagcctgaaggcgaggtaccaagctgccatacctcaatcccccctggcctgtaccacgcgtgcctggccagcctgtctattctagtccttctcctactggccatgcttgttcgacgcagacagctctggccggactgcgtccggggaaggcccggtctgcccagtcccgtggatttcttagcgggagatcggccaagagccgttccggctgctgtatttatggtgttgctgagctctctgtgtctgctgctcccagatgaagatgccctccctttcttgacccttgcctccgcccctagccaggatggtaaaacggaagcgcctagaggagcatggaagatcctggggttgttctattatgccgctctgtactacccactcgcagcttgcgctacggccggtcacactgccgcacacctgctcggctcaactctgagctgggctcatctgggagtgcaggtctggcagcgcgctgagtgcccacaggttcccaagatctacaaatattattctctgctcgcttcccttccccttctgctgggtctcggatttctcagtttatggtaccccgtgcagctggtccgcagcttctcgcgccgaacgggcgctggatcgaaagggcttcagagtagctattccgaagagtacctgcggaacctcctctgccgaaagaagctgggcagcagctatcacacaagcaaacacgggttcttgtcctgggctagagtctgcttgcggcactgtatatacacacctcaaccaggtttccatctgccactgaagctagttctctcagctaccctcactggcaccgcaatttatcaggtggcactgttgcttctggttggagtggttcccactatacaaaaagtacgcgctggcgttaccaccgacgtatcctaccttttagccggattcggaattgtcctgtccgaagataagcaggaggtggtcgaattggtgaagcaccacctatgggccttggaggtatgctacattagtgctctcgtgctgtcttgcctgctcaccttcttagttcttatgcgtagcctcgtgacccaccgaactaatctccgagccttacaccgcggtgcggctctcgatctgtctccattgcacaggtctccccacccaagtaggcaagcaatattctgctggatgagtttctctgcttaccagactgccttcatttgcctggggctcttagtccagcagattatcttcttccttggaactactgccctagcttttctggttctcatgcctgttctgcacgggcgtaaccttcttctgtttcgcagcctggagagcagctggcctttctggctcacacttgctttagcagttatcctgcaaaacatggcagcccattgggtttttttggagacgcacgacggccatcctcagctgacaaaccgcagagtcttgtatgcagccacattcctcctgttccctctgaatgtcctggttggtgctatggtcgctacctggagggttttgctgagcgccctgtataacgctatacatctgggccagatggatctatcactgttgcctcctcgggcagccacccttgatcctggttactatacataccggaactttctcaagatagaagtctctcagagtcaccccgcaatgacagctttctgctctcttctgctacaggcgcagagcttgttacccaggaccatggctgcccctcaggactccctacgcccaggagaggaggatgaagggatgcagttactgcagaccaaagattccatggctaagggggctcgcccaggagcctctagagggagggctcggtgggggcttgcttatacactcctccacaatccgactttgcaagtattcagaaagacggctcttcttggcgcaaatggcgcacagccttag

SEQ ID NO: 315061 - DNA, 2004 bp, Artificial Sequence
  derived and/or modified sequence
atgagctcacaacccgcaggcaatcagaccagtcctggggcaaccgaggactactcttatggatcttggtacatcgacgagccccagggcggagaggagttgcaacctgaaggggaagtgccctcatgccacactagtatcccccctggcctgtaccacgcttgcctggcctctctctctattctggtcctgttgctgctcgcgatgctggtgcgcaggcggcagctgtggccagattgtgtcaggggcagacccggtctcccaagccctgtggacttcctcgcgggtgatcggccaagggcagtccctgccgcagtatttatggtgcttttgtcttccctgtgcctcctactgcccgacgaggatgcactgccattcctcactttagcatccgctccttctcaggacggcaaaactgaagcgcctaggggagcctggaagatcttggggcttttctattatgcagcactgtactatcccctggcagcctgcgcaacagctggacataccgcggcacacttgctggggtccaccctgtcatgggcccaccttggcgtccaggtctggcagagggctgaatgccctcaggtacccaagatctataagtactattctctgctggctagcctgcctctgctgctggggctagggttcttatccttgtggtaccccgtccaactagttcgttccttcagtcggaggacgggcgcagggtccaaaggactccaatcgtcatattcagaagaatacctgaggaatctcttgtgcaggaaaaaacttggtagctcctatcacacatctaagcatggcttcctgtcttgggccagagtgtgcctgcgtcactgcatctatacacctcagccaggcttccaccttccactcaagcttgttctcagcgccaccctaacaggtacggcaatttaccaggtggccctgctgcttctggttggcgtggtgccaacgatacagaaggttagggcgggagtgaccacagacgtgagttacctgttagctggctttggcatcgtgctatctgaggataagcaggaggttgtcgagctggtgaaacaccacctatgggcgctcgaggtgtgttacatttctgctttggtgctcagctgtctgctgacattcctggttctgatgaggtctcttgtgactcacaggacaaatcttcgagccttgcaccgaggtgctgctctggacctgagcccactgcatcggtccccacacccaagccggcaagctattttctgctggatgagtttcagtgcataccagaccgcgtttatttgtctggggctcttagtgcaacagataattttctttctggggaccaccgcactcgcttttctcgtgcttatgcctgtgctgcacgggaggaacctgcttctgtttagatctctggaaagcagttggccattctggctgactctcgccctggctgttatactccagaatatggcagcacactgggttttcctggagactcatgatggtcatccgcagcttaccaaccgcagagttctgtatgccgcaaccttcctgctgtttcctcttaatgtactcgtgggtgccatggtcgctacttggcgcgtgctgctttccgctctgtacaacgccatccatcttggacagatggatctgtcattattgcccccaagagccgcaacactggaccctggatactatacctacaggaattttctcaaaattgaggtatcacagtcacatccagccatgaccgctttttgctcgcttctgctacaggcccaatctctcttacccaggactatggccgctcctcaggattccctccggccaggggaagaagatgaggggatgcaattactccaaactaaggacagtatggctaagggagccaggccgggagcctctcgcggtagagctcgttggggcctcgcatataccctgctccataacccaacactgcaggtgttcagaaagaccgcactgctgggcgctaacggagcccagccttag

SEQ ID NO: 315062 - DNA, 1800 bp, Artificial Sequence
  derived and/or modified sequence
atgttggttcgcagaagacagctgtggcctgattgcgtccgagggcgaccaggactccccagccctgtggacttcctggcaggcgacaggccgagagcggtccccgcagccgtatttatggtgctcctaagctctctgtgtctgctgttgccagatgaggacgccctgccatttcttacgctcgcctcagcaccgtcacaggacggcaaaaccgaagctccaagaggggcatggaagattctcggcttgttttattacgccgctctgtactaccctctggccgcttgtgctacggctggacataccgccgctcatctgttaggatctacgctgagctgggcgcatctgggcgtgcaagtgtggcagcgggctgagtgtccccaagtgcctaagatttataagtactatagcctcctggcttccctaccccttcttttgggcttgggtttcctctcgttgtggtatcccgtccagctcgtgcggtccttctccaggcgcaccggcgcaggaagtaagggcctgcaatcctcttactctgaggagtacttgaggaatctcctgtgccgtaagaagctagggtcatcgtaccatacaagcaaacatggatttctaagctgggcaagagtctgcttgagacattgtatatacaccccccagccgggattccacctccccctgaaattggtgctaagcgccacgttaaccgggaccgcgatttaccaagtggctctgcttctgttggtgggggttgtccccaccatccagaaagttagggccggagttacaacagatgtttcttatctcctagctgggttcgggatcgttctgtccgaggataagcaggaggttgtggagttggtgaagcatcacctttgggcactggaggtatgttacatcagcgctttagtcctgagctgtctgttgactttcctcgtgctgatgagaagtctggttacacatcgtaccaacctgagggcgttgcacaggggcgctgcactggacttgtcgccacttcaccgttccccacatccaagccggcaggccattttttgctggatgtctttttccgcctatcagacagctttcatatgtcttggactgctggtgcagcagatcatctttttcctcgggacgacagcactggcctttttggtcctgatgcccgttcttcatgggcgaaatttactcctgttcaggtctctcgagtcgtcctggcccttctggttgacattagcactcgctgtgatcctccagaatatggccgctcactgggttttccttgagactcacgatggtcatccccagctaacgaatagacgagttctatacgcggctaccttcctacttttcccactgaacgtcctcgtgggcgcaatggtggcaacctggcgagtcttactatctgccctgtataatgctatccacctgggtcagatggatctctctctcctgccccctcgcgcagccacactggatccaggctactacacctatcgaaacttcctcaaaatagaggtgagtcaatcccatcctgcaatgacagccttctgcagcctactgctgcaggcacagtcacttctgcccaggactatggctgcccctcaagactcattgagacctggtgaagaggatgagggaatgcagttgctgcagaccaaagacagcatggcaaagggcgctcgcccaggcgcatctcgcggacgagccaggtggggactggcttatacactgctgcacaacccaacactccaagtgttcagaaagaccgccctgttgggggcaaatggcgctcaaccctag

SEQ ID NO: 315063 - DNA, 2889 bp, Artificial Sequence
  derived and/or modified sequence
acaaaaagggtttaccaatgagacacatgttgcctccttcatggaaaccctaggagaagaaacggacagattccccttccctgcctccgccccagcccagccccagcggtccgtctcactcggttgttgctgtaatgctggtctcctgtctgtgtgcggcactgcagatgtggcgggcaggggcttgggagctctggggcaggcgctgaaggcaggagaagggccagagaatgtcgtcccagccagcagggaaccagacctcccccggggccacagaggactactcctatggcagctggtacatcgatgagccccaggggggcgaggagctccagccagaggggggggcctgacgcaggcctgagccagccttcatttgctctgcagggaagtgccctcctgccacaccagcataccacccggcctgtaccacgcctgcctggcctcgctgtcaatccttgtgctgctgctcctggccatgctggtgaggcgccgccagctctggcctgactgtgtgcgtggcaggcccggcctgcccagccctgtggatttcttggctggggacaggccccgggcagtgcctgctgctgttttcatggtcctcctgagctccctgtgtttgctgctccccgacgaggacgcattgcccttcctgactctcgcctcagcacccagccaagatgggaaaactgaggctccaagaggggcctggaagatactgggactgttctattatgctgccctctactaccctctggctgcctgtgccacggctggccacacagctgcacacctgctcggcagcacgctgtcctgggcccaccttggggtccaggtctggcagagggcagagtgtccccaggtgcccaagatctacaagtactactccctgctggcctccctgcctctcctgctgggcctcggattcctgagcctttggtaccctgtgcagctggtgagaagcttcagccgtaggacaggagcaggctccaaggggctgcagagcagctactctgaggaatatctgaggaacctcctttgcaggaagaagctgggaagcagctaccacacctccaagcatggcttcctgtcctgggcccgcgtctgcttgagacactgcatctacactccacagccaggattccatctcccgctgaagctggtgctttcagctacactgacagggacggccatttaccaggtggccctgctgctgctggtgggcgtggtacccactatccagaaggtgagggcaggggtcaccacggatgtctcctacctgctggccggctttggaatcgtgctctccgaggacaagcaggaggtggtggagctggtgaagcaccatctgtgggctctggaagtgtgctacatctcagccttggtcttgtcctgcttactcaccttcctggtcctgatgcgctcactggtgacacacaggaccaaccttcgagctctgcaccgaggagctgccctggacttgagtcccttgcatcggagtccccatccctcccgccaagccatattctgttggatgagcttcagtgcctaccagacagcctttatctgccttgggctcctggtgcagcagatcatcttcttcctgggaaccacggccctggccttcctggtgctcatgcctgtgctccatggcaggaacctcctgctcttccgttccctggagtcctcgtggcccttctggctgactttggccctggctgtgatcctgcagaacatggcagcccattgggtcttcctggagactcatgatggacacccacagctgaccaaccggcgagtgctctatgcagccacctttcttctcttccccctcaatgtgctggtgggtgccatggtggccacctggcgagtgctcctctctgccctctacaacgccatccaccttggccagatggacctcagcctgctgccaccgagagccgccactctcgaccccggctactacacgtaccgaaacttcttgaagattgaagtcagccagtcgcatccagccatgacagccttctgctccctgctcctgcaagcgcagagcctcctacccaggaccatggcagccccccaggacagcctcagaccaggggaggaagacgaagggatgcagctgctacagacaaaggactccatggccaagggagctaggcccggggccagccgcggcagggctcgctggggtctggcctacacgctgctgcacaacccaaccctgcaggtcttccgcaagacggccctgttgggtgccaatggtgcccagccctgagggcagggaaggtcaacccacctgcccatctgtgctgaggcatgttcctgcctaccatcctcctccctccccggctctcctcccagcatcacaccagccatgcagccagcaggtcctccggatcactgtggttgggtggaggtctgtctgcactgggagcctcaggagggctctgctccacccacttggctatgggagagccagcaggggttctggagaaagaaactggtgggttagggccttggtccaggagccagttgagccagggcagccacatccaggcgtctccctaccctggctctgccatcagccttgaagggcctcgatgaagccttctctggaaccactccagcccagctccacctcagccttggccttcacgctgtggaagcagccaaggcacttcctcaccccctcagcgccacggacctctctggggagtggccggaaagctcccgggcctctggcctgcagggcagcccaagtcatgactcagaccaggtcccacactgagctgcccacactcgagagccagatatttttgtagtttttatgcctttggctattatgaaagaggttagtgtgttccctgcaataaacttgttcctgag

SEQ ID NO: 315064 - protein, 557 aa, Artificial Sequence
  derived and/or modified sequence
MAAGTSMSPDEDALPFLTLASAPSQDGKTEAPRGAWKILGLFYYAALYYPLAACATAGHTAAHLLGSTLSWAHLGVQVWQRAECPQVPKIYKYYSLLASLPLLLGLGFLSLWYPVQLVRSFSRRTGAGSKGLQSSYSEEYLRNLLCRKKLGSSYHTSKHGFLSWARVCLRHCIYTPQPGFHLPLKLVLSATLTGTAIYQVALLLLVGVVPTIQKVRAGVTTDVSYLLAGFGIVLSEDKQEVVELVKHHLWALEVCYISALVLSCLLTFLVLMRSLVTHRTNLRALHRGAALDLSPLHRSPHPSRQAIFCWMSFSAYQTAFICLGLLVQQIIFFLGTTALAFLVLMPVLHGRNLLLFRSLESSWPFWLTLALAVILQNMAAHWVFLETHDGHPQLTNRRVLYAATFLLFPLNVLVGAMVATWRVLLSALYNAIHLGQMDLSLLPPRAATLDPGYYTYRNFLKIEVSQSHPAMTAFCSLLLQAQSLLPRTMAAPQDSLRPGEEDEGMQLLQTKDSMAKGARPGASRGRARWGLAYTLLHNPTLQVFRKTALLGANGAQP

SEQ ID NO: 315065 - protein, 476 aa, Artificial Sequence
  derived and/or modified sequence
MGKLRLQEIYKYYSLLASLPLLLGLGFLSLWYPVQLVRSFSRRTGAGSKGLQSSYSEEYLRNLLCRKKLGSSYHTSKHGFLSWARVCLRHCIYTPQPGFHLPLKLVLSATLTGTAIYQVALLLLVGVVPTIQKVRAGVTTDVSYLLAGFGIVLSEDKQEVVELVKHHLWALEVCYISALVLSCLLTFLVLMRSLVTHRTNLRALHRGAALDLSPLHRSPHPSRQAIFCWMSFSAYQTAFICLGLLVQQIIFFLGTTALAFLVLMPVLHGRNLLLFRSLESSWPFWLTLALAVILQNMAAHWVFLETHDGHPQLTNRRVLYAATFLLFPLNVLVGAMVATWRVLLSALYNAIHLGQMDLSLLPPRAATLDPGYYTYRNFLKIEVSQSHPAMTAFCSLLLQAQSLLPRTMAAPQDSLRPGEEDEGMQLLQTKDSMAKGARPGASRGRARWGLAYTLLHNPTLQVFRKTALLGANGAQP

SEQ ID NO: 315066 - DNA, 663 bp, Artificial Sequence
  derived and/or modified sequence
atgtggcacgggaaccatgttcaacccggtgcaacccacagaccaaatcagggtctggaaatgttgcaagggttgggcataggcatcctaacaatctcaatcgtagtggggttaatgatcttacagatgtgcattgccgctagcttctttttacagcctaagctgggtactgctgataagcaaaagccacttgccctcaataatcgtaaagcctttcacaacttcaattacttcctgttcttttacaacgtgttgctcggattgggtgcatgtttgtccagacttttgatctcatgccttctgggcatgtggctcatagcaaggatcgaccggaccattatgcagtctggctatgagggggcagatatgggattttccgcctggatcggaatgctctacatggatcattaccatatcaaccctgtcttggtgagcttttgtcatatccttatcaccaatcaccgcgagaaaaagctgcagcagtccaccaaatattggtgtctcaatcagtctgccggacctcatgtctctgcacggtcccggacacggtggtttcttttgcagacgctcatcgataatccgcggcttactatgcacaggaagctcaaattggggcactcttcccaggaatcccagattctaatggcttgtagcgagtcttag

SEQ ID NO: 315067 - DNA, 663 bp, Artificial Sequence
  derived and/or modified sequence
atgtggcacggcaaccacgtgcagcccggcgccacccaccggcccaatcagggcctggaaatgctccagggcctcggcattggaattctgacaatcagcatagttgtgggcctgatgatcctacagatgtgcattgctgcatccttttttctacaacctaagcttggcacagctgacaagcagaaaccacttgctcttaacaatcggaaagcttttcacaactttaactactttctctttttctacaacgtccttctgggtctcggcgcttgcctaagccgactcctcataagctgtcttctggggatgtggttgatcgcacgcattgacaggaccattatgcagagcggctatgaaggggcagatatggggttttccgcctggattgggatgttgtacatggaccactatcatattaaccccgtgctggtgtctttttgccatatcttgatcacgaatcatcgcgaaaaaaaactgcagcagtccactaaatactggtgtctgaaccagagcgctggcccgcacgtatccgcccgatcgaggacgcgatggttcctgttacaaacacttatagacaatcccaggctgaccatgcatcgcaagcttaaactgggccacagtagccaggagtcacaaattttgatggcctgttccgagtcatag

SEQ ID NO: 315068 - DNA, 663 bp, Artificial Sequence
  derived and/or modified sequence
atgtggcatggcaatcacgttcagccgggagccactcaccgccctaaccaaggacttgaaatgctacagggccttgggatcggcatcctcaccatctctatagtcgtgggcctcatgatactccagatgtgtatcgcagccagtttcttccttcagccgaagttaggaactgccgacaagcagaagccactggccctgaacaatagaaaagcctttcacaatttcaactactttctgttcttttataacgtgctgctgggcttaggagcgtgcctcagcagacttctgatcagctgcttattagggatgtggttgattgcgagaattgatagaaccatcatgcagtctggttacgagggagcggacatgggattcagtgcctggatcggtatgctgtacatggaccactaccatatcaaccccgtgctggtgtccttctgccatatcttaatcactaatcacagagagaagaagttgcaacaatcgacaaagtactggtgtctgaatcagagcgcaggcccacatgtatcagccaggtccaggactcgctggttcctgctccagaccttaatcgataatccacgcctcacgatgcaccgcaaactgaagctgggacattcctctcaggagagtcaaatattaatggcttgctccgagtcttag

SEQ ID NO: 315069 - DNA, 1674 bp, Artificial Sequence
  derived and/or modified sequence
atggccgccggcaccagcatgagccccgacgaggacgccctgcccttcctgaccctggccagcgcccccagccaggacggcaagaccgaggcccccagaggcgcctggaagatcctgggcctgttctactacgccgccctgtactaccccctggccgcctgcgccaccgccggccacaccgccgcccacctgctgggcagcaccctgagctgggcccacctgggcgtgcaggtgtggcagagagccgagtgcccccaggtgcccaagatctacaagtactacagcctgctggccagcctgcccctgctgctgggcctgggcttcctgagcctgtggtaccccgtgcagctggtgagaagcttcagcagaagaaccggcgccggcagcaagggcctgcagagcagctacagcgaggagtacctgagaaacctgctgtgcagaaagaagctgggcagcagctaccacaccagcaagcacggcttcctgagctgggccagagtgtgcctgagacactgcatctacaccccccagcccggcttccacctgcccctgaagctggtgctgagcgccaccctgaccggcaccgccatctaccaggtggccctgctgctgctggtgggcgtggtgcccaccatccagaaggtgagagccggcgtgaccaccgacgtgagctacctgctggccggcttcggcatcgtgctgagcgaggacaagcaggaggtggtggagctggtgaagcaccacctgtgggccctggaggtgtgctacatcagcgccctggtgctgagctgcctgctgaccttcctggtgctgatgagaagcctggtgacccacagaaccaacctgagagccctgcacagaggcgccgccctggacctgagccccctgcacagaagcccccaccccagcagacaggccatcttctgctggatgagcttcagcgcctaccagaccgccttcatctgcctgggcctgctggtgcagcagatcatcttcttcctgggcaccaccgccctggccttcctggtgctgatgcccgtgctgcacggcagaaacctgctgctgttcagaagcctggagagcagctggcccttctggctgaccctggccctggccgtgatcctgcagaacatggccgcccactgggtgttcctggagacccacgacggccacccccagctgaccaacagaagagtgctgtacgccgccaccttcctgctgttccccctgaacgtgctggtgggcgccatggtggccacctggagagtgctgctgagcgccctgtacaacgccatccacctgggccagatggacctgagcctgctgccccccagagccgccaccctggaccccggctactacacctacagaaacttcctgaagatcgaggtgagccagagccaccccgccatgaccgccttctgcagcctgctgctgcaggcccagagcctgctgcccagaaccatggccgccccccaggacagcctgagacccggcgaggaggacgagggcatgcagctgctgcagaccaaggacagcatggccaagggcgccagacccggcgccagcagaggcagagccagatggggcctggcctacaccctgctgcacaaccccaccctgcaggtgttcagaaagaccgccctgctgggcgccaacggcgcccagccctag

SEQ ID NO: 315070 - DNA, 1431 bp, Artificial Sequence
  derived and/or modified sequence
atgggcaagctgagactgcaggagatctacaagtactacagcctgctggccagcctgcccctgctgctgggcctgggcttcctgagcctgtggtaccccgtgcagctggtgagaagcttcagcagaagaaccggcgccggcagcaagggcctgcagagcagctacagcgaggagtacctgagaaacctgctgtgcagaaagaagctgggcagcagctaccacaccagcaagcacggcttcctgagctgggccagagtgtgcctgagacactgcatctacaccccccagcccggcttccacctgcccctgaagctggtgctgagcgccaccctgaccggcaccgccatctaccaggtggccctgctgctgctggtgggcgtggtgcccaccatccagaaggtgagagccggcgtgaccaccgacgtgagctacctgctggccggcttcggcatcgtgctgagcgaggacaagcaggaggtggtggagctggtgaagcaccacctgtgggccctggaggtgtgctacatcagcgccctggtgctgagctgcctgctgaccttcctggtgctgatgagaagcctggtgacccacagaaccaacctgagagccctgcacagaggcgccgccctggacctgagccccctgcacagaagcccccaccccagcagacaggccatcttctgctggatgagcttcagcgcctaccagaccgccttcatctgcctgggcctgctggtgcagcagatcatcttcttcctgggcaccaccgccctggccttcctggtgctgatgcccgtgctgcacggcagaaacctgctgctgttcagaagcctggagagcagctggcccttctggctgaccctggccctggccgtgatcctgcagaacatggccgcccactgggtgttcctggagacccacgacggccacccccagctgaccaacagaagagtgctgtacgccgccaccttcctgctgttccccctgaacgtgctggtgggcgccatggtggccacctggagagtgctgctgagcgccctgtacaacgccatccacctgggccagatggacctgagcctgctgccccccagagccgccaccctggaccccggctactacacctacagaaacttcctgaagatcgaggtgagccagagccaccccgccatgaccgccttctgcagcctgctgctgcaggcccagagcctgctgcccagaaccatggccgccccccaggacagcctgagacccggcgaggaggacgagggcatgcagctgctgcagaccaaggacagcatggccaagggcgccagacccggcgccagcagaggcagagccagatggggcctggcctacaccctgctgcacaaccccaccctgcaggtgttcagaaagaccgccctgctgggcgccaacggcgcccagccctag

SEQ ID NO: 315071 - DNA, 1674 bp, Artificial Sequence
  derived and/or modified sequence
atggccgcaggaaccagcatgtcacccgatgaggacgcgctgccctttctgaccctggcatctgcccctagtcaggacggtaagacagaggctcctaggggcgcttggaaaatattgggcctcttctattatgcagccctgtattaccctctcgcagcctgtgctaccgcaggccatacggctgctcacctgttggggtcaaccctgtcttgggcacacctaggggtccaggtttggcagcgagctgagtgtccccaagtgcctaaaatttataagtactatagcctgttggctagccttcccctcctgctgggcctgggcttcctgtctttgtggtacccagtccagctcgttaggtccttttcacgtcgcacgggtgcgggaagtaaaggcctgcagtcctcctactctgaagagtatcttagaaacttgctgtgcagaaaaaaactaggatctagttatcatacttccaagcacgggttcttgtcctgggccagagtgtgcctccggcattgcatctacactccacaacccggcttccatctgccacttaaactggtgctctcagcaactcttaccggaactgcaatctatcaggtcgccctgctcctcctggtgggggtggtccccactatccagaaggtgcgcgcaggcgtgacgactgacgtgagctatcttctcgcagggtttgggattgtgcttagtgaggacaagcaggaagtagtcgagctggtgaagcaccatctgtgggccttggaggtttgttacatttctgccctagttctgtcgtgcctgctgacctttctcgtgctcatgagatcacttgtgacccataggactaacttgcgtgccctccaccgcggggcagccctcgatctctccccacttcacaggtcgccacatccgagccgacaggccattttctgctggatgtcattctcagcttaccaaactgccttcatctgcttgggccttctggtgcaacaaattatcttctttcttggtactaccgcactagcctttttggtgcttatgccagtccttcacggaagaaacctgctattatttagatccctggagtcctcttggcccttttggttgacactggcccttgccgttattctgcaaaacatggcagcccattgggttttcctggagacacacgatggacaccctcaactcaccaaccgtcgcgtgctgtatgcggcaacttttctgcttttcccgctgaatgtgctggttggcgcgatggtggcgacatggcgcgtgctgctttcagctttgtacaacgctattcatctcggccagatggacttgagcctcctgcccccgagagccgctactctcgacccaggctattacacgtaccggaacttcctaaagatcgaggtctcccagtcccaccccgcaatgactgccttctgtagtctactcctgcaggcacaatccctattgccgcgtacaatggccgcgccgcaggactctctaagacccggggaggaggatgaggggatgcagttacttcaaaccaaggatagtatggctaagggagcgcgcccaggggccagcagaggacgcgctcgttgggggttggcgtatacactgttgcacaacccaacgctccaggtatttcgcaaaactgctttactgggtgcgaacggcgcgcagccctag

SEQ ID NO: 315072 - DNA, 1431 bp, Artificial Sequence
  derived and/or modified sequence
atggggaagttgagactgcaggaaatttataaatattacagcctactagcgtccctccctctgctcctggggctcggtttcttgagcctgtggtatcctgtgcagctggtgcgctcctttagccggagaaccggggctggatccaagggactgcagagcagctactccgaagaataccttcggaatttgctgtgccgtaaaaagcttggatcctcttaccacacatcaaaacacgggttcttatcatgggcacgcgtgtgtctgagacactgcatctacactccacagcctggctttcacttaccgttaaagcttgtcctatccgccaccctcactggcacagcaatctaccaggtagccctattgcttttggtcggagtggtgccgacaatccagaaggtaagagctggtgtgactacggatgtgtcctacctgctagccggattcggaatcgttctctcagaagataagcaagaggtagtcgagttggtcaagcatcatttgtgggccctggaggtctgttacatcagtgcattggtgctgtcatgcttgctgacgtttctggtgcttatgcggtcactggttacccacaggaccaacctgcgcgccttacacagaggggccgctcttgaccttagcccgctccaccgctcgccacacccaagccgccaggctatcttttgctggatgtctttttccgcctaccaaaccgcatttatctgtctggggctgctggtccagcagataatcttcttcctgggtacaactgcactggccttcctggtccttatgcccgtcctgcacggccgaaatttgctgctgttccggtctctggaatcctcctggcccttctggctgacactcgccttagctgttattctgcaaaacatggccgcccattgggtgttcctcgaaacgcatgacgggcacccccagttgacgaatcgacgcgtcctatatgctgcaacctttttgctgttccctttgaatgtgctagtcggggctatggtagctacttggcgggtgttgctgagcgcactatataatgccatccacctcggacagatggacctaagcttacttccaccccgagcagccaccttagatccaggctactatacctataggaattttctgaaaattgaagtatcacagagccaccccgctatgacggctttctgttcacttttgctgcaggcgcagtccctgctgccgcggactatggctgccccacaggactcgctgcggccaggcgaggaagatgaggggatgcagctgctccagaccaaggattcaatggctaagggagccagacctggtgcctcccggggcagagcccgctggggcctggcctacacccttctccataatcccacgctgcaggtgtttagaaagactgccttgttgggagcgaacggcgcccagccctag

SEQ ID NO: 315073 - DNA, 1674 bp, Artificial Sequence
  derived and/or modified sequence
atggctgctggcacctccatgagcccagatgaagatgccctgcccttcctgaccctggccagcgcccccagccaggacggcaagacagaggcccccaggggggcctggaagatcctgggcctcttctactatgctgccctgtactaccccctggccgcctgtgccacagctggccacacagctgcccacctgctgggcagcaccctgtcctgggcccacctgggcgtgcaggtgtggcagagagcagaatgtccccaggtgcccaagatctacaagtactacagcctgctggccagcctgcccctgctgctgggcctgggcttcctgagcctgtggtaccctgtgcagctggtgcgctccttcagcagaagaactggagctggcagcaagggcctgcagagcagctacagcgaggagtacctgaggaacctgctgtgcaggaagaagctgggcagcagctaccacaccagcaagcacggcttcctgtcctgggcccgggtgtgcctgcggcactgcatctacaccccccagcccggcttccacctgcccctgaagctggtgctgagcgccaccctgactggaacagccatctaccaggtggccctgctgctgctggtgggcgtggtgcccaccatccagaaggtgcgggccggcgtgaccacagatgtgtcctacctgctggccggcttcggcatcgtgctgtctgaggacaagcaggaggtggtggagctggtgaagcaccacctgtgggccctggaggtgtgctacatcagcgccctggtgctgagctgcctgctgaccttcctggtgctgatgaggagcctggtgacccacaggaccaacctgcgggccctgcacagaggagctgccctggacctgagccccctgcacaggagcccccaccccagccggcaggccatcttctgctggatgtccttcagcgcctaccagacagccttcatctgcctgggcctgctggtgcagcagatcatcttcttcctgggcaccacagccctggccttcctggtgctgatgcctgtgctgcatggaagaaacctgctgctcttccgcagcctggagagctcctggcccttctggctgaccctggccctggccgtcatcctgcagaacatggccgcccactgggtgttcctggagacccatgatggccacccccagctgaccaacagaagagtgctgtatgctgccaccttcctgctcttccccctgaatgtgctggtgggcgccatggtggccacctggagggtgctgctgagcgccctgtacaatgccatccacctgggccagatggacctgagcctgctgcccccccgggccgccaccctggaccccggctactacacctacagaaacttcctgaagattgaggtgtcccagagccacccagccatgacagccttctgcagcctgctgctgcaggcccagagcctgctgcccaggaccatggccgccccccaggacagcctgcggcctggagaagaagatgagggcatgcagctgctgcagaccaaggacagcatggccaagggggcccggcctggggccagccggggccgggcccgctggggcctggcctacaccctgctgcacaaccccaccctgcaggtgttcaggaagacagccctgctgggcgccaatggagcccagccctag

SEQ ID NO: 315074 - DNA, 1431 bp, Artificial Sequence
  derived and/or modified sequence
atgggcaagctgcggctgcaggagatctacaagtactacagcctgctggccagcctgcccctgctgctgggcctgggcttcctgagcctgtggtaccctgtgcagctggtgcgctccttcagcagaagaactggagctggcagcaagggcctgcagagcagctacagcgaggagtacctgaggaacctgctgtgcaggaagaagctgggcagcagctaccacaccagcaagcacggcttcctgtcctgggcccgggtgtgcctgcggcactgcatctacaccccccagcccggcttccacctgcccctgaagctggtgctgagcgccaccctgaccggcacagccatctaccaggtggccctgctgctgctggtgggcgtggtgcccaccatccagaaggtgcgggccggcgtgaccacagatgtgtcctacctgctggccggctttggaattgtgctgtctgaggacaagcaggaggtggtggagctggtgaagcaccacctgtgggccctggaggtgtgctacatcagcgccctggtgctgagctgcctgctgaccttcctggtgctgatgaggagcctggtgacccacaggaccaacctgcgggccctgcacagaggagctgccctggacctgagccccctgcacaggagcccccaccccagccggcaggccatcttctgctggatgtccttcagcgcctaccagacagccttcatctgcctgggcctgctggtgcagcagatcatcttcttcctgggcaccacagccctggccttcctggtgctgatgcctgtgctgcacggcaggaacctgctgctcttccgcagcctggagagctcctggcccttctggctgaccctggccctggccgtcatcctgcagaacatggccgcccactgggtgttcctggagacccatgatggccacccccagctgaccaacagaagagtgctgtatgctgccaccttcctgctcttccccctgaatgtgctggtgggcgccatggtggccacctggagggtgctgctgagcgccctgtacaatgccatccacctgggccagatggacctgagcctgctgccccccagggctgccaccctggaccccggctactacacctacagaaacttcctgaagattgaggtgtcccagagccacccagccatgacagccttctgcagcctgctgctgcaggcccagagcctgctgcccaggaccatggccgccccccaggacagcctgcggcctggagaggaggatgagggcatgcagctgctgcagaccaaggacagcatggccaagggggcccggcctggggccagccggggccgggcccgctggggcctggcctacaccctgctgcacaaccccaccctgcaggtgttcaggaagacagccctgctgggcgccaacggggcccagccctag

SEQ ID NO: 315075 - DNA, 1674 bp, Artificial Sequence
  derived and/or modified sequence
atggccgccggcaccagcatgagccccgacgaggacgccctgccctttctgacactggcgagtgcgccctcccaggacgggaagacggaggcacccagaggggcatggaaaatattaggattgttctactacgcagctctctactacccactggcagcatgtgcaaccgccggacacacagctgctcacctcctcggtagtactctgtcttgggcccacctcggggttcaggtttggcagagagcggaatgcccccaggtaccaaagatctataaatattatagtcttctggcatctctgccgctgcttctcggactgggctttctttcactgtggtaccccgtacagctggtgcgttctttcagccgacggacaggcgctggcagcaaagggctacaaagttcctatagcgaagagtacctgcggaacttgctgtgtcggaagaaactcggctctagttatcacacctccaaacacggttttttatcctgggcgagagtgtgcctgaggcattgtatttatacacctcagccaggtttccacctgcccctgaagctggtcctttcagcaacactgaccgggactgcaatctatcaggtggctctactcctgctggtgggggtagtgcctaccatccaaaaggtgagggcaggggtgacaactgacgtaagttacctcctggcaggatttggcatcgtgctgtccgaggataagcaggaggtggtggaactcgttaagcaccacctttgggctctggaagtgtgctacatttccgctctcgttctcagttgcctgctgacctttctggtgctgatgcggtccctcgtgacccatcgaacaaacctgcgggcccttcatcgcggggccgcactggacctttctcctttgcaccgaagccctcaccccagtaggcaggcaatcttttgctggatgagcttctctgcgtatcagactgcctttatttgtctcggtctactggttcagcaaatcatcttctttctcggcactacagctctggcctttcttgtgcttatgccagttctacatggaagaaacttgttgctgtttcgttcgctggagtcatcgtggcctttctggctcacattagcactggcggtgattttacaaaacatggccgctcattgggttttcttagaaacacacgatggccacccccagctgactaaccgaagagttctctacgccgcaactttcttgctctttccactaaatgtgctcgttggggccatggtggccacgtggcgcgtgctgctctcagccctgtataatgcaattcacctggggcagatggacctttctctactccccccccgcgccgctactctggaccctgggtattacacttacagaaactttctaaaaatagaggtttcacagagtcatccggcgatgaccgcattctgctctctcctgcttcaggctcagtctctcctgcctcgcacaatggccgccccccaggatagcttgcgccctggggaagaagacgaggggatgcaactgctgcagaccaaagacagcatggcaaaaggcgctcggccaggtgctagtagggggcgggcccgctgggggctggcgtacacgctgttgcacaatcccacactgcaggtctttcggaaaacagcccttttgggagctaacggagcccagccatag

SEQ ID NO: 315076 - DNA, 1431 bp, Artificial Sequence
  derived and/or modified sequence
atgggcaagctgcggctgcaggagatctacaagtactacagcctgctggccagccttccgttgctgctcggcctcggctttctgtctctctggtatcctgtgcagttggtaagaagtttctctcgaaggactggcgcaggcagtaagggtttgcagtcgtcgtatagcgaggaatacctacgcaatttgttgtgcaggaaaaagttgggttctagctaccatacaagcaaacacggcttcctttcgtgggctcgcgtgtgcctgcggcattgcatttacaccccccagccggggtttcatctgccactgaaactggttctgagcgctacactgacagggactgcaatctatcaagttgccctgctactcctggtgggagttgtgcccactattcaaaaggtgagggccggagtcaccacagatgtaagctacttgctggcgggattcggaattgtcttaagcgaagataaacaggaagtagttgagctcgtcaagcaccacctttgggccttggaagtctgctatatcagtgcacttgtgctctcatgtctgctgacattcttagttctgatgcggagcttggtcacccacagaacgaatctgagggctctgcacaggggagcagccctcgacttaagtccactgcaccgctcaccccacccttctagacaggcaattttttgctggatgagtttttccgcttaccagacggcattcatctgcctgggactcttggtccaacagattatcttcttcttaggcacaacagcacttgcctttctggtcctaatgcccgttttgcacgggcgaaacttgttgctcttcagaagtctcgagagctcatggcctttctggctgacacttgcgctggcggttatccttcaaaacatggccgctcactgggtgttcctggagacgcatgacggacaccctcaactgaccaacaggcgcgttctatacgccgcaacctttcttctgtttcccctgaatgttttggtgggggccatggtggcaacttggcgggtgcttttgtccgccctgtacaacgccatccatctcgggcagatggacctgagtttgctgccaccgagagccgctactttagatcccggctactacacatacagaaacttcttgaagattgaggtgtcacagtcccatcccgccatgactgccttctgtagcctgctgctccaggctcagagtcttctgcccagaactatggccgcacctcaagactccctccggcctggagaggaggacgaagggatgcagcttctgcagaccaaggacagcatggccaaaggggcaaggccaggagcctccagaggtagagccaggtgggggctcgcctacaccctgctacacaatcctacgttacaggtcttccgcaagaccgcacttcttggggcaaacggcgctcagccctag

SEQ ID NO: 315077 - DNA, 1674 bp, Artificial Sequence
  derived and/or modified sequence
atggccgctggcacgtcgatgagccctgacgaggacgcactgccttttttaactctcgcctccgccccatcccaggatgggaagaccgaggctcctagaggcgcatggaagatactgggtcttttttattatgctgcactatactaccctctggccgcatgtgcaactgccggacatactgcggcacatctcttgggctccacactgtcctgggcccacctcggggtgcaggtgtggcaacgagcagagtgcccacaggtgcctaagatatacaaatactactccctgctcgcttcactccccttacttttgggcttagggttcctttccctgtggtatccggtgcagctggtccgaagcttttcccgccgaacgggcgcagggagcaaaggcctccagtcctcatattccgaggagtacctacggaacctgttgtgtaggaaaaagctaggaagctcatatcacacatccaaacatgggttcctctcctgggcaagggtgtgcctgcgccattgtatttacaccccccagccagggtttcacttacccctgaagctcgttctgtctgctaccctgaccgggacggccatatatcaggtggccctcctgctccttgtaggcgtggtcccgacaatccagaaggtcagggctggtgttactactgacgtttcttatcttctggccggattcggaattgtgctgagcgaggacaaacaggaggtggtagagctcgtgaaacatcacctgtgggccctggaggtctgttatatcagcgcccttgtgctgtcctgcctccttacctttttggtgctgatgcgctcactcgtgacccacaggacaaacctgcgtgcactccaccgaggcgcagccttggacctgagtccactgcaccggagtccacacccttctcggcaggcaatcttttgttggatgagcttctcagcttatcagaccgctttcatttgtctgggcttactcgtgcagcaaatcatctttttcctgggcaccacagctttagctttcttagtgcttatgcctgtccttcacggcagaaacttgcttttgttccggtccctggagtcctcctggcccttctggttaaccctggcgctggctgtcattctccagaacatggccgctcactgggtcttcctggaaactcacgacggccacccacagctcacgaatcgtagggtattatatgctgctacattcctgttgttccctcttaacgtcctcgtcggcgcaatggttgcgacctggagagtactgctgtccgcgctgtataatgccatccacctcggacagatggatctcagcttactcccgcctagagccgctacactggatccgggatattatacgtatcggaacttcctgaaaatcgaagttagtcagagccatcctgccatgaccgcgttctgctctctgctgctccaggcccaatctctgctgcctcgcactatggccgctccacaggacagtctgcggcctggtgaagaggatgagggcatgcagctgcttcagactaaggacagcatggccaaaggagctcggccaggtgcatcaagaggccgagctagatgggggctggcttacacgctcctccacaatcctacacttcaagtgttccggaaaaccgccctgctcggcgctaacggggctcagccgtag

SEQ ID NO: 315078 - DNA, 1431 bp, Artificial Sequence
  derived and/or modified sequence
atgggtaaactacggctgcaggagatttataagtactattcccttctggccagcctacctttactgttgggccttggtttcctcagcctttggtatccagtacagctcgttaggtcattcagccggagaacaggcgcagggtccaaggggctccagagttcgtacagtgaagagtacttgcgcaacctattgtgccgtaaaaaactcggttctagctaccacacttccaagcacggttttttaagttgggctagggtatgtcttcgacactgtatctacacaccgcagcctggctttcacttacccctgaagctggtcctctccgccactctgacaggcacggctatctatcaggttgctctgctcctcctggtgggagtggttccaacgatacaaaaggtgcgggctggcgtaaccactgacgttagctatctgcttgccggattcggcattgtcctcagcgaagataaacaagaagtggtagaacttgtcaagcatcacttatgggccctcgaggtatgttacattagcgccctggtcttatcttgtctcctgacttttttggttttgatgcggagtctggtaactcaccgtactaatctgcgggctcttcacaggggggcagccttggacctgtcccctctccaccggagtccgcacccctccagacaggctatattctgctggatgtcgttttccgcttaccagactgctttcatctgtctcggcctcctggtgcagcagatcattttctttcttggcaccactgcacttgccttcctcgttttgatgcctgtgctccacgggagaaatctgttgctgttcagatcactcgagagctcctggccattctggctcacactggccctcgctgtcatactgcagaacatggctgcacattgggtgttcctggagacacacgatggccatccacaactgaccaacaggcgggtcctctacgcagctacgtttttgctattcccgctgaacgtactggtgggagctatggtcgcaacctggcgcgtgctactctcggccctctacaatgccatccacctcggacagatggatctaagcctccttccacctagagcagcgactcttgatccaggctactacacgtaccggaactttctgaaaatagaggtgagccaaagccacccagctatgacagcattctgttccctgcttctccaagcccagtcattgctgcctcgtaccatggctgctcctcaggacagtctcaggccaggagaggaggacgagggaatgcagttgctgcaaactaaagactcaatggcaaagggtgccaggcctggtgcgagccgcggacgggctaggtggggattagcatacacgctcttgcacaatcccaccctgcaggtgttccgcaaaacagccctcctgggggctaacggggcacaaccttag

SEQ ID NO: 315079 - DNA, 1806 bp, Artificial Sequence
  derived and/or modified sequence
cctttcatctctgcaactccttcctccctgggcctcccttctggagaagggccagagaatgtcgtcccagccagcagggaaccagacctcccccggggccacagaggactactcctatggcagctggtacatcgatgagccccgacgaggacgcattgcccttcctgactctcgcctcagcacccagccaagatgggaaaactgaggctccaagaggggcctggaagatactgggactgttctattatgctgccctctactaccctctggctgcctgtgccacggctggccacacagctgcacacctgctcggcagcacgctgtcctgggcccaccttggggtccaggtctggcagagggcagagtgtccccaggtgcccaagatctacaagtactactccctgctggcctccctgcctctcctgctgggcctcggattcctgagcctttggtaccctgtgcagctggtgagaagcttcagccgtaggacaggagcaggctccaaggggctgcagagcagctactctgaggaatatctgaggaacctcctttgcaggaagaagctgggaagcagctaccacacctccaagcatggcttcctgtcctgggcccgcgtctgcttgagacactgcatctacactccacagccaggattccatctcccgctgaagctggtgctttcagctacactgacagggacggccatttaccaggtggccctgctgctgctggtgggcgtggtacccactatccagaaggtgagggcaggggtcaccacggatgtctcctacctgctggccggctttggaatcgtgctctccgaggacaagcaggaggtggtggagctggtgaagcaccatctgtgggctctggaagtgtgctacatctcagccttggtcttgtcctgcttactcaccttcctggtcctgatgcgctcactggtgacacacaggaccaaccttcgagctctgcaccgaggagctgccctggacttgagtcccttgcatcggagtccccatccctcccgccaagccatattctgttggatgagcttcagtgcctaccagacagcctttatctgccttgggctcctggtgcagcagatcatcttcttcctgggaaccacggccctggccttcctggtgctcatgcctgtgctccatggcaggaacctcctgctcttccgttccctggagtcctcgtggcccttctggctgactttggccctggctgtgatcctgcagaacatggcagcccattgggtcttcctggagactcatgatggacacccacagctgaccaaccggcgagtgctctatgcagccacctttcttctcttccccctcaatgtgctggtgggtgccatggtggccacctggcgagtgctcctctctgccctctacaacgccatccaccttggccagatggacctcagcctgctgccaccgagagccgccactctcgaccccggctactacacgtaccgaaacttcttgaagattgaagtcagccagtcgcatccagccatgacagccttctgctccctgctcctgcaagcgcagagcctcctacccaggaccatggcagccccccaggacagcctcagaccaggggaggaagacgaagggatgcagctgctacagacaaaggactccatggccaagggagctaggcccggggccagccgcggcagggctcgctggggtctggcctacacgctgctgcacaacccaaccctgcaggtcttccgcaagacggccctgttgggtgccaatggtgcccagccctgagggcagggaaggtcaa

SEQ ID NO: 315080 - DNA, 2324 bp, Artificial Sequence
  derived and/or modified sequence
atgaatgaatgaaggggccttattcccccatctagaaagtgggactgactccacctccttgatttatggaatacagctgggaggtaatgggggtgcaggggctgagcaactccctcctgccctgtccttgcctctgtgctagccctgtggatttcttggctggggacaggccccgggcagtgcctgctgctgttttcatggtcctcctgagctccctgtgtttgctgctccccgacgaggacgcattgcccttcctgactctcgcctcagcacccagccaagatgggaaaactgaggctccaagagatctacaagtactactccctgctggcctccctgcctctcctgctgggcctcggattcctgagcctttggtaccctgtgcagctggtgagaagcttcagccgtaggacaggagcaggctccaaggggctgcagagcagctactctgaggaatatctgaggaacctcctttgcaggaagaagctgggaagcagctaccacacctccaagcatggcttcctgtcctgggcccgcgtctgcttgagacactgcatctacactccacagccaggattccatctcccgctgaagctggtgctttcagctacactgacagggacggccatttaccaggtggccctgctgctgctggtgggcgtggtacccactatccagaaggtgagggcaggggtcaccacggatgtctcctacctgctggccggctttggaatcgtgctctccgaggacaagcaggaggtggtggagctggtgaagcaccatctgtgggctctggaagtgtgctacatctcagccttggtcttgtcctgcttactcaccttcctggtcctgatgcgctcactggtgacacacaggaccaaccttcgagctctgcaccgaggagctgccctggacttgagtcccttgcatcggagtccccatccctcccgccaagccatattctgttggatgagcttcagtgcctaccagacagcctttatctgccttgggctcctggtgcagcagatcatcttcttcctgggaaccacggccctggccttcctggtgctcatgcctgtgctccatggcaggaacctcctgctcttccgttccctggagtcctcgtggcccttctggctgactttggccctggctgtgatcctgcagaacatggcagcccattgggtcttcctggagactcatgatggacacccacagctgaccaaccggcgagtgctctatgcagccacctttcttctcttccccctcaatgtgctggtgggtgccatggtggccacctggcgagtgctcctctctgccctctacaacgccatccaccttggccagatggacctcagcctgctgccaccgagagccgccactctcgaccccggctactacacgtaccgaaacttcttgaagattgaagtcagccagtcgcatccagccatgacagccttctgctccctgctcctgcaagcgcagagcctcctacccaggaccatggcagccccccaggacagcctcagaccaggggaggaagacgaagggatgcagctgctacagacaaaggactccatggccaagggagctaggcccggggccagccgcggcagggctcgctggggtctggcctacacgctgctgcacaacccaaccctgcaggtcttccgcaagacggccctgttgggtgccaatggtgcccagccctgagggcagggaaggtcaacccacctgcccatctgtgctgaggcatgttcctgcctaccatcctcctccctccccggctctcctcccagcatcacaccagccatgcagccagcaggtcctccggatcactgtggttgggtggaggtctgtctgcactgggagcctcaggagggctctgctccacccacttggctatgggagagccagcaggggttctggagaaagaaactggtgggttagggccttggtccaggagccagttgagccagggcagccacatccaggcgtctccctaccctggctctgccatcagccttgaagggcctcgatgaagccttctctggaaccactccagcccagctccacctcagccttggccttcacgctgtggaagcagccaaggcacttcctcaccccctcagcgccacggacctctctggggagtggccggaaagctcccgggcctctggcctgcagggcagcccaagtcatgactcagaccaggtcccacactgagctgcccacactcgagagccagatatttttgtagtttttatgcctttggctattatgaaagaggttagtgtgttccctgcaataaacttgttcctgag

SEQ ID NO: 315081 - DNA, 132 bp, Artificial Sequence
  derived and/or modified sequence
acagatttcctgagaacacaacccacacgaacgcgcgtgaataagcaaccactccttctcactctatccttgttcaaactgtcgttgcagctggacgcacgcattaccttcggcgcagagtctcccggctag

SEQ ID NO: 315082 - protein, 696 aa, Artificial Sequence
  derived and/or modified sequence
MIERGLIPPTARITFQNPPITPRAAPLHSFDEARKIPTVATFTIPREPPPSPAEVKFFPKKQRSKGKSRRSRGHHDRKAMKVKTPLRALKSLWDYDFLIYDGVIDNTAPDFLAFKEHFSLAWGGIFSLLEHVEKFLRNYAIPEVKIKGNNLVALLPEFELTNKLTRYDLLSVLEDPAHVQMLINLPGQRYKGQDGNSEAAMKIQATWKCYKARKFFLFYRQQKWASGVIAIAWLLYCHKTRLKKILKESRQRHLENFRIRAKHLAANWNRIRTSRRTIIHIPSLGYSQPVREHIADFNTQQNMQLGRLCDILDANVNVIYICSHHMNDELVLYYKKILSLHAAVKSGNLEDRSDLQDRFKIITPEAVNIFPMIEQLSQLITDHLQIQRWLFKMDSEFRGNGTAFCDIPSYLKCYKWVLKESSRYGLEDWRKKWAQEPALVKISEELAGILAQHAQPVNEKRFPTWRKFLQTFLSQGGVIEAFPPADNVTNLTVDMLIEPNGKISVLSTGDQLHAESPFISSGTTVPQTSVDPQVLTYLCLQIGKACRMRDVVGYFSIDLVTFIDPSTLEQQVWATGLNLAYSDQLALTQLTLYLTNGHLDCSLSTLEVPRFVPKERKKTKCMSALSMPMLATSRYAVMTTQLRHSNLSLVFHYVFLQICRAHGIGYDVENNRRGSPGGPHDLCSPSLHHPSRNIST

SEQ ID NO: 315083 - protein, 684 aa, Artificial Sequence
  derived and/or modified sequence
MKVKTPLRALKSLWDYDFLIYDGVIDNTAPDFLAFKEHFSLAWGGIFSLLEHVEKFLRNYAIPEVKIKGNNLVALLPEFELTNKLTRYDLLSVLEDPAHVQMLINLPGQRYKGQDGNSEAAMKIQATWKCYKARKFFLFYRQQKWASGVIAIAWLLYCHKTRLKKILKESRQRHLENFRIRAKHLAANWNRIRTSRRTIIHIPSLGYSQPVREHIADFNTQQNMQLGRLCDILDANVNVIYICSHHMNDELVLYYKKILSLHAAVKSGNLEDRSDLQDRFKIITPEAVNIFPMIEQLSQLITDHLQIQRWLFKMDSEFRGNGTAFCDIPSYLKCYKWVLKESSRYGLEDWRKKWAQEPALVKISEELAGILAQHAQPVNEKRFPTWRKFLQTFLSQGGVIEAFPPADNVTNLTVDMLIEPNGKISVLSTGDQLHAESPFISSGTTVPQTSVDPQVLTYLCLQIGKACRMRDVVGYFSIDLVTFIDPSTLEQQVWATGLNLAYSDQLALTQLTLYLTNGHLDCSLSTLEVPRFVPKERKKTKCMSALSMPMLATSRYAVMTTQLRHSNLSLVFHYVFLQICRAHGIGYDVEERQGTVFILYEHLKRHKLGMLTIGEDLQGVLMTFARHLFIIHQEISAPNMQGETNFKTTIADIETILRVTKENKMRFEEEQQSKDDKNLSKPKK

SEQ ID NO: 315084 - DNA, 2091 bp, Artificial Sequence
  derived and/or modified sequence
atgatcgagcggggcctgatccctcctacagcaaggataacctttcagaacccacccatcactcctcgtgccgcaccgttgcacagcttcgacgaggcccggaagatccccacagttgctacttttacaattcccagggagcctcctcctagccctgctgaggtaaaattctttcctaagaagcagcggtcgaaagggaaatccaggagatcgagaggacatcacgacaggaaggccatgaaggtaaaaactccacttagggcacttaaaagcctttgggattacgactttctgatttacgatggggtgatcgataataccgcccccgattttctggcattcaaggagcacttctctctagcctgggggggcatttttagtcttctggaacatgtggagaagtttctgcggaactatgcaattccagaggtaaaaattaaaggaaataacttagtggcgcttttgcccgaatttgagttaacgaataagctgaccaggtacgatctgctgagcgtgttggaggacccagcccacgtgcagatgctaattaaccttccggggcagcgatataagggacaggatgggaacagcgaggccgccatgaagattcaggcaacttggaagtgctataaagccagaaaattctttctgttttatcgccaacagaaatgggcgagtggagttatcgccatcgcttggctactgtactgtcacaagacgagactgaaaaaaatcctgaaggaatccagacagcgccacctcgaaaatttccgcatacgggccaagcacctggccgccaactggaatcgcattaggacatcaagacgaacaattatccacattcccagccttggctattctcagccagtgcgggaacacattgctgacttcaatacacagcagaatatgcagcttggcagactctgcgacattctggatgctaacgtgaatgtgatatatatatgttctcatcatatgaacgatgagttagtgttgtattataaaaagattctgagcttacacgcagctgtaaaatccggtaacttggaggacagaagcgatctccaggatcggttcaaaataattacaccagaggcagtcaatattttcccgatgatcgagcagttatcccagcttattaccgatcaccttcaaatccagagatggctgttcaagatggacagcgagtttaggggaaacgggactgccttctgcgatataccctcttacttgaaatgttacaaatgggtcttaaaggaaagttctagatacggcttagaagattggcggaagaagtgggcgcaggaacccgccttagttaagatttctgaagaactggccgggattcttgcacagcatgcccagccagtcaatgagaaacgattccccacttggcgtaaatttctgcagacattcctctcccagggtggcgtgattgaggccttccccccagcggataacgttacaaatttgactgtcgatatgctgattgagccaaacggcaaaatctcggtactgagcaccggcgaccaactgcatgccgaaagcccgtttatatcttctgggacgaccgttcctcagacaagcgtggatccacaagttctgacctatttgtgccttcaaattggcaaagcttgtcggatgagagatgtggtgggatacttttcaattgacttggtcactttcattgatccatctacactagaacagcaggtgtgggccaccggactcaacctggcttactcagaccagttagctctgacacaattaactctctacctgaccaatggtcacctcgactgctcgttgagcacccttgaagtgccccgtttcgtgcccaaagaaagaaaaaagactaagtgcatgtctgccttgtctatgccaatgctcgccacttcccggtatgccgtcatgactacccagctccgccattctaacctatctctggtatttcactacgtgtttctccagatttgtagagcacatggtatcggctatgacgtcgaaaacaacagaagaggatcccccggaggaccccatgatctctgttccccaagcttgcaccacccatccaggaatatctccacttag

SEQ ID NO: 315085 - DNA, 2055 bp, Artificial Sequence
  derived and/or modified sequence
atgaaggtaaagaccccactgagggcactcaagagcctgtgggattacgattttctcatttacgatggagtgatagataacaccgccccagatttcctagccttcaaggagcatttcagtctggcctggggaggaatcttcagccttttagaacatgtggaaaagttcctgcgaaattacgcaatccctgaagtgaaaatcaagggtaacaatctcgttgcgctgctccccgagttcgagctgaccaataagctgacgcggtatgatcttttgtctgttctagaggatcctgctcatgtccagatgttgattaatctgcccgggcaacgctacaaaggtcaggacggcaacagcgaggccgccatgaagattcaggctacttggaagtgctacaaagcaagaaagttctttctcttttaccgccagcagaaatgggcaagtggtgtgatagcaatcgcatggctgctttactgtcacaagaccaggctgaaaaagatcctgaaggaatcaaggcaacgccacctcgagaactttaggatcagggctaagcacttagcagctaattggaacagaatcagaacttcgcgtagaacaatcattcacataccgtccctggggtactcacagcccgtacgtgaacatatcgctgactttaatactcagcagaacatgcagctagggcggctgtgcgacatcctggatgccaatgtaaatgttatatacatctgcagtcaccatatgaacgacgaactggtcttgtattacaagaaaattctaagcctgcacgccgccgtgaagtcaggaaatctggaggatcgaagcgacctccaggacaggtttaaaataatcacccccgaggctgtaaacatatttcctatgatagaacagctcagtcagcttatcacggatcacttacagatccaacggtggctgtttaaaatggattccgaattcagaggcaatggtactgcattttgtgacatcccatcatacctgaagtgctacaaatgggttctgaaggagtcgtcccgctacggcctcgaagactggaggaagaagtgggcacaagaacccgccctggtgaagattagcgaggaacttgccggaattctggcccagcacgctcagcccgtgaatgaaaagaggttcccaacctggcggaaattcctacagacattcctaagtcagggtggggttattgaggcatttcccccagccgataatgttaccaaccttactgttgatatgcttattgaaccaaatgggaaaattagcgttttatccacaggcgatcagttgcacgccgaatctccattcatctcaagcggaaccacagtaccacagaccagtgtggatccacaggtgctgacctacctctgcctgcagattggtaaggcttgtaggatgcgggacgtcgtgggctacttctctatcgatctggtcaccttcattgacccctccactttggagcagcaagtgtgggccaccgggctgaatctggcatatagcgaccagctggctcttacccagctgactctatacctcactaatggacacctagattgcagcttatccacgcttgaggtgcccagatttgtcccgaaagaaagaaagaaaactaaatgcatgagcgccctgtccatgcctatgttggctacttcacggtatgcggttatgaccacacagcttaggcactcgaatctgtccctggtctttcattacgtctttcttcagatctgccgggcccacggcatcggctacgatgtcgaagaacgccagggcacagtcttcattttatatgaacatctgaagaggcacaagctcgggatgcttacgatcggcgaagatctgcagggtgttttgatgacgttcgcacggcatctatttattatccaccaggaaatttcagcccccaacatgcaaggcgaaactaatttcaagacaaccatcgcagacattgagaccatcctgcgggtgaccaaggagaataaaatgaggttcgaggaagagcagcagtctaaagatgacaagaacctgagcaagcccaagaagtag

SEQ ID NO: 315086 - DNA, 3903 bp, Artificial Sequence
  derived and/or modified sequence
cgcgcgcggtgttgccatggggacgagcggctccggctgaaggtttccgtgcttggaaaccgcgcctccgcggaggtagccgttccctgacctagccatggcacagaacactgaaaaccacgaccctgtcggatccatcttaatccagatccatgaagacctttatcagttaaaggagaaattaacaaaattctcacctgaggaaaaaggagagactctagacattcagagtcttgaaacagcaatcaaaaggactgaagtggggttaagaattcacattgagaagtatttaaatgttgtaaaccagaatgtattaacgacttctgttaatgatgagagcttatatactccccaggcttccaaatggttacttccaactgtaattgatcagaaatcatttattttccctcaggaatctgagggtacattttggcaaccccaaagacagcacagttcatctctgcctgtctttccaagagcaaagataaaggtttcgaagttaatcaaagggtctaacatatccagcctcacggttctgccatcttctcattgcacagatccctatttcactcctataccagtcttacaagcagatgcccacaaagggattttaagtatgatagaacgagggctgattccaccaacagcaaggattacctttcagaatccacccattacacccagagcagctcctctgcatagttttgatgaagcacgtaagattccaactgtagccactttcactatacctcgggaaccacctccatctccagcagaagtgaagttctttcccaagaaacaaagatcaaaggggaaaagcagaaggtcaagaggacatcatgataggaaggccatgaaagtcaaaacacctttgagagccctgaaatcactgtgggattatgactttttaatttatgatggtgtcatagacaatacagccccagacttcttagcattcaaggaacattttagcttagcttggggaggtattttttctctcttggaacacgtcgagaagtttctcaggaactatgctataccagaagtcaaaataaaagggaataatttggtggccctccttccagagtttgagctgacgaataaacttaccagatatgaccttctctcagtgttagaggacccagctcatgtccaaatgctgataaatcttccagggcaaaggtacaagggccaagatggaaattcggaggccgccatgaagatccaagccacatggaaatgctacaaagcaagaaaattcttcctcttttatcgccagcagaagtgggcatcaggtgtgattgccattgcttggctgttatattgccataagactcgactaaagaagatactaaaggaatcacgtcagagacacctggagaattttcgcattcgagccaagcatctggcagccaactggaatcgcatcaggacctccaggaggactattatccatatcccatcattagggtattcccagcctgtgagagaacatattgccgatttcaacacacagcagaacatgcagctggggaggctgtgtgacatcttagatgccaatgtgaatgtcatctacatctgctcccatcatatgaatgacgagttagtgctgtattacaaaaaaatcctaagtctacatgcagccgtcaaatctgggaaccttgaggacagaagtgacctgcaggacaggttcaaaattatcacacctgaagctgtaaacatcttccctatgatagagcagctgagtcagctgataactgatcacctgcaaatacagcgttggctctttaaaatggactctgagttccgaggaaatgggactgcattttgtgatattccttcctacctaaagtgctacaaatgggtgctaaaggagagtagcagatatggccttgaagactggagaaagaaatgggcacaagagccagctttggtgaagatctctgaggagctggcgggcattttagcacagcacgcacagccagtcaatgagaaacggttcccgacgtggaggaaattcctccaaacatttctcagtcaagggggtgtgatcgaagcattcccacctgcagacaatgtcaccaacctcacagtggacatgctgatagagcccaacgggaaaatcagcgtgctgtcgacaggggaccagcttcatgctgaaagccccttcatctcctctggtaccaccgtgcctcagacctcagtggatccccaagttctcacttatttgtgcctccaaattggaaaagcctgcagaatgagagatgtggttggttacttttcgatagatctggtgacttttatagatccaagcaccttggaacaacaggtgtgggcaaccggccttaacctcgcatatagtgaccagctggccctgactcaactcaccttatacctgacaaacggccatctggattgcagtttgagcaccctggaagtgccccgctttgttccaaaggaaaggaagaaaaccaaatgcatgagtgcgctgtcaatgccgatgctggcaaccagtcgctatgcagtgatgaccacccagctaagacacagcaatctctcactggttttccactatgtttttctccagatctgtagggcccatggcattggctatgatgttgagaacaatcggcgaggatctccagggggtcctcatgacctttgctcgccatctcttcatcatccatcaagaaatatcagcacctaatatgcaaggcgagaccaattttaagaccaccattgctgatattgaaactattctaagagtaacaaaggaaaacaaaatgagatttgaagaggagcaacagtccaaagatgataaaaacctctctaaacccaagaaatgatcctggaatacagtacataacaatttggatcccagtctggaataaaaagggcaatttttttttctgttagaaataaaagccaggggaaattggtttgctttgtgtgctaggaggtgaatcagaacagattataatgaaatgctctttttaaaacattgtttattaagtgatcttattttatttattaaaccaaaacttatttgtgttttcatttgagagtgttgaacaatcccttcttcttctcaaactcagaaaaaagtaatctgataaaagaagaaagttaaaagtcttactgatatcacctccgcatttacttcctcataggcctcaggattatgtagcttttattttttatgttttataaagttttctcctatttctaatagtccatcgatcttctgcatttataggtttgaataaaggcttaagaattgctatttgtcaaaacacaaatgcctttttttcaaagcttcaaattatattgaaattatatttatatgaatttttaagtgactatcattcatcgtgtttttgttataccaagccactattgtctgctattgttgccatttttcaaaaagtaggataagccagcatctagttaaccaaagcatcagaatgtatctaggtggcagtatctgctcttagtttaagatggagtgtagctcgagctctgtagcttgaataaacatttgtattctctagttctccatttaatacagcagtaggattttttcaagtttagttcaacattatactacctttaaaaaggcagactgttaagattgtagtagtgctgactctaactttcagcattcacttcataattgtccaaaaatatttccacatcagtgagctttactgaagggtgaaataaaagcaaattacaacaccaaaaccattattgttttaaagaatgacctttatgtctataaaaatattttagtgtattggggaaaggaataggatttttacctgtggaatttcaataatttgttaactgtgattcagccacaggctaagagtttctgtaataaaattaacatttgtgtgtgtc

SEQ ID NO: 315087 - DNA, 3965 bp, Artificial Sequence
  derived and/or modified sequence
cgcgcgcggtgttgccatggggacgagcggctccggctgaaggtttccgtgcttggaaaccgcgcctccgcggaggtagccgttccctgacctagccatggcacagaacactgaaaaccacgaccctgtcggatccatcttaatccagatccatgaagacctttatcagttaaaggagaaattaacaaaattctcacctgaggaaaaaggagagactctagacattcagagtcttgaaacagcaatcaaaaggactgaagtggggttaagaattcacattgagaagtatttaaatgttgtaaaccagaatgtattaacgacttctgttaatgatgagagcttatatactccccaggcttccaaatggttacttccaactgtaattgatcagaaatcatttattttccctcaggaatctgagggtacattttggcaaccccaaagacagcacagttcatctctgcctgtctttccaagagcaaagataaaggtttcgaagttaatcaaagggtctaacatatccagcctcacggttctgccatcttctcattgcacagatccctatttcactcctataccagtcttacaagcagatgcccacaaagggattttaagtatgatagaacgagggctgattccaccaacagcaaggattacctttcagaatccacccattacacccagagcagctcctctgcatagttttgatgaagcacgtaagattccaactgtagccactttcactatacctcgggaaccacctccatctccagcagaagtgaagttctttcccaagaaacaaagatcaaaggggaaaagcagaaggtcaagaggacatcatgataggaaggccatgaaagtcaaaacacctttgagagccctgaaatcactgtgggattatgactttttaatttatgatggtgtcatagacaatacagccccagacttcttagcattcaaggaacattttagcttagcttggggaggtattttttctctcttggaacacgtcgagaagtttctcaggaactatgctataccagaagtcaaaataaaagggaataatttggtggccctccttccagagtttgagctgacgaataaacttaccagatatgaccttctctcagtgttagaggacccagctcatgtccaaatgctgataaatcttccagggcaaaggtacaagggccaagatggaaattcggaggccgccatgaagatccaagccacatggaaatgctacaaagcaagaaaattcttcctcttttatcgccagcagaagtgggcatcaggtgtgattgccattgcttggctgttatattgccataagactcgactaaagaagatactaaaggaatcacgtcagagacacctggagaattttcgcattcgagccaagcatctggcagccaactggaatcgcatcaggacctccaggaggactattatccatatcccatcattagggtattcccagcctgtgagagaacatattgccgatttcaacacacagcagaacatgcagctggggaggctgtgtgacatcttagatgccaatgtgaatgtcatctacatctgctcccatcatatgaatgacgagttagtgctgtattacaaaaaaatcctaagtctacatgcagccgtcaaatctgggaaccttgaggacagaagtgacctgcaggacaggttcaaaattatcacacctgaagctgtaaacatcttccctatgatagagcagctgagtcagctgataactgatcacctgcaaatacagcgttggctctttaaaatggactctgagttccgaggaaatgggactgcattttgtgatattccttcctacctaaagtgctacaaatgggtgctaaaggagagtagcagatatggccttgaagactggagaaagaaatgggcacaagagccagctttggtgaagatctctgaggagctggcgggcattttagcacagcacgcacagccagtcaatgagaaacggttcccgacgtggaggaaattcctccaaacatttctcagtcaagggggtgtgatcgaagcattcccacctgcagacaatgtcaccaacctcacagtggacatgctgatagagcccaacgggaaaatcagcgtgctgtcgacaggggaccagcttcatgctgaaagccccttcatctcctctggtaccaccgtgcctcagacctcagtggatccccaagttctcacttatttgtgcctccaaattggaaaagcctgcagaatgagagatgtggttggttacttttcgatagatctggtgacttttatagatccaagcaccttggaacaacaggtgtgggcaaccggccttaacctcgcatatagtgaccagctggccctgactcaactcaccttatacctgacaaacggccatctggattgcagtttgagcaccctggaagtgccccgctttgttccaaaggaaaggaagaaaaccaaatgcatgagtgcgctgtcaatgccgatgctggcaaccagtcgctatgcagtgatgaccacccagctaagacacagcaatctctcactggttttccactatgtttttctccagatctgtagggcccatggcattggctatgatgttgaggaaaggcaaggaactgtttttatattatatgagcacctgaagagacacaagttgggaatgttaacaatcggcgaggatctccagggggtcctcatgacctttgctcgccatctcttcatcatccatcaagaaatatcagcacctaatatgcaaggcgagaccaattttaagaccaccattgctgatattgaaactattctaagagtaacaaaggaaaacaaaatgagatttgaagaggagcaacagtccaaagatgataaaaacctctctaaacccaagaaatgatcctggaatacagtacataacaatttggatcccagtctggaataaaaagggcaatttttttttctgttagaaataaaagccaggggaaattggtttgctttgtgtgctaggaggtgaatcagaacagattataatgaaatgctctttttaaaacattgtttattaagtgatcttattttatttattaaaccaaaacttatttgtgttttcatttgagagtgttgaacaatcccttcttcttctcaaactcagaaaaaagtaatctgataaaagaagaaagttaaaagtcttactgatatcacctccgcatttacttcctcataggcctcaggattatgtagcttttattttttatgttttataaagttttctcctatttctaatagtccatcgatcttctgcatttataggtttgaataaaggcttaagaattgctatttgtcaaaacacaaatgcctttttttcaaagcttcaaattatattgaaattatatttatatgaatttttaagtgactatcattcatcgtgtttttgttataccaagccactattgtctgctattgttgccatttttcaaaaagtaggataagccagcatctagttaaccaaagcatcagaatgtatctaggtggcagtatctgctcttagtttaagatggagtgtagctcgagctctgtagcttgaataaacatttgtattctctagttctccatttaatacagcagtaggattttttcaagtttagttcaacattatactacctttaaaaaggcagactgttaagattgtagtagtgctgactctaactttcagcattcacttcataattgtccaaaaatatttccacatcagtgagctttactgaagggtgaaataaaagcaaattacaacaccaaaaccattattgttttaaagaatgacctttatgtctataaaaatattttagtgtattggggaaaggaataggatttttacctgtggaatttcaataatttgttaactgtgattcagccacaggctaagagtttctgtaataaaattaacatttgtgtgtgtc

SEQ ID NO: 315088 - DNA, 2091 bp, Artificial Sequence
  derived and/or modified sequence
atgattgaaagaggcctcatccccccaacagcccgcatcaccttccagaacccccccatcaccccccgggccgcccccctgcacagctttgatgaggccaggaagatccccaccgtggccaccttcaccatcccccgggagcccccacccagccctgctgaggtgaagttcttccccaagaagcagaggagcaagggcaagagcagaagaagccggggccaccacgacaggaaggccatgaaggtgaagacccccctgcgggccctgaagagcctgtgggactatgacttcctgatctatgatggagtcatcgacaacacagccccagacttcctggccttcaaggagcacttcagcctggcctggggcggcatcttcagcctgctggagcacgtggagaagttcctgagaaattatgccatccctgaggtgaagatcaagggcaacaacctggtggccctgctgcctgagtttgagctgaccaacaagctgaccaggtatgacctgctgtctgtgctggaggaccctgcccacgtgcagatgctgatcaacctgcccggccagcgctacaagggccaggacggcaacagcgaggccgccatgaagatccaggccacctggaagtgctacaaggccaggaagttcttcctgttctaccggcagcagaagtgggccagcggcgtgattgccatcgcctggctgctgtactgccacaagacccggctgaagaagatcctgaaggagagccggcagaggcacctggagaacttccgcatccgggccaagcacctggccgccaactggaaccgcatccgcaccagcaggaggaccatcatccacatccccagcctgggctacagccagcctgtgcgggagcacatcgctgacttcaacacccagcagaacatgcagctgggccgcctgtgtgacatcctggatgccaacgtgaatgtcatctacatctgcagccaccacatgaatgatgagctggtgctgtactacaagaagatcctgagcctgcacgccgctgtgaagagcggcaacctggaggacagaagtgacctgcaggaccgcttcaagatcatcaccccagaggccgtgaacatcttccccatgattgagcagctgagccagctgatcacagaccacctgcagatccagcgctggctgttcaagatggattctgagttcagaggaaatggaacagccttctgtgacatccccagctacctgaagtgctacaagtgggtgctgaaggagagcagccgctatggcctggaggactggaggaagaagtgggcccaggagcccgccctggtgaagatcagcgaggagctggccggcatcctggcccagcacgcccagcctgtgaatgagaagcgcttccccacctggaggaagttcctgcagaccttcctgagccagggcggcgtgattgaggccttccccccagctgacaacgtgaccaacctgactgtggacatgctgattgagcccaacgggaagatctctgtgctgagcactggagaccagctgcacgccgagagccccttcatcagcagcggcaccaccgtgccccagacctctgtggacccccaggtgctgacctacctgtgcctgcagatcggcaaggcctgcaggatgagagatgtggtgggctacttcagcattgacctggtgaccttcatcgaccccagcaccctggagcagcaggtgtgggccaccggcctgaacctggcctacagcgaccagctggccctgacccagctgaccctgtacctgaccaacggccacctggactgcagcctgagcaccctggaggtgcccaggtttgtgcccaaggagaggaagaagaccaagtgcatgtctgccctgtccatgcccatgctggccaccagccgctatgctgtgatgaccacccagctgcggcacagcaacctgagcctggtgttccactacgtgttcctgcagatctgccgggcccacggcatcggctatgatgtggagaacaacagaagaggcagccctgggggcccccatgacctgtgcagccccagcctgcaccaccccagcaggaacatcagcacctag

SEQ ID NO: 315089 - DNA, 2055 bp, Artificial Sequence
  derived and/or modified sequence
atgaaggtgaagacccccctgcgggccctgaagagcctgtgggactatgacttcctgatctatgatggagtgattgacaacacagccccagacttcctggccttcaaggagcacttcagcctggcctggggcggcatcttcagcctgctggagcacgtggagaagttcctgaggaactatgccatccctgaggtgaagatcaagggcaacaacctggtggccctgctgcctgagtttgagctgaccaacaagctgaccaggtatgacctgctgtctgtgctggaggaccctgcccacgtgcagatgctgatcaacctgcccggccagcgctacaagggccaggacggcaacagcgaggccgccatgaagatccaggccacctggaagtgctacaaggccaggaagttcttcctgttctaccggcagcagaagtgggccagcggggtcatcgccatcgcctggctgctgtactgccacaagacccggctgaagaagatcctgaaggagagccggcagaggcacctggagaacttccgcatccgggccaagcacctggccgccaactggaaccgcatccgcaccagcaggaggaccatcatccacatccccagcctgggctacagccagcctgtgcgggagcacatcgctgacttcaacacccagcagaacatgcagctgggccgcctgtgtgacatcctggatgccaacgtgaatgtcatctacatctgcagccaccacatgaatgatgagctggtgctgtactacaagaagatcctgagcctgcatgctgctgtgaagagcggcaacctggaggacagaagtgacctgcaggaccgcttcaagatcatcaccccagaggccgtgaacatcttccccatgattgagcagctgagccagctgatcacagaccacctgcagatccagcgctggctgttcaagatggacagcgagttcagaggaaatggaacagccttctgtgacatccccagctacctgaagtgctacaagtgggtgctgaaggagagcagccgctatggcctggaggactggaggaagaagtgggcccaggagcccgccctggtgaagatcagcgaggagctggccggcatcctggcccagcacgcccagcctgtgaatgagaagcgcttccccacctggaggaagttcctgcagaccttcctgagccagggcggcgtcatcgaggccttccccccagctgacaacgtgaccaacctgactgtggacatgctgattgagcccaacgggaagatctctgtgctgagcactggagaccagctgcatgctgagagccccttcatcagcagcggcaccaccgtgccccagacctctgtggacccccaggtgctgacctacctgtgcctgcagatcggcaaggcctgcaggatgagagatgtggtgggctacttcagcattgacctggtgaccttcatcgaccccagcaccctggagcagcaggtgtgggccaccggcctgaacctggcctacagcgaccagctggccctgacccagctgaccctgtacctgaccaacggccacctggactgcagcctgagcaccctggaggtgcccaggtttgtgcccaaggagaggaagaagaccaagtgcatgtctgccctgtccatgcccatgctggccaccagccgctatgctgtgatgaccacccagctgcggcacagcaacctgagcctggtgttccactacgtgttcctgcagatctgccgggcccatggaattggctatgatgtggaggagcggcagggcaccgtcttcatcctgtatgagcacctgaagaggcacaagctgggcatgctgaccatcggggaggacctgcagggcgtgctgatgacctttgcccggcacctgttcatcatccaccaggagatcagcgcccccaacatgcagggcgagaccaacttcaagaccaccatcgctgacatcgagaccatcctgcgggtgaccaaggagaacaagatgagatttgaggaggagcagcagagcaaggatgacaagaacctgagcaagcccaagaagtag

SEQ ID NO: 315090 - DNA, 2091 bp, Artificial Sequence
  derived and/or modified sequence
atgatcgagcggggcctgatcccccccaccgcccggatcaccttccaaaacccccccataacgccccgcgctgcaccgctgcattcattcgacgaagcccggaaaattccaacagtcgcaacatttacaatcccacgggaaccacccccctcaccagccgaagtaaagttcttccctaagaagcagcgatccaagggaaaatcacggcgcagtcgtggtcaccacgaccggaaagccatgaaagtcaaaacccccttgagggccctcaaaagcctttgggactacgatttcctcatctatgatggcgtgatcgataatacagcacccgactttcttgcgtttaaggagcactttagcctggcgtggggcgggatcttctccctgttggaacacgttgaaaagttcctcaggaactatgctattccggaggtaaaaatcaagggaaataacctggtggcactcttgcctgagtttgaacttactaacaaactgacgcgctacgatttgctgagcgtcttggaggatcctgcccatgttcaaatgctgatcaatctgcccggtcaaagatacaagggacaggatggcaattcagaagctgcaatgaagatccaggcaacgtggaagtgttacaaggcgcgcaagttcttcctcttctaccgtcagcagaagtgggcaagtggcgtcatagcaatcgcctggttgttatattgtcataaaaccaggctgaaaaaaattctcaaggaaagcagacagcggcatttggagaactttcgcatcagggccaagcacctcgccgcgaactggaatagaatcaggaccagtcgccggactatcatccacattccctcactgggatacagccagccagtgcgcgagcacatcgctgacttcaacacccagcaaaatatgcagctgggcaggctctgtgacatccttgatgctaatgtgaacgtaatttacatatgctcacaccacatgaatgatgaattagttttgtattacaagaagatcctgtctttacacgccgctgtgaagagcggtaatctggaggaccgctcagatttacaggacagattcaagattatcactcccgaggctgttaacatattccccatgatcgagcagctatctcagctgataactgatcatctccagatccaacgttggctgttcaagatggatagcgagtttcgaggcaacggtacagccttctgcgacattccctcttacctaaaatgctataaatgggttcttaaagagagtagtcgatacggactggaagattggcgcaaaaaatgggctcaggaaccagccttagttaagatatctgaagaactcgcgggcatcctggctcaacatgcccagcccgttaatgaaaagagattcccaacttggagaaagtttctgcagacatttctgtctcagggtggggtgatcgaagcgttcccgccagccgacaatgtgactaatttgactgttgacatgttaattgaacctaatggaaagatctccgttctaagcactggcgatcagctgcacgccgaatccccattcatttcatccggcacaactgtgccacagaccagcgtggacccccaagtgctgacctatctctgtttgcagatcggcaaagcatgccggatgcgagatgttgtgggctatttctcgatcgatttagtcacttttatagacccgagcaccttagagcagcaggtctgggctactggcttaaatctagcctactccgatcagctggcgctgacccaactaactctctatctcactaatgggcacttggattgctccctgagtacgttggaggtccctcgcttcgtgccgaaggagcggaagaagacaaagtgcatgtccgccctgtcgatgcccatgctggcaacaagtaggtacgcagtgatgactacccagctccggcactctaacctatctctggtgttccactatgtcttcttgcaaatttgccgcgcccatggtatcggctacgacgtagaaaacaaccggaggggatctcctgggggaccacacgatctttgttccccgtccctgcaccacccttcccgtaacatatccacttag

SEQ ID NO: 315091 - DNA, 2055 bp, Artificial Sequence
  derived and/or modified sequence
atgaaggtgaagacccccctgcgggccctgaagagcctgtgggactatgactttctgatatatgatggcgtgatcgacaatacggcccccgactttttagcttttaaggagcattttagcttggcctggggtggcatcttcagtctcctggagcacgtggagaagttcctgcgtaattacgctattcctgaggtgaagatcaagggaaacaatttagtcgccctgctgcctgaattcgagctcacgaataaattaacgagatacgacttgctgtcagttctcgaggatccagcccatgtgcagatgttaattaacctacccgggcaaagatataaaggccaggatggcaacagtgaagcagccatgaagatacaggcaacatggaagtgctataaggctcgcaaattttttctgttttacagacagcagaagtgggcctcaggtgtgattgcaatcgcttggcttctgtattgccacaagaccagactaaagaagatcctgaaggagtcgcggcagcgccatctagaaaattttagaattagagccaagcatcttgctgctaattggaaccgtattcgtacgagtcgccgaacaataatccacataccctccctgggctactctcagccggttagggagcatatcgccgacttcaacactcagcagaatatgcaactgggacgcctgtgtgacatcctggacgctaacgttaatgttatctacatttgtagtcatcacatgaacgatgaacttgtcctgtattataaaaaaattctcagcttgcatgcagccgtgaagtctggaaacctcgaagaccggtccgacctccaggataggttcaagatcataactcctgaggccgtgaatatctttcctatgatcgagcagctaagccaattgattactgatcatttacagatacagcgatggctattcaagatggattctgaattcaggggaaatggtaccgccttctgcgatattccttcctacttgaagtgctataagtgggtgctcaaagagtcgtccaggtacggactagaagattggcgcaagaagtgggcccaggaacccgccctggtgaagatttcggaagagctcgccggaattcttgcccagcacgctcagccagtcaacgagaaacgctttcccacatggagaaagttcctccagacttttcttagccaggggggcgtgattgaggcgtttccccccgcggacaatgttaccaatttaacagtcgacatgctcatcgagcccaatgggaaaattagcgttctctctaccggcgatcagctgcacgcggagtccccatttatttcttctgggactacagtgccacagacatctgtcgaccctcaagtactcacctatttgtgtctgcaaatagggaaggcttgcaggatgcgagacgtggtcggttatttttcaatagatctggtcacattcattgatccaagcaccctggagcagcaggtgtgggcaaccgggctcaacctcgcctactctgatcagctcgcactgacacaactgaccttgtacctcaccaacggccacctggactgcagcctttcaacgttggaagttccccgcttcgtgcccaaggagcggaaaaagactaaatgtatgtcagctctgagcatgccaatgctggcgacctcacgctacgcagtgatgacaactcagcttcgccactccaatttatcacttgtgttccactatgttttcttgcagatctgcagagcacacggcattggatacgacgtggaagaaagacagggaaccgtgttcatcttgtacgagcaccttaagagacataagctcggcatgttaacaatcggcgaagatctgcagggcgttttgatgaccttcgccagacacctttttattattcaccaagagatctcggctcccaacatgcaaggagaaaccaattttaaaacgacaatagcggacatcgaaacaatcctgcgagtgacaaaggagaacaagatgcgctttgaggaggagcaacaatctaaagacgataaaaatctgtctaagcctaaaaagtag

SEQ ID NO: 315092 - DNA, 2091 bp, Artificial Sequence
  derived and/or modified sequence
atgatagagcgcggactgattcccccaacggcaaggattacgttccagaaccctcccataacaccaagagcagctcctttacacagcttcgatgaagcacggaagattccgacggtggccacattcaccattccacgggaaccacccccatcgccagctgaagtgaaatttttcccaaaaaagcagcgcagcaagggaaaaagtcgcagatcccgcggacatcacgatcggaaggcaatgaaggtgaagacccccctgcgggcattaaaatcactgtgggactacgatttcctcatctatgacggggtgatcgataacacagctccagatttcctcgcctttaaggagcacttctccttggcttggggtggaattttttctctactggagcatgtggaaaaattccttagaaactacgccatacctgaagtaaagatcaaaggcaataacctggtagctctcctgcctgagtttgaactgaccaataaactcacgcgctacgacttactctctgttcttgaggacccagcccacgtacagatgttgataaatctgccaggccagagatacaaggggcaagacggcaatagcgaagctgccatgaaaattcaggcgacctggaaatgctacaaggcccgtaagttcttccttttttacagacagcaaaaatgggcttctggggtgattgcaatcgcgtggcttctatattgccacaagacgcgccttaagaagattctgaaagagtcgagacagagacatctggagaatttccgcatccgcgcaaagcacctggcagccaactggaacagaatccgcaccagtaggagaaccataattcacatcccaagcttaggctacagccagccagtgagagagcatatcgcagacttcaacacgcagcagaacatgcaacttggcagattgtgcgatatactcgacgctaacgtgaatgtcatttacatctgctctcaccacatgaacgacgagcttgtgttgtattacaagaaaattctttccctgcacgccgcagtgaagtccggaaacctggaggacaggtccgatttgcaggacaggttcaagatcattacccccgaggccgtcaatattttcccaatgattgaacagctcagccaactcatcaccgaccacttgcagattcagaggtggctgttcaagatggactccgaattccggggtaacggcacagcattctgtgacatcccctcctatttgaagtgttataagtgggtattaaaggaatctagcagatacggactcgaagattggcgcaaaaagtgggctcaggagccggcactcgtcaaaatcagcgaagagttagctggcattctcgctcagcacgctcagccagtaaatgagaaacgcttccctacctggcgtaaatttcttcagacctttctgagccagggaggggtgattgaagcatttcccccagctgataacgttactaatcttacagtggacatgcttatcgagccaaatggcaaaatcagcgtactgtccacaggtgaccagctccatgccgagtcaccattcatctcttcaggcaccaccgtacctcagacatctgtggacccccaggtgttaacgtacctgtgcttacagatagggaaagcctgccgaatgcgggatgtggtcggctacttctccattgatttggttacctttatcgatccctccaccctggagcagcaggtctgggccaccggccttaatctcgcttacagtgatcagctggcgttaacccagctgactctgtatcttaccaatgggcaccttgattgctctctttccacacttgaagtgccgagatttgtccctaaggaaaggaaaaaaaccaaatgtatgagcgccctttccatgcctatgctggccaccagccgctacgccgtcatgactactcaactacggcacagcaacctgtcactcgtgttccactacgtgtttctgcagatctgccgagcccatggcattgggtacgatgttgagaataaccgcaggggctcgcccggagggccacacgatctttgctcacccagcctgcatcatccatcccggaacattagtacctag

SEQ ID NO: 315093 - DNA, 2055 bp, Artificial Sequence
  derived and/or modified sequence
atgaaggtgaaaacaccactgcgggctttgaaatccttatgggactatgatttcttaatctatgacggcgttattgacaacaccgctcccgactttcttgcctttaaagaacacttttctctagcctggggcggaattttcagcctgctggagcatgtggagaagtttctgagaaattatgcaatccccgaagtgaaaatcaagggcaacaacctagtggccctactacctgagttcgaactcacaaacaaactcactcggtatgacctgctctccgtgctggaggatcctgctcatgttcaaatgctgatcaatctgccaggacagcggtataagggacaggacgggaattcagaggctgccatgaaaatccaggcaacctggaaatgctataaggcacgcaagttctttctattttaccggcagcagaaatgggcgagcggagttatagctatcgcatggctgctctattgccataagacgagactaaaaaagatcctcaaagaaagcagacagagacacctggaaaatttcagaatcagggctaaacaccttgccgctaactggaacagaatccggacgagcaggaggactattattcatatcccctcgctgggatatagccagcctgttcgtgagcacattgctgattttaatactcagcaaaacatgcaattgggcaggttgtgcgacattctcgacgccaacgtgaatgtgatttacatttgtagccaccacatgaatgatgagctggtgctttactataagaaaatactttcactccatgctgcggtgaaatcaggaaatttggaggatagaagtgatctccaggacagatttaaaatcatcacccctgaggcagtcaatatattcccgatgattgagcagctttcccaactgattaccgaccacctgcagatccaacgttggctgttcaagatggacagcgagtttcggggaaacggtacagccttttgcgatatccctagttacctcaagtgttacaagtgggtactgaaggagtcttcaaggtatggccttgaagattggcgtaaaaaatgggctcaggaacccgcactagtgaagatttcagaagagttggcgggtattctggcccagcacgcgcagcccgttaacgagaaacggttcccgacctggagaaaattcctccagactttcctcagccagggcggagttatcgaagcttttccaccagctgacaatgttacgaacttgaccgtggatatgctcatcgagcccaatgggaagatctccgtgctttctacgggagatcagctgcacgccgagtccccatttataagctctggcacgacggtgccacagacttcagtggatcctcaggtcctaacttacctgtgtttacaaattggcaaggcctgtcgcatgagagatgtggttggctacttctccattgacctggttacatttatcgatccttccaccctcgagcagcaggtttgggcaactggcctgaaccttgcctacagtgaccagttagccctgactcaactgacgttatatcttaccaacggccacttagactgctccctcagcacactcgaggtcccaagattcgttcccaaggagagaaagaagaccaagtgtatgagtgcactctctatgcccatgctggccacttctcggtatgcagtgatgacaacccagttgagacactccaatctatccctggttttccactacgtgttcctccagatatgcagggcccatggaataggttatgacgtggaagaacggcagggtaccgtgttcatcctctacgagcacctaaaaaggcacaagctgggtatgctgactatcggcgaagatctccaaggggtgcttatgacttttgccagacatctgttcattattcatcaggagatcagtgccccaaacatgcagggggaaacaaactttaagactaccattgccgacatcgaaacaattttgagggtcaccaaggagaataagatgcggtttgaggaggaacaacaaagcaaagatgacaaaaatctgagcaaacctaagaagtag

SEQ ID NO: 315094 - DNA, 2091 bp, Artificial Sequence
  derived and/or modified sequence
atgatcgagagaggcctgatcccccccaccgccagaatcaccttccagaacccccccatcacccccagagccgcccccctgcacagcttcgacgaggccagaaagatccccaccgtggccaccttcaccatccccagagagcccccccccagccccgccgaggtgaagttcttccccaagaagcagagaagcaagggcaagagcagaagaagcagaggccaccacgacagaaaggccatgaaggtgaagacccccctgagagccctgaagagcctgtgggactacgacttcctgatctacgacggcgtgatcgacaacaccgcccccgacttcctggccttcaaggagcacttcagcctggcctggggcggcatcttcagcctgctggagcacgtggagaagttcctgagaaactacgccatccccgaggtgaagatcaagggcaacaacctggtggccctgctgcccgagttcgagctgaccaacaagctgaccagatacgacctgctgagcgtgctggaggaccccgcccacgtgcagatgctgatcaacctgcccggccagagatacaagggccaggacggcaacagcgaggccgccatgaagatccaggccacctggaagtgctacaaggccagaaagttcttcctgttctacagacagcagaagtgggccagcggcgtgatcgccatcgcctggctgctgtactgccacaagaccagactgaagaagatcctgaaggagagcagacagagacacctggagaacttcagaatcagagccaagcacctggccgccaactggaacagaatcagaaccagcagaagaaccatcatccacatccccagcctgggctacagccagcccgtgagagagcacatcgccgacttcaacacccagcagaacatgcagctgggcagactgtgcgacatcctggacgccaacgtgaacgtgatctacatctgcagccaccacatgaacgacgagctggtgctgtactacaagaagatcctgagcctgcacgccgccgtgaagagcggcaacctggaggacagaagcgacctgcaggacagattcaagatcatcacccccgaggccgtgaacatcttccccatgatcgagcagctgagccagctgatcaccgaccacctgcagatccagagatggctgttcaagatggacagcgagttcagaggcaacggcaccgccttctgcgacatccccagctacctgaagtgctacaagtgggtgctgaaggagagcagcagatacggcctggaggactggagaaagaagtgggcccaggagcccgccctggtgaagatcagcgaggagctggccggcatcctggcccagcacgcccagcccgtgaacgagaagagattccccacctggagaaagttcctgcagaccttcctgagccagggcggcgtgatcgaggccttcccccccgccgacaacgtgaccaacctgaccgtggacatgctgatcgagcccaacggcaagatcagcgtgctgagcaccggcgaccagctgcacgccgagagccccttcatcagcagcggcaccaccgtgccccagaccagcgtggacccccaggtgctgacctacctgtgcctgcagatcggcaaggcctgcagaatgagagacgtggtgggctacttcagcatcgacctggtgaccttcatcgaccccagcaccctggagcagcaggtgtgggccaccggcctgaacctggcctacagcgaccagctggccctgacccagctgaccctgtacctgaccaacggccacctggactgcagcctgagcaccctggaggtgcccagattcgtgcccaaggagagaaagaagaccaagtgcatgagcgccctgagcatgcccatgctggccaccagcagatacgccgtgatgaccacccagctgagacacagcaacctgagcctggtgttccactacgtgttcctgcagatctgcagagcccacggcatcggctacgacgtggagaacaacagaagaggcagccccggcggcccccacgacctgtgcagccccagcctgcaccaccccagcagaaacatcagcacctag

SEQ ID NO: 315095 - DNA, 2055 bp, Artificial Sequence
  derived and/or modified sequence
atgaaggtgaagacccccctgagagccctgaagagcctgtgggactacgacttcctgatctacgacggcgtgatcgacaacaccgcccccgacttcctggccttcaaggagcacttcagcctggcctggggcggcatcttcagcctgctggagcacgtggagaagttcctgagaaactacgccatccccgaggtgaagatcaagggcaacaacctggtggccctgctgcccgagttcgagctgaccaacaagctgaccagatacgacctgctgagcgtgctggaggaccccgcccacgtgcagatgctgatcaacctgcccggccagagatacaagggccaggacggcaacagcgaggccgccatgaagatccaggccacctggaagtgctacaaggccagaaagttcttcctgttctacagacagcagaagtgggccagcggcgtgatcgccatcgcctggctgctgtactgccacaagaccagactgaagaagatcctgaaggagagcagacagagacacctggagaacttcagaatcagagccaagcacctggccgccaactggaacagaatcagaaccagcagaagaaccatcatccacatccccagcctgggctacagccagcccgtgagagagcacatcgccgacttcaacacccagcagaacatgcagctgggcagactgtgcgacatcctggacgccaacgtgaacgtgatctacatctgcagccaccacatgaacgacgagctggtgctgtactacaagaagatcctgagcctgcacgccgccgtgaagagcggcaacctggaggacagaagcgacctgcaggacagattcaagatcatcacccccgaggccgtgaacatcttccccatgatcgagcagctgagccagctgatcaccgaccacctgcagatccagagatggctgttcaagatggacagcgagttcagaggcaacggcaccgccttctgcgacatccccagctacctgaagtgctacaagtgggtgctgaaggagagcagcagatacggcctggaggactggagaaagaagtgggcccaggagcccgccctggtgaagatcagcgaggagctggccggcatcctggcccagcacgcccagcccgtgaacgagaagagattccccacctggagaaagttcctgcagaccttcctgagccagggcggcgtgatcgaggccttcccccccgccgacaacgtgaccaacctgaccgtggacatgctgatcgagcccaacggcaagatcagcgtgctgagcaccggcgaccagctgcacgccgagagccccttcatcagcagcggcaccaccgtgccccagaccagcgtggacccccaggtgctgacctacctgtgcctgcagatcggcaaggcctgcagaatgagagacgtggtgggctacttcagcatcgacctggtgaccttcatcgaccccagcaccctggagcagcaggtgtgggccaccggcctgaacctggcctacagcgaccagctggccctgacccagctgaccctgtacctgaccaacggccacctggactgcagcctgagcaccctggaggtgcccagattcgtgcccaaggagagaaagaagaccaagtgcatgagcgccctgagcatgcccatgctggccaccagcagatacgccgtgatgaccacccagctgagacacagcaacctgagcctggtgttccactacgtgttcctgcagatctgcagagcccacggcatcggctacgacgtggaggagagacagggcaccgtgttcatcctgtacgagcacctgaagagacacaagctgggcatgctgaccatcggcgaggacctgcagggcgtgctgatgaccttcgccagacacctgttcatcatccaccaggagatcagcgcccccaacatgcagggcgagaccaacttcaagaccaccatcgccgacatcgagaccatcctgagagtgaccaaggagaacaagatgagattcgaggaggagcagcagagcaaggacgacaagaacctgagcaagcccaagaagtag

SEQ ID NO: 315096 - protein, 168 aa, Artificial Sequence
  derived and/or modified sequence
MAQNTENHDPVGSILIQIHEDLYQLKEKLTKFSPEEKGETLDIQSLETAIKRTEVGLRIHIEKYLNVVNQNVLTTSVNDESLYTPQASKWLLPTVIDQKSFIFPQESEGTFWQPQRQHSSSLPVFPRAKRKIGLNVKILQDPENIHHRAAVNANYGISLPYINQRKAC

SEQ ID NO: 315097 - DNA, 1000 bp, Artificial Sequence
  derived and/or modified sequence
cgcgcgcggtgttgccatggggacgagcggctccggctgaaggtttccgtgcttggaaaccgcgcctccgcggaggtagccgttccctgacctagccatggcacagaacactgaaaaccacgaccctgtcggatccatcttaatccagatccatgaagacctttatcagttaaaggagaaattaacaaaattctcacctgaggaaaaaggagagactctagacattcagagtcttgaaacagcaatcaaaaggactgaagtggggttaagaattcacattgagaagtatttaaatgttgtaaaccagaatgtattaacgacttctgttaatgatgagagcttatatactccccaggcttccaaatggttacttccaactgtaattgatcagaaatcatttattttccctcaggaatctgagggtacattttggcaaccccaaagacagcacagttcatctctgcctgtctttccaagagcaaagcgaaagatagggttgaatgtaaaaatcttgcaggatcctgaaaacatccaccacagagctgctgtaaatgcgaactatggaatcagtttgccatatattaatcagagaaaagcatgttaggtcctcaaaggtatgtggaaacaagaagaaatccctggtactgttcatgttccctcactgacatccagttccagttagactttataatacaacacattaagaaatctacagaaaatttgactttgatttattccttttaaataaaaagtgtttcttaaaaggcttgaaacatgtatctgttaacatgaattttaaaagaacaattatgaatgcataacaaaatagccaaaccaaacattgctttgaattgctgcacaaataactgattataactgttatgacctagaaaaaaatcataaaaacatttttctttttggcaagatgtgagttgctgtagaattataccagttctttggttctactttccaaataaatatatatataatgcaatgtaaa

SEQ ID NO: 315098 - DNA, 282 bp, Artificial Sequence
  derived and/or modified sequence
atggacacccagaagcagatccacaagacccacaacagcaagaaccagttctttacaatcttctttttcctcagtgtggagtttgggaaggaaggtacgcgaaagaatttttacctccttctgtcaatcggccactacgggcggaaaagccggcgggccgatctgggtactgccgatactgcagacaagactgagcccgagtgctttgcagccagctggacttttgatccaaaccctagtgtaactgtgtccggcgcccattccaccgccgtacatcagtag

SEQ ID NO: 315099 - protein, 294 aa, Artificial Sequence
  derived and/or modified sequence
MSFLKDVCEQSRMEDRLDRLDDAIHVLRNHAVGPSTSLPAGHSDIHSLLGPSHNAPIGSLNSNYGGSSLVASSRSASMVGTHREDSVSLNGNHSVLSSTVTTSSTDLNHKTQENYRGGLQSQSGTVVTTEIKTENKEKDENLHEPPSSDDMKSDDESSQKDIKVSSRGRTSTNEDEDLNPEQKIEREKERRMANNARERLRVRDINEAFKELGRMCQLHLKSEKPQTKLLILHQAVAVILSLEQQVRERNLNPKAACLKRREEEKVSAVSAEPPTTLPGTHPGLSETTNPMGHM

SEQ ID NO: 315100 - protein, 339 aa, Artificial Sequence
  derived and/or modified sequence
MSSNSSTSQWPRPGGQAPSSPSYENSLHSLKNRVEQQLHEHLQDAMSFLKDVCEQSRMEDRLDRLDDAIHVLRNHAVGPSTSLPAGHSDIHSLLGPSHNAPIGSLNSNYGGSSLVASSRSASMVGTHREDSVSLNGNHSVLSSTVTTSSTDLNHKTQENYRGGLQSQSGTVVTTEIKTENKEKDENLHEPPSSDDMKSDDESSQKDIKVSSRGRTSTNEDEDLNPEQKIEREKERRMANNARERLRVRDINEAFKELGRMCQLHLKSEKPQTKLLILHQAVAVILSLEQQVRERNLNPKAACLKRREEEKVSAVSAEPPTTLPGTHPGLSETTNPMGHM

SEQ ID NO: 315101 - DNA, 885 bp, Artificial Sequence
  derived and/or modified sequence
atgagcttcctgaaggacgtgtgcgagcagagcagaatggaggacagactggacagactggacgacgccatccacgtgctgagaaaccacgccgtgggccccagcaccagcctgcccgccggccacagcgacatccacagcctgctgggccccagccacaacgcccccatcggcagcctgaacagcaactacggcggcagcagcctggtggccagcagcagaagcgccagcatggtgggcacccacagagaggacagcgtgagcctgaacggcaaccacagcgtgctgagcagcaccgtgaccaccagcagcaccgacctgaaccacaagacccaggagaactacagaggcggcctgcagagccagagcggcaccgtggtgaccaccgagatcaagaccgagaacaaggagaaggacgagaacctgcacgagccccccagcagcgacgacatgaagagcgacgacgagagcagccagaaggacatcaaggtgagcagcagaggcagaaccagcaccaacgaggacgaggacctgaaccccgagcagaagatcgagagagagaaggagagaagaatggccaacaacgccagagagagactgagagtgagagacatcaacgaggccttcaaggagctgggcagaatgtgccagctgcacctgaagagcgagaagccccagaccaagctgctgatcctgcaccaggccgtggccgtgatcctgagcctggagcagcaggtgagagagagaaacctgaaccccaaggccgcctgcctgaagagaagagaggaggagaaggtgagcgccgtgagcgccgagccccccaccaccctgcccggcacccaccccggcctgagcgagaccaccaaccccatgggccacatgtag

SEQ ID NO: 315102 - DNA, 1020 bp, Artificial Sequence
  derived and/or modified sequence
atgagcagcaacagcagcaccagccagtggcccagacccggcggccaggcccccagcagccccagctacgagaacagcctgcacagcctgaagaacagagtggagcagcagctgcacgagcacctgcaggacgccatgagcttcctgaaggacgtgtgcgagcagagcagaatggaggacagactggacagactggacgacgccatccacgtgctgagaaaccacgccgtgggccccagcaccagcctgcccgccggccacagcgacatccacagcctgctgggccccagccacaacgcccccatcggcagcctgaacagcaactacggcggcagcagcctggtggccagcagcagaagcgccagcatggtgggcacccacagagaggacagcgtgagcctgaacggcaaccacagcgtgctgagcagcaccgtgaccaccagcagcaccgacctgaaccacaagacccaggagaactacagaggcggcctgcagagccagagcggcaccgtggtgaccaccgagatcaagaccgagaacaaggagaaggacgagaacctgcacgagccccccagcagcgacgacatgaagagcgacgacgagagcagccagaaggacatcaaggtgagcagcagaggcagaaccagcaccaacgaggacgaggacctgaaccccgagcagaagatcgagagagagaaggagagaagaatggccaacaacgccagagagagactgagagtgagagacatcaacgaggccttcaaggagctgggcagaatgtgccagctgcacctgaagagcgagaagccccagaccaagctgctgatcctgcaccaggccgtggccgtgatcctgagcctggagcagcaggtgagagagagaaacctgaaccccaaggccgcctgcctgaagagaagagaggaggagaaggtgagcgccgtgagcgccgagccccccaccaccctgcccggcacccaccccggcctgagcgagaccaccaaccccatgggccacatgtag

SEQ ID NO: 315103 - DNA, 885 bp, Artificial Sequence
  derived and/or modified sequence
atgagcttcctaaaagatgtatgcgagcagtcccgaatggaagataggcttgacagattggatgacgctatccacgtgctaaggaatcacgcggtcggcccctctacttccctgccagccggccactcagatatacattcgttgctgggacctagccacaatgcccccatcggctccctgaatagtaattacggcgggagctcactcgtggcgtcctctcgaagcgctagcatggtcggcactcaccgcgaggactccgtcagtctgaacgggaaccactccgttcttagttctaccgtgacaacaagctcaactgacttgaatcataagacccaggagaactatcggggcggactgcagtctcagagcggcactgtggtgacgaccgagatcaaaactgaaaacaaggagaaagacgaaaatcttcatgaacccccttcatccgatgatatgaagtccgacgacgagagcagccagaaggacattaaggtctcatcaagaggaagaacgagtaccaacgaggacgaggacctaaaccccgagcagaagatcgagcgagaaaaagagcgccgcatggccaataatgctagggagcgactcagggtgagagacatcaatgaagccttcaaagagctcggaagaatgtgccagctgcacctaaagtccgagaagccgcagacaaagctgctgattctgcaccaggccgtagcggtgattctgtctctcgaacaacaagtgagagaacgaaacctgaatccaaaggccgcatgtctgaagcgtagagaggaggaaaaagtgagtgccgtgagtgccgagccgccaacgaccctgccaggaactcaccctggtctttccgagactaccaaccccatgggacacatgtag

SEQ ID NO: 315104 - DNA, 1020 bp, Artificial Sequence
  derived and/or modified sequence
atgagtagcaattcatccacatctcagtggcctcggcccggcggccaggccccctcttcaccgagctacgaaaatagccttcattccctgaaaaatcgggtggaacagcagctccacgagcatctgcaagacgcaatgagtttcctgaaagacgtctgcgagcagtcaagaatggaggacaggttggataggttagacgatgctattcacgtgctgaggaaccacgcagtgggcccatcgacttctctccctgcagggcacagtgacatacactctctgctcggcccttcacataatgcccctatcggatcattgaacagtaattacggagggagcagcctggttgcaagctccagaagcgccagcatggtcggtacacaccgggaggactccgtttctttgaatggaaaccacagtgtgctatcctctaccgtgaccactagctccaccgatctgaaccataaaacccaggaaaattatcggggcggacttcagtctcagtcaggaacggtggtaacaacagaaatcaagacagagaataaagaaaaggacgaaaacctgcacgagccaccctcttcagatgacatgaaatctgacgacgagtcaagtcagaaagacatcaaagtctccagccggggccggacaagcactaatgaggatgaggacctaaatcccgagcagaagattgaacgggaaaaagaacgtcgcatggccaacaacgcaagggagaggctgcgggttcgcgacattaatgaggcattcaaagaactgggtcggatgtgccagctgcatctcaagtcggagaagccccagaccaaactgttgatcctgcaccaggccgtggcagtgattttgtctctcgaacagcaagtcagggagcgcaacctaaaccctaaggctgcatgtttgaagcggcgcgaagaggaaaaagtctctgccgttagcgcagaaccacccaccaccctaccagggacccacccaggtctgagcgagacaaccaaccccatgggccacatgtag

SEQ ID NO: 315105 - DNA, 885 bp, Artificial Sequence
  derived and/or modified sequence
atgtccttcctgaaggatgtgtgtgagcagagcaggatggaggaccggctggaccggctggatgatgccatccacgtgctgaggaaccacgctgtgggccccagcaccagcctgcctgctggccacagcgacatccacagcctgctgggccccagccacaatgcccccatcggcagcctgaacagcaactacggcggcagcagcctggtggccagcagccgcagcgcctccatggtgggcacccaccgggaggacagcgtgtccctgaatggaaaccacagcgtgctgagcagcacagtgaccaccagcagcacagacctgaaccacaagacccaggagaactacagaggaggcctgcagagccagagcggcaccgtggtgaccacagagatcaagacagagaacaaggagaaggatgagaacctgcacgagccccccagcagtgatgacatgaagagtgatgatgagagcagccagaaggacatcaaggtgagcagccggggccgcaccagcaccaatgaagatgaggacctgaaccctgagcagaagattgaaagagagaaggagaggaggatggccaacaatgcccgggagcggctgcgggtgcgggacatcaatgaggccttcaaggagctgggccgcatgtgccagctgcacctgaagtctgagaagccccagaccaagctgctgatcctgcaccaggccgtggccgtcatcctgagcctggagcagcaggtgcgggagaggaacctgaaccccaaggccgcctgcctgaagaggcgggaggaggagaaggtgtctgctgtgtctgctgagccccccaccaccctgcccggcacccaccctggcctgtctgagaccaccaaccccatgggccacatgtag

SEQ ID NO: 315106 - DNA, 1020 bp, Artificial Sequence
  derived and/or modified sequence
atgagcagcaacagcagcaccagccagtggcccaggcctgggggccaggcccccagcagccccagctatgagaacagcctgcacagcctgaagaacagagtggagcagcagctgcacgagcacctgcaggatgccatgtccttcctgaaggatgtgtgtgagcagagcaggatggaggaccggctggaccggctggatgatgccatccacgtgctgagaaatcatgctgtgggccccagcaccagcctgcctgctggccacagcgacatccacagcctgctgggccccagccacaatgcccccatcggcagcctgaacagcaactatggaggcagcagcctggtggccagcagccgcagcgcctccatggtgggcacccacagagaagattctgtgtccctgaatggaaaccacagcgtgctgagcagcacagtgaccaccagcagcacagacctgaaccacaagacccaggagaactaccggggcggcctgcagagccagagcggcaccgtggtgaccacagagatcaagacagagaacaaggagaaggatgagaacctgcacgagccccccagcagtgatgacatgaagagtgatgatgagagcagccagaaggacatcaaggtgagcagccggggccgcaccagcaccaatgaagatgaggacctgaaccctgagcagaagattgagcgggagaaggagaggaggatggccaacaatgcccgggagcggctgcgggtgcgggacatcaatgaggccttcaaggagctgggccgcatgtgccagctgcacctgaagtctgagaagccccagaccaagctgctgatcctgcaccaggccgtggccgtcatcctgagcctggagcagcaggtgcgggagaggaacctgaaccccaaggccgcctgcctgaagagaagagaggaggagaaggtgtctgctgtgtctgctgagccccccaccaccctgcccggcacccaccctggcctgtctgagaccaccaaccccatgggccacatgtag

SEQ ID NO: 315107 - DNA, 885 bp, Artificial Sequence
  derived and/or modified sequence
atgagcttcctgaaggacgtgtgcgagcagagccggatggaggacaggctggacaggcttgatgacgccattcacgttttgcgaaatcacgctgtggggccaagcacgtctttgcccgctggccatagtgacatacattctctgttagggccttcgcataacgctcccatcggatctctgaatagcaactatggcgggtctagcctggttgcgagctctcgatcagcctccatggtgggcactcaccgcgaggactcggtgagcttgaatgggaatcactcagttctctcatccacggtgactacttcaagcacagatttgaatcataaaacacaggaaaactaccggggtggccttcagtctcagagcggcaccgtcgtgaccacagagattaagactgagaacaaagagaaagatgagaaccttcatgagcctccatcttccgacgacatgaagagtgacgacgagagctcccagaaagatataaaggtttcttccaggggtagaacctcgaccaatgaagacgaagacctaaacccagagcagaagattgagagggaaaaggaacggcgaatggcgaacaatgctagggaacgactaagagtgagagatattaacgaggccttcaaggagctaggccgcatgtgccagctgcatctgaagtcggagaagccgcagactaaactgctcatcctgcatcaggccgttgcggtaatactgagcctcgaacagcaggtgcgggagaggaaccttaatccaaaggcagcatgcttaaagaggcgggaagaagagaaagtcagtgctgtttctgcagaacctcctactaccttgcccgggacgcaccccgggcttagtgaaacgacgaatcccatgggtcacatgtag

SEQ ID NO: 315108 - DNA, 1020 bp, Artificial Sequence
  derived and/or modified sequence
atgagcagcaacagcagcaccagccagtggccccggcccggcggccaggcaccttcctcaccctcctatgagaactctctgcactccttaaagaatcgcgttgagcagcagctccacgaacatctgcaggacgccatgagttttctgaaagatgtatgtgaacagagcagaatggaagaccggctggataggctcgacgatgccatccatgtactacggaatcacgccgttggacctagtacaagcctccccgccggccactcagacattcactctctgctgggaccaagccacaacgcgcccattggctcacttaattctaactacggaggcagcagcctggtggcatctagccgctcggcctccatggtcggtacacacagagaagatagcgtatctctcaatggtaaccatagcgtgctgtcctccaccgtgaccaccagctccactgacttaaaccataagacccaggagaattatcgcggcggtctccagtcccaaagcggcacagtcgtgacaacagaaataaaaaccgaaaataaggagaaggacgaaaatttgcacgagcctccttcctccgatgacatgaagtcggatgatgaatcatcccagaaagatatcaaggtatcatctcggggcaggacaagcacgaatgaggacgaggatctgaatccggagcagaagatagagagagaaaaggagaggcggatggccaataacgcaagagagcgtctacgcgtccgcgatataaacgaggccttcaaagagctggggcgcatgtgccagcttcacctgaaatcagagaaaccacagacaaagctgctcatcctgcaccaagcagttgctgtcatcctgtcactggaacagcaggtgcgagagcgcaacctgaatccaaaggcagcttgtctcaagagacgcgaggaggaaaaggtgagcgccgtaagcgctgagcctccaacaaccttacccggcacacaccccggattatccgagacaaccaatcccatggggcacatgtag

SEQ ID NO: 315109 - DNA, 885 bp, Artificial Sequence
  derived and/or modified sequence
atgtcctttctgaaggacgtgtgtgagcagtccaggatggaagatagacttgataggctggacgatgccatccatgtacttcgcaaccatgcggtggggccttctacgtccctacccgcagggcactccgacattcactctctgctgggtccttctcacaatgcacctattggttccctcaactcaaattacggcggaagcagcctggtggcctcttcccggtccgcgagcatggtcggaacgcatcgagaggactccgtgtccctcaacggcaatcattccgtgctaagctcgactgtgactaccagttccacagatctgaaccacaaaacccaggaaaattacaggggcggtctgcagagccagagtggcaccgtggtcactactgaaattaagactgagaacaaggagaaagatgaaaatctgcatgaaccaccttcaagcgatgatatgaagtcagatgatgaaagcagtcagaaggatattaaagttagttcaagaggtcgcacctctacaaacgaggacgaagatctcaacccggaacagaagatcgaacgcgagaaggagcggagaatggcaaataacgctcgtgagcggctgcgggtcagagacattaatgaggcattcaaagagctggggagaatgtgtcagttgcacctgaagagtgagaaaccccagaccaagctgctgattctgcatcaggccgtggccgtgatcctgtctctagagcaacaggttagggagcggaacctcaacccgaaagcagcatgcctcaaacgcagggaagaagaaaaggtgtctgctgtaagcgccgaaccacctaccaccctgccaggtactcaccccggtctctccgaaactactaacccaatggggcatatgtag

SEQ ID NO: 315110 - DNA, 1020 bp, Artificial Sequence
  derived and/or modified sequence
atgagctccaattcctctacatcgcaatggccgcgaccgggtggccaggctccgtcatcgccctcttatgaaaattcactacacagtttaaaaaaccgggtggaacaacaactgcacgagcacctccaggatgcaatgtccttccttaaagatgtgtgcgaacagtcacgtatggaagatagactcgatagactcgatgatgctattcatgtgctgcggaaccatgctgtaggtccgtccacctcgttgccagcagggcatagcgacatccactccctgctggggccttctcataacgccccaataggttcgctcaactccaactacgggggatcttctttggttgcttcatctcgatccgccagtatggtcgggactcatcgcgaggatagtgtgagcttgaacgggaaccacagcgtcctctcctccactgtcacaacctcatctaccgacttgaaccataagactcaagaaaattaccggggtggactacagtcccagagtggaacagtggtaactacagaaataaagactgagaataaggagaaagatgaaaacttgcacgagcccccttccagcgacgacatgaaatctgacgatgaaagctcgcagaaagacattaaggtcagctctcggggaaggacatccacaaacgaggacgaagacctgaatccggagcagaagattgagcgggagaaagagcgacgcatggctaacaatgccagagaaaggctccgggtccgcgatattaatgaggcttttaaggagctcggacgaatgtgtcagctgcatttgaagtcagagaaaccacagacaaaactgctgatactccaccaggctgtggccgtcatcctctcattagaacagcaggtgcgggaacgcaatctcaacccaaaagcagcctgcctcaagcgccgtgaggaagagaaggttagcgctgtcagtgcagaacccccaaccactctgccaggcacacatcccggactgtccgaaacaacaaatcccatggggcacatgtag

SEQ ID NO: 315111 - DNA, 1545 bp, Artificial Sequence
  derived and/or modified sequence
attttgagaccagacaactggactcatgtcttccaactcaaggtaccagtcagtggccaagacctggagggcaagcaccttcatccccaagctatgaaaactcactccactccctgaaaaatcgagttgagcagcaacttcacgagcatttgcaagatgcaatgtccttcttaaaggatgtctgtgagcagtctcgaatggaggatcgtttagacagactggatgatgcaatccatgtgctgcggaaccatgctgtgggaccttccaccagtttgcctgctggtcacagtgatatacatagtttattgggaccatcccataatgcaccaattggaagcctcaattcaaactatggaggatcaagccttgttgcaagcagtcgatcagcttcaatggttggaactcatcgggaagactctgtcagtctcaatggcaatcattcagtcctgtctagtacagtcactacttcaagcacagacctgaaccataaaacacaagaaaattatagaggtggcttgcaaagtcagtctggaactgttgttacaacagaaatcaagactgaaaacaaagaaaaggatgaaaaccttcatgaacctccttcatcagatgacatgaagtcagatgatgaatcctcccaaaaagatatcaaggtttcatctagaggcagaacaagtactaatgaagatgaggatttgaaccctgaacagaagatagaaagggagaaggagaggcggatggctaacaatgccagagaacgcttacgcgtgcgggatattaatgaagcattcaaagagcttggccgaatgtgtcagcttcacttgaagagtgaaaaaccccaaacaaaactccttattcttcatcaagccgtggcagtcatccttagtctagaacagcaagtcagagagaggaaccttaaccccaaagcagcctgccttaagagaagggaagaagaaaaagtttctgccgtatcggcagagccgccaaccacactgccaggaacccatcctgggcttagtgaaactaccaaccctatgggtcatatgtaaacatcagccagttccagagttatcagtaggctagatagaaggtgacctctcctcataaggacttggacaactcagattatctgaagacacaaacctgacaggagggagaagaaaaaacaaaacacttgaaccaagaaactcaaatgtaatcctacgatcaaagcaactggtcaacacttccatcagaagtgaagataggaagctcatcagatagaacatcagcccatgagatgtttgcaacaaatcttttgttgcaagcagtgtgtcgcttctgcacaatcagagactgtctcgatctctccactcaccgtggaagttgccttgtgcctaaactgaattgacaaatgcattgtaactacaaattttatttattgttatgaaactgtaaggtctacatataaagggaaaaagttaatgtggaaagctgatctacactcagctgatgccagcatacattaaagcggttcacgtgcagagaacaaagcagtgacaaccattg

SEQ ID NO: 315112 - DNA, 1544 bp, Artificial Sequence
  derived and/or modified sequence
attttgagaccagacaactggactcatgtcttccaactcaagtaccagtcagtggccaagacctggagggcaagcaccttcatccccaagctatgaaaactcactccactccctgaaaaatcgagttgagcagcaacttcacgagcatttgcaagatgcaatgtccttcttaaaggatgtctgtgagcagtctcgaatggaggatcgtttagacagactggatgatgcaatccatgtgctgcggaaccatgctgtgggaccttccaccagtttgcctgctggtcacagtgatatacatagtttattgggaccatcccataatgcaccaattggaagcctcaattcaaactatggaggatcaagccttgttgcaagcagtcgatcagcttcaatggttggaactcatcgggaagactctgtcagtctcaatggcaatcattcagtcctgtctagtacagtcactacttcaagcacagacctgaaccataaaacacaagaaaattatagaggtggcttgcaaagtcagtctggaactgttgttacaacagaaatcaagactgaaaacaaagaaaaggatgaaaaccttcatgaacctccttcatcagatgacatgaagtcagatgatgaatcctcccaaaaagatatcaaggtttcatctagaggcagaacaagtactaatgaagatgaggatttgaaccctgaacagaagatagaaagggagaaggagaggcggatggctaacaatgccagagaacgcttacgcgtgcgggatattaatgaagcattcaaagagcttggccgaatgtgtcagcttcacttgaagagtgaaaaaccccaaacaaaactccttattcttcatcaagccgtggcagtcatccttagtctagaacagcaagtcagagagaggaaccttaaccccaaagcagcctgccttaagagaagggaagaagaaaaagtttctgccgtatcggcagagccgccaaccacactgccaggaacccatcctgggcttagtgaaactaccaaccctatgggtcatatgtaaacatcagccagttccagagttatcagtaggctagatagaaggtgacctctcctcataaggacttggacaactcagattatctgaagacacaaacctgacaggagggagaagaaaaaacaaaacacttgaaccaagaaactcaaatgtaatcctacgatcaaagcaactggtcaacacttccatcagaagtgaagataggaagctcatcagatagaacatcagcccatgagatgtttgcaacaaatcttttgttgcaagcagtgtgtcgcttctgcacaatcagagactgtctcgatctctccactcaccgtggaagttgccttgtgcctaaactgaattgacaaatgcattgtaactacaaattttatttattgttatgaaactgtaaggtctacatataaagggaaaaagttaatgtggaaagctgatctacactcagctgatgccagcatacattaaagcggttcacgtgcagagaacaaagcagtgacaaccattg

SEQ ID NO: 315113 - protein, 94 aa, Artificial Sequence
  derived and/or modified sequence
MGLAWGLGVLFLMHVCGTNRIPESGGDNSVFDIFELTGAARKGSGRRLVKGPDPSSPAFRIEDANLIPPVPDDKFQDLVDAVRAEKGFLLLASL

SEQ ID NO: 315114 - DNA, 285 bp, Artificial Sequence
  derived and/or modified sequence
atgggcctggcctggggcctgggcgtgctgttcctgatgcacgtgtgcggcaccaacagaatccccgagagcggcggcgacaacagcgtgttcgacatcttcgagctgaccggcgccgccagaaagggcagcggcagaagactggtgaagggccccgaccccagcagccccgccttcagaatcgaggacgccaacctgatcccccccgtgcccgacgacaagttccaggacctggtggacgccgtgagagccgagaagggcttcctgctgctggccagcctgtag

SEQ ID NO: 315115 - DNA, 285 bp, Artificial Sequence
  derived and/or modified sequence
atgggactggcctggggcctgggtgtgctatttctcatgcacgtttgcggtacgaaccggatccctgaatcaggaggagacaattctgtgtttgatatttttgaacttactggcgccgctagaaagggaagcggccgcagattagtcaagggcccggacccctcttctcccgcctttaggatcgaggatgcaaatctgatcccacccgtccccgacgataaattccaggatctggtggacgcagtgcgagcagagaaaggcttcctactactcgcatctttgtag

SEQ ID NO: 315116 - DNA, 501 bp, Artificial Sequence
  derived and/or modified sequence
atggccgccggcaatgttgtgttagtccctctcgtcaccgttgaaatggcctccagcgcccagatgctgatgagtgccaagaaatgcctaatgccggcttctacaaccatggaaagcacaggcgtacggaccagaacccccgctactacagcttgtcctgccccacacgccagtcctgctcacagcccgagcgcccgtgtctcgaatatgccaaggccaaccaatcgctgcgcttccccgatccctctgtgtctgtgtcacagagcaggctgctattgcgaggctatctccgaacagtggacacagaagcatttccaagcttgccagcgacgcgaggatagcttggagttagccaacaaaacaacactcactagctcatttagaaataccggtagcaggggccaaagcaccaagggacgtgcccacacacgcgatgattgcatgaagaagatctggcgtaactgttacatgttcggcactaagagtttctccggagactag

SEQ ID NO: 315117 - DNA, 285 bp, Artificial Sequence
  derived and/or modified sequence
atgggcctggcctggggcctgggcgtgctcttcctgatgcacgtgtgtggcaccaaccgcatccctgagagcggcggggacaacagcgtgtttgacatctttgagctgactggagctgccaggaagggcagcggccggcggctggtgaagggccctgaccccagcagccctgccttcagaattgaagatgccaacctgatcccccctgtgcctgatgacaagttccaggacctggtggatgctgtgcgggcagagaagggcttcctgctgctggccagcctgtag

SEQ ID NO: 315118 - DNA, 501 bp, Artificial Sequence
  derived and/or modified sequence
atggctgctggaaatgtggtgctggtgcccctggtgacagtggagatggccagcagcgcccagatgctgatgtctgccaagaagtgcctgatgcctgccagcaccaccatggagagcactggagtgaggaccaggaccccagccaccacagcctgcccagccccccacgccagccctgcccacagccccagcgcccgggtgagcaacatgccccggcccaccaacagatgtgccagccccatccccctgtgcctgtgccacagagctggctgctactgtgaggccatcagcgagcagtggacccagaagcacttccaggcctgccagaggcgggaggacagcctggagctggccaacaagaccaccctgaccagcagcttcaggaacacaggcagccggggccagagcaccaagggccgggcccacaccagagatgactgcatgaagaagatctggaggaactgctacatgtttggcaccaagagcttcagcggggactag

SEQ ID NO: 315119 - DNA, 285 bp, Artificial Sequence
  derived and/or modified sequence
atgggcctggcctggggcctgggcgtgctgttcctgatgcacgtgtgtggtactaaccggatccctgagtccgggggcgacaattcggtgtttgacatctttgagctgacgggagcagcacgcaagggaagcgggcggagattggtcaaggggcccgacccatcttcccctgccttccggatcgaagacgccaatctaattcctccagtaccagacgacaaattccaggacttggtcgatgcagtgagggccgagaaaggtttccttctgttagcgagcctgtag

SEQ ID NO: 315120 - DNA, 285 bp, Artificial Sequence
  derived and/or modified sequence
atgggactggcttggggattgggcgtcttgtttctgatgcacgtctgcggcacgaaccgtattccagagtcagggggagataacagtgtcttcgacatcttcgagctcactggtgctgcgagaaagggatccggtagaagactcgtaaagggcccagacccctcaagtcccgcatttcggatagaggacgccaacctgattcccccagttcccgatgataaattccaggatctggtggacgccgtgcgggcagagaaaggatttcttttgcttgcaagtctgtag

SEQ ID NO: 315121 - DNA, 501 bp, Artificial Sequence
  derived and/or modified sequence
atggccgcaggcaatgtcgttttggtgcccctggtgacagttgagatggcctcttctgctcaaatgctgatgtccgccaagaagtgtctgatgcccgctagcaccaccatggagtcgaccggagttcggacccggacacctgccaccacagcctgccccgcacctcatgcttcccctgctcacagcccgtctgctagggtatcaaatatgcccaggccaactaaccgctgtgcttcccctattccactgtgcctgtgccatagggctgggtgctattgcgaggccatcagcgagcagtggacacaaaagcattttcaagcttgccaacgccgtgaggattccttggagcttgccaataaaactaccttaaccagctccttccggaatactggctcacggggacagagcacgaaggggagggctcataccagagatgattgcatgaaaaagatctggcgtaattgttacatgttcggcactaagagcttcagtggcgattag

SEQ ID NO: 315122 - DNA, 582 bp, Artificial Sequence
  derived and/or modified sequence
agccgctgcgcccgagctggcctgcgagttcagggctcctgtcgctctccaggagcaacctctactccggacgcacaggcattccccgcgcccctccagccctcgccgccctcgccaccgctcccggccgccgcgctccggtacacacagcaaacgcggggtcaaagagggatggtcccggccctgtccccatgcccagccccgtttctgcgcaccgtccctccctgcctagctgatctctgaccctcggctcttgtgcttcctgctacaggatccctgctgggcaccaacagctccaccatggggctggcctggggactaggcgtcctgttcctgatgcatgtgtgtggcaccaaccgcattccagagtctggcggagacaacagcgtgtttgacatctttgaactcaccggggccgcccgcaaggggtctgggcgccgactggtgaagggccccgacccttccagcccagctttccgcatcgaggatgccaacctgatcccccctgtgcctgatgacaagttccaagacctggtggatgctgtgcgggcagaaaagggtttcctccttctggcatccctg

SEQ ID NO: 315123 - protein, 1927 aa, Artificial Sequence
  derived and/or modified sequence
MPGEQMDPTGSQLDSDFSQQDTPCLIIEDSQPESQVLEDDSGSHFSMLSRHLPNLQTHKENPVLDVVSNPEQTAGEERGDGNSGFNEHLKENKVADPVDSSNLDTCGSISQVIEQLPQPNRTSSVLGMSVESAPAVEEEKGEELEQKEKEKEEDTSGNTTHSLGAEDTASSQLGFGVLELSQSQDVEENTVPYEVDKEQLQSVTTNSGYTRLSDVDANTAIKHEEQSNEDIPIAEQSSKDIPVTAQPSKDVHVVKEQNPPPARSEDMPFSPKASVAAMEAKEQLSAQELMESGLQIQKSPEPEVLSTQEDLFDQSNKTVSSDGCSTPSREEGGCSLASTPATTLHLLQLSGQRSLVQDSLSTNSSDLVAPSPDAFRSTPFIVPSSPTEQEGRQDKPMDTSVLSEEGGEPFQKKLQSGEPVELENPPLLPESTVSPQASTPISQSTPVFPPGSLPIPSQPQFSHDIFIPSPSLEEQSNDGKKDGDMHSSSLTVECSKTSEIEPKNSPEDLGLSLTGDSCKLMLSTSEYSQSPKMESLSSHRIDEDGENTQIEDTEPMSPVLNSKFVPAENDSILMNPAQDGEVQLSQNDDKTKGDDTDTRDDISILATGCKGREETVAEDVCIDLTCDSGSQAVPSPATRSEALSSVLDQEEAMEIKEHHPEEGSSGSEVEEIPETPCESQGEELKEENMESVPLHLSLTETQSQGLCLQKEMPKKECSEAMEVETSVISIDSPQKLAILDQELEHKEQEAWEEATSEDSSVVIVDVKEPSPRVDVSCEPLEGVEKCSDSQSWEDIAPEIEPCAENRLDTKEEKSVEYEGDLKSGTAETEPVEQDSSQPSLPLVRADDPLRLDQELQQPQTQEKTSNSLTEDSKMANAKQLSSDAEAQKLGKPSAHASQSFCESSSETPFHFTLPKEGDIIPPLTGATPPLIGHLKLEPKRHSTPIGISNYPESTIATSDVMSESMVETHDPILGSGKGDSGAAPDVDDKLCLRMKLVSPETEASEESLQFNLEKPATGERKNGSTAVAESVASPQKTMSVLSCICEARQENEARSEDPPTTPIRGNLLHFPSSQGEEEKEKLEGDHTIRQSQQPMKPISPVKDPVSPASQKMVIQGPSSPQGEAMVTDVLEDQKEGRSTNKENPSKALIERPSQNNIGIQTMECSLRVPETVSAATQTIKNVCEQGTSTVDQNFGKQDATVQTERGSGEKPVSAPGDDTESLHSQGEEEFDMPQPPHGHVLHRHMRTIREVRTLVTRVITDVYYVDGTEVERKVTEETEEPIVECQECETEVSPSQTGGSSGDLGDISSFSSKASSLHRTSSGTSLSAMHSSGSSGKGAGPLRGKTSGTEPADFALPSSRGGPGKLRETAVPGPLGIEDISPNLSPDDKSFSRVVPRVPDSTRRTDVGAGALRRSDSPEIPFQAAAGPSDGLDASSPGNSFVGLRVVAKWSSNGYFYSGKITRDVGAGKYKLLFDDGYECDVLGKDILLCDPIPLDTEVTALSEDEYFSAGVVKGHRKESGELYYSIEKEGQRKWYKRMAVILSLEQGNRLREQYGLGPYEAVTPLTKAADISLDNLVEGKRKRRSNVSSPATPTASSSSSTTPTRKITESPRASMGVLSGKRKLITSEEERSPAKRGRKSATVKPGAVGAGEFVSPCESGDNTGEPSALEEQRGPLPLNKTLFLGYAFLLTMATTSDKLASRSKLPDGPTGSSEEEEEFLEIPPFNKQYTESQLRAGAGYILEDFNEAQCNTAYQCLLIADQHCRTRKYFLCLASGIPCVSHVWVHDSCHANQLQNYRNYLLPAGYSLEEQRILDWQPRENPFQNLKVLLVSDQQQNFLELWSEILMTGGAASVKQHHSSAHNKDIALGVFDVVVTDPSCPASVLKCAEALQLPVVSQEWVIQCLIVGERIGFKQHPKYKHDYVSH

SEQ ID NO: 315124 - DNA, 5784 bp, Artificial Sequence
  derived and/or modified sequence
atgcccggcgagcagatggaccccaccggcagccagctggacagcgacttcagccagcaggacaccccctgcctgatcatcgaggacagccagcccgagagccaggtgctggaggacgacagcggcagccacttcagcatgctgagcagacacctgcccaacctgcagacccacaaggagaaccccgtgctggacgtggtgagcaaccccgagcagaccgccggcgaggagagaggcgacggcaacagcggcttcaacgagcacctgaaggagaacaaggtggccgaccccgtggacagcagcaacctggacacctgcggcagcatcagccaggtgatcgagcagctgccccagcccaacagaaccagcagcgtgctgggcatgagcgtggagagcgcccccgccgtggaggaggagaagggcgaggagctggagcagaaggagaaggagaaggaggaggacaccagcggcaacaccacccacagcctgggcgccgaggacaccgccagcagccagctgggcttcggcgtgctggagctgagccagagccaggacgtggaggagaacaccgtgccctacgaggtggacaaggagcagctgcagagcgtgaccaccaacagcggctacaccagactgagcgacgtggacgccaacaccgccatcaagcacgaggagcagagcaacgaggacatccccatcgccgagcagagcagcaaggacatccccgtgaccgcccagcccagcaaggacgtgcacgtggtgaaggagcagaaccccccccccgccagaagcgaggacatgcccttcagccccaaggccagcgtggccgccatggaggccaaggagcagctgagcgcccaggagctgatggagagcggcctgcagatccagaagagccccgagcccgaggtgctgagcacccaggaggacctgttcgaccagagcaacaagaccgtgagcagcgacggctgcagcacccccagcagagaggagggcggctgcagcctggccagcacccccgccaccaccctgcacctgctgcagctgagcggccagagaagcctggtgcaggacagcctgagcaccaacagcagcgacctggtggcccccagccccgacgccttcagaagcacccccttcatcgtgcccagcagccccaccgagcaggagggcagacaggacaagcccatggacaccagcgtgctgagcgaggagggcggcgagcccttccagaagaagctgcagagcggcgagcccgtggagctggagaacccccccctgctgcccgagagcaccgtgagcccccaggccagcacccccatcagccagagcacccccgtgttcccccccggcagcctgcccatccccagccagccccagttcagccacgacatcttcatccccagccccagcctggaggagcagagcaacgacggcaagaaggacggcgacatgcacagcagcagcctgaccgtggagtgcagcaagaccagcgagatcgagcccaagaacagccccgaggacctgggcctgagcctgaccggcgacagctgcaagctgatgctgagcaccagcgagtacagccagagccccaagatggagagcctgagcagccacagaatcgacgaggacggcgagaacacccagatcgaggacaccgagcccatgagccccgtgctgaacagcaagttcgtgcccgccgagaacgacagcatcctgatgaaccccgcccaggacggcgaggtgcagctgagccagaacgacgacaagaccaagggcgacgacaccgacaccagagacgacatcagcatcctggccaccggctgcaagggcagagaggagaccgtggccgaggacgtgtgcatcgacctgacctgcgacagcggcagccaggccgtgcccagccccgccaccagaagcgaggccctgagcagcgtgctggaccaggaggaggccatggagatcaaggagcaccaccccgaggagggcagcagcggcagcgaggtggaggagatccccgagaccccctgcgagagccagggcgaggagctgaaggaggagaacatggagagcgtgcccctgcacctgagcctgaccgagacccagagccagggcctgtgcctgcagaaggagatgcccaagaaggagtgcagcgaggccatggaggtggagaccagcgtgatcagcatcgacagcccccagaagctggccatcctggaccaggagctggagcacaaggagcaggaggcctgggaggaggccaccagcgaggacagcagcgtggtgatcgtggacgtgaaggagcccagccccagagtggacgtgagctgcgagcccctggagggcgtggagaagtgcagcgacagccagagctgggaggacatcgcccccgagatcgagccctgcgccgagaacagactggacaccaaggaggagaagagcgtggagtacgagggcgacctgaagagcggcaccgccgagaccgagcccgtggagcaggacagcagccagcccagcctgcccctggtgagagccgacgaccccctgagactggaccaggagctgcagcagccccagacccaggagaagaccagcaacagcctgaccgaggacagcaagatggccaacgccaagcagctgagcagcgacgccgaggcccagaagctgggcaagcccagcgcccacgccagccagagcttctgcgagagcagcagcgagacccccttccacttcaccctgcccaaggagggcgacatcatcccccccctgaccggcgccaccccccccctgatcggccacctgaagctggagcccaagagacacagcacccccatcggcatcagcaactaccccgagagcaccatcgccaccagcgacgtgatgagcgagagcatggtggagacccacgaccccatcctgggcagcggcaagggcgacagcggcgccgcccccgacgtggacgacaagctgtgcctgagaatgaagctggtgagccccgagaccgaggccagcgaggagagcctgcagttcaacctggagaagcccgccaccggcgagagaaagaacggcagcaccgccgtggccgagagcgtggccagcccccagaagaccatgagcgtgctgagctgcatctgcgaggccagacaggagaacgaggccagaagcgaggacccccccaccacccccatcagaggcaacctgctgcacttccccagcagccagggcgaggaggagaaggagaagctggagggcgaccacaccatcagacagagccagcagcccatgaagcccatcagccccgtgaaggaccccgtgagccccgccagccagaagatggtgatccagggccccagcagcccccagggcgaggccatggtgaccgacgtgctggaggaccagaaggagggcagaagcaccaacaaggagaaccccagcaaggccctgatcgagagacccagccagaacaacatcggcatccagaccatggagtgcagcctgagagtgcccgagaccgtgagcgccgccacccagaccatcaagaacgtgtgcgagcagggcaccagcaccgtggaccagaacttcggcaagcaggacgccaccgtgcagaccgagagaggcagcggcgagaagcccgtgagcgcccccggcgacgacaccgagagcctgcacagccagggcgaggaggagttcgacatgccccagcccccccacggccacgtgctgcacagacacatgagaaccatcagagaggtgagaaccctggtgaccagagtgatcaccgacgtgtactacgtggacggcaccgaggtggagagaaaggtgaccgaggagaccgaggagcccatcgtggagtgccaggagtgcgagaccgaggtgagccccagccagaccggcggcagcagcggcgacctgggcgacatcagcagcttcagcagcaaggccagcagcctgcacagaaccagcagcggcaccagcctgagcgccatgcacagcagcggcagcagcggcaagggcgccggccccctgagaggcaagaccagcggcaccgagcccgccgacttcgccctgcccagcagcagaggcggccccggcaagctgagagagaccgccgtgcccggccccctgggcatcgaggacatcagccccaacctgagccccgacgacaagagcttcagcagagtggtgcccagagtgcccgacagcaccagaagaaccgacgtgggcgccggcgccctgagaagaagcgacagccccgagatccccttccaggccgccgccggccccagcgacggcctggacgccagcagccccggcaacagcttcgtgggcctgagagtggtggccaagtggagcagcaacggctacttctacagcggcaagatcaccagagacgtgggcgccggcaagtacaagctgctgttcgacgacggctacgagtgcgacgtgctgggcaaggacatcctgctgtgcgaccccatccccctggacaccgaggtgaccgccctgagcgaggacgagtacttcagcgccggcgtggtgaagggccacagaaaggagagcggcgagctgtactacagcatcgagaaggagggccagagaaagtggtacaagagaatggccgtgatcctgagcctggagcagggcaacagactgagagagcagtacggcctgggcccctacgaggccgtgacccccctgaccaaggccgccgacatcagcctggacaacctggtggagggcaagagaaagagaagaagcaacgtgagcagccccgccacccccaccgccagcagcagcagcagcaccacccccaccagaaagatcaccgagagccccagagccagcatgggcgtgctgagcggcaagagaaagctgatcaccagcgaggaggagagaagccccgccaagagaggcagaaagagcgccaccgtgaagcccggcgccgtgggcgccggcgagttcgtgagcccctgcgagagcggcgacaacaccggcgagcccagcgccctggaggagcagagaggccccctgcccctgaacaagaccctgttcctgggctacgccttcctgctgaccatggccaccaccagcgacaagctggccagcagaagcaagctgcccgacggccccaccggcagcagcgaggaggaggaggagttcctggagatcccccccttcaacaagcagtacaccgagagccagctgagagccggcgccggctacatcctggaggacttcaacgaggcccagtgcaacaccgcctaccagtgcctgctgatcgccgaccagcactgcagaaccagaaagtacttcctgtgcctggccagcggcatcccctgcgtgagccacgtgtgggtgcacgacagctgccacgccaaccagctgcagaactacagaaactacctgctgcccgccggctacagcctggaggagcagagaatcctggactggcagcccagagagaaccccttccagaacctgaaggtgctgctggtgagcgaccagcagcagaacttcctggagctgtggagcgagatcctgatgaccggcggcgccgccagcgtgaagcagcaccacagcagcgcccacaacaaggacatcgccctgggcgtgttcgacgtggtggtgaccgaccccagctgccccgccagcgtgctgaagtgcgccgaggccctgcagctgcccgtggtgagccaggagtgggtgatccagtgcctgatcgtgggcgagagaatcggcttcaagcagcaccccaagtacaagcacgactacgtgagccactag

SEQ ID NO: 315125 - DNA, 5784 bp, Artificial Sequence
  derived and/or modified sequence
atgcctggcgagcagatggatcctactggctcccagctggacagtgattttagtcaacaggatacaccatgcctgattatagaggattcacagcctgagtcgcaggttctggaggacgattccggctctcattttagcatgctatctcggcacttgccgaacttgcagacgcataaagaaaacccggttctagacgtggtgagcaatccagaacagacagccggagaagaacggggcgacgggaacagcgggtttaatgagcacctgaaggagaacaaagtggccgaccctgtcgacagcagcaatctcgatacatgcgggtccatctctcaggtgattgaacagctgccacagcccaacagaaccagctccgtccttggaatgagtgtcgagtctgcccccgctgtggaagaagagaaaggagaagagttagaacagaaagagaaggaaaaggaagaagacacaagcggcaataccacccatagcctgggggctgaggacacggcctcatctcagctgggctttggcgtgctggagctgagccagtctcaggacgtagaagaaaacactgtgccatatgaggtggataaggaacagctacaaagcgtgactactaattccgggtatacacggctgtctgacgtggatgccaacaccgccatcaaacatgaagaacagtctaacgaggatattccgatcgcagaacagagtagcaaagacatcccagtgacagcccaaccatcgaaggacgtgcacgtggtcaaggaacagaatcccccaccagccagatccgaagatatgccctttagcccgaaagcctcggtggccgccatggaggccaaagaacagctgtcggcacaggaattaatggagagcggactgcaaatacagaaaagtccggagccggaagtattgagcactcaagaagacttgttcgatcagagcaataaaacagtaagcagcgatgggtgctcaactccgagcagggaagagggtgggtgttctcttgcctccactcccgccaccaccctccaccttctacaattaagtggccagagaagtctggtgcaggacagcttgagtactaactcttccgacctcgtagccccaagtccagatgcgttcaggtcaactccattcatcgtccctagctcccctaccgagcaggagggaaggcaagacaagccaatggatactagtgtgctgtctgaggaagggggcgagccattccagaagaagctgcagtccggcgaaccggtggagctggaaaacccccctttgctgccagagagcactgtctctccgcaggcgagtacccctataagccagtctactccagtattcccccccgggagccttcccatcccatcccaaccacagttttctcatgacatcttcatcccgagcccatcccttgaagagcagtctaacgatgggaagaaagatggggacatgcacagtagcagcctcaccgttgagtgttcaaaaacaagtgaaatcgagccaaaaaattctcctgaggatcttgggctgagtctgacaggggactcttgtaaactgatgctgtcaactagcgagtattctcaatcacctaaaatggagtctctgtcttcccacagaattgatgaggacggagaaaatacacaaattgaagacacggaaccaatgagccccgtccttaattcaaaattcgtgcctgctgaaaacgactctattctcatgaatccagcgcaggacggtgaagtgcagctatcccaaaacgatgataagaccaagggggacgatactgacactcgcgacgatatatccattttagccacgggctgcaaagggagggaagagactgtcgctgaggacgtgtgtatcgacctcacctgtgacagtgggtcgcaggcagtgccaagcccagccacgcgcagcgaggccctatcctccgtgctggaccaggaagaggccatggaaatcaaggagcaccaccccgaggaaggcagtagcggctctgaagtggaggagatacccgagactccttgcgaatcacagggggaagagctgaaggaagagaatatggagagtgtccccctccacttaagtctgactgaaacccagtctcaggggctctgtctgcagaaagagatgccaaagaaggaatgctctgaggctatggaggtggagacttctgtgataagcattgactcccctcagaagctggcaatcctggaccaggaactggagcacaaggaacaggaagcgtgggaagaggctacatccgaagattccagtgtcgtcatcgttgacgtgaaggagcctagcccaagagttgacgttagctgtgagcccctggagggagtggaaaagtgttccgactcacaaagctgggaggatattgcgcctgagatcgaaccatgcgcggaaaacaggctggataccaaggaagaaaagtctgtagagtacgagggggatctgaagtcaggaacggccgaaactgaacctgttgagcaagactccagtcagcccagtctgcctctagtgcgcgcggatgatcctctcagactggaccaggaattacagcagccccagactcaggagaaaacctccaatagcttgaccgaagacagtaagatggctaacgccaaacagctgtcgtccgacgcagaagcccaaaaacttggtaagccttcagcccacgcgtcacagtccttttgtgagagctcatccgagactccattccacttcaccctaccgaaggagggtgatattattcctccattaaccggtgcaaccccgcctttgatcggccacttgaaactggagcccaagagacactcaacaccaatcggcatatcaaactatccagagtctacgatcgccaccagcgatgttatgagtgagagcatggtggagacacacgaccccatcttgggaagcggaaagggcgattctggagcagcaccagacgtggacgacaaactgtgtttgcgcatgaagctggtatctcccgaaacggaagcaagcgaggagagcctgcagtttaacctcgaaaagccagcgacgggagaacggaaaaatggcagtacagcagttgccgaatccgtggcatccccacagaaaaccatgagcgtgcttagttgtatctgtgaagcacgccaagaaaatgaggccaggtctgaggatcccccgacaaccccgatacgtggaaacctcctgcatttcccttcgtcccagggagaggaagaaaaggagaaattagaaggcgaccatacaatccgtcagagtcagcaacccatgaagcccatttcacccgtgaaggatcccgtcagtcccgcaagccagaaaatggtgattcagggccctagctccccccagggcgaggccatggtgaccgacgttttagaagatcagaaggaaggccgctctacgaataaagagaacccttccaaagctctcatagagcggccttcccagaataacattggcatccagaccatggagtgcagtcttagggtcccggagaccgtcagtgcagccacgcagaccattaaaaacgtttgtgagcagggcacatctacagtggatcagaactttggcaagcaggatgccacagtgcagacggaacgcggctctggcgagaagcctgtctccgcccccggtgacgatactgaatccctacactctcagggcgaggaagaattcgacatgccccagccgccccacggacacgttctacataggcatatgagaacaatacgtgaggttaggacactggtgacccgagtgataacggacgtatattacgtggatggtactgaagttgagcgaaaagtcactgaggagacagaggagcctattgtagaatgccaggaatgcgaaactgaggtgagtccaagccagaccgggggcagcagtggcgatttaggcgacatcagctccttctcatcgaaagccagctcattgcataggacaagctccggcacatctctgagtgccatgcacagctccgggtcttccggaaaaggcgcgggaccattaagaggcaaaactagcggcacagaaccagctgattttgccctcccgtcttccagggggggcccagggaagttgagggagaccgcagttcccggccctctcggcatagaggatatctcccctaatttgtcgcctgatgataagagctttagtcgggtggtgccccgtgtgcctgacagcacccgaagaactgacgtgggagcaggcgcattgaggagatctgatagccctgagatcccttttcaggcagcggccgggccatcagatggtctggacgcctcttcacccggcaacagctttgtggggctgagagtagtcgcaaagtggtcatctaacgggtacttctatagcggaaagataacacgggacgtcggggccggaaaatataagctgcttttcgacgacgggtacgagtgtgatgttctgggcaaggatatcctactttgtgatcccatccctttagacaccgaggtgaccgcactttccgaggatgaatacttttcggctggagtcgtgaaggggcacagaaaagagtccggcgagctgtattattctatcgagaaagagggccagcggaaatggtataagaggatggccgtgattttgtcactcgagcagggaaatagacttcgcgagcaatacggcctgggaccctatgaggccgttactcctttgacaaaggcagcagatatttctctggacaacctggtcgaaggtaagagaaagagaagatccaatgtgagcagtccagctacccccaccgccagcagcagctcctcgactactcctacacgcaaaattacggagtcgccccgcgccagcatgggagtgctgtccgggaagaggaagttgatcacgtccgaggaggagagatcaccagcaaaaagaggtagaaagagtgccacggtgaaacctggggcggtgggagctggcgaatttgtttctccctgtgagtcgggggacaatactggcgagccttctgcactggaggaacagcggggcccgctgccactgaacaagacactgttcctgggttacgcttttttacttacaatggccacaacctcagacaaactcgcctcccgcagcaagctccctgatggccccacaggctcttctgaagaagaggaggaattcctggagattcccccctttaataaacagtacactgaatctcaattacgcgcgggagcaggatacatactggaggacttcaacgaggcccagtgtaatacagcctaccagtgcctgctcattgctgatcagcattgcagaactagaaagtactttctttgtttggcatctgggataccatgcgtatctcatgtctgggtgcatgatagttgccacgcaaatcagctgcagaattatcggaattacctcttacccgccggatacagcctggaggagcagaggatcttagattggcaaccacgggagaatcctttccaaaatctgaaagtgctcttagtctccgatcaacagcagaattttcttgaattatggagtgagattcttatgaccggcggcgctgcctctgtgaaacaacaccattcttccgctcacaataaggatatcgccctgggcgtcttcgatgtagttgttaccgatcccagctgccccgcttccgtattgaagtgcgccgaggccctgcaattgccagtggtgtcccaggaatgggttatacagtgtctgattgtgggagagcgcattgggtttaaacagcatccgaagtacaagcacgattacgtgtctcactag

SEQ ID NO: 315126 - DNA, 5784 bp, Artificial Sequence
  derived and/or modified sequence
atgcctggagagcagatggaccccaccggcagccagctggacagcgacttcagccagcaggacaccccctgcctgatcatcgaggacagccagcctgagagccaggtgctggaggatgattctggcagccacttctccatgctgagccgccacctgcccaacctgcagacccacaaggagaaccctgtgctggatgtggtgagcaaccctgagcagacagctggggaggagagaggagatggcaacagcggcttcaatgagcacctgaaggagaacaaggtggccgaccctgtggacagcagcaacctggacacctgtggcagcatcagccaggtgattgagcagctgccccagcccaacagaaccagctctgtgctgggcatgtctgtggagagcgccccagctgtggaggaggagaagggggaggagctggagcagaaggagaaggagaaggaggaggacaccagcggcaacaccacccacagcctgggcgctgaggacacagccagcagccagctgggctttggagtgctggagctgagccagagccaggatgtggaggagaacacagtgccctatgaggtggacaaggagcagctgcagagcgtgaccaccaacagcggctacacccggctgagtgatgtggatgccaacacagccatcaagcatgaggagcagagcaatgaagacatccccatcgccgagcagagcagcaaggacatccctgtgacagcccagcccagcaaggatgtgcacgtggtgaaggagcagaaccccccaccagcccggtctgaggacatgcccttcagccccaaggcctctgtggccgccatggaggccaaggagcagctgagcgcccaggagctgatggagagcggcctgcagatccagaagagccctgagcctgaggtgctgagcacccaggaggacctgtttgaccagagcaacaagacagtgtccagtgatggctgcagcacccccagccgggaggagggcggctgcagcctggccagcaccccagccaccaccctgcacctgctgcagctgagcggccagaggagcctggtgcaggacagcctgagcaccaacagcagtgacctggtggcccccagcccagatgccttccgcagcacccccttcatcgtgcccagcagccccacagagcaggagggccggcaggacaagcccatggacacctctgtgctgtctgaggagggcggggagcccttccagaagaagctgcagagcggggagcctgtggagctggagaacccccccctgctgcctgagagcacagtgagcccccaggccagcacccccatcagccagagcacccctgtgtttcctcctggcagcctgcccatccccagccagccccagttcagccatgacatcttcatccccagccccagcctggaggagcagagcaatgatggcaagaaggatggagacatgcacagcagcagcctgactgtggagtgcagcaagaccagcgagattgagcccaagaacagccctgaggacctgggcctgagcctgaccggggacagctgcaagctgatgctgagcaccagcgagtacagccagagccccaagatggagagcctgagcagccacagaattgatgaagatggagagaacacccagatcgaggacacagagcccatgagccctgtgctgaacagcaagtttgtgcctgcagaaaatgacagcatcctgatgaacccagcccaggatggagaggtgcagctgagccagaatgatgacaagaccaagggagatgacacagacaccagagatgacatcagcatcctggccaccggctgcaagggccgggaggagaccgtggccgaggatgtgtgcatcgacctgacctgtgacagcggcagccaggccgtgcccagccctgccaccaggtctgaggccctgagctctgtgctggaccaggaggaggccatggagatcaaggagcaccaccctgaggagggcagcagcggcagcgaggtggaggagatccctgagaccccctgtgagagccagggcgaggagctgaaggaggagaacatggagagcgtgcccctgcacctgagcctgacagagacccagagccagggcctgtgcctgcagaaggagatgcccaagaaggagtgcagcgaggccatggaggtggagaccagcgtcatcagcattgacagcccccagaagctggccatcctggaccaggagctggagcacaaggagcaggaggcctgggaggaggccaccagcgaggacagctctgtggtgattgtggatgtgaaggagcccagcccccgggtggatgtgtcctgtgagcccctggagggcgtggagaagtgcagcgacagccagagctgggaggacatcgcccctgagattgagccctgtgccgagaaccggctggacaccaaggaggagaagtctgtggagtatgaaggagacctgaagtctggaacagctgagacagagcctgtggagcaggacagcagccagcccagcctgcccctggtgcgggcagatgaccccctgcggctggaccaggagctgcagcagccccagacccaggagaagaccagcaacagcctgacagaggacagcaagatggccaatgccaagcagctgagcagtgatgctgaggcccagaagctgggcaagcccagcgcccacgccagccagagcttctgtgagagcagcagcgagacccccttccacttcaccctgcccaaggagggggacatcatcccccccctgaccggggccaccccacccctgattggccacctgaagctggagcccaagaggcacagcacccccatcggcatcagcaactacccagagagcaccatcgccaccagtgatgtgatgtctgagagcatggtggagacccatgaccccatcctgggcagcgggaaaggagacagcggggccgccccagatgtggatgacaagctgtgcctgaggatgaagctggtgtccccagagacagaggccagcgaggagagcctgcagttcaacctggagaagccagccactggagagaggaagaatggcagcacagctgtggccgagagcgtggccagcccccagaagaccatgtctgtgctgagctgcatctgtgaggcccggcaggagaatgaggcccggtctgaggacccccccaccacccccatccggggcaacctgctgcacttccccagcagccagggcgaggaggagaaggagaagctggagggggaccacaccatccggcagagccagcagcccatgaagcccatcagccctgtgaaggaccctgtgtccccagccagccagaagatggtgatccagggccccagcagcccccagggcgaggccatggtgacagatgtgctggaggaccagaaggagggccgcagcaccaacaaggagaaccccagcaaggccctgattgagcggcccagccagaacaacatcggcatccagaccatggagtgcagcctgcgggtgcctgagaccgtgtctgctgccacccagaccatcaagaatgtgtgtgagcagggcaccagcacagtggaccagaactttgggaagcaggatgccaccgtgcagacagagcggggcagcggggagaagcctgtgtctgcccctggagatgacacagagagcctgcacagccagggcgaggaggagtttgacatgccccagccccctcatggccacgtgctgcaccgccacatgaggaccatccgggaggtgaggaccctggtgaccagggtcatcacagatgtgtactacgtggatggaacagaggtggagaggaaggtgacagaggagacagaggagcccatcgtggagtgccaggagtgtgaaacagaggtgagccccagccagacaggaggcagcagcggggacctgggggacatcagcagcttcagcagcaaggccagcagcctgcacaggaccagcagcggcaccagcctgagcgccatgcacagcagcggcagcagtggaaaaggagctggccccctgcggggcaagaccagcggcacagagcctgctgactttgccctgcccagcagcagaggaggccctgggaagctgcgggagacagctgtgcccggccccctgggcatcgaggacatcagccccaacctgagcccagatgacaagagcttcagccgggtggtgccccgggtgcctgacagcaccaggagaacagatgtgggcgctggggccctgcggcggagtgacagccctgagatccccttccaggccgccgccggccccagtgatggcctggatgccagcagccctggcaacagctttgtgggcctgcgggtggtggccaagtggagcagcaatggctacttctacagcggcaagatcaccagagatgtgggcgccggcaagtacaagctgctgtttgatgatggctatgaatgtgatgtgctgggcaaggacatcctgctgtgtgaccccatccccctggacacagaggtgacagccctgtctgaagatgagtacttctctgctggggtggtgaagggccacaggaaggagagcggggagctgtactacagcattgagaaggagggccagaggaagtggtacaagaggatggccgtcatcctgagcctggagcagggcaaccggctgcgggagcagtatggcctgggcccctatgaggccgtgacccccctgaccaaggctgctgacatcagcctggacaacctggtggagggcaagaggaagaggaggagcaatgtgagcagccctgccacccccacagccagcagcagcagcagcaccacccccaccaggaagatcacagagagcccccgggcctccatgggcgtgctgagcggcaagaggaagctgatcaccagcgaggaggagaggagccctgccaagaggggcaggaagagcgccaccgtgaagccaggagctgtgggcgctggggagtttgtgagcccctgtgagagcggggacaacacaggagagcccagcgccctggaggagcagaggggccccctgcccctgaacaagaccctcttcctgggctacgccttcctgctgaccatggccaccaccagtgacaagctggccagccgcagcaagctgcctgatggccccaccggcagcagcgaggaggaggaggagttcctggagatcccccccttcaacaagcagtacacagagagccagctgcgggccggggccggctacatcctggaggacttcaatgaggcccagtgcaacacagcctaccagtgcctgctgattgctgaccagcactgcaggaccaggaagtacttcctgtgcctggccagcggcatcccctgtgtgagccacgtgtgggtgcatgacagctgccacgccaaccagctgcagaactacagaaactacctgctgcctgctggctacagcctggaggagcagaggatcctggactggcagccccgggagaaccccttccagaacctgaaggtgctgctggtgtctgaccagcagcagaacttcctggagctgtggagcgagatcctgatgactggaggagctgcctctgtgaagcagcaccacagcagcgcccacaacaaggacatcgccctgggcgtgtttgatgtggtggtgacagaccccagctgcccagcctctgtgctgaagtgtgccgaggccctgcagctgcctgtggtgtcccaggagtgggtgatccagtgcctgattgtgggggagcgcatcggcttcaagcagcaccccaagtacaagcatgactatgtgagccactag

SEQ ID NO: 315127 - DNA, 5784 bp, Artificial Sequence
  derived and/or modified sequence
atgcccggcgagcagatggaccccaccggcagccagctggacagcgattttagccagcaggacactccttgcctgatcattgaggacagtcagccagagagtcaggtgctcgaggacgactctggctcccacttctccatgctgtcccgtcacctgcctaacttacaaactcacaaagaaaacccggtgctggatgtagtctccaaccccgagcagacggccggagaagagcgcggggacgggaattctgggttcaatgaacacttaaaggagaacaaagttgccgatcccgttgactctagtaatctggacacttgcgggtccatttcacaggttatcgaacagctgccacagccaaaccgaaccagctcagtgctggggatgtctgttgaatcggcacctgctgtcgaggaggaaaaaggggaagagctggagcagaaagaaaaagaaaaggaggaagacaccagcggcaacacaacccatagcctgggggcagaggacaccgcttcctctcaattagggtttggagtgctggagctctcacaatcccaggatgtagaggaaaacactgtcccttacgaagtggacaaagaacaactgcaaagcgtgacaacaaactccggatacacacggctcagcgatgtggatgctaacactgcaatcaagcatgaagagcagtcaaacgaagatatccccatcgctgagcagagctctaaagatatccctgtcaccgcccaaccttctaaggacgtgcacgtcgtgaaagaacagaacccacctcccgcccggagtgaggacatgccgttctcccccaaagccagcgtggctgcaatggaagccaaggagcagctgtccgctcaggaactcatggaatctggattgcagatccagaaaagccccgaacctgaagtcctatctacacaggaggatttattcgaccagtccaataagacggtctcctctgatggttgttcgaccccgtcacgggaggagggtggttgttccttggcctcaaccccagcgactaccctccatctgttgcagctctccggacagaggagcctggttcaagactctctctctaccaactctagtgaccttgtagccccttcccccgacgcttttcgctccaccccattcatcgtgccttcaagtcccacagaacaagagggcagacaagataaaccaatggatacctcagttctgagcgaggagggcggcgaaccctttcagaaaaagttgcagtcaggcgaacccgtcgaactcgaaaaccctccactgttgcctgaatcaacagtctccccccaggcatccacccccatcagccagtctacaccagtgtttccaccaggcagcctgccaattccgagccagccacagttttcgcacgacatctttatcccttccccctcactagaggaacagagtaatgatgggaagaaggatggcgatatgcattcctcctctctcactgtggagtgctccaagacaagcgaaatcgagcccaaaaacagccctgaagatctcggcctgtcactgactggagactcatgcaagctgatgctatccacatcagaatatagccagagtcctaagatggagtctctgagctcccatagaatcgacgaggatggcgagaatacacagatcgaggacaccgagccgatgtcaccagtgttaaattccaaatttgtcccggctgagaatgactctatcctgatgaacccagcccaggatggcgaggtgcaattgtcccagaatgacgataagaccaagggagatgacactgataccagagacgacatttccattttagccacgggatgcaaaggacgagaagagacagtggctgaagatgtctgcattgatctgacttgtgattccgggtcgcaggctgtgccaagccccgccacccgctccgaggcactcagttccgtgttagaccaggaggaggccatggagatcaaggagcatcaccccgaggagggatcaagcggctccgaagtcgaagagatcccggagacaccctgcgagtcacagggagaagaactcaaggaagagaacatggagtcagttcccctgcatctgtctctgacagagacacagtcccagggtctgtgtttgcagaaggaaatgcccaaaaaagaatgttccgaggctatggaggttgagacatcggtgatctccattgattccccacagaagcttgccatcctcgatcaggaattggaacacaaagaacaggaggcttgggaggaggccacctcagaagactcctcagtggtgatcgtggacgtgaaggagccttcaccacgggtcgatgtaagctgtgaaccgctggaaggagtcgaaaaatgctccgatagtcagagctgggaggacattgcgcctgaaattgagccttgcgccgagaacagacttgatactaaggaagagaagtctgtagaatacgagggggaccttaaatcaggtaccgcggaaactgagcctgtggagcaggatagttcacagccctctctcccactagtaagagctgacgatccgttgcggctagatcaggaactacagcaaccccaaacacaggaaaagaccagcaacagcctcactgaagactctaaaatggctaatgccaaacagttgagctccgacgcagaggcacagaagctcggtaagcccagtgctcatgcctcacaatctttttgcgaatcatcttccgaaacgcctttccacttcaccctacctaaggagggagatataattccgccactgaccggagcaacccctcccctgataggccacttgaaactggaacccaaacggcattctacgccgattggtatctctaactacccagaatcaacaatcgctacatctgacgtgatgtcagaaagcatggtggaaacccacgaccccattctgggttcggggaagggggattctggagccgcaccggacgtcgatgataagttatgcttaaggatgaagttagtgagtccggagacagaagcttccgaagaatcgttacaattcaatctggagaagccagccacaggggagcgtaagaacggctccaccgccgttgcggaatccgtggcctcccctcaaaagactatgagcgtattatcctgcatatgtgaagcccgccaggaaaacgaggcacgctccgaggacccgccgaccacgcctattcgaggaaatctgctgcatttcccgagtagccagggagaggaggagaaggaaaaactggaaggagaccatactataagacagagtcaacagccaatgaaacccatttcccccgtgaaggacccggtaagtccagcatcacagaaaatggtaattcaggggccaagttcaccacagggtgaggctatggtcacagatgtgctcgaagaccagaaagaaggcagaagcacaaacaaagaaaatccttctaaggcactcatagagcgcccatcccaaaataatattggtatccagacaatggagtgttccctcagggtgccagaaacagtgagtgctgctacccagactatcaaaaacgtgtgcgagcaggggacatcaaccgtggaccagaattttgggaaacaggatgcgacggtgcaaactgagcgagggtctggagagaagcctgtctcggcaccaggcgatgacactgagtctttgcactcgcagggtgaagaagagttcgacatgccacagccgccacacggccatgtcctgcatcggcacatgcggaccatacgggaggtgaggactctagtgactcgagtcatcaccgacgtgtattacgtcgatggaactgaagtggagcggaaagtgactgaagagaccgaagagccgatcgtcgagtgtcaggaatgcgaaacagaagtgtctccatcccagaccggagggtctagtggcgatctcggggacatttcctcattcagtagtaaagcatcctcactgcataggacaagctcaggcaccagtttgtccgcgatgcacagtagcggaagttccggtaaaggcgccggtccactgcggggaaaaacgagtggcactgagcctgctgatttcgccctgcctagcagcagaggcggacctggcaaacttagggagacagccgtgcctggccccctgggaatagaggacatctctccaaacttgtctccagacgacaaatctttctctcgagtggtgccgagggtgcccgatagcactcggcgcaccgacgttggcgcaggagctctcaggaggtctgatagcccagagatccccttccaagctgcagcagggccatcagacggcctggatgcttccagccccggtaactcttttgttggactgcgggtggtcgcgaagtggtcttccaacggctacttctactccggcaagataaccagagacgtcggcgctggaaagtacaagctgttgtttgacgatggttacgagtgcgatgtgctggggaaagacatactactctgtgatcctataccattggacaccgaggttaccgcactcagcgaggatgagtacttcagtgcaggggtggtcaagggtcaccggaaagaatctggagagctgtactactcgatagaaaaagaaggccaaaggaaatggtataaaaggatggctgttattttaagccttgaacagggtaaccggctgagagagcagtacggcttgggaccatatgaagctgtgaccccattaaccaaggcagctgatatttcgttagacaatcttgtcgagggaaagagaaaacggcgctcgaatgtttcatcccccgccacaccaacagcctcctcatcgagttctacaacgcctacacgcaagatcaccgagagtccgagagcctctatgggagtcctgtctggcaagaggaaacttatcacaagtgaggaggagagaagccccgccaagcgcgggagaaaatcggcaaccgtaaagcctggtgctgttggcgccggggagtttgttagcccttgcgaaagcggagacaataccggggagccatctgctctagaggagcagaggggcccactgcctcttaacaagacattatttctcggctacgcatttcttttgaccatggctacaacttccgacaaattggccagcaggtccaagctgccagatggaccgaccggctcctcagaagaagaggaggagttcctggaaatccctccattcaataagcaatataccgaaagtcagttaagagctggcgccggctacatcttggaggacttcaatgaggcccagtgtaacaccgcctaccagtgcctgttgatagctgatcagcattgcagaacacggaaatacttcctctgcctcgcttcgggtataccctgcgtatcacatgtatgggtacatgacagttgccatgccaatcagttgcagaattacaggaactacctcctccccgccggctattccctggaagaacagcgcatactagactggcagcccagagaaaacccctttcagaacctcaaggtcctgttagtgagcgaccagcagcagaattttctcgaactatggagcgagatactgatgacaggcggggccgcctctgtgaaacagcatcattcaagtgctcacaacaaggatattgcgttaggtgtgttcgacgtggtagtcacagatccctcatgccctgcatcagtgctgaagtgtgcagaagcgttacagctgccagttgtgagccaggaatgggtgatccagtgtctcatagtaggcgaaaggattggattcaagcagcaccccaaatataagcacgactacgttagccactag

SEQ ID NO: 315128 - DNA, 5784 bp, Artificial Sequence
  derived and/or modified sequence
atgccgggtgagcagatggaccccaccggcagccaattggactccgacttcagtcagcaggacacaccatgcttgatcattgaagacagccagcccgagtcccaggtgctcgaggacgattccggtagtcatttcagtatgctctctcggcatctgccaaatctgcagacacataaggagaaccccgttcttgatgtggtctccaacccagaacagactgctggcgaggagaggggagacggaaacagcgggtttaacgaacacttaaaagaaaataaggtggcagatcccgtcgacagtagcaaccttgacacttgtgggtccatttcgcaggtgattgagcagttaccacaacctaataggacttcctcagtgctgggaatgtccgtggagagtgcccctgctgtggaggaagagaaaggcgaggaactcgaacagaaggaaaaagagaaagaagaggacactagcggcaacacaacacatagcttgggcgcagaagacacagcaagcagtcagctggggttcggggttctggaactatctcagtctcaggacgtggaagaaaataccgtgccatatgaagttgataaggagcagctgcagtctgtcaccacaaactcagggtacactcgcctgtccgacgtcgatgccaacaccgcgattaagcatgaagaacagtctaatgaggatatccccatcgccgagcagtcttcaaaagatataccagtgactgcacagccttccaaagatgtacatgtggtgaaggaacaaaatccgcctcctgctcggagtgaggatatgccattttctccgaaagctagtgtagcggctatggaagccaaagagcagttgtctgcacaagagctgatggaatcagggctgcagatccagaagagccccgagccagaggtgctatcaactcaggaagatctgttcgaccaaagcaacaaaactgtgtcttccgacgggtgctccacaccgagccgggaagaaggcggatgctcgctcgcgagcacaccagccactacactccacctgctgcagctgtccggtcaacggtccctcgtgcaagactccctaagcaccaattcatctgatttggtagccccttctccagacgctttcaggtcaactccattcattgtgcctagttcccctactgaacaagaaggacgccaggacaaacctatggatacttcagtgctgtcagaggagggaggcgagccttttcagaagaaattacagagcggcgagccggtcgagctggaaaacccaccacttctgccagagtccactgtgtccccccaggcaagcacaccaatctcacagagcacaccggtttttcctcctgggagtcttcccatcccatcacagccccagttttcgcatgatatcttcatccccagtccaagcctggaggagcaatcgaatgacggaaaaaaagacggggacatgcattccagctcattgaccgtggaatgctccaagactagcgagattgaacctaagaactctccagaagacctcgggctttccctcactggcgatagctgcaaactgatgctgagtactagcgagtattcacaatccccaaagatggaaagcctttcctctcacaggatagacgaagacggtgagaatacacagatcgaagatacagagcctatgtcaccagtgctcaacagtaagttcgtcccagccgagaacgactctatcctgatgaatcctgctcaggatggcgaggttcagttgagccagaatgatgacaagaccaagggcgatgacactgacaccagagacgacatatcaattctggccacgggttgcaagggcagagaagagacagtggccgaagatgtgtgcatcgatctcacgtgcgattctgggtctcaggcagtgccaagccctgctactcgcagcgaggccctgtctagcgtgctggaccaggaagaggcaatggaaatcaaagagcaccatcccgaggaagggtcttcagggagtgaggttgaggaaataccagagaccccctgcgagagtcagggagaggagttgaaggaagagaacatggagtcggtacctctgcatctcagcctgaccgaaactcagtcccagggcctgtgtctgcagaaggagatgcccaagaaagaatgtagcgaggcgatggaggtggagacctccgtgatttccatcgattccccccagaaactggctattctcgatcaggagctggagcacaaggagcaagaagcttgggaggaggctacctctgaagacagcagcgtggtgatcgtcgatgttaaagaacctagccctagggtggacgtttcctgcgagcccttagagggcgtagagaagtgttccgactcccagagctgggaagacattgccccagagatagaaccatgcgcagaaaaccggttggataccaaggaggaaaaaagcgtggagtatgaaggagatcttaaatctggcactgccgagaccgagcctgtggagcaagactctagtcaacctagtctgcctctcgtccgagccgacgatcctctccggctggaccaggagctgcagcagccgcaaacacaagagaagacctccaattctctgaccgaggattcgaaaatggctaatgctaaacagctgagttccgacgcagaagcccaaaaattgggaaaaccctcagctcatgcgtctcagagtttttgcgagagctcaagtgagacccctttccatttcactctgcccaaggagggagatattatccctccccttacaggtgcaactcctccgctcatcggtcatctcaagctggagcctaagcgccattccactcctatcggaatctctaattatccagagtcaacaattgccacctccgatgttatgtctgaatcaatggtggagacgcatgacccgatactggggtctgggaagggcgacagcggtgcagcacccgatgtggatgacaagctctgtctgcggatgaagctggtgtccccggagacggaagcctcagaggagagcctgcagtttaatctggagaaaccggctaccggcgagcgcaagaacggctctaccgctgtcgctgaaagcgtagcatctccccagaaaacgatgtccgtattgtcttgtatctgtgaggctcgacaggaaaacgaggccagatcggaggaccctcctactacacctatccgaggaaacctcttacatttccccagctctcaaggggaggaagagaaagagaaacttgagggtgatcatacaatccggcagtcccagcaaccaatgaaaccaatcagtccggtcaaggaccccgtttcacctgccagtcagaaaatggtgattcaggggcctagcagcccccagggagaagccatggtgacagacgttcttgaggatcagaaggagggccgttcaacaaacaaagagaatccaagtaaggcgctgatcgagaggccaagccagaacaatatcggcattcagactatggagtgtagtctgcgcgtaccagaaacagtttctgccgctactcaaaccatcaagaatgtgtgcgagcagggcacctctactgttgaccagaacttcggcaagcaggacgctaccgtccaaacggaacgtggctctggggagaaacccgtcagcgccccaggagacgacacagagtcgttgcattctcagggggaggaggaattcgatatgcctcaacctccccatggccatgtgctgcatagacatatgaggaccatcagagaagtgcgaactttggtgacaagagtcataacggatgtttactatgtcgatggaactgaagtggagcgaaaggtcacagaggagacggaggagccaattgttgagtgccaggaatgtgagactgaagtgagcccatcccaaaccggcggatcaagcggggacctgggcgacatttcttcgttctcttctaaagcctcctcactccaccggacatctagtggcacgtcactgtcagcaatgcacagcagcggctccagcggtaaaggggcaggaccactgagaggtaagacctctggaaccgagcccgctgatttcgccttaccttcttctcgcggagggcctggcaaactcagggaaacagcggtgccgggtccactcggcatcgaggatatctccccaaatttaagcccagatgataaaagcttcagtagagtggtcccacgggtgcccgactctacgcgcaggacagacgtgggagcaggggcactacgaagatccgacagtcctgaaatccccttccaagcagccgctggtccctccgacggcctcgacgccagctcgcctgggaattcattcgtgggattaagagtggtcgccaaatggtctagtaatggatatttttatagtggaaagatcacccgcgacgtgggtgcaggtaagtacaagctgctgtttgatgacggctacgagtgcgatgtccttgggaaggacatcctcctgtgtgaccccattccattagacactgaagttaccgccttatccgaggatgaatattttagcgcgggagtcgtgaaaggacatagaaaggaatcaggcgaactctactattctatcgagaaggaaggacagagaaagtggtacaaacgaatggcggtaattctctctctggagcagggcaatcgcctgcgggagcagtacggtctgggtccctatgaagccgtgacaccccttactaaggcagctgatatctccttggataatctggtggaaggcaagcggaagcgcagatcaaacgtgtcatcaccagctactcccaccgcttcctctagctcatctacgacaccaactaggaaaattaccgaatccccccgagcatccatgggggtgctgagtgggaaacgcaagctaataaccagcgaagaggagagatcacccgctaagcggggtcgcaaatccgcaaccgtcaaaccaggagctgtgggcgcaggtgagtttgtaagtccttgcgaatccggggataataccggagagccatcggccctggaagaacagagaggcccattgcccctcaataagactttatttttgggctacgcctttcttctgacaatggccaccacatccgataagttagcaagcaggtctaagctaccggatggccctacgggtagtagtgaggaggaagaggaatttctggaaattccacctttcaacaaacagtataccgagtcacagctgcgggcaggagccggatacatcctcgaggacttcaacgaggcacagtgcaataccgcgtatcagtgcctgctgatcgccgaccagcactgcagaacgcgaaagtacttcctgtgcctcgcaagcggtattccatgcgtatcacatgtttgggtccatgatagttgtcacgcaaaccagctacaaaactaccgtaactacctgctacccgcaggctactcgctcgaagaacaacgtatcctcgactggcagccgagggagaatcccttccaaaacctgaaagttcttctggttagcgaccagcaacagaactttctagaactttggtccgaaatcctaatgactggaggcgcagccagtgtaaaacaacatcactcttcagcccataacaaggatattgctttaggagtctttgacgtggtggtgaccgatccaagctgtccagccagcgtactgaagtgtgcagaggccttgcagttgccggtggtgtcccaggaatgggtgatccaatgcctgattgtcggcgaacggatcgggtttaagcagcaccccaaatacaagcacgattacgtgtctcactag

SEQ ID NO: 315129 - DNA, 6015 bp, Artificial Sequence
  derived and/or modified sequence
ctggagggacttggggagcgtgcagagacctctagctcgagcgcgagggacctcccgccgggatgcctggggagcagatggaccctactggaagtcagttggattcagatttctctcagcaagatactccttgcctgataattgaagattctcagcctgaaagccaggttctagaggatgattctggttctcacttcagtatgctatctcgacaccttcctaatctccagacgcacaaagaaaatcctgtgttggatgttgtgtccaatcctgaacaaacagctggagaagaacgaggagacggtaatagtgggttcaatgaacatttgaaagaaaacaaggttgcagaccctgtggattcttctaacttggacacatgtggttccatcagtcaggtcattgagcagttacctcagccaaacaggacaagcagtgttctgggaatgtcagtggaatctgctcctgctgtggaggaagagaagggagaagagttggaacagaaggagaaagagaaggaagaagatacttcaggcaatactacacattcccttggtgctgaagatactgcctcatcacagttgggttttggggttctggaactctcccagagccaggatgttgaggaaaatactgtgccatatgaagtggacaaagagcagctacaatcagtaaccaccaactctggttataccaggctgtctgatgtggatgctaatactgcaattaagcatgaagaacagtccaacgaagatatccccatagcagaacagtccagcaaggacatccctgtgacagcacagcccagtaaggatgtacatgttgtaaaagagcaaaatccaccacctgcaaggtcagaggacatgccttttagccccaaagcatctgttgctgctatggaagcaaaagaacagttgtctgcacaagaacttatggaaagtggactgcagattcagaagtcaccagagcctgaggttttgtcaactcaggaagacttgtttgaccagagcaataaaacagtatcttctgatggttgctctactccttcaagggaggaaggtgggtgttctttggcttccactcctgccaccactctgcatctcctgcagctctctggtcagaggtcccttgttcaggacagtctttccacgaattcttcagatcttgttgctccttctcctgatgctttccgatctactccttttatcgttcctagcagtcccacagagcaagaagggagacaagataagccaatggacacgtcagtgttatctgaagaaggaggagagccttttcagaagaaacttcaaagtggtgaaccagtggagttagaaaacccccctctcctgcctgagtccactgtatcaccacaagcctcaacaccaatatctcagagcacaccagtcttccctcctgggtcacttcctatcccatcccagcctcagttttctcatgacatttttattccttccccaagtctggaagaacaatcaaatgatgggaagaaagatggagatatgcatagttcatctttgacagttgagtgttctaaaacttcagagattgaaccaaagaattcccctgaggatcttgggctatctttgacaggggattcttgcaagttgatgctttctacaagtgaatatagtcagtccccaaagatggagagcttgagttctcacagaattgatgaagatggagaaaacacacagattgaggatacggaacccatgtctccagttctcaattctaaatttgttcctgctgaaaatgatagtatcctgatgaatccagcacaggatggtgaagtacaactgagtcagaatgatgacaaaacaaagggagatgatacagacaccagggatgacattagtattttagccactggttgcaagggcagagaagaaacggtagcagaagatgtttgtattgatctcacttgtgattcggggagtcaggcagttccgtcaccagctactcgatctgaggcactttctagtgtgttagatcaggaggaagctatggaaattaaagaacaccatccagaggaggggtcttcagggtctgaggtggaagaaatccctgagacaccttgtgaaagtcaaggagaggaactcaaagaagaaaatatggagagtgttccgttgcacctttctctgactgaaactcagtcccaagggttgtgtcttcaaaaggaaatgccaaaaaaagaatgctcagaagctatggaagttgaaaccagtgtgattagtattgattcccctcaaaagttggcaatacttgaccaagaattggaacataaggaacaggaagcttgggaagaagctacttcagaggactccagtgttgtcattgtagatgtgaaagagccatctcccagagttgatgtttcttgtgaacctttggagggagtggagaagtgctcagattcccagtcatgggaggatattgctccagaaatagaaccatgtgctgagaatagattagacaccaaggaagaaaagagtgtagaatatgaaggagatctgaaatcagggactgcagaaacagaacctgtagagcaagattcttcacagccttccttacctttagtgagagcagatgatcctttaagacttgaccaggagttgcagcagccccaaactcaggagaaaacaagtaattcattaacagaagactcaaaaatggctaatgcaaagcagctaagctcagatgcagaggcccagaagctggggaagccctctgcccatgcctcacaaagcttctgtgaaagttctagtgaaaccccatttcatttcactttgcctaaagaaggtgatatcatcccaccattgactggtgcaaccccacctcttattgggcacctaaaattggagcccaagagacacagtactcctattggtattagcaactatccagaaagcaccatagcaaccagtgatgtcatgtctgaaagcatggtggagacccatgatcccatacttgggagtggaaaaggggattctggggctgccccagacgtggatgataaattatgtctaagaatgaaactggttagtcctgagactgaggcgagtgaagagtctttgcagttcaacctggaaaagcctgcaactggtgaaagaaaaaatggatctactgctgttgctgagtctgttgccagtccccagaagaccatgtctgtgttgagctgtatctgtgaagccaggcaagagaatgaggctcgaagtgaggatccccccaccacacccatcagggggaacttgctccactttccaagttctcaaggagaagaggagaaagaaaaattggagggtgaccatacaatcaggcagagtcaacagcctatgaagcccattagtcctgtcaaggaccctgtttctcctgcttcccagaagatggtcatacaagggccatccagtcctcaaggagaggcaatggtgacagatgtgctagaagaccagaaagaaggacggagtactaataaggaaaatcctagtaaggccttgattgaaaggcccagccaaaataacataggaatccaaaccatggagtgttccttgagggtcccagaaactgtttcagcagcaacccagactataaagaatgtgtgtgagcaggggaccagtacagtggaccagaactttggaaagcaagatgccacagttcagactgagagggggagtggtgagaaaccagtcagtgctcctggggatgatacagagtcgctccatagccagggagaagaagagtttgatatgcctcagcctccacatggccatgtcttacatcgtcacatgagaacaatccgggaagtacgcacacttgtcactcgtgtcattacagatgtgtattatgtggatggaacagaagtagaaagaaaagtaactgaggagactgaagagccaattgtagagtgtcaggagtgtgaaactgaagtttccccttcacagactgggggctcctcaggtgacctgggggatatcagctccttctcctccaaggcatccagcttacaccgcacatcaagtgggacaagtctctcagctatgcacagcagtggaagctcagggaaaggagccggaccactcagagggaaaaccagcgggacagaacccgcagattttgccttacccagctcccgaggaggcccaggaaaactgagagaaacagctgtgcctggccccttgggcatagaggacatttcacctaacttgtcaccagatgataaatccttcagccgtgtcgtgccccgagtgccagactccaccagacgaacagatgtgggtgctggtgctttgcgtcgtagtgactctccagaaattcctttccaggctgctgctggcccttctgatggcttagatgcctcctctccaggaaatagctttgtagggctccgtgttgtagccaagtggtcatccaatggctacttttactctgggaaaatcacacgagatgtcggagctgggaagtataaattgctctttgatgatgggtacgaatgtgatgtgttgggcaaagacattctgttatgtgaccccatcccgctggacactgaagtgacggccctctcggaggatgagtatttcagtgcaggagtggtgaaaggacataggaaggagtctggggaactgtactacagcattgaaaaagaaggccaaagaaagtggtataagcgaatggctgtcatcctgtccttggagcaaggaaacagactgagagagcagtatgggcttggcccctatgaagcagtaacacctcttacaaaggcagcagatatcagcttagacaatttggtggaagggaagcggaaacggcgcagtaacgtcagctccccagccacccctactgcctccagtagcagcagcacaacccctacccgaaagatcacagaaagtcctcgtgcctccatgggagttctctcaggcaaaagaaaacttatcacttctgaagaggaacggtcccctgccaagcgaggtcgcaagtctgccacagtaaaacctggtgcagtaggggcaggagagtttgtgagcccctgtgagagtggagacaacaccggtgaaccctctgccctggaagagcagagagggcctttgcctctcaacaagaccttgtttctgggctacgcatttctccttaccatggccacaaccagtgacaagttggccagccgctccaaactgccagatggtcctacaggaagcagtgaagaagaggaggaatttttggaaattcctcctttcaacaagcagtatacagaatcccagcttcgagcaggagctggctatatccttgaagatttcaatgaagcccagtgtaacacagcttaccagtgtcttctaattgcggatcagcattgtcgaacccggaagtacttcctgtgccttgccagtgggattccttgtgtgtctcatgtctgggtccatgatagttgccatgccaaccagctccagaactaccgtaattatctgttgccagctgggtacagccttgaggagcaaagaattctggactggcaaccccgtgaaaatcctttccagaatctgaaggtactcttggtatcagaccaacagcagaacttcctggagctctggtctgagatcctcatgactggtggtgcagcctctgtgaagcagcaccattcaagtgcccataacaaagatattgctttaggggtatttgatgtggtggtgacggacccctcatgcccagcctcggtgctgaagtgtgctgaagcattgcagctgcctgtggtgtcacaagagtgggtgatccagtgcctcattgttggggagagaattggattcaagcagcatccaaaatataaacacgattatgtttctcactaaagatacttggtcttactggttttattccctgctatcgtggagattgtgttttaaccaggttttaaatgtgtcttgtgtgtaactggattccttgcatggatcttgtatatagttttatttgctgaacttttatgataaaataaatgttgaatctctttggttgtagtaa

SEQ ID NO: 315130 - DNA, 2673 bp, Artificial Sequence
  derived and/or modified sequence
atggccctgagaagaagcatgggcagacccggcctgccccccctgcccctgccccccccccccagactgggcctgctgctggccgccctggccagcctgctgctgcccgagagcgccgccgccggcctgaagctgatgggcgcccccgtgaagctgaccgtgagccagggccagcccgtgaagctgaactgcagcgtggagggcatggaggagcccgacatccagtgggtgaaggacggcgccgtggtgcagaacctggaccagctgtacatccccgtgagcgagcagcactggatcggcttcctgagcctgaagagcgtggagagaagcgacgccggcagatactggtgccaggtggaggacggcggcgagaccgagatcagccagcccgtgtggctgaccgtggagggcgtgcccttcttcaccgtggagcccaaggacctggccgtgccccccaacgcccccttccagctgagctgcgaggccgtgggcccccccgagcccgtgaccatcgtgtggtggagaggcaccaccaagatcggcggccccgcccccagccccagcgtgctgaacgtgaccggcgtgacccagagcaccatgttcagctgcgaggcccacaacctgaagggcctggccagcagcagaaccgccaccgtgcacctgcaggccctgcccgccgcccccttcaacatcaccgtgaccaagctgagcagcagcaacgccagcgtggcctggatgcccggcgccgacggcagagccctgctgcagagctgcaccgtgcaggtgacccaggcccccggcggctgggaggtgctggccgtggtggtgcccgtgccccccttcacctgcctgctgagagacctggtgcccgccaccaactacagcctgagagtgagatgcgccaacgccctgggccccagcccctacgccgactgggtgcccttccagaccaagggcctggcccccgccagcgccccccagaacctgcacgccatcagaaccgacagcggcctgatcctggagtgggaggaggtgatccccgaggcccccctggagggccccctgggcccctacaagctgagctgggtgcaggacaacggcacccaggacgagctgaccgtggagggcaccagagccaacctgaccggctgggacccccagaaggacctgatcgtgagagtgtgcgtgagcaacgccgtgggctgcggcccctggagccagcccctggtggtgagcagccacgacagagccggccagcagggccccccccacagcagaaccagctgggtgcccgtggtgctgggcgtgctgaccgccctggtgaccgccgccgccctggccctgatcctgctgagaaagagaagaaaggagaccagattcggccaggccttcgacagcgtgatggccagaggcgagcccgccgtgcacttcagagccgccagaagcttcaacagagagagacccgagagaatcgaggccaccctggacagcctgggcatcagcgacgagctgaaggagaagctggaggacgtgctgatccccgagcagcagttcaccctgggcagaatgctgggcaagggcgagttcggcagcgtgagagaggcccagctgaagcaggaggacggcagcttcgtgaaggtggccgtgaagatgctgaaggccgacatcatcgccagcagcgacatcgaggagttcctgagagaggccgcctgcatgaaggagttcgaccacccccacgtggccaagctggtgggcgtgagcctgagaagcagagccaagggcagactgcccatccccatggtgatcctgcccttcatgaagcacggcgacctgcacgccttcctgctggccagcagaatcggcgagaaccccttcaacctgcccctgcagaccctgatcagattcatggtggacatcgcctgcggcatggagtacctgagcagcagaaacttcatccacagagacctggccgccagaaactgcatgctggccgaggacatgaccgtgtgcgtggccgacttcggcctgagcagaaagatctacagcggcgactactacagacagggctgcgccagcaagctgcccgtgaagtggctggccctggagagcctggccgacaacctgtacaccgtgcagagcgacgtgtgggccttcggcgtgaccatgtgggagatcatgaccagaggccagaccccctacgccggcatcgagaacgccgagatctacaactacctgatcggcggcaacagactgaagcagccccccgagtgcatggaggacgtgtacgacctgatgtaccagtgctggagcgccgaccccaagcagagacccagcttcacctgcctgagaatggagctggagaacatcctgggccagctgagcgtgctgagcgccagccaggaccccctgtacatcaacatcgagagagccgaggagcccaccgccggcggcagcctggagctgcccggcagagaccagccctacagcggcgccggcgacggcagcggcatgggcgccgtgggcggcacccccagcgactgcagatacatcctgacccccggcggcctggccgagcagcccggccaggccgagcaccagcccgagagccccctgaacgagacccagagactgctgctgctgcagcagggcctgctgccccacagcagctgctag

SEQ ID NO: 315131 - DNA, 2673 bp, Artificial Sequence
  derived and/or modified sequence
atggccctgaggcgctccatgggccgccccggactgccccctttacccctgcctccgccacctcgcctgggactcctcctcgccgcactcgcaagcttattgcttcctgagtcagctgccgcgggcctcaagttgatgggagctcccgttaagctgactgtgagtcagggacagcctgtgaagctgaattgtagcgttgagggtatggaagagcctgacatacaatgggtgaaggatggagcagtcgtgcaaaatctggaccaactgtatatcccagtctctgaacagcactggatcggtttcctgtcccttaaatccgtggaaaggtccgacgccggccggtattggtgccaggtcgaggacggcggggaaactgaaatatcacagccagtatggctgaccgtggaaggcgtgcccttcttcacggtagagcctaaagatctagcagtgcctcccaatgcccctttccagctgagctgcgaggcggttggcccaccagaaccggtgacaatcgtttggtggcgtggcactaccaagatcggcggccccgccccctcgcctagtgtcctcaacgtcaccggcgtaacacaaagcactatgtttagctgtgaagctcataacctgaagggtctggcaagttcccgcactgccaccgtgcatctccaggccctccccgccgcacctttcaacattaccgtcaccaagttatcctcctcaaacgcgtcagtggcctggatgcctggagccgacgggagggccctacttcaatcatgcaccgtccaagtaacccaggcccctggggggtgggaggtccttgccgtggtagtaccagtgcctccctttacctgcctgttgagggatctggtgccagccacgaattactcactccgtgtgcgttgtgctaacgccctgggacccagcccttacgccgactgggtgcccttccagactaagggactagctccggccagtgcccctcagaatcttcatgcaattcggactgattctggtctcattctggaatgggaggaggtcattccagaggcgccactcgagggcccgttaggtccttataagctatcctgggtgcaggataatgggacgcaggacgaattaaccgtggagggaactcgcgctaacctgaccggatgggatccacagaaagatctaatagtcagagtatgcgtatccaacgctgttggctgcgggccttggagtcagcctctggtggtctcgtctcacgatcgtgcaggtcagcagggccccccgcattcaagaacctcctgggtacctgttgtgctcggggtcctgaccgccctggtgactgctgctgccctggccctgatccttcttagaaagaggaggaaggagacacgcttcgggcaggccttcgactctgtcatggcgcgtggagagcccgctgtacacttcagggctgcaagaagtttcaacagggaaagacctgagcgcatcgaggccacacttgattctctggggattagcgacgaactgaaggaaaagttggaggacgtgctcatcccagagcaacagttcaccctagggagaatgctggggaaaggcgagttcggctctgtgagggaggcccagctgaaacaggaggacgggagcttcgtgaaggtcgccgtgaagatgcttaaggctgatatcatcgcttctagcgacatcgaagaattcctgagagaagctgcatgtatgaaggagtttgatcatccccatgtggctaaattggtcggcgtgagtttgcgctctcgcgccaaaggaaggttaccaattccaatggtgatcctacccttcatgaaacacggagacctgcatgccttcctgctcgcttctagaatcggtgagaatccatttaatctcccgctgcagaccctcattcgcttcatggttgatatagcatgtggcatggagtatctatcaagccggaactttatccatagggacctggcagcaagaaattgcatgctggcagaagacatgactgtctgcgtcgctgactttggcctttctcggaaaatttattccggagattattacagacagggctgtgcctccaagctcccagtgaaatggcttgctcttgagtccttggccgataatctgtatacagtgcagagtgacgtctgggcgttcggtgtgactatgtgggagattatgacgagaggacaaaccccctacgctggcatcgagaacgcagagatctacaactatctgatcggcggcaaccgcctgaagcagccacccgaatgcatggaggacgtgtacgacctcatgtaccaatgctggtccgctgaccccaagcaacgtccatcattcacctgtctgcggatggagctggaaaacatcctgggtcagctttctgtgttaagcgcatcccaagatccactgtacatcaatattgaacgagctgaggaacctactgccgggggctccttggagttacctggccgggaccaaccatactccggggccggggacggctccggcatgggcgctgttggcggaactccctccgattgtcgctatattctaactccaggaggactggctgaacagcccggtcaggcagagcatcagccagagtcccctctcaacgaaacacaacggttactcttgcttcagcagggactcctgccacactcttcttgttag

SEQ ID NO: 315132 - DNA, 2673 bp, Artificial Sequence
  derived and/or modified sequence
atggccctgcggcgctccatgggccggcccggcctgccccccctgcccctgcccccaccaccccggctgggcctgctgctggccgccctggccagcctgctgctgcctgagagcgctgctgctggcctgaagctgatgggcgcccctgtgaagctgactgtgtcccagggccagcctgtgaagctgaactgcagcgtggagggcatggaggagccagacatccagtgggtgaaggatggagctgtggtgcagaacctggaccagctgtacatccctgtgtctgagcagcactggattggcttcctgagcctgaagtctgtggagaggagtgatgctggccgctactggtgccaggtggaggatggaggagaaacagagatcagccagcctgtgtggctgactgtggagggcgtgcccttcttcaccgtggagcccaaggacctggccgtgcccccaaatgcccccttccagctgagctgtgaggccgtgggccccccagagcctgtgaccatcgtgtggtggaggggcaccaccaagattggaggccctgcccccagccccagcgtgctgaatgtgactggagtgacccagagcaccatgttcagctgtgaggcccacaacctgaagggcctggccagcagcaggacagccaccgtgcacctgcaggccctgcctgctgcccccttcaacatcaccgtgaccaagctgagcagcagcaatgcctctgtggcctggatgcctggagcagatggccgggccctgctgcagagctgcaccgtgcaggtgacccaggcccctgggggctgggaggtgctggccgtggtggtgcctgtgccccccttcacctgcctgctgcgggacctggtgcctgccaccaactacagcctgcgggtgcgctgtgccaatgccctgggccccagcccctatgctgactgggtgcccttccagaccaagggcctggccccagccagcgccccccagaacctgcacgccatcagaacagacagcggcctcatcctggagtgggaggaggtgattcctgaggcccccctggagggccccctgggcccctacaagctgtcctgggtgcaggacaatggcacccaggatgagctgactgtggagggcacccgggccaacctgaccggctgggacccccagaaggacctgattgtgcgggtgtgtgtgtccaatgctgtgggctgcggcccctggagccagcccctggtggtgagcagccatgacagagctggccagcagggccccccccacagcaggacctcctgggtgcctgtggtgctgggcgtgctgacagccctggtgacagctgctgccctggccctgatcctgctgaggaagaggaggaaggagacccgcttcggccaggcctttgacagcgtgatggcccggggggagcctgctgtgcacttccgggccgcccggagcttcaaccgggagaggcctgagagaattgaggccaccctggacagcctgggcatcagtgatgagctgaaggagaagctggaggatgtgctgatccctgagcagcagttcaccctgggccgcatgctgggcaagggggagtttggatctgtgcgggaggcccagctgaagcaggaggatggcagctttgtgaaggtggccgtgaagatgctgaaggctgacatcatcgccagcagtgacatcgaggagttcctgcgggaggccgcctgcatgaaggagtttgaccacccccacgtggccaagctggtgggcgtgtccctgcggagccgggccaagggccgcctgcccatccccatggtgatcctgcccttcatgaagcacggggacctgcacgccttcctgctggccagccgcatcggggagaaccccttcaacctgcccctgcagaccctcatccgcttcatggtggacatcgcctgtggcatggagtacctgagcagcaggaacttcatccaccgggacctggccgccaggaactgcatgctggccgaggacatgacagtgtgtgtggccgactttggcctgagcaggaagatctacagcggggactactaccggcagggctgtgccagcaagctgcctgtgaagtggctggccctggagagcctggccgacaacctgtacacagtgcagagtgatgtgtgggccttcggcgtgaccatgtgggagatcatgacccggggccagaccccctatgccggcattgaaaatgctgagatctacaactacctgattggaggcaaccggctgaagcagcccccagagtgcatggaggatgtgtatgacctgatgtaccagtgctggagcgctgaccccaagcagaggcccagcttcacctgcctgaggatggagctggagaacatcctgggccagctgtctgtgctgagcgccagccaggaccccctgtacatcaacatcgagcgggcagaggagcccacagctgggggcagcctggagctgcccggccgggaccagccctacagcggggctggagatggcagcggcatgggcgctgtgggcggcacccccagcgactgccgctacatcctgaccccaggcggcctggccgagcagcccggccaggccgagcaccagcctgagagccccctgaatgagacccagaggctgctgctgctgcagcagggcctgctgccccacagcagctgctag

SEQ ID NO: 315133 - DNA, 2673 bp, Artificial Sequence
  derived and/or modified sequence
atggccctgcggcggagcatgggccggcccggcctgccccccctgcccttgccaccacctccgagactgggcttactgctcgcagctctggcgagccttctgctgcccgaatcagcagcagccggcttaaagctaatgggggccccagtgaagctgacggttagtcagggccagccagtgaagctcaattgcagtgttgaaggcatggaagagccagatattcaatgggtgaaggacggcgctgtggtacaaaacctggaccagctctacatccctgtcagcgaacagcactggattggattcctcagtctgaaatccgtggaacgtagcgatgctggcaggtactggtgtcaagtggaggatggaggcgagacagagatctctcagccggtatggcttaccgtggagggcgtccccttttttaccgtggagcctaaagacttggctgtcccccctaatgcaccttttcagctgtcatgtgaggccgtcggcccacctgagccagtcactattgtctggtggcgaggaaccactaagattggcggtccagcccctagtccctccgtgctgaacgtaacaggtgtaacacaatccacaatgttttcttgcgaggcccataacctgaagggcctggcctcttccagaaccgcaaccgtccatctgcaggccctgcctgcagcacctttcaatattacagtaactaagctgtctagcagtaacgcttccgtggcttggatgcctggagccgatggccgagctctgctgcaaagctgcactgtccaggtgactcaggccccgggaggctgggaggtgctggctgtggtggttccggtgccgccattcacatgtcttctgagggacctggtgcccgcgacaaattattccctaagggtcaggtgtgctaacgcgctggggccttctccttacgccgactgggtgcccttccaaactaagggcttggctccggctagcgccccccagaatctgcacgctattagaaccgactccggcttaattctggagtgggaggaagtgataccagaggcgcctcttgaagggcccctcggcccctataaactgtcctgggttcaagataatggcacccaggacgaacttaccgtggaaggcacgagagctaacctgacaggctgggatcctcagaaggaccttatcgttagggtatgcgtttctaacgccgtgggatgcggcccctggtcccaaccgcttgtggtgtcctctcacgatcgtgcagggcagcaaggaccaccccattctaggactagctgggttcctgtggtcctaggtgtccttacagccctagtcacagccgccgcactcgccctcatactgctcaggaaacggaggaaggaaacaagatttggccaggcgttcgactccgtgatggcaagaggcgagccagccgtccatttcagggctgcacgttccttcaaccgggagcgaccagagcgaatcgaagcgaccctggattctctcggaatttcggacgaactgaaagaaaaattagaagatgtactcattcctgagcaacaatttaccctcggaaggatgctgggcaaaggcgaattcgggtctgtcagagaggcgcagttgaagcaggaggacggttccttcgtgaaggttgccgtgaaaatgttgaaggccgatatcattgcctccagcgatattgaggagttcctgagagaggctgcctgtatgaaggaattcgatcacccacacgttgcgaagcttgtgggagtttccctcaggagtcgggctaaaggacgccttcctatcccaatggtcatcctgcctttcatgaaacacggggatcttcatgcttttttgctggcaagcaggatcggagaaaacccctttaacctccctctccaaaccctcatcaggttcatggtggacatcgcttgcggcatggagtatctctcttcccggaattttattcacagggacctcgccgcccggaactgtatgctggccgaagacatgacagtctgtgtggcagacttcggcctgtcgcggaagatctactccggggattactatcgccagggctgcgcaagcaagctgcctgtcaagtggctagcactggagtctctggctgataacctgtacactgttcaatctgatgtttgggcattcggcgtaacaatgtgggagattatgacgcgtggccaaaccccctacgccggcatcgaaaacgcagagatctacaactacttaataggcggaaaccgtttgaagcagccgcccgagtgtatggaggatgtctacgacctgatgtaccagtgttggagcgctgatccaaagcagcgaccatcgttcacgtgtttacgcatggagctggagaacatactggggcagctctcagtgctgagtgcctcccaggaccctctgtacattaacattgagcgggcagaagaaccgaccgctggaggctcattagaattacctggacgagatcagccttattccggtgctggcgatggctctggaatgggagcagtgggtgggactccctccgactgtcgctatatcctgaccccaggggggttagccgaacagccgggtcaggccgaacaccagccagaatcaccactcaatgaaacacaacgtctgctgctactccagcagggcttgctcccacactcaagctgttag

SEQ ID NO: 315134 - DNA, 2673 bp, Artificial Sequence
  derived and/or modified sequence
atggccctgcgcagaagcatggggcgacccggacttcctccactacccctcccaccccctcctaggctcggtttgctgctggctgccctagcaagtcttcttctccctgagtctgcagccgctggcttgaagctgatgggcgctccagtgaagcttactgttagccaagggcagcccgttaagctcaactgtagcgtagaagggatggaggagcccgacattcagtgggttaaggatggggcagttgtgcaaaacctcgaccagctctatatcccagttagcgagcagcactggattggcttcctgtcactaaagtcagtggagagatccgatgccggacggtactggtgtcaggttgaggatgggggtgaaacagagattagtcagcctgtgtggctaactgtggagggagtgcccttttttaccgtcgaaccaaaggacctcgcagtccctcccaatgccccattccagttgtcctgcgaggcagttgggccacctgaaccagtaaccatcgtgtggtggaggggcactacaaagattggcggtcctgcgcctagcccttccgtactcaatgtgactggagtgacccagagcaccatgttctcttgcgaggctcacaacctaaagggccttgcctcttccaggacagcaaccgtccacttacaggcactgcccgcagccccattcaacatcactgtcacaaagttgagttcctctaatgcgagcgtggcttggatgccaggtgcggacggccgagcactgcttcagtcctgcaccgtacaggttactcaggcccctggcggatgggaggtgcttgcagtcgtggttcctgtgccccctttcacctgtctgctccgggatttggtgcccgctacaaactatagcttaagagtgagatgcgctaacgcccttggcccttccccctacgcagactgggtcccattccaaactaagggcctggcccctgcatccgcgccacagaatctgcacgccatccgcaccgactcaggactcattttagagtgggaggaggttatccccgaggctcccctcgaaggccctttgggaccgtacaaattgtcctgggtgcaagataacgggactcaagacgaactcaccgttgagggaactcgggctaatctgactggatgggacccacagaaggacttaatcgtgcgggtgtgtgtgtctaatgcggtggggtgcggtccatggagccaacctctggtggtgagtagccacgacagggccggacagcagggcccaccacatagtcgtacctcttgggtgccggtggttctcggcgtgctgaccgcgctggtgactgcagccgcattggccctgattttactacggaagagaagaaaggaaacccgctttgggcaggccttcgacagtgtgatggcgcgaggcgagccagcggtgcacttcagggcagccagaagttttaatagagaacgccctgagaggatcgaggccaccttggattccctgggtattagcgatgagctgaaagaaaagctggaggatgtgctgatccctgagcagcagttcacgctgggtcggatgctgggcaagggcgagttcgggagcgtgagggaggcacagcttaagcaggaggatggctcgttcgtcaaggttgcagtgaagatgctgaaggctgacattatagcatcttccgacatcgaagagttcctgagggaagccgcttgtatgaaggagttcgaccatccacacgtcgccaagctcgtgggcgtctcactgcggtctcgggctaaaggcagacttccaatccctatggtcattcttccattcatgaagcatggtgatttgcacgcattcctactggcaagccggattggtgagaatccattcaatctgcccctccaaacgctgatccgttttatggtagacattgcttgtggaatggaatatctgtctagtagaaattttattcacagagacctcgcggcacggaactgtatgctcgctgaggacatgacagtctgtgtggccgatttcggtctaagcaggaaaatttatagtggagactattaccgccagggatgtgcaagcaaactccctgtgaagtggctggccctggagagtctcgctgataatctctatacagtccaatcagatgtgtgggccttcggagtaaccatgtgggaaataatgacacggggacagacaccctatgccggtatcgagaacgctgagatttacaattacttaattggcggtaaccggttgaagcagccacctgagtgtatggaagacgtgtacgacctgatgtaccaatgttggtctgcagatcctaaacagcgcccatcttttacctgtctgcgtatggaacttgaaaatattttggggcagcttagtgtgctttccgcttcccaggaccccctgtatatcaatatcgaaagggcggaagaaccaaccgcaggaggatccttggagctgccaggacgggaccagccttatagtggcgcaggggacgggagtggaatgggtgccgttggcggaactccgagcgactgtagatatatcctgactccaggcggtctggccgaacaaccaggacaagcagagcatcagcccgagagtcccctgaacgagacccaacggctgcttctgctgcaacaggggctgcttccgcactcaagctgctag

SEQ ID NO: 315135 - DNA, 3959 bp, Artificial Sequence
  derived and/or modified sequence
gcggtggcgcgggagcggccccggggaccccgcgctgctgacggcggcgaccgcggccggaggcgggcgcgggtctcggaggcggtcgcctcagcaccgccccacgggcggccccagcccctcccgcagccctcctccctcccgctcccttcccgccgcctcctccccgccctcctccctcctcgctcgcgggccgggcccggcatggtgcggcgtcgccgccgatggcgctgaggcggagcatggggcggccggggctcccgccgctgccgctgccgccgccaccgcggctcgggctgctgctggcggctctggcttctctgctgctcccggagtccgccgccgcaggtctgaagctcatgggagccccggtgaagctgacagtgtctcaggggcagccggtgaagctcaactgcagtgtggaggggatggaggagcctgacatccagtgggtgaaggatggggctgtggtccagaacttggaccagttgtacatcccagtcagcgagcagcactggatcggcttcctcagcctgaagtcagtggagcgctctgacgccggccggtactggtgccaggtggaggatgggggtgaaaccgagatctcccagccagtgtggctcacggtagaaggtgtgccatttttcacagtggagccaaaagatctggcagtgccacccaatgcccctttccaactgtcttgtgaggctgtgggtccccctgaacctgttaccattgtctggtggagaggaactacgaagatcgggggacccgctccctctccatctgttttaaatgtaacaggggtgacccagagcaccatgttttcctgtgaagctcacaacctaaaaggcctggcctcttctcgcacagccactgttcaccttcaagcactgcctgcagcccccttcaacatcaccgtgacaaagctttccagcagcaacgctagtgtggcctggatgccaggtgctgatggccgagctctgctacagtcctgtacagttcaggtgacacaggccccaggaggctgggaagtcctggctgttgtggtccctgtgcccccctttacctgcctgctccgggacctggtgcctgccaccaactacagcctcagggtgcgctgtgccaatgccttggggccctctccctatgctgactgggtgccctttcagaccaagggtctagccccagccagcgctccccaaaacctccatgccatccgcacagattcaggcctcatcttggagtgggaagaagtgatccccgaggcccctttggaaggccccctgggaccctacaaactgtcctgggttcaagacaatggaacccaggatgagctgacagtggaggggaccagggccaatttgacaggctgggatccccaaaaggacctgatcgtacgtgtgtgcgtctccaatgcagttggctgtggaccctggagtcagccactggtggtctcttctcatgaccgtgcaggccagcagggccctcctcacagccgcacatcctgggtacctgtggtccttggtgtgctaacggccctggtgacggctgctgccctggccctcatcctgcttcgaaagagacggaaagagacgcggtttgggcaagcctttgacagtgtcatggcccggggagagccagccgttcacttccgggcagcccggtccttcaatcgagaaaggcccgagcgcatcgaggccacattggacagcttgggcatcagcgatgaactaaaggaaaaactggaggatgtgctcatcccagagcagcagttcaccctgggccggatgttgggcaaaggagagtttggttcagtgcgggaggcccagctgaagcaagaggatggctcctttgtgaaagtggctgtgaagatgctgaaagctgacatcattgcctcaagcgacattgaagagttcctcagggaagcagcttgcatgaaggagtttgaccatccacacgtggccaaacttgttggggtaagcctccggagcagggctaaaggccgtctccccatccccatggtcatcttgcccttcatgaagcatggggacctgcatgccttcctgctcgcctcccggattggggagaacccctttaacctacccctccagaccctgatccggttcatggtggacattgcctgcggcatggagtacctgagctctcggaacttcatccaccgagacctggctgctcggaattgcatgctggcagaggacatgacagtgtgtgtggctgacttcggactctcccggaagatctacagtggggactactatcgtcaaggctgtgcctccaaactgcctgtcaagtggctggccctggagagcctggccgacaacctgtatactgtgcagagtgacgtgtgggcgttcggggtgaccatgtgggagatcatgacacgtgggcagacgccatatgctggcatcgaaaacgctgagatttacaactacctcattggcgggaaccgcctgaaacagcctccggagtgtatggaggacgtgtatgatctcatgtaccagtgctggagtgctgaccccaagcagcgcccgagctttacttgtctgcgaatggaactggagaacatcttgggccagctgtctgtgctatctgccagccaggaccccttatacatcaacatcgagagagctgaggagcccactgcgggaggcagcctggagctacctggcagggatcagccctacagtggggctggggatggcagtggcatgggggcagtgggtggcactcccagtgactgtcggtacatactcacccccggagggctggctgagcagccagggcaggcagagcaccagccagagagtcccctcaatgagacacagaggcttttgctgctgcagcaagggctactgccacacagtagctgttagcccacaggcagagggcatcggggccatttggccggctctggtggccactgagctggctgactaagccccgtctgaccccagcccagacagcaaggtgtggaggctcctgtggtagtcctcccaagctgtgctgggaagcccggactgaccaaatcacccaatcccagttcttcctgcaaccactctgtggccagcctggcatcagtttaggccttggcttgatggaagtgggccagtcctggttgtctgaacccaggcagctggcaggagtggggtggttatgtttccatggttaccatgggtgtggatggcagtgtggggagggcaggtccagctctgtgggccctaccctcctgctgagctgcccctgctgcttaagtgcatgcattgagctgcctccagcctggtggcccagctattaccacacttggggtttaaatatccaggtgtgcccctccaagtcacaaagagatgtccttgtaatattcccttttaggtgagggttggtaaggggttggtatctcaggtctgaatcttcaccatctttctgattccgcaccctgcctacgccaggagaagttgaggggagcatgcttccctgcagctgaccgggtcacacaaaggcatgctggagtacccagcctatcaggtgcccctcttccaaaggcagcgtgccgagccagcaagaggaaggggtgctgtgaggcttgcccaggagcaagtgaggccggagaggagttcaggaacccttctccatacccacaatctgagcacgctaccaaatctcaaaatatcctaagactaacaaaggcagctgtgtctgagcccaacccttctaaacggtgacctttagtgccaacttcccctctaactggacagcctcttctgtcccaagtctccagagagaaatcaggcctgatgagggggaattcctggaacctggaccccagccttggtgggggagcctctggaatgcatggggcgggtcctagctgttagggacatttccaagctgttagttgctgtttaaaatagaaataaaattgaagactaaagacctaa

SEQ ID NO: 315136 - DNA, 3965 bp, Artificial Sequence
  derived and/or modified sequence
agtggaaggagcgcggtggcgcgggagcggccccggggaccccgcgctgctgacggcggcgaccgcggccggaggcgggcgcgggtctcggaggcggtcgcctcagcaccgccccacgggcggccccagcccctcccgcagccctcctccctcccgctcccttcccgccgcctcctccccgccctcctccctcctcgctcgcgggccgggcccggcatggtgcggcgtcgccgccgatggcgctgaggcggagcatggggcggccggggctcccgccgctgccgctgccgccgccaccgcggctcgggctgctgctggcggctctggcttctctgctgctcccggagtccgccgccgcaggtctgaagctcatgggagccccggtgaagctgacagtgtctcaggggcagccggtgaagctcaactgcagtgtggaggggatggaggagcctgacatccagtgggtgaaggatggggctgtggtccagaacttggaccagttgtacatcccagtcagcgagcagcactggatcggcttcctcagcctgaagtcagtggagcgctctgacgccggccggtactggtgccaggtggaggatgggggtgaaaccgagatctcccagccagtgtggctcacggtagaaggtgtgccatttttcacagtggagccaaaagatctggcagtgccacccaatgcccctttccaactgtcttgtgaggctgtgggtccccctgaacctgttaccattgtctggtggagaggaactacgaagatcgggggacccgctccctctccatctgttttaaatgtaacaggggtgacccagagcaccatgttttcctgtgaagctcacaacctaaaaggcctggcctcttctcgcacagccactgttcaccttcaagcactgcctgcagcccccttcaacatcaccgtgacaaagctttccagcagcaacgctagtgtggcctggatgccaggtgctgatggccgagctctgctacagtcctgtacagttcaggtgacacaggccccaggaggctgggaagtcctggctgttgtggtccctgtgcccccctttacctgcctgctccgggacctggtgcctgccaccaactacagcctcagggtgcgctgtgccaatgccttggggccctctccctatgctgactgggtgccctttcagaccaagggtctagccccagccagcgctccccaaaacctccatgccatccgcacagattcaggcctcatcttggagtgggaagaagtgatccccgaggcccctttggaaggccccctgggaccctacaaactgtcctgggttcaagacaatggaacccaggatgagctgacagtggaggggaccagggccaatttgacaggctgggatccccaaaaggacctgatcgtacgtgtgtgcgtctccaatgcagttggctgtggaccctggagtcagccactggtggtctcttctcatgaccgtgcaggccagcagggccctcctcacagccgcacatcctgggtacctgtggtccttggtgtgctaacggccctggtgacggctgctgccctggccctcatcctgcttcgaaagagacggaaagagacgcggtttgggcaagcctttgacagtgtcatggcccggggagagccagccgttcacttccgggcagcccggtccttcaatcgagaaaggcccgagcgcatcgaggccacattggacagcttgggcatcagcgatgaactaaaggaaaaactggaggatgtgctcatcccagagcagcagttcaccctgggccggatgttgggcaaaggagagtttggttcagtgcgggaggcccagctgaagcaagaggatggctcctttgtgaaagtggctgtgaagatgctgaaagctgacatcattgcctcaagcgacattgaagagttcctcagggaagcagcttgcatgaaggagtttgaccatccacacgtggccaaacttgttggggtaagcctccggagcagggctaaaggccgtctccccatccccatggtcatcttgcccttcatgaagcatggggacctgcatgccttcctgctcgcctcccggattggggagaacccctttaacctacccctccagaccctgatccggttcatggtggacattgcctgcggcatggagtacctgagctctcggaacttcatccaccgagacctggctgctcggaattgcatgctggcagaggacatgacagtgtgtgtggctgacttcggactctcccggaagatctacagtggggactactatcgtcaaggctgtgcctccaaactgcctgtcaagtggctggccctggagagcctggccgacaacctgtatactgtgcagagtgacgtgtgggcgttcggggtgaccatgtgggagatcatgacacgtgggcagacgccatatgctggcatcgaaaacgctgagatttacaactacctcattggcgggaaccgcctgaaacagcctccggagtgtatggaggacgtgtatgatctcatgtaccagtgctggagtgctgaccccaagcagcgcccgagctttacttgtctgcgaatggaactggagaacatcttgggccagctgtctgtgctatctgccagccaggaccccttatacatcaacatcgagagagctgaggagcccactgcgggaggcagcctggagctacctggcagggatcagccctacagtggggctggggatggcagtggcatgggggcagtgggtggcactcccagtgactgtcggtacatactcacccccggagggctggctgagcagccagggcaggcagagcaccagccagagagtcccctcaatgagacacagaggcttttgctgctgcagcaagggctacacacagtagctgttagcccacaggcagagggcatcggggccatttggccggctctggtggccactgagctggctgactaagccccgtctgaccccagcccagacagcaaggtgtggaggctcctgtggtagtcctcccaagctgtgctgggaagcccggactgaccaaatcacccaatcccagttcttcctgcaaccactctgtggccagcctggcatcagtttaggccttggcttgatggaagtgggccagtcctggttgtctgaacccaggcagctggcaggagtggggtggttatgtttccatggttaccatgggtgtggatggcagtgtggggagggcaggtccagctctgtgggccctaccctcctgctgagctgcccctgctgcttaagtgcatgcattgagctgcctccagcctggtggcccagctattaccacacttggggtttaaatatccaggtgtgcccctccaagtcacaaagagatgtccttgtaatattcccttttaggtgagggttggtaaggggttggtatctcaggtctgaatcttcaccatctttctgattccgcaccctgcctacgccaggagaagttgaggggagcatgcttccctgcagctgaccgggtcacacaaaggcatgctggagtacccagcctatcaggtgcccctcttccaaaggcagcgtgccgagccagcaagaggaaggggtgctgtgaggcttgcccaggagcaagtgaggccggagaggagttcaggaacccttctccatacccacaatctgagcacgctaccaaatctcaaaatatcctaagactaacaaaggcagctgtgtctgagcccaacccttctaaacggtgacctttagtgccaacttcccctctaactggacagcctcttctgtcccaagtctccagagagaaatcaggcctgatgagggggaattcctggaacctggaccccagccttggtgggggagcctctggaatgcatggggcgggtcctagctgttagggacatttccaagctgttagttgctgtttaaaatagaaataaaattgaagactaaagacct

SEQ ID NO: 315137 - protein, 842 aa, Artificial Sequence
  derived and/or modified sequence
MEEPDIQWVKDGAVVQNLDQLYIPVSEQHWIGFLSLKSVERSDAGRYWCQVEDGGETEISQPVWLTVEGVPFFTVEPKDLAVPPNAPFQLSCEAVGPPEPVTIVWWRGTTKIGGPAPSPSVLNVTGVTQSTMFSCEAHNLKGLASSRTATVHLQALPAAPFNITVTKLSSSNASVAWMPGADGRALLQSCTVQVTQAPGGWEVLAVVVPVPPFTCLLRDLVPATNYSLRVRCANALGPSPYADWVPFQTKGLAPASAPQNLHAIRTDSGLILEWEEVIPEAPLEGPLGPYKLSWVQDNGTQDELTVEGTRANLTGWDPQKDLIVRVCVSNAVGCGPWSQPLVVSSHDRAGQQGPPHSRTSWVPVVLGVLTALVTAAALALILLRKRRKETRFGQAFDSVMARGEPAVHFRAARSFNRERPERIEATLDSLGISDELKEKLEDVLIPEQQFTLGRMLGKGEFGSVREAQLKQEDGSFVKVAVKMLKADIIASSDIEEFLREAACMKEFDHPHVAKLVGVSLRSRAKGRLPIPMVILPFMKHGDLHAFLLASRIGENPFNLPLQTLIRFMVDIACGMEYLSSRNFIHRDLAARNCMLAEDMTVCVADFGLSRKIYSGDYYRQGCASKLPVKWLALESLADNLYTVQSDVWAFGVTMWEIMTRGQTPYAGIENAEIYNYLIGGNRLKQPPECMEDVYDLMYQCWSADPKQRPSFTCLRMELENILGQLSVLSASQDPLYINIERAEEPTAGGSLELPGRDQPYSGAGDGSGMGAVGGTPSDCRYILTPGGLAEQPGQAEHQPESPLNETQRLLLLQQGLHTVAVSPQAEGIGAIWPALVATELAD

SEQ ID NO: 315138 - DNA, 2529 bp, Artificial Sequence
  derived and/or modified sequence
atggaggagcccgacatccagtgggtgaaggacggcgccgtggtgcagaacctggaccagctgtacatccccgtgagcgagcagcactggatcggcttcctgagcctgaagagcgtggagagaagcgacgccggcagatactggtgccaggtggaggacggcggcgagaccgagatcagccagcccgtgtggctgaccgtggagggcgtgcccttcttcaccgtggagcccaaggacctggccgtgccccccaacgcccccttccagctgagctgcgaggccgtgggcccccccgagcccgtgaccatcgtgtggtggagaggcaccaccaagatcggcggccccgcccccagccccagcgtgctgaacgtgaccggcgtgacccagagcaccatgttcagctgcgaggcccacaacctgaagggcctggccagcagcagaaccgccaccgtgcacctgcaggccctgcccgccgcccccttcaacatcaccgtgaccaagctgagcagcagcaacgccagcgtggcctggatgcccggcgccgacggcagagccctgctgcagagctgcaccgtgcaggtgacccaggcccccggcggctgggaggtgctggccgtggtggtgcccgtgccccccttcacctgcctgctgagagacctggtgcccgccaccaactacagcctgagagtgagatgcgccaacgccctgggccccagcccctacgccgactgggtgcccttccagaccaagggcctggcccccgccagcgccccccagaacctgcacgccatcagaaccgacagcggcctgatcctggagtgggaggaggtgatccccgaggcccccctggagggccccctgggcccctacaagctgagctgggtgcaggacaacggcacccaggacgagctgaccgtggagggcaccagagccaacctgaccggctgggacccccagaaggacctgatcgtgagagtgtgcgtgagcaacgccgtgggctgcggcccctggagccagcccctggtggtgagcagccacgacagagccggccagcagggccccccccacagcagaaccagctgggtgcccgtggtgctgggcgtgctgaccgccctggtgaccgccgccgccctggccctgatcctgctgagaaagagaagaaaggagaccagattcggccaggccttcgacagcgtgatggccagaggcgagcccgccgtgcacttcagagccgccagaagcttcaacagagagagacccgagagaatcgaggccaccctggacagcctgggcatcagcgacgagctgaaggagaagctggaggacgtgctgatccccgagcagcagttcaccctgggcagaatgctgggcaagggcgagttcggcagcgtgagagaggcccagctgaagcaggaggacggcagcttcgtgaaggtggccgtgaagatgctgaaggccgacatcatcgccagcagcgacatcgaggagttcctgagagaggccgcctgcatgaaggagttcgaccacccccacgtggccaagctggtgggcgtgagcctgagaagcagagccaagggcagactgcccatccccatggtgatcctgcccttcatgaagcacggcgacctgcacgccttcctgctggccagcagaatcggcgagaaccccttcaacctgcccctgcagaccctgatcagattcatggtggacatcgcctgcggcatggagtacctgagcagcagaaacttcatccacagagacctggccgccagaaactgcatgctggccgaggacatgaccgtgtgcgtggccgacttcggcctgagcagaaagatctacagcggcgactactacagacagggctgcgccagcaagctgcccgtgaagtggctggccctggagagcctggccgacaacctgtacaccgtgcagagcgacgtgtgggccttcggcgtgaccatgtgggagatcatgaccagaggccagaccccctacgccggcatcgagaacgccgagatctacaactacctgatcggcggcaacagactgaagcagccccccgagtgcatggaggacgtgtacgacctgatgtaccagtgctggagcgccgaccccaagcagagacccagcttcacctgcctgagaatggagctggagaacatcctgggccagctgagcgtgctgagcgccagccaggaccccctgtacatcaacatcgagagagccgaggagcccaccgccggcggcagcctggagctgcccggcagagaccagccctacagcggcgccggcgacggcagcggcatgggcgccgtgggcggcacccccagcgactgcagatacatcctgacccccggcggcctggccgagcagcccggccaggccgagcaccagcccgagagccccctgaacgagacccagagactgctgctgctgcagcagggcctgcacaccgtggccgtgagcccccaggccgagggcatcggcgccatctggcccgccctggtggccaccgagctggccgactag

SEQ ID NO: 315139 - DNA, 2529 bp, Artificial Sequence
  derived and/or modified sequence
atggaagagcctgatattcaatgggttaaggacggcgcggtagtacagaatttagatcagctgtatattcctgtgagcgaacagcattggatcggtttcctgagtctaaaatccgtggaaagatctgatgctggacggtactggtgtcaggtggaggacggcggagagaccgaaatttctcaaccagtgtggctgaccgttgaaggcgtacctttttttacagtcgagcccaaggacttggctgtacctcctaatgcaccctttcagctgtcttgcgaagcggtaggccccccggagcccgtgaccatcgtgtggtggcgcggaactacaaaaatcggggggcctgccccatccccgtccgtactgaacgtcaccggtgtaactcagtcaacaatgttcagttgcgaggcccataatcttaagggcctggcctcatcacgaacagcaaccgtccacctgcaagccctgcctgcggctcccttcaacatcacagttacaaagctcagttccagtaacgcatctgtcgcatggatgcccggggcggacggaagggcactgttgcagagttgcaccgttcaggtaacacaggcacctggaggatgggaggtcctggccgttgtcgtccctgtgcctccattcacctgtttgctccgggacctcgttccagccacaaattattcgctgcgagtgagatgtgctaatgccctaggccccagcccatatgcggactgggtgccctttcaaacaaagggcctggctcccgctagcgctccccagaatctgcacgccatcaggacagatagcggcctgatcctagagtgggaggaggtgatacccgaagctccactcgagggtcccctgggcccgtacaaattgtcttgggtccaggataacggaacccaggacgaattaactgtagagggcactcgagcaaacttgactgggtgggatccccagaaagatctgattgtccgcgtctgcgtctctaatgccgtaggctgcggaccttggtctcaacccctggtcgtctcttcccacgacagggcaggccaacaagggccaccccactcacgtacatcttgggtcccggtggtgctgggcgtgctgacagccctggtgaccgccgccgcgctcgccctcattctgttacgcaaaagacgaaaagaaacgagattcggtcaagcctttgactccgttatggcacgcggggaacccgctgtgcattttagagcagccaggtcatttaacagagaacgacctgagagaatcgaggcaacgctggattctctggggatcagcgacgaactgaaggaaaaactggaggacgtcttgatccctgaacagcagtttacacttgggcgcatgctggggaaaggcgagtttggctctgtcagggaagcacagctgaaacaggaggacggcagcttcgtgaaagtggcagttaaaatgttaaaggccgatattatcgcctcatctgatatcgaggagttcctgcgggaggctgcgtgtatgaaagagttcgaccatccccatgtcgccaagctggtgggcgttagtctccgctcccgcgctaaagggcgacttccaattccaatggttattctcccttttatgaagcatggtgatctgcacgccttcttacttgcctctagaataggggagaacccatttaatctgcccctccaaacacttatccgctttatggtggacattgcttgcggcatggagtacctgagttctcgcaacttcattcacagggatctggctgcacgcaattgtatgttggccgaggacatgacagtttgcgtcgctgatttcggcctgtcccgtaagatttactcaggcgactattaccgtcagggctgtgcctctaaactgcctgtcaagtggctggccctcgaatccctggctgacaacctctacacggtgcaatccgatgtctgggcctttggtgtaacgatgtgggagataatgacgcggggccagacaccgtacgccggcatcgaaaatgcagagatttataattacctgatcggcgggaacagattgaaacagccaccagagtgcatggaggacgtctatgatctgatgtatcaatgttggtcagccgatcctaaacagcgtccatcttttacctgtctgcgtatggagctggaaaacatattgggccaattgagcgtcctgagtgcttctcaggacccgctctatatcaatatagaaagggccgaagaacccacagctggcgggagtttagaactgcccggcagggaccaaccctacagtggggctggcgatggcagtggtatgggcgcggtcggtggaaccccaagcgactgcaggtacatactgactcctgggggcttagcagagcaacctggtcaagccgagcatcagcctgaatccccacttaacgagacccagaggttgctgctgctgcagcagggccttcatactgtggctgtgtctccccaggctgagggaataggcgctatatggcctgccttggttgccacggagctggcagactag

SEQ ID NO: 315140 - DNA, 2529 bp, Artificial Sequence
  derived and/or modified sequence
atggaggagccagacatccagtgggtgaaggatggagctgtggtgcagaacctggaccagctgtacatccctgtgtctgagcagcactggattggcttcctgagcctgaagtctgtggagaggagtgatgctggccgctactggtgccaggtggaggatggaggagaaacagagatcagccagcctgtgtggctgactgtggagggcgtgcccttcttcaccgtggagcccaaggacctggccgtgcccccaaatgcccccttccagctgagctgtgaggccgtgggccccccagagcctgtgaccatcgtgtggtggaggggcaccaccaagattggaggccctgcccccagccccagcgtgctgaatgtgactggagtgacccagagcaccatgttcagctgtgaggcccacaacctgaagggcctggccagcagcaggacagccaccgtgcacctgcaggccctgcctgctgcccccttcaacatcaccgtgaccaagctgagcagcagcaatgcctctgtggcctggatgcctggagcagatggccgggccctgctgcagagctgcaccgtgcaggtgacccaggcccctgggggctgggaggtgctggccgtggtggtgcctgtgccccccttcacctgcctgctgcgggacctggtgcctgccaccaactacagcctgcgggtgcgctgtgccaatgccctgggccccagcccctatgctgactgggtgcccttccagaccaagggcctggccccagccagcgccccccagaacctgcacgccatcagaacagacagcggcctcatcctggagtgggaggaggtgattcctgaggcccccctggagggccccctgggcccctacaagctgtcctgggtgcaggacaatggcacccaggatgagctgactgtggagggcacccgggccaacctgaccggctgggacccccagaaggacctgattgtgcgggtgtgtgtgtccaatgctgtgggctgcggcccctggagccagcccctggtggtgagcagccatgacagagctggccagcagggccccccccacagcaggacctcctgggtgcctgtggtgctgggcgtgctgacagccctggtgacagctgctgccctggccctgatcctgctgaggaagaggaggaaggagacccgcttcggccaggcctttgacagcgtgatggcccggggggagcctgctgtgcacttccgggccgcccggagcttcaaccgggagaggcctgagagaattgaggccaccctggacagcctgggcatcagtgatgagctgaaggagaagctggaggatgtgctgatccctgagcagcagttcaccctgggccgcatgctgggcaagggggagtttggatctgtgcgggaggcccagctgaagcaggaggatggcagctttgtgaaggtggccgtgaagatgctgaaggctgacatcatcgccagcagtgacatcgaggagttcctgcgggaggccgcctgcatgaaggagtttgaccacccccacgtggccaagctggtgggcgtgtccctgcggagccgggccaagggccgcctgcccatccccatggtgatcctgcccttcatgaagcacggggacctgcacgccttcctgctggccagccgcatcggggagaaccccttcaacctgcccctgcagaccctcatccgcttcatggtggacatcgcctgtggcatggagtacctgagcagcaggaacttcatccaccgggacctggccgccaggaactgcatgctggccgaggacatgacagtgtgtgtggccgactttggcctgagcaggaagatctacagcggggactactaccggcagggctgtgccagcaagctgcctgtgaagtggctggccctggagagcctggccgacaacctgtacacagtgcagagtgatgtgtgggccttcggcgtgaccatgtgggagatcatgacccggggccagaccccctatgccggcattgaaaatgctgagatctacaactacctgattggaggcaaccggctgaagcagcccccagagtgcatggaggatgtgtatgacctgatgtaccagtgctggagcgctgaccccaagcagaggcccagcttcacctgcctgaggatggagctggagaacatcctgggccagctgtctgtgctgagcgccagccaggaccccctgtacatcaacatcgagcgggcagaggagcccacagctgggggcagcctggagctgcccggccgggaccagccctacagcggggctggagatggcagcggcatgggcgctgtgggcggcacccccagcgactgccgctacatcctgaccccaggcggcctggccgagcagcccggccaggccgagcaccagcctgagagccccctgaatgagacccagaggctgctgctgctgcagcagggcctgcacacagtggccgtgagcccccaggccgagggcatcggggccatctggccagccctggtggccacagagctggccgactag

SEQ ID NO: 315141 - DNA, 2529 bp, Artificial Sequence
  derived and/or modified sequence
atggaggagcccgacatccagtgggtgaaggacggcgccgtggtgcaaaacttggatcagctttacattccagtcagcgagcagcattggatcggctttctgagcctgaaatcagtggagcggtccgacgcaggcagatactggtgtcaggtggaggacggcggggaaacagaaatcagccagcctgtctggctgacggtggagggcgtgcccttctttactgtggagcctaaagaccttgccgtgcctcccaacgcccccttccagctgagctgcgaggccgtggggccccctgaaccagttaccatcgtgtggtggcgaggtacaacgaagattggcggaccggccccgagtccatcagttctgaatgtcacgggagtaacccagagcaccatgttctcatgcgaggcccacaacttgaaaggcctcgcatcatctagaacagccaccgtgcatttgcaggctcttccggccgccccttttaacattactgtgaccaagctcagtagctccaacgccagtgtcgcctggatgcccggtgctgatggacgtgcccttctccagagttgcacagtgcaagtaacacaggcacccggcggctgggaagtactggccgttgtggtccctgtacccccctttacttgtttgctgcgtgacctggtccccgcaacaaattatagcctgagagtgagatgcgctaacgcactcggtcccagcccttacgcggattgggttcccttccagacaaagggccttgcacctgccagtgctcctcagaatctgcacgctatccggactgatagcggcttgatattggaatgggaagaagttatacccgaggctccactggagggaccacttggcccatacaagttgtcttgggtccaggataacggtactcaggacgagctcaccgtggagggcacccgggcaaacctgacaggatgggacccccagaaggaccttattgttagagtgtgtgtgtctaatgctgttggctgtggcccgtggagccagcctctcgtcgtatcaagccatgaccgggccgggcagcaggggccccctcattcgcgcacctcatgggtgcccgtggtactgggagttctgactgctctggtcaccgcagccgccctggccctgattctgctgaggaagcggcggaaggagaccagattcgggcaagcctttgacagcgtgatggctcgaggagagcccgctgtccactttcgggccgcccgtagctttaaccgagaacgtccggagcgcattgaagctactcttgattctctgggaattagtgatgagctcaaagagaaactggaagacgttctaatcccagagcaacagttcacgctcggacgcatgctgggcaagggagagttcggaagtgtgcgggaagcgcagctcaaacaggaagacggtagcttcgtcaaggtggccgtcaaaatgctcaaagcagacatcatcgcatccagcgatatcgaggaattcttaagggaagctgcttgcatgaaggagtttgatcaccctcacgtagccaagctcgtgggagtgagccttcgtagccgcgcaaaagggcgtctgcctataccgatggtaatcctgccattcatgaaacacggcgacctgcatgcttttttattggcgtcacggatcggcgaaaatccattcaacttaccattacaaaccctcattcggttcatggtagacattgcctgtggcatggagtacttgtcgagtcgcaactttattcacagagacttggcagcccgaaactgtatgctggctgaggacatgaccgtctgcgtggcggattttgggctgagccggaagatttactctggagactactatcggcaggggtgtgctagcaaactccccgtgaaatggctcgctcttgaaagtctcgccgataacctgtataccgttcagtccgacgtctgggcctttggagttacaatgtgggaaatcatgacacgcggtcagacaccctatgccggcattgagaacgctgaaatctacaattatctgattggcggaaacagactcaagcagccccctgagtgcatggaagatgtatatgatctcatgtatcagtgttggtccgcggatcccaagcagaggcccagtttcacgtgtttgcgcatggagctggagaatatcctggggcagctgagtgttctgagcgcttcccaagaccccctgtacattaacattgaacgcgctgaggagccaacagccggaggcagtctggaacttcccggacgggatcagccatattctggggcaggagacggatctggtatgggagccgtcggaggaacaccttccgattgccggtacatcttgactccgggcgggctcgcggagcagcccggccaggccgaacatcaacccgaatctccactgaatgagacccaacggctgcttctgttgcagcagggccttcataccgtggctgtatccccccaggcagaaggcatcggcgccatctggccagctctagttgctaccgagctggctgattag

SEQ ID NO: 315142 - DNA, 2529 bp, Artificial Sequence
  derived and/or modified sequence
atggaagaacctgatatacagtgggtgaaggatggtgctgtggtccagaacctcgatcaactgtacatccctgtgtctgagcaacattggattggttttcttagcctgaagtcagtcgagcgcagtgatgccggacgttactggtgccaggttgaggacggcggtgagaccgaaatcagccagcctgtatggctgactgtggagggtgtacctttttttaccgttgagcctaaggacttagctgtgccgcctaatgccccattccaactttcctgcgaggctgtcggtcccccagagccggtcacaatcgtttggtggcgcggaacgactaagatcggcggacccgctcccagcccgagcgtcctaaacgtgacaggcgtcactcagtctacaatgttctcgtgcgaggcccacaacttgaagggactcgcttccagcagaactgccacagtgcacctgcaggccctccctgctgcccctttcaatatcaccgtgacaaagctcagctcatctaacgcttcggtggcctggatgcccggagcagatggcagagccctgctgcaatcttgcacagtacaggtgacacaggcccctggcggatgggaagtgctggccgtcgttgttccggtaccaccatttacatgcctcctcagggatctggtgcctgctaccaactattccctgagagttagatgcgccaacgcccttggaccatccccctacgccgattgggtcccgtttcagaccaaaggattagcgcctgcttccgctcctcagaatcttcatgccataagaacagattctggtctcatattggagtgggaagaagtgattcccgaagcgccactggagggacctctcggtccctataaactctcctgggtgcaagataacggcacacaggatgagctgactgtggagggaactcgggcaaacctaaccggctgggatccacaaaaagatcttattgtccgagtatgcgtctcaaacgcagttgggtgcggcccatggtcccaaccactcgtggtgtcttcccacgatagggcaggtcagcaggggccaccgcactccaggacttcatgggtcccagtggtgttaggagtgttgacagcccttgtcaccgcagcagccctggccttgatcctgctccggaagcgaaggaaggagaccaggttcggtcaagcttttgactcagttatggccagaggggagcctgctgttcactttcgagcggcacggagcttcaaccgggaacgcccagagagaatcgaggccaccctcgattctctcggcatcagtgacgagttgaaagagaagctggaggacgtcctcatccccgaacagcagtttacgctgggtagaatgctcggtaagggggagttcggcagcgtgcgggaggctcagctgaagcaggaagatgggtccttcgtcaaagtggcagtcaaaatgctgaaggcagatattatagcctcttcagacatagaagagttcctgagggaagctgcatgcatgaaagaatttgatcatccccatgtcgccaagctggtgggcgtgtccttgaggtcccgagccaaggggagattgccaattcccatggttatactcccgttcatgaagcatggggatctccacgcatttctcctagcatcgcgcatcggagagaatccattcaacctgccgctgcagacactaattcgcttcatggtcgatatcgcttgcggtatggagtatcttagtagccgcaattttatacatagggatctcgctgccagaaattgtatgctggctgaagatatgacagtgtgtgtggccgacttcgggcttagccggaagatctactccggcgattattaccgacagggatgcgcctccaagttgcccgtgaagtggctggctctggagagtttagccgacaatctgtacaccgtccaaagcgacgtctgggcatttggcgttactatgtgggagatcatgacacgcggtcagaccccatacgccggaatcgaaaacgcagaaatctacaattacctgattggagggaacaggctcaaacagcccccagaatgcatggaagatgtgtacgatctgatgtaccaatgctggagcgccgatccaaagcaaaggcctagctttacctgtctgcggatggagttggaaaatattctgggtcaattgtctgtcctcagcgctagccaggaccctctctatatcaatatagaacgcgcagaggagccgaccgctggcggttcactcgaacttcctggaagggaccagccatacagtggggctggagacggctcaggcatgggtgcggtaggcggtactccatccgattgtcgctacatccttacccccggaggtctggccgagcagccgggacaggccgagcaccagcccgaatcccctctcaacgaaacccagcgtctgttattattgcagcaggggcttcacactgtggcggtttctccccaggccgagggcatcggcgcaatctggcccgcactcgttgccactgagctggcagattag

SEQ ID NO: 315143 - protein, 875 aa, Artificial Sequence
  derived and/or modified sequence
MEKLHQCYWKSGEPQSDDIEASRMKRAAAKHLIERYYHQLTEGCGNEACTNEFCASCPTFLRMDNNAAAIKALELYKINAKLCDPHPSKKGASSAYLENSKGAPNNSCSEIKMNKKGARIDFKDVTYLTEEKVYEILELCREREDYSPLIRVIGRVFSSAEALVQSFRKVKQHTKEELKSLQAKDEDKDEDEKEKAACSAAAMEEDSEASSSRIGDSSQGDNNLQKLGPDDVSVDIDAIRRVYTRLLSNEKIETAFLNALVYLSPNVECDLTYHNVYSRDPNYLNLFIIVMENRNLHSPEYLEMALPLFCKAMSKLPLAAQGKLIRLWSKYNADQIRRMMETFQQLITYKVISNEFNSRNLVNDDDAIVAASKCLKMVYYANVVGGEVDTNHNEEDDEEPIPESSELTLQELLGEERRNKKGPRVDPLETELGVKTLDCRKPLIPFEEFINEPLNEVLEMDKDYTFFKVETENKFSFMTCPFILNAVTKNLGLYYDNRIRMYSERRITVLYSLVQGQQLNPYLRLKVRRDHIIDDALVRLEMIAMENPADLKKQLYVEFEGEQGVDEGGVSKEFFQLVVEEIFNPDIGMFTYDESTKLFWFNPSSFETEGQFTLIGIVLGLAIYNNCILDVHFPMVVYRKLMGKKGTFRDLGDSHPVLYQSLKDLLEYEGNVEDDMMITFQISQTDLFGNPMMYDLKENGDKIPITNENRKEFVNLYSDYILNKSVEKQFKAFRRGFHMVTNESPLKYLFRPEEIELLICGSRNLDFQALEETTEYDGGYTRDSVLIREFWEIVHSFTDEQKRLFLQFTTGTDRAPVGGLGKLKMIIAKNGPDTERLPTSHTCFNVLLLPEYSSKEKLKERLLKAITYAKGFGML

SEQ ID NO: 315144 - DNA, 2628 bp, Artificial Sequence
  derived and/or modified sequence
atggagaagctgcaccagtgctactggaagagcggcgagccccagagcgacgacatcgaggccagcagaatgaagagagccgccgccaagcacctgatcgagagatactaccaccagctgaccgagggctgcggcaacgaggcctgcaccaacgagttctgcgccagctgccccaccttcctgagaatggacaacaacgccgccgccatcaaggccctggagctgtacaagatcaacgccaagctgtgcgacccccaccccagcaagaagggcgccagcagcgcctacctggagaacagcaagggcgcccccaacaacagctgcagcgagatcaagatgaacaagaagggcgccagaatcgacttcaaggacgtgacctacctgaccgaggagaaggtgtacgagatcctggagctgtgcagagagagagaggactacagccccctgatcagagtgatcggcagagtgttcagcagcgccgaggccctggtgcagagcttcagaaaggtgaagcagcacaccaaggaggagctgaagagcctgcaggccaaggacgaggacaaggacgaggacgagaaggagaaggccgcctgcagcgccgccgccatggaggaggacagcgaggccagcagcagcagaatcggcgacagcagccagggcgacaacaacctgcagaagctgggccccgacgacgtgagcgtggacatcgacgccatcagaagagtgtacaccagactgctgagcaacgagaagatcgagaccgccttcctgaacgccctggtgtacctgagccccaacgtggagtgcgacctgacctaccacaacgtgtacagcagagaccccaactacctgaacctgttcatcatcgtgatggagaacagaaacctgcacagccccgagtacctggagatggccctgcccctgttctgcaaggccatgagcaagctgcccctggccgcccagggcaagctgatcagactgtggagcaagtacaacgccgaccagatcagaagaatgatggagaccttccagcagctgatcacctacaaggtgatcagcaacgagttcaacagcagaaacctggtgaacgacgacgacgccatcgtggccgccagcaagtgcctgaagatggtgtactacgccaacgtggtgggcggcgaggtggacaccaaccacaacgaggaggacgacgaggagcccatccccgagagcagcgagctgaccctgcaggagctgctgggcgaggagagaagaaacaagaagggccccagagtggaccccctggagaccgagctgggcgtgaagaccctggactgcagaaagcccctgatccccttcgaggagttcatcaacgagcccctgaacgaggtgctggagatggacaaggactacaccttcttcaaggtggagaccgagaacaagttcagcttcatgacctgccccttcatcctgaacgccgtgaccaagaacctgggcctgtactacgacaacagaatcagaatgtacagcgagagaagaatcaccgtgctgtacagcctggtgcagggccagcagctgaacccctacctgagactgaaggtgagaagagaccacatcatcgacgacgccctggtgagactggagatgatcgccatggagaaccccgccgacctgaagaagcagctgtacgtggagttcgagggcgagcagggcgtggacgagggcggcgtgagcaaggagttcttccagctggtggtggaggagatcttcaaccccgacatcggcatgttcacctacgacgagagcaccaagctgttctggttcaaccccagcagcttcgagaccgagggccagttcaccctgatcggcatcgtgctgggcctggccatctacaacaactgcatcctggacgtgcacttccccatggtggtgtacagaaagctgatgggcaagaagggcaccttcagagacctgggcgacagccaccccgtgctgtaccagagcctgaaggacctgctggagtacgagggcaacgtggaggacgacatgatgatcaccttccagatcagccagaccgacctgttcggcaaccccatgatgtacgacctgaaggagaacggcgacaagatccccatcaccaacgagaacagaaaggagttcgtgaacctgtacagcgactacatcctgaacaagagcgtggagaagcagttcaaggccttcagaagaggcttccacatggtgaccaacgagagccccctgaagtacctgttcagacccgaggagatcgagctgctgatctgcggcagcagaaacctggacttccaggccctggaggagaccaccgagtacgacggcggctacaccagagacagcgtgctgatcagagagttctgggagatcgtgcacagcttcaccgacgagcagaagagactgttcctgcagttcaccaccggcaccgacagagcccccgtgggcggcctgggcaagctgaagatgatcatcgccaagaacggccccgacaccgagagactgcccaccagccacacctgcttcaacgtgctgctgctgcccgagtacagcagcaaggagaagctgaaggagagactgctgaaggccatcacctacgccaagggcttcggcatgctgtag

SEQ ID NO: 315145 - DNA, 2628 bp, Artificial Sequence
  derived and/or modified sequence
atggagaaactgcaccagtgttactggaagagcggagagccccagtctgatgacatagaggcttctcgcatgaagcgggcagccgctaaacatctaatcgagagatactatcatcagctgaccgaaggatgtggcaacgaggcctgcacaaatgagttctgcgcatcctgtcccacattcctgaggatggataataacgccgcagcaattaaggcactagaactgtacaagataaacgccaagctgtgtgacccccacccttcaaagaagggggcatcctcggcttacttggagaactccaagggcgccccaaacaattcatgtagtgagattaagatgaacaagaaaggggctagaatagattttaaagacgtcacctatctaaccgaagagaaagtctatgaaatccttgagctctgtagggaaagagaagattacagtcctctgatccgagtgataggacgtgtcttttcctctgctgaggccttagtgcagtcgtttcggaaggttaaacagcatacaaaggaggagctcaaatcactgcaagccaaagacgaagacaaggatgaggacgagaaagaaaaggccgcctgttccgcagccgccatggaggaggattccgaggcatcctctagcagaattggcgactcctcacagggtgacaataacctacagaagctgggccctgatgacgtgtcagttgatatcgacgcaatccggcgcgtttatacgcggcttctctcgaatgaaaagattgaaacagcttttctcaatgcactagtttatctgagcccaaacgttgagtgtgacctcacctatcacaatgtatacagccgcgaccctaactatttaaatctgtttatcatcgtgatggagaacagaaacttacactcccctgaatacctcgagatggctttaccactcttctgtaaagccatgtcaaaactcccgctcgccgcacagggcaaactgatccgtctctggtctaagtacaacgcagatcaaatccgtcgcatgatggaaacattccaacagctaattacttataaagtgatctctaatgagttcaattcacgtaacctggttaatgacgatgacgccatagtggctgcctctaagtgcctgaaaatggtgtactatgcaaacgtggtcggtggagaagtcgatactaaccataacgaggaggacgacgaggaacctattcctgaaagctccgagctaaccctgcaggagctgcttggtgaggagcgcagaaataagaaaggtccacgggtcgatcccctggagactgaactgggagtgaagacactcgattgccggaagcccctgattcccttcgaggaattcataaatgagcccttgaacgaagttctggagatggacaaggactacaccttttttaaggtggagacagagaacaagttcagtttcatgacatgccctttcattttaaatgctgtcaccaagaacctcggtctttactacgacaataggattcggatgtacagcgagcggagaattaccgtcttgtactccctggtgcaaggccaacagctcaatccatatctccggcttaaagtgcgaagggatcacattattgacgacgctctcgtaaggctggagatgatcgcgatggaaaacccagcagacctgaagaagcaactctacgtagagttcgagggggaacagggggtggatgaagggggtgtctcaaaggagtttttccaactagtcgtggaagaaatctttaacccagatattgggatgtttacttatgatgagtcaaccaaactgttttggttcaacccctcaagtttcgagacggaaggccaatttacactgatcggcatcgtgctggggctggctatttacaacaactgtatccttgatgtgcacttcccaatggtggtgtacaggaaactgatgggcaaaaagggaacatttcgagatcttggggactctcaccccgtgttgtaccagtctctcaaagacctgctcgagtacgagggaaacgtcgaagacgacatgatgattacttttcagatatctcaaacagatttgttcggaaatcctatgatgtatgacctcaaagaaaacggtgacaaaatccccatcaccaatgaaaaccgaaaggagttcgtcaatctgtattccgattacatcctcaataaatccgttgaaaagcagtttaaggcattccgccgcggctttcacatggttaccaacgaatctccgctcaaataccttttcaggcccgaagaaatagagctgctgatttgcggctctcgtaacctcgatttccaggcacttgaggagacaacagagtatgacggcggatatacaagagatagtgtactcatccgcgaattttgggagattgtgcactcttttaccgatgagcagaaacgactgttcttacagttcactaccggtactgaccgagcccctgttggaggattgggcaagctgaagatgattatagccaaaaacggcccagatacagagaggctcccgacatctcacacctgtttcaatgtgcttctgctccccgaatattctagcaaggagaagctgaaggaaaggttactgaaggctattacatacgcaaaaggcttcgggatgctgtag

SEQ ID NO: 315146 - DNA, 2628 bp, Artificial Sequence
  derived and/or modified sequence
atggagaagctgcaccagtgctactggaagtctggagagccccagagtgatgacatcgaggccagcaggatgaagagagctgctgccaagcacctgattgagcgctactaccaccagctgacagagggctgtggaaatgaggcctgcaccaatgagttctgtgccagctgccccaccttcctgaggatggacaacaatgctgctgccatcaaggccctggagctgtacaagatcaatgccaagctgtgtgacccccaccccagcaagaagggggccagcagcgcctacctggagaacagcaaaggagcccccaacaacagctgcagcgagatcaagatgaacaagaagggggccagaattgacttcaaggatgtgacctacctgacagaggagaaggtgtatgagatcctggagctgtgccgggagcgggaggactacagccccctcatccgggtgattggccgggtcttcagcagcgctgaggccctggtgcagagcttcaggaaggtgaagcagcacaccaaggaggagctgaagagcctgcaggccaaggatgaggacaaggatgaagatgagaaggagaaggccgcctgcagcgctgctgccatggaggaggacagcgaggccagcagcagccgcatcggggacagcagccagggcgacaacaacctgcagaagctgggcccagatgatgtgtctgtggacattgatgccatccggcgggtgtacacccggctgctgagcaatgagaagattgaaacagccttcctgaatgccctggtgtacctgagccccaacgtggagtgtgacctgacctaccacaacgtgtacagccgggaccccaactacctgaacctcttcatcatcgtgatggagaacagaaacctgcacagccctgagtacctggagatggccctgcccctcttctgcaaggccatgagcaagctgcccctggccgcccagggcaagctgatccggctgtggagcaagtacaatgctgaccagatccggaggatgatggagaccttccagcagctgatcacctacaaggtgatcagcaatgagttcaacagcaggaacctggtgaatgatgatgatgccatcgtggccgccagcaagtgcctgaagatggtgtactatgccaacgtggtgggcggggaggtggacaccaaccacaatgaagaagatgatgaggagcccatccctgagagcagcgagctgaccctgcaggagctgctgggggaggagaggaggaacaagaagggcccccgggtggaccccctggagacagagctgggcgtgaagaccctggactgcaggaagcccctcatcccctttgaggagttcatcaatgagcccctgaatgaggtgctggagatggacaaggactacaccttcttcaaggtggagacagagaacaagttctccttcatgacctgccccttcatcctgaatgctgtgaccaagaacctgggcctgtactatgacaaccgcatccgcatgtacagcgagcggcgcatcaccgtgctgtacagcctggtgcagggccagcagctgaacccctacctgcggctgaaggtgcggcgggaccacatcattgatgatgccctggtgcggctggagatgattgccatggagaacccagctgacctgaagaagcagctgtatgtggagtttgaaggagagcagggcgtggatgagggcggcgtgtccaaggagttcttccagctggtggtggaggagatcttcaacccagacatcggcatgttcacctatgatgagagcaccaagctgttctggttcaaccccagcagctttgaaacagagggccagttcaccctgattggaattgtgctgggcctggccatctacaacaactgcatcctggatgtgcacttccccatggtggtgtacaggaagctgatgggcaagaagggcaccttccgggacctgggggacagccaccctgtgctgtaccagagcctgaaggacctgctggagtatgagggcaatgtggaggatgacatgatgatcaccttccagatcagccagacagacctgtttggaaaccccatgatgtatgacctgaaggaaaatggagacaagatccccatcaccaatgaaaataggaaggagtttgtgaacctgtacagcgactacatcctgaacaagtctgtggagaagcagttcaaggccttccggcggggcttccacatggtgaccaatgaaagccccctgaagtacctgttccggcctgaggagattgagctgctgatctgtggcagcaggaacctggacttccaggccctggaggagaccacagaatatgatggcggctacacccgggacagcgtgctgatccgggagttctgggagatcgtgcacagcttcacagatgagcagaagaggctcttcctgcagttcaccaccggcacagaccgggcccctgtgggcggcctgggcaagctgaagatgatcatcgccaagaatggaccagacacagagcggctgcccaccagccacacctgcttcaacgtgctgctgctgcctgagtacagcagcaaggagaagctgaaggagcggctgctgaaggccatcacctacgccaagggcttcggcatgctgtag

SEQ ID NO: 315147 - DNA, 2628 bp, Artificial Sequence
  derived and/or modified sequence
atggagaagctgcaccagtgctactggaagagcggcgagccccagtccgacgatatcgaagcaagcaggatgaagagggcagcggccaaacacctcatcgaaagatactatcaccagttaactgagggatgtgggaatgaagcttgcaccaacgagttttgtgcgtcatgtcccacctttctgaggatggacaataacgctgccgctatcaaagccctcgagctctataaaattaacgccaagctgtgtgacccacacccctctaagaagggcgctagctcagcttacctggagaactcaaagggtgcccccaacaactcctgctccgaaataaagatgaacaagaagggcgcaaggattgacttcaaggatgtgacataccttacggaagagaaggtgtacgagatcctagaactgtgtcgcgagcgagaagattattcaccactgatccgcgttatcgggcgtgtgttctctagcgcagaagcactggtgcagtccttcagaaaagtcaaacaacatactaaggaagagctaaaaagtctgcaggcaaaggacgaagataaggacgaggatgagaaagaaaaagcagcctgctctgcagccgctatggaagaggactctgaggcgtcatcttcccgcatcggagactccagccagggtgataacaatctgcaaaaactgggtcctgatgacgtgtccgttgacatcgacgccatccgaagagtgtacacccggttgctctcaaacgaaaaaattgagacagccttcctgaatgccctggtctacctgtcgcctaacgtcgaatgcgacctgacttatcataatgtgtatagtcgggaccctaattatctgaacttatttattatcgtaatggagaatcgcaatcttcactctcctgaataccttgagatggctctccccctgttttgcaaagcgatgtccaagcttcctcttgccgcacaggggaagctcatccggctgtggtctaagtacaatgccgaccagattagaagaatgatggagacgtttcagcagctcattacatacaaagtgatcagtaacgaatttaattctcgcaatcttgtgaacgatgatgacgcgatcgtggccgcaagcaagtgtctgaagatggtatactacgccaacgtcgtcggaggcgaggtcgatacaaatcataacgaagaggacgacgaagagcccatcccggagtcgagtgaactgactttgcaggaattgttaggggaggaacgtcggaacaaaaaggggcctcgagtggacccccttgaaacagagcttggcgttaaaacccttgactgtcggaagccccttatcccgttcgaagagttcatcaacgagccattgaacgaggtactggaaatggataaggattacacctttttcaaagtggagactgagaacaaattctctttcatgacatgcccattcatcttaaacgccgtaactaagaaccttggactgtactatgataaccgtatacgaatgtatagcgaaaggaggataacagttctgtattctctggtacaagggcagcagctgaacccatacctgcggctgaaagtccgacgcgaccacatcattgacgacgcccttgttcggctagagatgatcgcaatggagaaccctgctgacctcaaaaagcagctgtacgtggagttcgagggggagcagggagtcgacgagggaggagtttctaaggagttctttcagctcgtggttgaagagatattcaatccagatatcggcatgttcacatatgatgaatcaacaaagctcttttggttcaatccttccagtttcgaaaccgaaggccagttcacattgataggcatcgtacttggcctggccatatacaacaactgcatcctggacgtccacttccccatggtcgtgtacaggaagcttatggggaaaaagggaacttttcgcgacctgggggactcccatccagtgttataccagtctctgaaggacctgttggagtatgagggtaatgttgaggacgatatgatgataacttttcagatatcccagacagacctctttggcaacccgatgatgtacgatcttaaagagaacggcgataaaattcccatcacaaatgagaatcgcaaggagtttgttaatttatatagtgactatatcctaaataaatccgtggagaagcagttcaaggccttccggcgcgggttccatatggtcactaacgagagccccctgaaatatctatttcgcccggaagagattgaactgctcatttgcgggtccagaaacctggactttcaagccctggaggagacgacggaatatgacggaggatacacaagggactctgttctgatcagagagttctgggagattgtgcattctttcaccgatgaacagaagaggttgttcctacagttcaccactgggacagacagagctccagtaggcggattgggcaaactgaagatgatcattgcaaaaaatgggcctgacacggagcggctccctacctcacacacttgcttcaatgtgctgctgctccccgagtactctagtaaggagaaattaaaagaaagattgctaaaagccataacctacgcaaagggattcggcatgctgtag

SEQ ID NO: 315148 - DNA, 2628 bp, Artificial Sequence
  derived and/or modified sequence
atggaaaagctgcaccaatgctattggaagtctggagaaccacagagcgatgatattgaagcctctaggatgaagcgagcagcagcgaaacacttaatagagcgatattaccaccagctcactgaagggtgtggcaatgaagcttgtactaatgaattctgtgcaagctgccccacatttctgaggatggataataacgccgctgcgattaaggcacttgaattatacaagatcaacgctaagctttgtgaccctcaccctagcaagaaaggcgctagcagtgcctacctggagaattctaaaggcgctcctaacaacagttgcagtgagatcaaaatgaataagaagggggcaaggatcgactttaaagatgtgacctatctgactgaagagaaagtgtatgagattctggagctgtgtcgggaacgagaggattacagcccactaatacgggtgatcggccgagtattctccagcgccgaagctcttgttcaaagttttcgtaaggtgaagcagcatacgaaggaggaactgaagtccctgcaggcaaaggacgaagacaaggatgaagacgagaaggaaaaggccgcttgctctgctgcggctatggaggaggacagcgaagcaagtagctccagaatcggagatagttcccagggagacaacaacttgcagaagctggggccagatgatgtctctgtggatatcgacgccattaggagagtgtacactcggttactgtcaaatgaaaaaatcgaaacagcgtttctgaacgccctcgtgtaccttagcccaaacgtggaatgcgacctgacttatcataatgtttacagtcgggaccctaactatcttaacctctttatcatcgtaatggagaatcgcaatctccactcgcccgagtatctcgaaatggcattgccactgttttgcaaagcaatgtcgaagctccctctcgcagctcagggaaaactaatccgactttggagcaagtataatgccgatcagattcgccgaatgatggaaacgtttcagcagctgattacttacaaagttatcagtaacgaattcaatagcagaaacctggtcaatgatgacgatgcaatcgtcgccgcttcgaagtgtctcaaaatggtctactatgcaaacgtggttggcggagaagtggatactaatcataacgaggaggatgatgaggagccgattccagagtcttcagaactgacacttcaggaacttcttggggaagagagaaggaataaaaaagggccacgcgtggaccccctggaaacagagctgggcgtcaagaccctcgactgtcggaagcctctcatcccattcgaagaattcattaatgagcctctaaacgaggtcctagagatggataaggattatacattcttcaaggtagagactgagaataaatttagttttatgacctgtccgttcatcctgaacgccgtaacaaagaacctcggcctgtattacgataacaggattcgtatgtattccgagcggaggatcactgtcctctacagcctggttcagggccaacagcttaacccttatcttagattgaaagtgcgacgcgatcacatcattgacgacgctctagttaggctggaaatgatcgcaatggaaaatccggctgatctcaaaaagcagctgtacgtggagttcgagggagagcagggggttgacgaagggggagtgagcaaggagtttttccagcttgtggtggaagaaattttcaacccggatattggaatgtttacctatgacgagtccacaaaactgttctggtttaacccctcctcctttgaaacggagggtcaattcacactcatcggaatcgtattaggactggccatctacaacaactgtattctggatgtgcacttcccgatggtcgtgtacaggaagttgatgggaaagaaaggtacctttcgtgatcttggcgactcacaccctgtgctctaccagtccctgaaagatctcttagaatatgaaggaaacgtggaagatgacatgatgatcacctttcagatctcacagacagacctcttcggaaaccccatgatgtatgatttaaaggagaacggggataaaatacccattactaatgagaacagaaaagaattcgtcaacctgtacagtgattacatcctcaataaaagcgttgagaagcagttcaaggctttccgtaggggattccacatggttaccaacgaatctccactcaagtacctcttccggcctgaggaaattgaactcctgatatgtggctctaggaatctggactttcaggccctggaggagaccacagagtatgacggaggttacacaagagacagcgttctcattagggaattctgggagattgtgcattccttcaccgacgagcagaaaagactgttcttgcagttcactaccggcaccgatagggccccagtcggaggtctggggaagctgaagatgatcattgccaaaaacggcccagacactgagagattacccacgagccacacctgttttaatgtgctgcttttgcccgaatactctagtaaagaaaagctcaaagaacggctactcaaagccattacttatgccaaaggtttcggaatgctgtag

SEQ ID NO: 315149 - DNA, 4516 bp, Artificial Sequence
  derived and/or modified sequence
atggagaagctgcaccagtgttattggaaatcaggagaacctcagtctgacgacattgaagctagccgaatgaagcgagcagctgcaaagcatctaatagaacgctactaccaccagttaactgagggctgtggaaatgaagcctgcacgaatgagttttgtgcttcctgtccaacttttcttcgtatggataataatgcagcagctattaaagccctcgagctttataagattaatgcaaaactctgtgatcctcatccctccaagaaaggagcaagctcagcttaccttgagaactcgaaaggtgcccccaacaactcctgctctgagataaaaatgaacaagaaaggcgctagaattgattttaaagatgtgacttacttaacagaagagaaggtatatgaaattcttgaattatgtagagaaagagaggattattcccctttaatccgtgttattggaagagttttttctagtgctgaggcattggtacagagcttccggaaagttaaacaacacaccaaggaagaactgaaatctcttcaagcaaaagatgaagacaaagatgaagatgaaaaggaaaaagctgcatgttctgctgctgctatggaagaagactcagaagcatcttcctcaaggataggtgatagctcacagggagacaacaatttgcaaaaattaggccctgatgatgtgtctgtggatattgatgccattagaagggtctacaccagattgctctctaatgaaaaaattgaaactgcctttctcaatgcacttgtatatttgtcacctaacgtggaatgtgacttgacgtatcacaatgtatactctcgagatcctaattatctgaatttgttcattatcgtaatggagaatagaaatctccacagtcctgaatatctggaaatggctttgccattattttgcaaagcgatgagcaagctaccccttgcagcccaaggaaaactgatcagactgtggtctaaatacaatgcagaccagattcggagaatgatggagacatttcagcaacttattacttataaagtcataagcaatgaatttaacagtcgaaatctagtgaatgatgatgatgccattgttgctgcttcgaagtgcttgaaaatggtttactatgcaaatgtagtgggaggggaagtggacacaaatcacaatgaagaagatgatgaagagcccatccctgagtccagcgagctgacacttcaggaacttttgggagaagaaagaagaaacaagaaaggtcctcgagtggaccccctggaaactgaacttggtgttaaaaccctggattgtcgaaaaccacttatcccttttgaagagtttattaatgaaccactgaatgaggttctagaaatggataaagattatacttttttcaaagtagaaacagagaacaaattctcttttatgacatgtccctttatattgaatgctgtcacaaagaatttgggattatattatgacaatagaattcgcatgtacagtgaacgaagaatcactgttctctacagcttagttcaaggacagcagttgaatccatatttgagactcaaagttagacgtgaccatatcatagatgatgcacttgtccggctagagatgatcgctatggaaaatcctgcagacttgaagaagcagttgtatgtggaatttgaaggagaacaaggagttgatgagggaggtgtttccaaagaattttttcagctggttgtggaggaaatcttcaatccagatattggtatgttcacatacgatgaatctacaaaattgttttggtttaatccatcttcttttgaaactgagggtcagtttactctgattggcatagtactgggtctggctatttacaataactgtatactggatgtacattttcccatggttgtctacaggaagctaatggggaaaaaaggaacttttcgtgacttgggagactctcacccagttctatatcagagtttaaaagatttattggagtatgaagggaatgtggaagatgacatgatgatcactttccagatatcacagacagatctttttggtaacccaatgatgtatgatctaaaggaaaatggtgataaaattccaattacaaatgaaaacaggaaggaatttgtcaatctttattctgactacattctcaataaatcagtagaaaaacagttcaaggcttttcggagaggttttcatatggtgaccaatgaatctcccttaaagtacttattcagaccagaagaaattgaattgcttatatgtggaagccggaatctagatttccaagcactagaagaaactacagaatatgacggtggctataccagggactctgttctgattagggagttctgggaaatcgttcattcatttacagatgaacagaaaagactcttcttgcagtttacaacgggcacagacagagcacctgtgggaggactaggaaaattaaagatgattatagccaaaaatggcccagacacagaaaggttacctacatctcatacttgctttaatgtgcttttacttccggaatactcaagcaaagaaaaacttaaagagagattgttgaaggccatcacgtatgccaaaggatttggcatgctgtaaaacaaaacaaaacaaaataaaacaaaaaaaaggaaggaaaaaaaaagaaaaaatttaaaaaattttaaaaatataacgagggataaatttttggtggtgatagtgtcccagtacaaaaaggctgtaagatagtcaaccacagtagtcacctatgtctgtgcctcccttctttattggggacatgtgggctggaacagcagatttcagctacatatatgaacaaatcctttattattattataattatttttttgcgtgaaagtgttacatattctttcacttgtatgtacagagaggtttttctgaatatttattttaagggttaaatcacttttgcttgtgtttattactgcttgaggttgagccttttgagtatttaaaaaatatataccaacagaactactctcccaaggaaaatattgccaccatttgtagaccacgtaaccttcaagtatgtgctacttttttgtccctgtatctaactcaaatcaggaactgtattttttttaatgatttgcttttgaaacttgaagtcttgaaaacagtgtgatgcaattactgctgttctagcccccaaagagttttctgtgcaaaatcttgagaatcaatcaataaagaaagatggaaggaagggagaaattggaatgttttaactgcagccctcagaactttagtaacagcacaacaaattaaaaacaaaaacaactcatgccacagtatgtcgtcttcatgtgtcttgcaatgaactgtttcagtagccaatcctctttcttagtatatgaaaggacagggatttttgttcttgttgttctcgttgttgttttaagtttactggggaaagtgcatttggccaaatgaaatggtagtcaagcctattgcaacaaagttaggaagtttgttgtttgtttattataaacaaaaagcatgtgaaagtgcacttaagatagagtttttattaattacttacttattacctagattttaaatagacaatccaaagtctccccttcgtgttgccatcatcttgttgaatcagccattttatcgaggcacgtgatcagtgttgcaacataatgaaaaagatggctactgtgccttgtgttacttaatcatacagtaagctgacctggaaatgaatgaaactattactcctaagaattacattgtatagccccacagattaaatttaattaattaattcaaaacatgttaaacgttactttcatgtactatggaaaagtacaagtaggtttacattactgatttccagaagtaagtagtttcccctttcctagtcttctgtgtatgtgatgttgttaatttcttttattgcattataaaataaaaggattatgtatttttaactaaggtgagacattgatatatccttttgctacaagctatagctaatgtgctgagcttgtgccttggtgattgattgattgattgactgattgttttaactgattactgtagatcaacctgatgatttgtttgtttgaaattggcaggaaaaatgcagctttcaaatcattggggggagaaaaaggatgtctttcaggattattttaattaatttttttcataattgagacagaactgtttgttatgtaccataatgctaaataaaactgtggcacttttcaccataatttaatttagtggaaaaagaagacaatgctttccatattgtgataaggtaacatggggtttttctgggccagcctttagaacactgttagggtacatacgctaccttgatgaaagggaccttcgtgcaactgtagtcatcttaaaggcttctcatccactgtgcttcttaatgtgtaattaaagtgaggagaaattaaatactctgagggcgttttatataataaattcgtgaaga

SEQ ID NO: 315150 - protein, 429 aa, Artificial Sequence
  derived and/or modified sequence
MAGSGAWKRLKSMLRKDDAPLFLNDTSAFDFSDEAGDEGLSRFNKLRVVVADDGSEAPERPVNGAHPTLQADDDSLLDQDLPLTNSQLSLKVDSCDNCSKQREILKQRKVKARLTIAAVLYLLFMIGELVGGYIANSLAIMTDALHMLTDLSAIILTLLALWLSSKSPTKRFTFGFHRLEVLSAMISVLLVYILMGFLLYEAVQRTIHMNYEINGDIMLITAAVGVAVNVIMGFLLNQSGHRHSHSHSLPSNSPTRGSGCERNHGQDSLAVRAAFVHALGDLVQSVGVLIAAYIIRFKPEYKIADPICTYVFSLLVAFTTFRIIWDTVVIILEGVPSHLNVDYIKEALMKIEDVYSVEDLNIWSLTSGKSTAIVHIQLIPGSSSKWEEVQSKANHLLLNTFGMYRCTIQLQSYRQEVDRTCANCQSSSP

SEQ ID NO: 315151 - DNA, 1290 bp, Artificial Sequence
  derived and/or modified sequence
atggcgggcagcggcgcctggaaaagactgaagagcatgttaaggaaggacgacgcgcctttgtttttaaatgacacctctgcattcgatttctccgacgaggctggcgatgaaggactgtccaggtttaataagctccgagtcgtggtcgcagatgatgggagcgaagcgcccgagcgccccgtgaacggcgctcatcctaccctgcaggctgatgacgattccctgttggatcaggatcttcctctgaccaattcacagttgagtcttaaggtggatagttgtgacaactgcagtaaacaacgagaaatcctgaaacagcgcaaggtgaaggccaggctcacaatcgcagcagtgctttacctcctcttcatgattggcgaactggtgggcggttacatcgctaattccttagcgataatgaccgacgccttgcacatgctgaccgatctgtcggccattatcctgacacttttagcactctggctttcgtccaagtcacctacaaagcggttcacattcggatttcacaggcttgaagttctttccgccatgatatctgtgctgctcgtatatatcctgatgggcttcctgttatatgaggcagtgcagaggaccatccatatgaattacgagattaacggtgacatcatgttaatcaccgctgcggtcggagtcgcagtgaacgtgatcatggggtttctactgaaccagtccggtcaccggcacagccacagtcactcacttccctctaatagcccaacacgcggctctggatgtgaacgcaatcacggacaggactctcttgcagtgcgagccgcattcgtgcatgcactgggtgacctggtgcagtccgtgggtgtcctgatagccgcctacattatcaggtttaaacccgagtataagatcgcagatcccatttgcacttacgtgttcagcttgttggtggctttcactacgtttagaatcatttgggataccgttgtaatcatcctggaaggagtgccgagtcatttgaatgtcgactacataaaagaggctctgatgaaaatcgaagacgtgtacagtgtcgaggatttgaatatctggagcctaaccagcggtaagtccactgccatcgtgcatattcagctgatccccgggtcatcatccaaatgggaagaggtccaatcaaaggctaatcacctgctcctgaacacttttggcatgtatcggtgtactattcagctgcagtcttaccgccaggaggtggacaggacatgtgccaactgtcagtcaagtagtccttag

SEQ ID NO: 315152 - DNA, 1290 bp, Artificial Sequence
  derived and/or modified sequence
atggccggcagcggggcctggaagaggctgaagtccatgctgaggaaggatgatgcccccctcttcctgaatgacaccagcgcctttgacttcagtgatgaagctggagatgagggcctgagccgcttcaacaagctgcgggtggtggtggctgatgatggcagcgaggcccctgagaggcctgtgaatggagcccaccccaccctgcaggctgatgatgacagcctgctggaccaggacctgcccctgaccaacagccagctgagcctgaaggtggacagctgtgacaactgcagcaagcagcgggagatcctgaagcagaggaaggtgaaggcccggctgaccatcgctgctgtgctgtacctgctcttcatgattggagagctggtgggcggctacatcgccaacagcctggccatcatgacagatgccctgcacatgctgacagacctgagcgccatcatcctgaccctgctggccctgtggctgagcagcaagagccccaccaagcgcttcaccttcggcttccaccggctggaggtgctgagcgccatgatctctgtgctgctggtgtacatcctgatgggcttcctgctgtatgaggccgtgcagaggaccatccacatgaactatgagatcaacggggacatcatgctgatcacagctgctgtgggcgtggccgtgaatgtcatcatgggcttcctgctgaaccagagcggccaccgccacagccacagccacagcctgcccagcaacagccccacccggggcagcggctgtgagaggaaccacggccaggacagcctggccgtgcgggccgcctttgtgcacgccctgggggacctggtgcagagcgtgggcgtgctgattgctgcctacatcatccgcttcaagccagagtacaagattgctgaccccatctgcacctacgtgttcagcctgctggtggccttcaccaccttccgcatcatctgggacacagtggtgatcatcctggagggcgtgcccagccacctgaatgtggactacatcaaggaggccctgatgaagattgaagatgtgtacagcgtggaggacctgaacatctggagcctgaccagcggcaagagcacagccatcgtgcacatccagctgatccctggcagcagcagcaagtgggaggaggtgcagagcaaggccaaccacctgctgctgaacaccttcggcatgtaccgctgcaccatccagctgcagagctaccggcaggaggtggacaggacctgtgccaactgccagagcagcagcccctag

SEQ ID NO: 315153 - DNA, 1290 bp, Artificial Sequence
  derived and/or modified sequence
atggccggcagcggcgcctggaagcggctgaagagcatgctgcggaaagacgacgctccattgttcctcaacgatactagcgccttcgactttagcgacgaagcaggggacgaggggctcagtcgtttcaataaattaagagtggtggtcgctgatgatggttcagaggctccagagcgccccgtcaatggtgcacatcctactctgcaagccgatgacgattcgctgctggatcaggacctccctttgacaaacagccagctaagcctgaaggtggattcatgcgacaattgtagtaagcagcgagagatcttgaagcagaggaaagtaaaagcgcgcctaaccatcgctgctgttctgtacctgctgtttatgataggcgagttggtgggagggtatattgcaaactctcttgcgatcatgaccgatgcactccacatgctgacagatctctccgcaataatattgactctgctggcactttggctgtcatctaagtctccaacaaagaggtttacgtttggcttccaccgcctggaggtgctcagcgcgatgatttcagtcctactcgtttatattttaatgggcttcttattatatgaggctgttcaacggacaatccacatgaactacgagattaacggtgacatcatgctcatcacagcggccgtaggcgttgcagtcaacgtgatcatggggttcctcctgaatcagagcggccataggcacagccattctcatagcctcccttccaatagtcccactaggggctctggctgcgaaagaaaccatgggcaggatagcttggctgtcagggccgcctttgttcatgcccttggcgacctcgtgcaatcagtcggagtcctaatcgcggcctatatcatcaggttcaagcctgagtacaaaattgcagaccctatctgcacatacgttttcagtcttctagtcgcatttacaacattccggattatttgggacaccgtggttatcatcctggagggcgttcctagtcatctgaatgttgactatatcaaggaagcattgatgaagatcgaggacgtgtattctgtcgaagatcttaatatctggagtctcacttccggcaaatccacagccatagtccacattcaactgataccaggtagctcttcaaaatgggaagaagtacagtcaaaggctaaccacctgctgcttaatactttcggaatgtatcggtgcacaatccagctgcagagctaccgtcaagaggtagacagaacctgtgctaactgtcagtcctcaagtccctag

SEQ ID NO: 315154 - DNA, 1290 bp, Artificial Sequence
  derived and/or modified sequence
atggcaggttccggagcgtggaagcggctaaaatcgatgctacgcaaggatgatgctcccctattcctgaacgacacctcggcattcgacttctccgacgaagcaggagatgaagggttatcaaggttcaataagctccgagtcgtggtagccgacgacgggtcagaagctccagaacggccagttaacggggcacatcctacgctgcaggcggatgacgattccctccttgatcaggacctacccctgacaaattcccagctctctttgaaagtcgatagttgcgataactgttctaagcagcgcgaaatcctaaagcagcgcaaggtcaaagccaggctgaccattgccgctgtcctgtacttgctgtttatgattggagagcttgtcggcggatacattgcgaactctttggctatcatgacagacgcccttcacatgctcactgacttgtccgctattatcctcacactgctggcattgtggctctcttccaagtccccaaccaagaggttcactttcggctttcatcgtttggaggtcttgtcagcaatgattagtgtgcttctagtttacatccttatgggtttcctgctctatgaggcggtccagaggaccattcatatgaactacgagatcaacggagatattatgctaataaccgcagctgtgggggttgccgtcaacgtgatcatgggattcttactcaatcaatcaggccaccgacacagtcactctcacagcttgccctctaacagtcctacgcgcggtagcggttgtgaacgcaaccacggacaagactcccttgcagtgcgcgctgccttcgtgcatgcactcggagacttggtacagagcgtgggcgtcctgatagccgcttacattattcgtttcaagcccgagtacaaaatcgctgacccaatttgcacctatgtcttcagcttactcgtagcgtttactacctttagaatcatctgggataccgtagttattattttagaaggggtcccatcacacttgaacgtggattacatcaaggaagctctgatgaaaatcgaggacgtgtacagcgtcgaagacctaaacatttggtcactcacaagtggaaaatcaactgcaatcgtgcatatacagctgatccctggctcctccagcaagtgggaagaagtccaaagcaaagcaaaccatctgttgttgaacacctttggtatgtatcgttgcacgattcaactgcagagctacaggcaggaagttgaccgtacttgcgctaattgtcagtctagcagtccctag

SEQ ID NO: 315155 - DNA, 7157 bp, Artificial Sequence
  derived and/or modified sequence
cgcgcagggcggggagaggcggtggctgtgggcgtccggccccgaacctgtcagacctggggagccggcctccagcagcgggcgcggcgggcgcgagcacgaccccactctcctgcggccgcgggtggagcagcgcgagcccgcctcgctgagccggccgggggcggggagatgagttgcggccccgcggcagcgccccaggatggggagggacgcgcggcactgccctcgagaactggcgctccggtgaagtaggcgccgccggccgtccgcctcccccaagccgttccgcaccgcggccgctcagcctctgccatggccggctctggcgcgtggaagcgcctcaaatctatgctaaggaaggatgatgcgccgctgtttttaaatgacaccagcgcctttgacttctcggatgaggcgggggacgaggggctttctcggttcaacaaacttcgagttgtggtggccgatgacggttccgaagccccggaaaggcctgttaacggggcgcacccgaccctccaggccgacgatgattccttactggaccaagacttacctttgaccaacagtcagctgagtttgaaggtggactcctgtgacaactgcagcaaacagagagagatactgaagcagagaaaggtgaaagccaggttgaccattgctgccgttctgtacttgcttttcatgattggagaacttgtaggtggatacattgcaaatagcctagcaatcatgacagatgcacttcatatgttaactgacctaagcgccatcatactcaccctgcttgctttgtggctatcatcaaaatcaccaaccaaaagattcacctttggatttcatcgcttagaggttttgtcagctatgattagtgtgctgttggtgtatatacttatgggattcctcttatatgaagctgtgcaaagaactatccatatgaactatgaaataaatggagatataatgctcatcaccgcagctgttggagttgcagttaatgtaataatggggtttctgttgaaccagtctggtcaccgtcactcccattcccactccctgccttcaaattcccctaccagaggttctgggtgtgaacgtaaccatgggcaggatagcctggcagtgagagctgcatttgtacatgctttgggagatttggtacagagtgttggtgtgctaatagctgcatacatcatacgattcaagccagaatacaagattgctgaccccatctgtacatacgtattttcattacttgtggcttttacaacatttcgaatcatatgggatacagtagttataatactagaaggtgtgccaagccatttgaatgtagactatatcaaagaagccttgatgaaaatagaagatgtatattcagtcgaagatttaaatatctggtctctcacttcaggaaaatctactgccatagttcacatacagctaattcctggaagttcatctaaatgggaggaagtacagtccaaagcaaaccatttattattgaacacatttggcatgtatagatgtactattcagcttcagagttacaggcaagaagtggacagaacttgtgcaaattgtcagagttctagtccctaattttatgtattttgggaactcctgccttatttatcctgcagtcacagacttgagagcaataaatgcaaacctaaatgagaaaatggaatccctgacagctgtgtccgtatcaagcatcagtctctcaaacagttgccccagcctgacagtgctagtctctgtttaatggtaaaaggagactttgccataattttcagatgaagatgtttcccaaacactgtttacagaatgagatgtgactctacagatacctcatagaagacaatccaagatcatacttcattaacttgacagagtacgtgtcttaaaggaagcatcaagaattcaatatttgcatttaaaaatactttttaaggccattttatattaagccagtgctggaaaactgaattttttttattatgtataataatctcgacacccagcttctggaattgctgctttctttttacagaaattactacccaacagatttcaggaagtactagtagttatcccaaaagtggaataagcatgtattcctaagtgtttcagaaatgttttatttcacacataagtcttaatgttattgttatgattatactttataaacaaccttttccagatgctacagggttttgaatctcaaagttaacatttttcattatttgtaatcttagaaccaaatctttatttattgtggtcactgttattaaatgatttaggaaatactttcaatattattctgaatggctgaagttagtcttaaactcaaattactatatgatgatttaaaacaaaataaaagagcgaggatgggggttggagtttcaggtttatgtcttcccgacatcacttttatcattcatgaaattgtcttaaaaaagcaagagactgcaaaatgtaaacagtaatcttctgtccctttaagaactgccaacaatttgtacaaaaaatgtggtacgttggttcctgcctccactccaggtcatctgtgtgtttagcctttcagggtaaactctagagggttcagtttataattcccacctttcacatatagttcaacaacattaatccagagagaattttatgttttatgatatgggttatgttttattatatattttatgttttatgatatgggttagggattctccatggactccagaaaccctaaaatacaattttgaggttttccaataataccatagcagaaatgtccaaggggttgggggaagatattactttgagaaaacagaaatgtaaaggatttttgaccttatatatgtgtgtggttttgtttttgtttttgttcttgagagagtctcactctgtcacccaggctggagtgcagtggcgtgacctctgctcactgtaacctctgcctcctgggttcaagtgattcttctgcctcagcctcccaactagctgggactacaggtacaccacacccagctcatttttttgtatttttagtagagacagggttttgccacattggcctgtctggtcttgaactcctgacctcaggtgatccgcctgccttggccttccagagtgctgggattacagcatgagccaccatgcctggcctgtatgtgtgtgttttaaagcactagatagggatggacattaaatctgtgttgcagggaaactaaacagaggtttccaaactgaaggcaacctaattgtaaatgcctgtgttaaagaggcagcttgactgttcatgtttcattttgcaaccattggttttgagattatcttttatgcacatttggagtcccttttcaacagtgacagtttcttacacgaagaatggatatggttattgggctcctctaagaatcagagtagggtaacaatgtaccaggcaaattgtaagttgaaattctagataagcatgcagatgacttacaatataaatgaagaataggaaacattttatcttcttaccaagtaccttactataagtaaacctaagataagaaaacccagatttacctataagattgttgggagttaatggtgtcaataaaaggattgatggtccctctaatgaaacccagtagatgtttgttgaattgaactgaaaatttatgtggccagacacagtggctcatgcctgtaatctcagcatttggggaggcaaaggtggaagtatccctcgaggccaagagttcatgaccagcctggtcttttgtagagaccctgtctctacaaaaatataaaaatcagccaggcgtcgtgcacacctgtagtatcagctacttgtaaggctgtggcagaagtgctttagcccaggaggttgaggctgcagtgagccatgtccacaccattgcactgcagcctgagtaacaaaatgagaccctatctcaaaaacaaaaaggaaaagaaaatatacatgatgggattcctattgtgaagtcatttaaaataatgacttgaatttctcagaaatttcaggagcatataaactatttaaatcaaaatattcttacatatagaaaccaagtaagaataaatgagagatatttcagtggacatctggacatatttatggactttgagtatctagcaagtagaaaggaaaaaaatattcatcatactctaatcatttttttatatctattgagcttgtttcttgtaaacttttctttatcttataaaggcatatctcgcttttgtatcgacctgttccttaaaaaatgtatttgataaaacaggctaaaattcatttgagtattgaaaagaattctttttttttttttaagatggtgtctcactgtcacccaggctggagtgcagtggcacagttgggctcactgcagcctctgcctcccaggctcaagtggtcctcccatctcagcctcccaagtagctggtaccacaggcatgcaccaccacacccagctaattttttgtatttttggtagacacagtgtttcaccatgttgcccaggctggtcttgaactcctgagctcaagtgatctgcccacctcggcctcccaaagtgctgggcttatgggcatgaaccactgtgcccagccaaaaagaatccttttgtaaaatacagaaacactgcaaacctttgtaaatcttttttttttttttttttttttttttttaatgagatggggtctccctatgttgcccaggctggtcttgagctcctgggctcaagaaatccttccacctcgggctcccaaagtgctgagattacagggtgtgagctaccgcacccagccatgaaaacttctgtaaatcttaactatcgtgttctgcttaaagtgaggtacacataaagtttcctgtgctttgtttttgtaggaaaaagtacatagtttgtatctttaccttacggagtctatgagatttgagaatttgatttcactttttgtaacttaacccacagaaaaggacattaacttagcagataggaccaaggactgaatgacttctgacaaaaagcgtttggtctatccttcacttgttgagctacaaccatgcattacacttctcagctgagctctcaaagagctctatgccctgtgaaaagcagtggctgagttggatgaacacatagcattattaattttgcactgggaaaacagattatgacaggaccacagaccacaatataaaaacttggcagttctttggtgtgatatattttaattagtatttgcaaataatcagagttacttgtgtacataaacgtgtgtttcacaactatggccagatgcaaccttttggtctgtttcaggaaaagacctattattccactaacaattatgctgccttagaaacataatgggagtgtaattgaagaaagcatgtctcagaaggttttgatatgcagaactggaagctattgtaattcctacatacatttccattagctatgccttatgtaatgtgagtgcagatttttacaacttagagttcccatcagtgtttttttgccacatcaccgggtttcttattttactgttttcttttcaactttgggtgctttatttccattctctaaaactaagtttcttgctcttacgagacttagtgttccttttgaacccaggtgttccacctgacagtgtttgtctttcatagactttccagaatagacatagtcaagatcagacacgtgagcttctctctcattttaatgtgaggaaaatcatctttcagagacaaggcaccgcttagaaatgtatgtccaggtatgaaagaacctttttaaaatggctggttgttccagatccagatttctctgcacactggacttcgtagagtaagtgtggtagacaaagagactacactgcacaaccaccagtgaatatcattgctaagaagactttgggtcgtgtttctcagccactctcacagcttttgtagacttatttgattttgaaacaagcagttagctaaatctattttccttttatgcatatatgttaattggctcaacttaatatggtgttcttacagaatatgagcccatttgaaataaggttttaggcaattttgctgttggctctgatttgtatatagcaaatttaaagttacagagtgtttcctagatagaagattagttcatttggttcattttgtctttgaagcaagccaagctcatgagccagttggttatttgtcataaatgaacacccatcactatatgctatgttgaggggaggcaagtctgatcttcgaataattgataaagtttaatatctttgtagccaaaatacaatttgcaaaccctaactccagatgtgtcgtatgaatcttgacaaccaggtcttgagatttgttttactgattgccaatcaggtatattatttgtgatgttcgtgggagcatgcaaattagaagacagtgttgtgggagttcctcagtattgaattacatgtgtgcactcaggcctgccagtcactgaattctgacttgtaaagggtttaacctgctgttccaatcattgaggaccaatttgctttttgataagattggaaaacatttatggagactttcccagttaaatctatgacagtgtccacttaaatagtgcaatttagtatattctcagataactgcaacacaaaattgaaatgtgccagtatgtcatctttctacctggaagatactgtatatttggaaagtttatgcttctctcaataaatacatgttattaaataagccatatcacagtttaagaaattgtatatactttatcatatgccctttcagaaaccaggtattttgcatatgattgattttagaaagattttgaagctggggtttgtccatgttaattaagatcaaagtatatatatatatatatatatgtgctgtatttgcaactttcacattgtaatttcctatacacttattaaagtattgttttgccatgtggtttattaaataaaaatgtacagtctcttaaatatctgctctttttattaagtaatattagtaggcctaaaaacattgttcttaaaagaaaatcttttataattataatgtcattttataatgccctcttatatgtttaagaaataaaactgaaaaaaatctt

SEQ ID NO: 315156 - DNA, 1290 bp, Artificial Sequence
  derived and/or modified sequence
atggccggcagcggcgcctggaagagactgaagagcatgctgagaaaggacgacgcccccctgttcctgaacgacaccagcgccttcgacttcagcgacgaggccggcgacgagggcctgagcagattcaacaagctgagagtggtggtggccgacgacggcagcgaggcccccgagagacccgtgaacggcgcccaccccaccctgcaggccgacgacgacagcctgctggaccaggacctgcccctgaccaacagccagctgagcctgaaggtggacagctgcgacaactgcagcaagcagagagagatcctgaagcagagaaaggtgaaggccagactgaccatcgccgccgtgctgtacctgctgttcatgatcggcgagctggtgggcggctacatcgccaacagcctggccatcatgaccgacgccctgcacatgctgaccgacctgagcgccatcatcctgaccctgctggccctgtggctgagcagcaagagccccaccaagagattcaccttcggcttccacagactggaggtgctgagcgccatgatcagcgtgctgctggtgtacatcctgatgggcttcctgctgtacgaggccgtgcagagaaccatccacatgaactacgagatcaacggcgacatcatgctgatcaccgccgccgtgggcgtggccgtgaacgtgatcatgggcttcctgctgaaccagagcggccacagacacagccacagccacagcctgcccagcaacagccccaccagaggcagcggctgcgagagaaaccacggccaggacagcctggccgtgagagccgccttcgtgcacgccctgggcgacctggtgcagagcgtgggcgtgctgatcgccgcctacatcatcagattcaagcccgagtacaagatcgccgaccccatctgcacctacgtgttcagcctgctggtggccttcaccaccttcagaatcatctgggacaccgtggtgatcatcctggagggcgtgcccagccacctgaacgtggactacatcaaggaggccctgatgaagatcgaggacgtgtacagcgtggaggacctgaacatctggagcctgaccagcggcaagagcaccgccatcgtgcacatccagctgatccccggcagcagcagcaagtgggaggaggtgcagagcaaggccaaccacctgctgctgaacaccttcggcatgtacagatgcaccatccagctgcagagctacagacaggaggtggacagaacctgcgccaactgccagagcagcagcccctag

SEQ ID NO: 315157 - protein, 2012 aa, Artificial Sequence
  derived and/or modified sequence
METLNGAGDTGGKPSTRGGDPAARSRRTEGIRAAYRRGDRGGARDLLEEACDQCASQLEKGQLLSIPAAYGDLEMVRYLLSKRLVELPTEPTDDNPAVVAAYFGHTAVVQELLEPLTPKQTEWEQTAPFSGTFPLSCHLLPGPCSPQRLLNWMLALACQRGHLGVVKLLVLTHGADPESYAVRKNEFPVIVRLPLYAAIKSGNEDIAIFLLRHGAYFCSYILLDSPDPSKHLLRKYFIEASPLPSSYPGKTALRVKWSHLRLPWVDLDWLIDISCQITELDLSANCLATLPSVIPWGLINLRKLNLSDNHLGELPGVQSSDEIICSRLLEIDISSNKLSHLPPGFLHLSKLQKLTASKNCLEKLFEEENATNWIGLRKLQELDISDNKLTELPALFLHSFKSLNSLNVSRNNLKVFPDPWACPLKCCKASRNALECLPDKMAVFWKNHLKDVDFSENALKEVPLGLFQLDALMFLRLQGNQLAALPPQEKWTCRQLKTLDLSRNQLGKNEDGLKTKRIAFFTTRGRQRSGTEAASVLEFPAFLSESLEVLCLNDNHLDTVPPSVCLLKSLSELYLGNNPGLRELPPELGQLGNLWQLDTEDLTISNVPAEIQKEGPKAMLSYLRAQLRKAEKCKLMKMIIVGPPRQGKSTLLEILQTGRAPQVVHGEATIRTTKWELQRPAGSRAKVESVEFNVWDIGGPASMATVNQCFFTDKALYVVVWNLALGEEAVANLQFWLLNIEAKAPNAVVLVVGTHLDLIEAKFRVERIATLRAYVLALCRSPSGSRATGFPDITFKHLHEISCKSLEGQEGLRQLIFHVTCSMKDVGSTIGCQRLAGRLIPRSYLSLQEAVLAEQQRRSRDDDVQYLTDRQLEQLVEQTPDNDIKDYEDLQSAISFLIETGTLLHFPDTSHGLRNLYFLDPIWLSECLQRIFNIKGSRSVAKNGVIRAEDLRMLLVGTGFTQQTEEQYFQFLAKFEIALPVANDSYLLPHLLPSKPGLDTHGMRHPTANTIQRVFKMSFVPVGFWQRFIARMLISLAEMDLQLFENKKNTKSRNRKVTIYSFTGNQRNRCSTFRVKRNQTIYWQEGLLVTFDGGYLSVESSDVNWKKKKSGGMKIVCQSEVRDFSAMAFITDHVNSLIDQWFPALTATESDGTPLMEQYVPCPVCETAWAQHTDPSEKSEDVQYFDMEDCVLTAIERDFISCPRHPDLPVPLQELVPELFMTDFPARLFLENSKLEHSEDEGSVLGQGGSGTVIYRARYQGQPVAVKRFHIKKFKNFANVPADTMLRHLRATDAMKNFSEFRQEASMLHALQHPCIVALIGISIHPLCFALELAPLSSLNTVLSENARDSSFIPLGHMLTQKIAYQIASGLAYLHKKNIIFCDLKSDNILVWSLDVKEHINIKLSDYGISRQSFHEGALGVEGTPGYQAPEIRPRIVYDEKVDMFSYGMVLYELLSGQRPALGHHQLQIAKKLSKGIRPVLGQPEEVQFRRLQALMMECWDTKPEKRPLALSVVSQMKDPTFATFMYELCCGKQTAFFSSQGQEYTVVFWDGKEESRNYTVVNTEKGLMEVQRMCCPGMKVSCQLQVQRSLWTATEDQKIYIYTLKGMCPLNTPQQALDTPAVVTCFLAVPVIKKNSYLVLAGLADGLVAVFPVVRGTPKDSCSYLCSHTANRSKFSIADEDARQNPYPVKAMEVVNSGSEVWYSNGPGLLVIDCASLEICRRLEPYMAPSMVTSVVCSSEGRGEEVVWCLDDKANSLVMYHSTTYQLCARYFCGVPSPLRDMFPVRPLDTEPPAASHTANPKVPEGDSIADVSIMYSEELGTQILIHQESLTDYCSMSSYSSSPPRQAARSPSSLPSSPASSSSVPFSTDCEDSDMLHTPGAASDRSEHDLTPMDGETFSQHLQAVKILAVRDLIWVPRRGGDVIVIGLEKDSGAQRGRVIAVLKARELTPHGVLVDAAVVAKDTVVCTFENENTEWCLAVWRGWGAREFDIFYQSYEELGRLEACTRKRR

SEQ ID NO: 315158 - protein, 2015 aa, Artificial Sequence
  derived and/or modified sequence
MAGMSQRPPSMYWCVGPEESAVCPERAMETLNGAGDTGGKPSTRGGDPAARSRRTEGIRAAYRRGDRGGARDLLEEACDQCASQLEKGQLLSIPAAYGDLEMVRYLLSKRLVELPTEPTDDNPAVVAAYFGHTAVVQELLESLPGPCSPQRLLNWMLALACQRGHLGVVKLLVLTHGADPESYAVRKNEFPVIVRLPLYAAIKSGNEDIAIFLLRHGAYFCSYILLDSPDPSKHLLRKYFIEASPLPSSYPGKTALRVKWSHLRLPWVDLDWLIDISCQITELDLSANCLATLPSVIPWGLINLRKLNLSDNHLGELPGVQSSDEIICSRLLEIDISSNKLSHLPPGFLHLSKLQKLTASKNCLEKLFEEENATNWIGLRKLQELDISDNKLTELPALFLHSFKSLNSLNVSRNNLKVFPDPWACPLKCCKASRNALECLPDKMAVFWKNHLKDVDFSENALKEVPLGLFQLDALMFLRLQGNQLAALPPQEKWTCRQLKTLDLSRNQLGKNEDGLKTKRIAFFTTRGRQRSGTEAASVLEFPAFLSESLEVLCLNDNHLDTVPPSVCLLKSLSELYLGNNPGLRELPPELGQLGNLWQLDTEDLTISNVPAEIQKEGPKAMLSYLRAQLRKAEKCKLMKMIIVGPPRQGKSTLLEILQTGRAPQVVHGEATIRTTKWELQRPAGSRAKVESVEFNVWDIGGPASMATVNQCFFTDKALYVVVWNLALGEEAVANLQFWLLNIEAKAPNAVVLVVGTHLDLIEAKFRVERIATLRAYVLALCRSPSGSRATGFPDITFKHLHEISCKSLEGQEGLRQLIFHVTCSMKDVGSTIGCQRLAGRLIPRSYLSLQEAVLAEQQRRSRDDDVQYLTDRQLEQLVEQTPDNDIKDYEDLQSAISFLIETGTLLHFPDTSHGLRNLYFLDPIWLSECLQRIFNIKGSRSVAKNGVIRAEDLRMLLVGTGFTQQTEEQYFQFLAKFEIALPVANDSYLLPHLLPSKPGLDTHGMRHPTANTIQRVFKMSFVPVGFWQRFIARMLISLAEMDLQLFENKKNTKSRNRKVTIYSFTGNQRNRCSTFRVKRNQTIYWQEGLLVTFDGGYLSVESSDVNWKKKKSGGMKIVCQSEVRDFSAMAFITDHVNSLIDQWFPALTATESDGTPLMEQYVPCPVCETAWAQHTDPSEKSEDVQYFDMEDCVLTAIERDFISCPRHPDLPVPLQELVPELFMTDFPARLFLENSKLEHSEDEGSVLGQGGSGTVIYRARYQGQPVAVKRFHIKKFKNFANVPADTMLRHLRATDAMKNFSEFRQEASMLHALQHPCIVALIGISIHPLCFALELAPLSSLNTVLSENARDSSFIPLGHMLTQKIAYQIASGLAYLHKKNIIFCDLKSDNILVWSLDVKEHINIKLSDYGISRQSFHEGALGVEGTPGYQAPEIRPRIVYDEKVDMFSYGMVLYELLSGQRPALGHHQLQIAKKLSKGIRPVLGQPEEVQFRRLQALMMECWDTKPEKRPLALSVVSQMKDPTFATFMYELCCGKQTAFFSSQGQEYTVVFWDGKEESRNYTVVNTEKGLMEVQRMCCPGMKVSCQLQVQRSLWTATEDQKIYIYTLKGMCPLNTPQQALDTPAVVTCFLAVPVIKKNSYLVLAGLADGLVAVFPVVRGTPKDSCSYLCSHTANRSKFSIADEDARQNPYPVKAMEVVNSGSEVWYSNGPGLLVIDCASLEICRRLEPYMAPSMVTSVVCSSEGRGEEVVWCLDDKANSLVMYHSTTYQLCARYFCGVPSPLRDMFPVRPLDTEPPAASHTANPKVPEGDSIADVSIMYSEELGTQILIHQESLTDYCSMSSYSSSPPRQAARSPSSLPSSPASSSSVPFSTDCEDSDMLHTPGAASDRSEHDLTPMDGETFSQHLQAVKILAVRDLIWVPRRGGDVIVIGLEKDSGAQRGRVIAVLKARELTPHGVLVDAAVVAKDTVVCTFENENTEWCLAVWRGWGAREFDIFYQSYEELGRLEACTRKRR

SEQ ID NO: 315159 - DNA, 6039 bp, Artificial Sequence
  derived and/or modified sequence
atggagactctcaacggagcgggtgacaccggagggaagccaagcacaaggggcggcgatccagcagccagatcccggagaaccgagggtatcagagccgcatatagacgtggagatagaggcggagcccgggacctcctagaagaagcctgtgaccaatgtgcatctcagctggaaaagggacagcttctttccatcccagccgcttatggggatctggagatggtgcgctacttactgtctaaacgcctggtcgagctgcccactgagcccacagacgacaaccctgctgtggtggctgcctatttcggccacaccgccgtggtccaggaacttctggagcccctgactcctaaacaaactgagtgggaacagacggctcccttttccggaacctttcccctcagttgccatctgctgcctggaccatgttcccctcagaggttactgaattggatgctggcccttgcttgtcagcgcggacatctcggagtggtgaagctgctcgtgttgactcacggcgctgatcccgagagctatgccgtgagaaaaaatgagttccctgtgatcgtgagactccccctgtacgctgctatcaaatcaggaaatgaggacattgccattttcctactgcggcatggcgcatatttctgctcttacattctgcttgactctcctgacccaagcaagcatcttctgcgcaagtactttatcgaagcaagtcctctcccgagttcatatccaggcaaaaccgccctgagggtgaagtggtcgcacttgaggttaccctgggtggacctcgactggctcatagacattagctgccaaataaccgaattggacctgagtgctaattgtctggctaccctcccgagcgtgataccgtggggcctgatcaacctgcgcaagctcaatctctctgacaatcatctgggtgagttgccaggagtccaaagctctgacgagattatttgctcaagactgctggagattgacatcagtagcaataaactgtcccacttacctccgggtttcttgcacctctcaaagctgcagaaattgaccgctagcaagaactgtctcgagaagctgttcgaggaggaaaacgcaacaaactggatcggtctcagaaaactgcaagagctggatattagcgacaacaaactaactgagcttcctgcgctgtttttgcatagcttcaagtctttaaactccctgaatgtgtcgagaaacaatttgaaagtgttcccagatccatgggcatgtcctttaaagtgttgtaaggcttctcgaaacgctctcgaatgcctgcctgacaagatggccgttttttggaaaaatcacctgaaagatgtcgatttttctgaaaacgcgctgaaagaggtacctctgggacttttccaactggacgccctgatgtttctgagattacaaggaaaccagctggctgcattgcccccccaagaaaaatggacatgccgccagctgaagactctggacctgtccaggaatcagctgggcaagaacgaggatgggttgaagactaaacggattgcattcttcacaactagaggtcgccagagatccgggaccgaagcggctagtgtgctagagttccctgctttcctgtctgagagcctcgaagtactgtgtctgaatgataatcacctcgacactgtgccgccctctgtttgcctgcttaaaagcctatcggagctgtatctagggaataatcccggccttagagaacttcctcctgagctgggtcaattgggtaacctctggcagctagacacagaagacttaactataagcaatgttcccgccgaaattcagaaagagggtcccaaagctatgctgtcttacctgagagcgcaactgagaaaggccgaaaagtgtaaactcatgaagatgataattgtgggaccccctcgccagggcaagagcaccttattggagattctgcagactgggcgtgcacctcaggtggttcacggtgaagctaccattagaaccaccaaatgggagctgcagcgaccagccggaagcagagccaaagtagagagcgttgagtttaatgtgtgggacattggtggccccgctagcatggccacggttaatcagtgtttcttcaccgataaggcactgtacgttgtggtttggaacctggctttaggagaggaggccgttgcgaatttacagttctggctgttgaacattgaggccaaagcgcccaatgctgtggtactcgtcgttggcacccatctggacttgattgaagccaaattccgggtcgaaaggatcgccacgctgcgggcctatgtgctcgccctctgtcgctcccccagcggctctagagcaacagggttccccgatattaccttcaaacacctgcacgagattagctgtaaaagtctggaaggtcaggaaggactgcgccagcttatctttcatgtcacatgcagtatgaaagatgtgggctctactatcggctgccagcgtttagccggccgcttgatccctcgctcgtatctgtccctacaggaagctgtcctggctgagcagcagaggcggagcagggacgatgatgtacagtacttgaccgacaggcagcttgagcaactggtggaacaaacacccgacaatgacatcaaggactacgaggacctccaatccgctatcagcttcctgatcgaaacaggaactttgttacactttcctgataccagccacggactgaggaatctgtattttctggatcccatttggctgagcgagtgtttacaacgaatttttaatatcaaaggctcaagatccgtggccaagaatggggtgatccgggccgaagacttgcggatgctgctggtcgggactggtttcacacagcagaccgaggagcaatactttcaatttcttgctaaattcgagattgccctgcccgtcgctaacgactcctatctgctgccccacctcctgccctcaaagccagggctagatactcacggcatgagacatcccacggcaaatacgatccaacgagtctttaagatgagcttcgtgcctgtcggattttggcaaaggttcattgcacgcatgctgatttcgctcgcagagatggacttacagctgtttgaaaacaaaaagaacaccaagtcgaggaatcgaaaggtgaccatatacagctttactgggaaccagcggaatagatgttccacctttagggtgaaaaggaaccagaccatctattggcaggaggggttgttggtcacattcgacggaggctatttatctgtggaatcttccgatgttaactggaagaaaaagaaatccggagggatgaagattgtttgtcagtccgaggtgcgcgatttttccgcaatggctttcatcacggaccatgttaacagcctgattgaccagtggtttccagccctgactgcgacagaatctgacggtacaccactaatggaacaatatgttccgtgtcctgtatgcgaaacagcgtgggcacaacacacagatccatctgagaaatctgaagatgtccagtatttcgatatggaagactgtgtacttacagctatagagagggatttcatatcgtgccctaggcaccccgacttgcccgtgcctctgcaagaactggtgccagaattattcatgacggattttccggcgaggctattcctcgagaacagcaagcttgagcatagtgaggatgaaggctcagttctgggccaaggcggctccggcaccgtgatatacagagctcgctatcagggccagcccgtggccgtgaaacggttccatataaagaagtttaagaatttcgctaatgtaccagctgataccatgttgcgacatctcagagctaccgatgctatgaagaattttagcgagttccggcaggaagccagcatgctgcatgcactgcagcacccttgcatcgtcgcactcatcggaattagtatccatcctctgtgctttgccttagaattggctcctctgtcatccctcaatacagttctctctgaaaacgccagggacagttcctttatccccctggggcacatgctaactcaaaagatcgcctaccagattgcctcagggctggcttacctccataagaagaatatcatcttttgcgaccttaagagtgacaacattctagtgtggtccctcgatgttaaggaacacatcaacataaaactgtccgactatggcatatctcgacagtccttccacgagggggctctgggcgtggaggggacaccaggctaccaggctcccgagatcaggcctaggatagtgtatgatgagaaagtggacatgttttcctacggcatggtgctctacgagctactgtccgggcaacgtcccgccttagggcatcatcagttgcagatcgccaaaaaactgtcaaaaggaatccgccctgtactcggtcagccagaggaggtccagtttaggcggctgcaggccctgatgatggagtgttgggacactaaaccagaaaaaagacccctcgcattaagcgtcgtatctcagatgaaggatccaacttttgccacctttatgtacgaactgtgttgtggaaaacagaccgcattcttctctagccagggtcaggaatacactgtggtcttctgggatggaaaggaagaaagccgaaactatactgtagtgaacacagagaagggcctgatggaagtgcaaagaatgtgttgtccaggaatgaaggtgagttgtcagctgcaagtgcagagatctctgtggactgccaccgaagaccagaaaatctatatttacactttgaagggaatgtgcccactgaatacaccccagcaggccttagataccccggctgtggtgacctgtttcctggcagtgccagtcatcaagaagaactcgtacttggtgcttgccggcttggccgacggtctggtcgcagtgtttccagttgttcgtggcactcccaaagattcttgttcatacctgtgcagtcacactgctaatcgaagtaaattcagcatagcagatgaggacgcaagacaaaatccatatcccgtgaaggcgatggaggtggttaattccggctcggaagtctggtacagcaatggccctggtttgctagtgattgattgcgcttccctggagatatgtagacgactggaaccctacatggccccatctatggtgacaagtgtggtatgcagctcggagggccggggggaagaagtggtgtggtgtctggatgacaaagccaattctcttgtgatgtatcatagcactacgtatcagttgtgtgcacggtacttctgcggagtacccagtcccttacgagatatgttcccagtccgccccctggacaccgagcccccggcagcctcccacaccgccaatcccaaagtacccgagggcgacagtatcgctgacgtctccatcatgtacagcgaggagctgggaactcagattctgatccatcaagagtctttaaccgactactgctctatgagctcctattcatccagccctccgagacaagcagctcggtccccatcctctctcccttccagtcccgctagtagcagttccgtcccgttcagcacagactgcgaggactccgacatgctacacacgcccggggccgcctccgataggtccgagcatgatctgactccaatggatggggaaaccttcagtcagcacctgcaagctgttaagattttggccgttcgtgacctgatttgggtccctcgcaggggcggcgacgtaattgttatcggacttgagaaggactccggtgcccagagaggacgcgtgattgctgtgctcaaagctagggaacttacccctcacggcgtgcttgtcgatgccgccgtcgtcgcaaaggatacagtagtgtgcactttcgaaaatgaaaacactgaatggtgtttggctgtctggcgtgggtggggggccagagagtttgacattttttatcaatcctatgaagagctcggtcggctcgaggcttgcactcggaaacgccggtag

SEQ ID NO: 315160 - DNA, 6048 bp, Artificial Sequence
  derived and/or modified sequence
atggccggtatgtcccagcgacctccgagcatgtattggtgtgtcggtcccgaagaatctgccgtatgccctgaacgtgccatggagacactgaatggggctggcgacacgggagggaaaccctctacaaggggtggggatcctgccgcacgcagtcggcgcaccgagggaatccgagccgcttataggagaggcgatcgaggaggagctagggacctgctggaggaggcatgcgatcagtgcgcatcacagctggagaagggacaactactaagcattccagccgcttacggggatctggagatggttaggtacctgctgtccaaacgactcgttgaactacccacagaacccaccgacgacaatccggctgttgtggcagcttatttcggccacaccgcagtggtgcaagaactgcttgaatctcttcccggaccatgctcccctcaaaggcttctcaactggatgctggccctggcttgccagaggggccacctcggggtggtcaagctgttagtgctgactcatggcgccgaccctgagtcttacgctgtgaggaaaaacgaattccccgtaattgtccggctgcctctgtacgctgcgattaaaagcggaaacgaagacatcgctatttttctcctgcgccatggagcctacttctgtagctatatcctcctggactcccccgatccctctaaacaccttttaaggaaatacttcattgaggcaagtccattaccttcttcctatcctggaaagaccgcactgagagttaagtggtctcaccttcgtttgccttgggtagacctcgactggcttatcgatatctcgtgtcaaatcacagagttggacctgtccgcaaattgcttggccactctcccatcagtgatcccatggggtctgataaacctgcgaaagttaaatttgtcagataatcacctgggagagcttcctggagtgcaatcttctgatgagattatttgttccagactactggagatagatatatcaagcaacaagctttcccatcttccacctgggtttttgcacctatccaagttgcagaagctgacagcgagcaaaaattgcctagaaaagctgtttgaagaagagaatgccaccaactggataggactccgcaaactccaggagctcgatatttctgacaataaactcactgagttgcccgctctctttctgcacagctttaaaagcttaaattcactgaatgtttcacgcaacaatctgaaggtctttccggatccgtgggcctgccctttaaaatgctgtaaagctagtcgcaacgcattggaatgtttgcctgataagatggcggtgttctggaaaaatcatctgaaagacgttgacttctctgaaaacgcactgaaggaggtgcctttgggactgttccagttagacgccctcatgtttctcaggttgcaaggaaatcagctcgccgctctgccaccacaagaaaagtggacttgcagacagctgaaaacgctggacctgtcaagaaatcagcttgggaaaaatgaagatggacttaaaactaagcgaatagctttttttactactcgggggagacaacgctctggtaccgaagcagcatccgtgcttgagtttccagcattcctgagcgaatctcttgaggtcctctgtcttaatgataatcacctggacacggtgccgcccagtgtctgcctgttaaaatcactctccgaattgtacctgggcaataacccagggctcagggagcttcctcctgagctcggacagctcgggaatctgtggcaactcgataccgaggacctgacaatttccaatgtacctgctgaaattcagaaagagggtccaaaggccatgctgagctatctaagagcccagctgcggaaagctgaaaagtgcaagctaatgaagatgattatcgttggcccccctagacagggaaaatctacacttctggagatactgcagaccggacgtgcgccccaggtcgtccacggcgaggcgacaattcgcacgactaagtgggagctccagagacctgctggcagtagagcgaaagtggaatctgtggagttcaacgtttgggacattggaggtcccgccagcatggccaccgtcaaccagtgctttttcactgataaggccctctacgttgtggtctggaatttggccctgggtgaagaagctgttgcaaatttgcagttctggcttctcaacatcgaggccaaagcccccaacgcggtagttttggtggtggggacacatttggatttgattgaggctaaatttcgagtggagaggattgctaccctgagagcctatgtcctggctttgtgtagaagcccaagtgggagcagggccacgggtttccccgatattacttttaaacacctgcatgaaattagttgcaaatccctggaggggcaggaaggcctccgacagttgattttccatgtgacctgcagcatgaaagatgtgggttcaacaattggctgtcaacggctggcagggcggctaatcccacgctcttacctgtcactgcaggaggccgtgttggccgagcagcagagaaggtcacgcgatgatgatgtgcaatacctgaccgatcgccagttagaacagctggtcgaacagacaccagataatgacattaaggactacgaggacttgcaatccgcaatttctttcctgattgagacaggcacactgctccattttcccgatacaagccatggtctacggaatctttactttctggaccccatctggctttcagaatgcttgcagaggatattcaacattaaaggatccaggagcgtggccaagaacggggtcattcgagccgaggatctccgaatgttgcttgtggggaccggcttcacacaacagactgaggaacagtacttccagtttctggcaaagtttgaaatcgccttgcctgtcgccaacgatagttatctactgcctcacctcctgccatccaaaccgggtcttgacactcacggcatgcgccaccccacagcaaacaccatccaacgagtctttaagatgtctttcgttccagtaggcttttggcagaggttcatcgcaagaatgctgatttccttggctgagatggatctgcagctgtttgagaacaaaaagaacaccaagagccgaaatcgcaaagttacaatctacagtttcacaggcaaccagaggaacagatgctccacattccgggttaagcgaaaccagaccatatattggcaggagggactgctggtcacttttgacggcggatatctatccgtcgaaagttctgacgtcaattggaagaagaagaagagcggcgggatgaagattgtgtgtcaatccgaagttagagattttagcgccatggctttcattacagatcacgtgaatagcctcatcgatcagtggttccccgcactcacagccacagagtctgacggcactcctttgatggagcagtacgtaccctgcccagtttgtgagaccgcctgggcccaacacaccgatccctctgagaagtccgaggatgtacagtattttgatatggaagattgcgtgttgaccgctatcgagcgcgattttatctcttgtccgaggcatccagatctgccggtccccctccaggagctagtgcctgaactgtttatgaccgactttcctgcccggttgtttctggagaatagcaaattggaacattccgaggatgaggggagcgtcctcggacagggcgggagcggcaccgtgatataccgggcccgctaccagggacagcctgttgcggtgaaaaggttccacatcaagaaattcaagaattttgctaatgtgcccgcagacaccatgctgcgtcatcttagggccacagatgctatgaagaatttctcagaatttcgccaggaggccagcatgctgcacgccctgcaacacccttgcatagttgcgctgatcggcatcagtatccacccactttgctttgcgctagagctggcacctttatcatctctcaataccgtgcttagcgaaaacgccagggacagcagtttcataccgctgggccacatgctgactcaaaagatcgcctatcagattgcttcaggcctggcctacctccacaagaaaaacataatattttgtgatcttaaatcggacaatatcctagtatggagcctcgacgtcaaggagcacatcaatatcaaactgtcagattacggaatcagccgccagagctttcatgagggcgcactgggtgttgagggaacaccaggatatcaggccccagaaattcggccaagaatcgtctatgacgagaaggtcgacatgttttcatatgggatggtactgtacgagttgctttccggacagcgcccagccttggggcatcatcaactacaaatagccaagaaactgagcaagggaatcagaccggtgttagggcaacctgaggaagttcagttccggcgcttacaggccctcatgatggagtgttgggataccaaaccagagaaacggccactggcactttccgttgttagccagatgaaagacccaacctttgctacattcatgtacgagctctgttgcgggaaacagaccgcttttttttctagccagggccaggagtacacagtggtgttctgggacgggaaggaggagtcccgcaactatactgtggttaataccgaaaagggtcttatggaagtccagaggatgtgttgtcccgggatgaaggtgagttgtcagttgcaggtccaaagatcgctctggacggccactgaagatcagaagatttatatctacacgttgaaggggatgtgcccattgaacacaccgcagcaggcgctggataccccagccgtcgtgacgtgctttcttgccgttccggtgattaaaaaaaacagttacctcgttttggccgggctggccgatggcttagtggccgtttttccagtcgtcagaggaactccaaaagactcctgctcgtacctatgctcacatacggctaataggagcaaatttagcatcgccgatgaagacgcaaggcagaatccttaccccgtgaaagctatggaggtggtcaacagcggtagcgaagtttggtatagcaatgggcccgggttgctggtcattgattgtgcatccctggagatctgcagacgtctggaaccatatatggctcccagcatggtgacctccgtggtgtgctcttcagagggccgcggggaggaggtggtatggtgccttgatgacaaagctaactccttggtcatgtaccattctaccacctatcagctgtgcgccaggtacttttgcggcgtcccttcccccctgagagacatgtttcctgtgagaccactcgatacagaaccacccgctgccagccacacagccaaccccaaggtgccggaaggcgacagtattgccgacgtcagtatcatgtactctgaagaactggggacacagatcttgattcaccaggaatctttgacggactattgcagcatgtcgtcctactcatcttctcctccccgtcaggccgctaggtcaccgtcctccctcccatcctccccagcttcaagcagcagtgttccgtttagcaccgactgtgaggactccgacatgctacatacaccaggtgccgcttccgatcggtcggaacacgatttaacacctatggatggcgagaccttttcacaacacttgcaggcagtcaaaatactcgccgtaagggatttgatctgggtgcctcggcgtggaggcgacgtgattgtgattggtctcgagaaggactccggggcccagagggggagagtaatcgccgtgctcaaagccagagagttgaccccccatggagttctggtggatgctgcggtggtagccaaggacaccgtagtgtgcaccttcgaaaatgaaaataccgagtggtgtctggccgtgtggagaggttggggcgctcgggagttcgacatcttctaccagtcatatgaggagctcgggaggttagaggcctgtacccgtaaacgccggtag

SEQ ID NO: 315161 - DNA, 99 bp, Artificial Sequence
  derived and/or modified sequence
atggcaggtatgtctcagaggcctccttcaatgtattggtgcgtgggaccagaggagtccgcagtatgtccagagcgagctatggaaactctaaactag

SEQ ID NO: 315162 - DNA, 6039 bp, Artificial Sequence
  derived and/or modified sequence
atggagaccctgaatggagctggggacaccggcggcaagcccagcacccggggcggggaccctgctgcccggagcagaagaacagagggcatccgggccgcctaccgccgcggggacagaggaggagcccgggacctgctggaggaggcctgtgaccagtgtgccagccagctggagaagggccagctgctgagcatcccagctgcctacggggacctggagatggtgcgctacctgctgagcaagaggctggtggagctgcccacagagcccacagatgacaacccagctgtggtggccgcctacttcggccacacagctgtggtgcaggagctgctggagcccctgacccccaagcagacagagtgggagcagacagcccccttcagcggcaccttccccctgagctgccacctgctgcccggcccctgcagcccccagaggctgctgaactggatgctggccctggcctgccagaggggccacctgggcgtggtgaagctgctggtgctgacccatggagctgaccctgagagctatgctgtgaggaagaatgagttccctgtgattgtgcggctgcccctgtatgctgccatcaagtctggaaatgaagacatcgccatcttcctgctgcggcatggagcctacttctgcagctacatcctgctggacagcccagaccccagcaagcacctgctgaggaagtacttcatcgaggccagccccctgcccagcagctacccaggcaagacagccctgcgggtgaagtggagccacctgcggctgccctgggtggacctggactggctgattgacatcagctgccagatcacagagctggacctgagcgccaactgcctggccaccctgcccagcgtcatcccctggggcctcatcaacctgaggaagctgaacctgagtgacaaccacctgggggagctgcccggggtgcagagcagtgatgagatcatctgcagccggctgctggagattgacatcagcagcaacaagctgagccacctgcccccaggcttcctgcacctgagcaagctgcagaagctgacagccagcaagaactgcctggagaagctgtttgaggaggagaatgccaccaactggattggcctgaggaagctgcaggagctggacatcagtgacaacaagctgacagagctgcctgccctcttcctgcacagcttcaagagcctgaacagcctgaatgtgtccaggaacaacctgaaggtgtttcctgacccctgggcctgccccctgaagtgctgcaaggccagcagaaatgccctggagtgcctgcctgacaagatggctgtgttctggaagaaccacctgaaggatgtggacttctctgaaaatgccctgaaggaggtgcccctgggcctcttccagctggatgccctgatgttcctgcggctgcagggcaaccagctggccgccctgcccccccaggagaagtggacctgccggcagctgaagaccctggacctgagcaggaaccagctgggcaagaatgaagatggcctgaagaccaagagaattgccttcttcaccacccggggccggcagaggtctggaacagaagctgcctctgtgctggagttccctgccttcctgtctgagagcctggaggtgctgtgcctgaatgacaaccacctggacacagtgcccccatctgtgtgcctgctgaagagcctgtctgagctgtacctgggcaacaaccctggcctgcgggagctgcccccagagctgggccagctgggcaacctgtggcagctggacacagaggacctgaccatcagcaatgtgcctgctgagatccagaaggagggccccaaggccatgctgagctacctgcgggcccagctgaggaaggccgagaagtgcaagctgatgaagatgatcatcgtgggccccccccggcagggcaagagcaccctgctggagatcctgcagacaggccgggccccccaggtggtgcatggagaggccaccatccgcaccaccaagtgggagctgcagaggcctgctggcagccgggccaaggtggagagcgtggagttcaacgtgtgggacattggaggccctgcctccatggccaccgtgaaccagtgcttcttcacagacaaggccctgtatgtggtggtgtggaacctggccctgggggaggaggccgtggccaacctgcagttctggctgctgaacatcgaggccaaggccccaaatgctgtggtgctggtggtgggcacccacctggacctgattgaggccaagttccgggtggagcgcatcgccaccctgcgggcctacgtgctggccctgtgccgcagccccagcggcagccgggccaccggcttcccagacatcaccttcaagcacctgcacgagatcagctgcaagagcctggagggccaggagggcctgcggcagctgatcttccacgtgacctgcagcatgaaggatgtgggcagcaccatcggctgccagaggctggccggccgcctcatccccaggagctacctgagcctgcaggaggccgtgctggccgagcagcagaggaggagcagagatgatgatgtgcagtacctgacagaccggcagctggagcagctggtggagcagaccccagacaatgacatcaaggactatgaggacctgcagagcgccatctccttcctgattgagaccggcaccctgctgcacttcccagacaccagccacggcctgaggaacctgtacttcctggaccccatctggctgtctgagtgcctgcagaggatcttcaacatcaagggcagccgctctgtggccaagaatggagtcatccgggcagaggacctgaggatgctgctggtgggcaccggcttcacccagcagacagaggagcagtacttccagttcctggccaagtttgaaattgccctgcctgtggccaatgacagctacctgctgccccacctgctgcccagcaagccaggcctggacacccacggcatgaggcaccccacagccaacaccatccagagggtcttcaagatgagctttgtgcctgtgggcttctggcagcgcttcatcgccaggatgctgatcagcctggccgagatggacctgcagctgtttgagaacaagaagaacaccaagagcaggaacaggaaggtgaccatctacagcttcaccggcaaccagaggaaccgctgcagcaccttccgggtgaagaggaaccagaccatctactggcaggagggcctgctggtgacctttgatggcggctacctgtctgtggagagcagtgatgtgaactggaagaagaagaagagcggcggcatgaagatcgtgtgccagagcgaggtgcgggacttcagcgccatggccttcatcacagaccacgtgaacagcctgattgaccagtggttccctgccctgacagccacagaaagtgatggcacccccctgatggagcagtatgtgccctgccctgtgtgtgaaacagcctgggcccagcacacagaccccagcgagaagtcagaagatgtgcagtactttgacatggaggactgtgtgctgacagccatcgagcgggacttcatcagctgccccaggcacccagacctgcctgtgcccctgcaggagctggtgcctgagctgttcatgacagacttccctgcccggctcttcctggagaacagcaagctggagcacagtgaagatgagggctctgtgctgggccagggcggcagcggcaccgtcatctaccgggcccgctaccagggccagcctgtggccgtgaagcgcttccacatcaagaagttcaagaactttgccaacgtgcctgctgacaccatgctgcggcacctgcgggccacagatgccatgaagaacttcagcgagttccggcaggaggcctccatgctgcacgccctgcagcacccctgcatcgtggccctgattggcatcagcatccaccccctgtgctttgccctggagctggcccccctgagcagcctgaacacagtgctgtctgaaaatgcccgggacagcagcttcatccccctgggccacatgctgacccagaagatcgcctaccagatcgccagcggcctggcctacctgcacaagaagaacatcatcttctgtgacctgaagagtgacaacatcctggtgtggagcctggatgtgaaggagcacatcaacatcaagctgagtgactatggcatcagccggcagagcttccatgaaggagccctgggcgtggagggcaccccaggctaccaggcccctgagatccggccccgcatcgtgtatgatgagaaggtggacatgttctcctatggcatggtgctgtatgagctgctgagcggccagaggcctgccctgggccaccaccagctgcagatcgccaagaagctgagcaagggcatccggcctgtgctgggccagcctgaggaggtgcagttccggcggctgcaggccctgatgatggagtgctgggacaccaagccagagaagaggcccctggccctgtctgtggtgtcccagatgaaggaccccacctttgccaccttcatgtatgagctgtgctgcggcaagcagacagccttcttcagcagccagggccaggagtacacagtggtgttctgggatggcaaggaggagagcaggaactacacagtggtgaacacagagaagggcctgatggaggtgcagaggatgtgctgccccggcatgaaggtgtcctgccagctgcaggtgcagaggagcctgtggacagccacagaggaccagaagatctacatctacaccctgaagggcatgtgccccctgaacaccccccagcaggccctggacaccccagctgtggtgacctgcttcctggccgtgcctgtgatcaagaagaacagctacctggtgctggccggcctggctgatggcctggtggccgtgtttcctgtggtgcggggcacccccaaggacagctgcagctacctgtgcagccacacagccaacagaagcaagttcagcattgctgatgaagatgcccggcagaacccctaccctgtgaaggccatggaggtggtgaacagcggcagcgaggtgtggtacagcaatggacctggcctgctggtgattgactgtgccagcctggagatctgccggcggctggagccctacatggcccccagcatggtgacctctgtggtgtgcagcagcgagggccgcggggaggaggtggtgtggtgcctggatgacaaggccaacagcctggtgatgtaccacagcaccacctaccagctgtgtgcccgctacttctgtggggtgcccagccccctgcgggacatgtttcctgtgcggcccctggacacagagcccccagctgccagccacacagccaaccccaaggtgcctgagggggacagcattgctgatgtgtccatcatgtacagcgaggagctgggcacccagatcctgatccaccaggagagcctgacagactactgcagcatgagcagctacagcagcagccccccccggcaggccgcccggagccccagcagcctgcccagcagccctgccagcagcagctctgtgcccttcagcacagactgtgaagattctgacatgctgcacaccccaggagctgccagtgacagaagtgaacatgacctgacccccatggatggagagaccttcagccagcacctgcaggccgtgaagatcctggccgtgcgggacctgatctgggtgcccaggagaggaggagatgtgattgtcatcggcctggagaaggacagcggggcccagaggggccgggtgattgctgtgctgaaggcccgggagctgacccctcatggagtgctggtggatgctgctgtggtggccaaggacacagtggtgtgcacctttgaaaatgaaaatacagagtggtgcctggccgtgtggaggggctggggcgcccgggagtttgacatcttctaccagagctatgaggagctgggccgcctggaggcctgcaccaggaagagaagatag

SEQ ID NO: 315163 - DNA, 6048 bp, Artificial Sequence
  derived and/or modified sequence
atggccggcatgagccagaggcctcccagcatgtactggtgtgtgggccctgaggagagcgctgtgtgcccagagcgggccatggagaccctgaatggagctggggacacaggaggcaagcccagcacccggggcggggaccctgctgcccggagcagaagaacagagggcatccgggccgcctacagaagaggagaccggggcggggcccgggacctgctggaggaggcctgtgaccagtgtgccagccagctggagaagggccagctgctgagcatcccagctgcctatggagacctggagatggtgcgctacctgctgagcaagaggctggtggagctgcccacagagcccacagatgacaacccagctgtggtggccgcctacttcggccacacagctgtggtgcaggagctgctggagagcctgcccggcccctgcagcccccagaggctgctgaactggatgctggccctggcctgccagaggggccacctgggcgtggtgaagctgctggtgctgacccacggggctgaccctgagagctatgctgtgaggaagaatgagttccctgtgattgtgcggctgcccctgtatgctgccatcaagtctggaaatgaagatattgccatcttcctgctgcggcacggggcctacttctgcagctacatcctgctggacagcccagaccccagcaagcacctgctgaggaagtacttcatcgaggccagccccctgcccagcagctacccaggcaagacagccctgcgggtgaagtggagccacctgcggctgccctgggtggacctggactggctgattgacatcagctgccagatcacagagctggacctgagcgccaactgcctggccaccctgcccagcgtcatcccctggggcctcatcaacctgaggaagctgaacctgagtgacaaccacctgggggagctgcccggggtgcagagcagtgatgagatcatctgcagccggctgctggagattgacatcagcagcaacaagctgagccacctgcccccaggcttcctgcacctgagcaagctgcagaagctgacagccagcaagaactgcctggagaagctgtttgaggaggagaatgccaccaactggattggcctgaggaagctgcaggagctggacatcagtgacaacaagctgacagagctgcctgccctcttcctgcacagcttcaagagcctgaacagcctgaatgtgtccaggaacaacctgaaggtgtttcctgacccctgggcctgccccctgaagtgctgcaaggccagcagaaatgccctggagtgcctgcctgacaagatggctgtgttctggaagaaccacctgaaggatgtggacttctctgaaaatgccctgaaggaggtgcccctgggcctcttccagctggatgccctgatgttcctgcggctgcagggcaaccagctggccgccctgcccccccaggagaagtggacctgccggcagctgaagaccctggacctgagcaggaaccagctgggcaagaatgaagatggcctgaagaccaagagaattgccttcttcaccacccggggccggcagaggagcggcacagaggccgcctctgtgctggagttccctgccttcctgtctgagagcctggaggtgctgtgcctgaatgacaaccacctggacacagtgccccccagcgtgtgcctgctgaagagcctgtctgagctgtacctgggcaacaaccctggcctgcgggagctgcccccagagctgggccagctgggcaacctgtggcagctggacacagaggacctgaccatcagcaatgtgcctgctgagatccagaaggagggccccaaggccatgctgagctacctgcgggcccagctgaggaaggccgagaagtgcaagctgatgaagatgatcatcgtgggccccccccggcagggcaagagcaccctgctggagatcctgcagacaggccgggccccccaggtggtgcacggggaggccaccatccgcaccaccaagtgggagctgcagaggcctgctggcagccgggccaaggtggagagcgtggagttcaacgtgtgggacatcggcggccctgcctccatggccaccgtgaaccagtgcttcttcacagacaaggccctgtatgtggtggtgtggaacctggccctgggggaggaggccgtggccaacctgcagttctggctgctgaacatcgaggccaaggccccaaatgctgtggtgctggtggtgggcacccacctggacctgattgaggccaagttccgggtggagagaattgccaccctgcgggcctacgtgctggccctgtgccgcagccccagcggcagccgggccaccggcttcccagacatcaccttcaagcacctgcacgagatcagctgcaagagcctggagggccaggagggcctgcggcagctgatcttccacgtgacctgcagcatgaaggatgtgggcagcaccatcggctgccagaggctggccggccgcctcatccccaggagctacctgagcctgcaggaggccgtgctggccgagcagcagaggaggagcagagatgatgatgtgcagtacctgacagaccggcagctggagcagctggtggagcagaccccagacaatgacatcaaggactatgaggacctgcagagcgccatctccttcctgattgaaacaggcaccctgctgcacttcccagacaccagccacggcctgaggaacctgtacttcctggaccccatctggctgtctgaatgtctgcagaggatcttcaacatcaagggcagccgctctgtggccaagaatggagtcatccgggcagaggacctgaggatgctgctggtgggcaccggcttcacccagcagacagaggagcagtacttccagttcctggccaagtttgagatcgccctgcctgtggccaatgacagctacctgctgccccacctgctgcccagcaagccaggcctggacacccacggcatgaggcaccccacagccaacaccatccagagggtcttcaagatgagctttgtgcctgtgggcttctggcagcgcttcatcgccaggatgctgatcagcctggccgagatggacctgcagctgtttgagaacaagaagaacaccaagagcaggaacaggaaggtgaccatctacagcttcaccggcaaccagaggaaccgctgcagcaccttccgggtgaagaggaaccagaccatctactggcaggagggcctgctggtgacctttgatggcggctacctgtctgtggagagcagtgatgtgaactggaagaagaagaagagcggcggcatgaagatcgtgtgccagagcgaggtgcgggacttcagcgccatggccttcatcacagaccacgtgaacagcctgattgaccagtggttccctgccctgacagccacagaaagtgatggcacccccctgatggagcagtatgtgccctgccctgtgtgtgaaacagcctgggcccagcacacagaccccagcgagaagtcagaagatgtgcagtactttgacatggaggactgtgtgctgacagccatcgagcgggacttcatcagctgccccaggcacccagacctgcctgtgcccctgcaggagctggtgcctgagctgttcatgacagacttccctgcccggctcttcctggagaacagcaagctggagcacagtgaagatgagggctctgtgctgggccagggcggcagcggcaccgtcatctaccgggcccgctaccagggccagcctgtggccgtgaagcgcttccacatcaagaagttcaagaactttgccaacgtgcctgctgacaccatgctgcggcacctgcgggccacagatgccatgaagaacttcagcgagttccggcaggaggcctccatgctgcacgccctgcagcacccctgcatcgtggccctgattggcatcagcatccaccccctgtgctttgccctggagctggcccccctgagcagcctgaacacagtgctgtctgaaaatgcccgggacagcagcttcatccccctgggccacatgctgacccagaagatcgcctaccagatcgccagcggcctggcctacctgcacaagaagaacatcatcttctgtgacctgaagagtgacaacatcctggtgtggagcctggatgtgaaggagcacatcaacatcaagctgagtgactatggcatcagccggcagagcttccacgagggcgccctgggcgtggagggcaccccaggctaccaggcccctgagatccggcccagaattgtgtatgatgagaaggtggacatgttctcctatggcatggtgctgtatgagctgctgagcggccagaggcctgccctgggccaccaccagctgcagatcgccaagaagctgagcaagggcatccggcctgtgctgggccagcctgaggaggtgcagttccggcggctgcaggccctgatgatggagtgctgggacaccaagccagagaagaggcccctggccctgtctgtggtgtcccagatgaaggaccccacctttgccaccttcatgtatgagctgtgctgcggcaagcagacagccttcttcagcagccagggccaggagtacacagtggtgttctgggatggcaaggaggagagcaggaactacacagtggtgaacacagagaagggcctgatggaggtgcagaggatgtgctgccccggcatgaaggtgtcctgccagctgcaggtgcagaggagcctgtggacagccacagaggaccagaagatctacatctacaccctgaagggcatgtgccccctgaacaccccccagcaggccctggacaccccagctgtggtgacctgcttcctggccgtgcctgtgatcaagaagaacagctacctggtgctggccggcctggctgatggcctggtggccgtgtttcctgtggtgcggggcacccccaaggacagctgcagctacctgtgcagccacacagccaacagaagcaagttcagcattgctgatgaagatgcccggcagaacccctaccctgtgaaggccatggaggtggtgaacagcggcagcgaggtgtggtacagcaatggacctggcctgctggtgattgactgtgccagcctggagatctgccggcggctggagccctacatggcccccagcatggtgacctctgtggtgtgcagcagcgagggccgcggggaggaggtggtgtggtgcctggatgacaaggccaacagcctggtgatgtaccacagcaccacctaccagctgtgtgcccgctacttctgtggggtgcccagccccctgcgggacatgtttcctgtgcggcccctggacacagagcccccagctgccagccacacagccaaccccaaggtgcctgagggggacagcattgctgatgtgtccatcatgtacagcgaggagctgggcacccagatcctgatccaccaggagagcctgacagactactgcagcatgagcagctacagcagcagccccccccggcaggccgcccggagccccagcagcctgcccagcagccctgccagcagcagctctgtgcccttcagcacagactgtgaggacagcgacatgctgcacacccctggggccgccagtgacagaagtgaacatgacctgacccccatggatggagagaccttcagccagcacctgcaggccgtgaagatcctggccgtgcgggacctgatctgggtgcccaggagaggaggagatgtgattgtgattggcctggagaaggacagcggggcccagaggggccgggtgattgctgtgctgaaggcccgggagctgaccccccacggcgtgctggtggatgctgctgtggtggccaaggacacagtggtgtgcacctttgaaaatgaaaatacagagtggtgcctggccgtgtggaggggctggggcgcccgggagtttgacatcttctaccagagctatgaggagctgggccgcctggaggcctgcaccaggaagagaagatag

SEQ ID NO: 315164 - DNA, 99 bp, Artificial Sequence
  derived and/or modified sequence
atggccggcatgagccagaggcctcccagcatgtactggtgtgtgggccctgaggagagcgctgtgtgcccagagcgggccatggagaccctgaactag

SEQ ID NO: 315165 - DNA, 7701 bp, Artificial Sequence
  derived and/or modified sequence
gctggcggcggccttgctctgcgcgctcttcgcgccgccctccccgcccgcccgcctcaggattgaggaagtgcgtctgggcccggccccggcgcggggggcagacggcggtgggacggccaggccccggccccgccagtgtgtccgcccggccccgcgtcccggagcgcccgcacccggccccgccgccgcctcagagcaagaaagctttctgctcagccatggctacgagtccacgccttaatgcaccccacagccagcggcagtggcagtgacaacagcgggacctgcctttgaagatcggctgctgcaagggttgatggctggcatgtcgcaaagaccccccagcatgtactggtgtgtggggccggaggagtcagctgtgtgtccagaacgtgccatggagacgcttaacggtgccggggacacgggcggcaagccgtccacgcggggcggtgaccctgcagcgcggtcccgcaggacggaaggcatccgcgccgcgtacaggcggggagaccgcggcggcgcccgggacctgctggaggaggcctgcgaccagtgcgcgtcccagctggaaaagggccagcttctgagcatcccggcagcctatggggatctggagatggtccgctacctactcagcaagagactggtggagctgcccaccgagcccacggatgacaacccagccgtggtggcagcgtattttggacacacggcagttgtgcaggaattgcttgagccattgacacccaaacaaacagagtgggaacaaacagcacccttcagtggcactttccctttgtcctgccatctcctgccaggtccctgcagtccccagcggcttctgaactggatgctggccttggcttgccagcgagggcacctgggggttgtgaagctcctggtcctgacgcacggggctgacccggagagctacgctgtcaggaagaatgagttccctgtcatcgtgcgcttgcccctgtatgcggccatcaagtcagggaatgaagacattgcaatattcctgcttcggcatggggcctatttctgttcctacatcttgctggatagtcctgaccccagcaaacatctgctgagaaagtacttcattgaagccagtcccttgcccagcagttatccgggaaaaacagctctccgtgtgaaatggtcccatctcagactgccctgggtagacctagactggctcatagacatctcctgccagatcacggagctcgacctttctgccaactgcctggcgaccctcccctcggttatcccctggggcctcatcaatctccggaagctgaacctctccgacaaccacctgggggagctgcctggcgtgcagtcatcggacgaaatcatctgttccaggctacttgaaattgacatttccagcaacaagttgtcccacctccctcctggattcttgcacctctcaaaacttcaaaaactgacagcttcaaaaaattgtttagaaaaattgttcgaagaagaaaatgccactaactggataggtttacggaagctacaggaacttgatatatctgacaataaattgacagaactccctgccctgttccttcactctttcaagtccctcaattctctgaatgtctccagaaacaacctgaaggtgtttccagatccctgggcctgccctttgaaatgttgtaaagcttccagaaatgccctggaatgtctgccagacaaaatggctgtcttttggaaaaatcacctgaaggatgtggatttctcagaaaacgcactcaaagaagttcccctgggacttttccagcttgatgccctcatgttcttgaggttacaggggaaccagctggcggcacttccacctcaagagaagtggacctgcaggcagctcaaaaccctggatctctccagaaaccaacttggcaaaaatgaagatggactgaaaacgaagcgtattgcctttttcaccaccagaggtcgccagcgctccgggactgaggcagcaagtgtgctggaatttccggccttcctaagtgagtctttggaagtcctttgcctgaacgacaaccacctcgacacagtccctccctcggtttgcctactgaagagcttatcagagctctacttgggaaacaaccctggcctccgggagctccctcctgagctggggcagctgggcaacctctggcagctggacactgaagacctgaccatcagcaatgtgcctgcagaaatccaaaaagaaggccccaaagcaatgctgtcttacctgcgtgctcagctgcggaaagcggaaaagtgcaagctgatgaagatgatcatcgtgggtcccccgcgccagggcaagtccaccctcctggagatcttacagacggggagggccccccaggtggtgcatggagaggccaccatcaggaccaccaagtgggagctccagaggccggctggctcgagagccaaggttgagtccgtggagttcaacgtctgggacatcgggggaccggccagcatggccactgtcaaccagtgcttcttcacggacaaggccctgtacgtggtggtctggaacctggcgctgggggaggaggccgtggccaacctccagttctggctgctcaacatcgaggccaaggccccaaacgccgtggtgctggtggtcgggacgcacctggatttaattgaagccaagttccgtgtggaaaggattgcaacgctgcgtgcctatgtgctggcactctgccgctccccctccggctccagggccacaggcttcccagacatcaccttcaaacacttacatgagatttcctgcaagagcctggaaggtcaggaagggctgcgacagctgattttccacgtcacgtgcagcatgaaggacgtgggcagcaccatcggctgccagcgactggcagggcggctgatccccaggagctacctgagcctgcaggaggccgtgctggcagagcagcagcgccgcagccgggacgacgacgtgcagtacctgacggacaggcagctggagcagctggtggagcagacgcccgacaacgacatcaaggactacgaggacctgcagtcagccatcagcttcctcatagaaaccggcaccctgctccatttcccggacaccagccacggcctgaggaacctctacttcctcgaccctatttggctctccgaatgtctgcagaggatctttaatattaagggctctcggtcagtggccaagaatggggtgatcagagcagaagacctcaggatgctgctggtggggactggcttcacgcagcagacggaagagcagtacttccagttcctggccaagtttgagatcgccctgcccgtcgccaatgacagctacctcctgccccatctccttccatctaaacctggcctggacacccacggtatgcggcaccccacagccaacaccattcagagggtatttaagatgagcttcgttcccgttggcttctggcaaaggtttatagcacggatgctgatcagcctggcggagatggacctgcagctttttgaaaacaagaagaatactaaaagcaggaacaggaaagtcaccatttacagttttacaggaaaccagagaaatcgctgtagcacattcagagtgaaaagaaatcagaccatctattggcaggaagggctcctggtcacttttgatgggggctacctcagtgtggaatcttccgacgtgaactggaaaaagaagaaaagcggaggaatgaaaattgtttgccaatcagaagtgagggacttctcagccatggctttcatcacggaccacgtcaattccttgattgatcagtggtttcccgccctgacagccacagagagcgacgggacgccactcatggagcagtacgtgccctgcccggtctgcgagacagcctgggcccagcacacggaccccagtgagaaatcagaggatgtgcagtacttcgacatggaagactgtgtcctgacggccatcgagcgggacttcatctcctgccccagacacccggacctccccgtgccgctgcaggagctggtccctgaactgttcatgaccgacttcccggccaggctcttcctggagaacagcaagctggagcacagcgaggacgagggcagcgtcctgggccagggcggcagtggcaccgtcatctaccgggcccggtaccagggccagcctgtggccgtcaagcgcttccacatcaaaaaattcaagaactttgctaacgtaccggcagacaccatgctgaggcacctgcgggccaccgatgccatgaagaacttctccgagttccggcaggaggccagcatgctgcacgcgctgcagcacccctgcatcgtggcgctcatcggcatcagcatccacccgctctgcttcgccctggagctcgcgccgctcagcagcctcaacaccgtgctgtccgagaacgccagagattcttcctttatacccctgggacacatgctcacccaaaaaatagcctaccagatcgcctcgggcctggcctacctgcacaagaaaaacatcatcttctgtgacctgaagtcggacaacattctggtgtggtcccttgacgtcaaggagcacatcaacatcaagctatctgactacgggatttcgaggcagtcattccatgagggcgccctaggcgtggagggcactcctggctaccaggccccagagatcaggcctcgcattgtatatgatgagaaggtagatatgttctcctatggaatggtgctctacgagttgctgtcaggacagcgccctgcactgggccaccaccagctccagattgccaagaagctgtccaagggcatccgcccggttctggggcagccggaggaagtgcagttccggcgactgcaggcgctcatgatggagtgctgggacactaagccagagaagcgaccgctggccctgtcggtggtgagccagatgaaggacccgacttttgccaccttcatgtatgaactgtgctgtgggaagcagacagccttcttctcatcccagggccaggagtacaccgtggtgttttgggatggaaaagaggagtccaggaactacacggtggtgaacacagagaagggcctcatggaggtgcagaggatgtgctgccctgggatgaaggtgagctgccagctccaggtccagagatccctgtggacagccaccgaggaccagaaaatctacatctacaccctcaagggcatgtgccccttaaacacaccccaacaggccttggatactccagctgtcgtcacctgcttcttggccgtgcctgttattaaaaagaattcctacctggtcttagcgggcctcgccgatgggcttgtggctgtgtttcccgtggtgcggggcaccccaaaggacagctgctcctacctgtgctcacacacagccaacaggtccaagttcagcatcgcggatgaagacgcacggcagaacccctacccagtgaaggccatggaggtggtcaacagcggctctgaggtctggtacagcaatgggccgggcctccttgtcatcgactgtgcctccctggagatctgcaggcggctggagccctacatggccccctccatggttacgtcagtcgtgtgcagctctgagggcagaggggaggaggtcgtctggtgcctggatgacaaggccaactccttggtgatgtaccactccaccacctaccagctgtgtgcccggtacttctgcggggtccccagccccctcagggacatgtttcccgtgcggcccttggacacggaacccccggcagccagccacacggccaacccaaaggtgcctgagggggactccatcgcggacgtgagcatcatgtacagtgaggagctgggcacgcagatcctgatccaccaggaatcactcactgactactgctccatgtcctcctactcctcatccccaccccgccaggctgccaggtccccctcaagcctccccagctccccagcaagttcttccagtgtgcctttctccaccgactgcgaggactcagacatgctacatacgcccggtgctgcctccgacaggtctgagcatgacctgacccccatggacggggagaccttcagccagcacctgcaggccgtgaagatcctcgccgtcagagacctcatttgggtccccaggcgcggtggagatgttatcgtcattggcctggagaaggattctggcgcccagcggggccgagtcattgccgtcttaaaagcccgagagctgactccgcatggggtgctggtggatgctgccgtggtggcaaaggacactgttgtgtgcacctttgaaaatgaaaacacagagtggtgcctggccgtctggaggggctggggcgccagggagttcgacattttctaccagtcctacgaggagctgggccggctggaggcttgcactcgcaagagaaggtaattcctgtggaatgactgtcacacatcagagctggctggcccggggctgcagcctgacccctctgccatcggcctctagttctccaaggacctagaagacagatggagttctcccctgaactccttgctgctaagaagtgctgagaagttactcgcctggcggtggctccagggttctctggttctctggagcagagttctctgaataccccatcccccaactgctgattttacagccccagggaagacagtggtatcaggctgggagcggcctcctctggcctcccccatcagtttgcaggagcaggggtgcaggatcctgttctgagctgggtcaaacaaagcagggccgggccttcctgccatccccaggtctcagatggaattacactagaggccctccgctgggaagcacttgaggtagggcaggaggggggctgtgacccctgccctttccccgccagagacctcaggctctcagcacattccacaggctcctgagtccccgaggcctgggccagcttgggcaagccaagatcagatgtctctgtgttcgggaaggtctccgtgtgggaaagcccttgggggatcccgggtgaggagtgttgccccatccagagaatgaatgagttcctttaagtgccaccgccagcaagcccagaggcacacagtccgagtgcacccgcttagcctttacattcctctccaccgacaaaaggaaggggaaactcaatcagcaggacttcagaaagggccttgtgtttatagctttgtcaagtaaatttggacgcagctggagcacaggccctgtttgtttgcacataataatcttgtttatcactttaaaaaattcagtaatatctcagcagtcaggcttctggttgtgaaatcacattgtatgggatttataccaaattatgtatttgctaaacattcactgcacacgtgtacagcggagtacgaaaaggaacgttgtccacaggggatttatggatacaacagcaaacattttataaactatgcacatgcattacacacatgcacacacatatgcacacacatgtgcaaacatagccacttttttgtcaagagttaccctttggggctccttaaaccagaatgggagtttgaaagagagatcatactccagctgaagtttgttgacccttttctaaaattaaaaagatcaaatttagtatttgctggatatgcagggagatgagactcttttaatctcaaaataaacagattctttcaagaacg

SEQ ID NO: 315166 - DNA, 7671 bp, Artificial Sequence
  derived and/or modified sequence
gcggccgccgaggggacgcctcgcgacggttcctgggagagctggcggcggccttgctctgcgcgctcttcgcgccgccctccccgcccgcccgcctcaggattgaggaagtgcgtctgggcccggccccggcgcggggggcagacggcggtgggacggccaggccccggccccgccagtgtgtccgcccggccccgcgtcccggagcgcccgcacccggccccgccgccgcctcagagcaagaaagctttctgctcagccatggctacgagtccacgccttaatgcaccccacagccagcggcagtggcagtgacaacagcgggacctgcctttgaagatcggctgctgcaagggttgatggctggcatgtcgcaaagaccccccagcatgtactggtgtgtggggccggaggagtcagctgtgtgtccagaacgtgccatggagacgcttaacggtgccggggacacgggcggcaagccgtccacgcggggcggtgaccctgcagcgcggtcccgcaggacggaaggcatccgcgccgcgtacaggcggggagaccgcggcggcgcccgggacctgctggaggaggcctgcgaccagtgcgcgtcccagctggaaaagggccagcttctgagcatcccggcagcctatggggatctggagatggtccgctacctactcagcaagagactggtggagctgcccaccgagcccacggatgacaacccagccgtggtggcagcgtattttggacacacggcagttgtgcaggaattgcttgagtccttaccaggtccctgcagtccccagcggcttctgaactggatgctggccttggcttgccagcgagggcacctgggggttgtgaagctcctggtcctgacgcacggggctgacccggagagctacgctgtcaggaagaatgagttccctgtcatcgtgcgcttgcccctgtatgcggccatcaagtcagggaatgaagacattgcaatattcctgcttcggcatggggcctatttctgttcctacatcttgctggatagtcctgaccccagcaaacatctgctgagaaagtacttcattgaagccagtcccttgcccagcagttatccgggaaaaacagctctccgtgtgaaatggtcccatctcagactgccctgggtagacctagactggctcatagacatctcctgccagatcacggagctcgacctttctgccaactgcctggcgaccctcccctcggttatcccctggggcctcatcaatctccggaagctgaacctctccgacaaccacctgggggagctgcctggcgtgcagtcatcggacgaaatcatctgttccaggctacttgaaattgacatttccagcaacaagttgtcccacctccctcctggattcttgcacctctcaaaacttcaaaaactgacagcttcaaaaaattgtttagaaaaattgttcgaagaagaaaatgccactaactggataggtttacggaagctacaggaacttgatatatctgacaataaattgacagaactccctgccctgttccttcactctttcaagtccctcaattctctgaatgtctccagaaacaacctgaaggtgtttccagatccctgggcctgccctttgaaatgttgtaaagcttccagaaatgccctggaatgtctgccagacaaaatggctgtcttttggaaaaatcacctgaaggatgtggatttctcagaaaacgcactcaaagaagttcccctgggacttttccagcttgatgccctcatgttcttgaggttacaggggaaccagctggcggcacttccacctcaagagaagtggacctgcaggcagctcaaaaccctggatctctccagaaaccaacttggcaaaaatgaagatggactgaaaacgaagcgtattgcctttttcaccaccagaggtcgccagcgctccgggactgaggcagcaagtgtgctggaatttccggccttcctaagtgagtctttggaagtcctttgcctgaacgacaaccacctcgacacagtccctccctcggtttgcctactgaagagcttatcagagctctacttgggaaacaaccctggcctccgggagctccctcctgagctggggcagctgggcaacctctggcagctggacactgaagacctgaccatcagcaatgtgcctgcagaaatccaaaaagaaggccccaaagcaatgctgtcttacctgcgtgctcagctgcggaaagcggaaaagtgcaagctgatgaagatgatcatcgtgggtcccccgcgccagggcaagtccaccctcctggagatcttacagacggggagggccccccaggtggtgcatggagaggccaccatcaggaccaccaagtgggagctccagaggccggctggctcgagagccaaggttgagtccgtggagttcaacgtctgggacatcgggggaccggccagcatggccactgtcaaccagtgcttcttcacggacaaggccctgtacgtggtggtctggaacctggcgctgggggaggaggccgtggccaacctccagttctggctgctcaacatcgaggccaaggccccaaacgccgtggtgctggtggtcgggacgcacctggatttaattgaagccaagttccgtgtggaaaggattgcaacgctgcgtgcctatgtgctggcactctgccgctccccctccggctccagggccacaggcttcccagacatcaccttcaaacacttacatgagatttcctgcaagagcctggaaggtcaggaagggctgcgacagctgattttccacgtcacgtgcagcatgaaggacgtgggcagcaccatcggctgccagcgactggcagggcggctgatccccaggagctacctgagcctgcaggaggccgtgctggcagagcagcagcgccgcagccgggacgacgacgtgcagtacctgacggacaggcagctggagcagctggtggagcagacgcccgacaacgacatcaaggactacgaggacctgcagtcagccatcagcttcctcatagaaaccggcaccctgctccatttcccggacaccagccacggcctgaggaacctctacttcctcgaccctatttggctctccgaatgtctgcagaggatctttaatattaagggctctcggtcagtggccaagaatggggtgatcagagcagaagacctcaggatgctgctggtggggactggcttcacgcagcagacggaagagcagtacttccagttcctggccaagtttgagatcgccctgcccgtcgccaatgacagctacctcctgccccatctccttccatctaaacctggcctggacacccacggtatgcggcaccccacagccaacaccattcagagggtatttaagatgagcttcgttcccgttggcttctggcaaaggtttatagcacggatgctgatcagcctggcggagatggacctgcagctttttgaaaacaagaagaatactaaaagcaggaacaggaaagtcaccatttacagttttacaggaaaccagagaaatcgctgtagcacattcagagtgaaaagaaatcagaccatctattggcaggaagggctcctggtcacttttgatgggggctacctcagtgtggaatcttccgacgtgaactggaaaaagaagaaaagcggaggaatgaaaattgtttgccaatcagaagtgagggacttctcagccatggctttcatcacggaccacgtcaattccttgattgatcagtggtttcccgccctgacagccacagagagcgacgggacgccactcatggagcagtacgtgccctgcccggtctgcgagacagcctgggcccagcacacggaccccagtgagaaatcagaggatgtgcagtacttcgacatggaagactgtgtcctgacggccatcgagcgggacttcatctcctgccccagacacccggacctccccgtgccgctgcaggagctggtccctgaactgttcatgaccgacttcccggccaggctcttcctggagaacagcaagctggagcacagcgaggacgagggcagcgtcctgggccagggcggcagtggcaccgtcatctaccgggcccggtaccagggccagcctgtggccgtcaagcgcttccacatcaaaaaattcaagaactttgctaacgtaccggcagacaccatgctgaggcacctgcgggccaccgatgccatgaagaacttctccgagttccggcaggaggccagcatgctgcacgcgctgcagcacccctgcatcgtggcgctcatcggcatcagcatccacccgctctgcttcgccctggagctcgcgccgctcagcagcctcaacaccgtgctgtccgagaacgccagagattcttcctttatacccctgggacacatgctcacccaaaaaatagcctaccagatcgcctcgggcctggcctacctgcacaagaaaaacatcatcttctgtgacctgaagtcggacaacattctggtgtggtcccttgacgtcaaggagcacatcaacatcaagctatctgactacgggatttcgaggcagtcattccatgagggcgccctaggcgtggagggcactcctggctaccaggccccagagatcaggcctcgcattgtatatgatgagaaggtagatatgttctcctatggaatggtgctctacgagttgctgtcaggacagcgccctgcactgggccaccaccagctccagattgccaagaagctgtccaagggcatccgcccggttctggggcagccggaggaagtgcagttccggcgactgcaggcgctcatgatggagtgctgggacactaagccagagaagcgaccgctggccctgtcggtggtgagccagatgaaggacccgacttttgccaccttcatgtatgaactgtgctgtgggaagcagacagccttcttctcatcccagggccaggagtacaccgtggtgttttgggatggaaaagaggagtccaggaactacacggtggtgaacacagagaagggcctcatggaggtgcagaggatgtgctgccctgggatgaaggtgagctgccagctccaggtccagagatccctgtggacagccaccgaggaccagaaaatctacatctacaccctcaagggcatgtgccccttaaacacaccccaacaggccttggatactccagctgtcgtcacctgcttcttggccgtgcctgttattaaaaagaattcctacctggtcttagcgggcctcgccgatgggcttgtggctgtgtttcccgtggtgcggggcaccccaaaggacagctgctcctacctgtgctcacacacagccaacaggtccaagttcagcatcgcggatgaagacgcacggcagaacccctacccagtgaaggccatggaggtggtcaacagcggctctgaggtctggtacagcaatgggccgggcctccttgtcatcgactgtgcctccctggagatctgcaggcggctggagccctacatggccccctccatggttacgtcagtcgtgtgcagctctgagggcagaggggaggaggtcgtctggtgcctggatgacaaggccaactccttggtgatgtaccactccaccacctaccagctgtgtgcccggtacttctgcggggtccccagccccctcagggacatgtttcccgtgcggcccttggacacggaacccccggcagccagccacacggccaacccaaaggtgcctgagggggactccatcgcggacgtgagcatcatgtacagtgaggagctgggcacgcagatcctgatccaccaggaatcactcactgactactgctccatgtcctcctactcctcatccccaccccgccaggctgccaggtccccctcaagcctccccagctccccagcaagttcttccagtgtgcctttctccaccgactgcgaggactcagacatgctacatacgcccggtgctgcctccgacaggtctgagcatgacctgacccccatggacggggagaccttcagccagcacctgcaggccgtgaagatcctcgccgtcagagacctcatttgggtccccaggcgcggtggagatgttatcgtcattggcctggagaaggattctggcgcccagcggggccgagtcattgccgtcttaaaagcccgagagctgactccgcatggggtgctggtggatgctgccgtggtggcaaaggacactgttgtgtgcacctttgaaaatgaaaacacagagtggtgcctggccgtctggaggggctggggcgccagggagttcgacattttctaccagtcctacgaggagctgggccggctggaggcttgcactcgcaagagaaggtaattcctgtggaatgactgtcacacatcagagctggctggcccggggctgcagcctgacccctctgccatcggcctctagttctccaaggacctagaagacagatggagttctcccctgaactccttgctgctaagaagtgctgagaagttactcgcctggcggtggctccagggttctctggttctctggagcagagttctctgaataccccatcccccaactgctgattttacagccccagggaagacagtggtatcaggctgggagcggcctcctctggcctcccccatcagtttgcaggagcaggggtgcaggatcctgttctgagctgggtcaaacaaagcagggccgggccttcctgccatccccaggtctcagatggaattacactagaggccctccgctgggaagcacttgaggtagggcaggaggggggctgtgacccctgccctttccccgccagagacctcaggctctcagcacattccacaggctcctgagtccccgaggcctgggccagcttgggcaagccaagatcagatgtctctgtgttcgggaaggtctccgtgtgggaaagcccttgggggatcccgggtgaggagtgttgccccatccagagaatgaatgagttcctttaagtgccaccgccagcaagcccagaggcacacagtccgagtgcacccgcttagcctttacattcctctccaccgacaaaaggaaggggaaactcaatcagcaggacttcagaaagggccttgtgtttatagctttgtcaagtaaatttggacgcagctggagcacaggccctgtttgtttgcacataataatcttgtttatcactttaaaaaattcagtaatatctcagcagtcaggcttctggttgtgaaatcacattgtatgggatttataccaaattatgtatttgctaaacattcactgcacacgtgtacagcggagtacgaaaaggaacgttgtccacaggggatttatggatacaacagcaaacattttataaactatgcacatgcattacacacatgcacacacatatgcacacacatgtgcaaacatagccacttttttgtcaagagttaccctttggggctccttaaaccagaatgggagtttgaaagagagatcatactccagctgaagtttgttgacccttttctaaaattaaaaagatcaaatttagtatttgctggatatgcagggagatgagactcttttaatctcaaaataaacagattctttcaagaacgaa

SEQ ID NO: 315167 - DNA, 6271 bp, Artificial Sequence
  derived and/or modified sequence
gctggcggcggccttgctctgcgcgctcttcgcgccgccctccccgcccgcccgcctcaggattgaggaagtgcgtctgggcccggccccggcgcggggggcagacggcggtgggacggccaggccccggccccgccagtgtgtccgcccggccccgcgtcccggagcgcccgcacccggccccgccgccgcctcagagcaagaaagctttctgctcagccatggctacgagtccacgccttaatgcaccccacagccagcggcagtggcagtgacaacagcgggacctgcctttgaagatcggctgctgcaagggttgatggctggcatgtcgcaaagaccccccagcatgtactggtgtgtggggccggaggagtcagctgtgtgtccagaacgtgccatggagacgcttaacggtgccggggacacgggcggcaagccgtccacgcggggcggtgaccctgcagcgcggtcccgcaggacggaaggcatccgcgccgcgtacaggcggggagaccgcggcggcgcccgggacctgctggaggaggcctgcgaccagtgcgcgtcccagctggaaaagggccagcttctgagcatcccggcagcctatggggatctggagatggtccgctacctactcagcaagagactggtggagctgcccaccgagcccacggatgacaacccagccgtggtggcagcgtattttggacacacggcagttgtgcaggaattgcttgagtccttaccaggtccctgcagtccccagcggcttctgaactggatgctggccttggcttgccagcgagggcacctgggggttgtgaagctcctggtcctgacgcacggggctgacccggagagctacgctgtcaggaagaatgagttccctgtcatcgtgcgcttgcccctgtatgcggccatcaagtcagggaatgaagacattgcaatattcctgcttcggcatggggcctatttctgttcctacatcttgctggatagtcctgaccccagcaaacatctgctgagaaagtacttcattgaagccagtcccttgcccagcagttatccgggaaaaacagctctccgtgtgaaatggtcccatctcagactgccctgggtagacctagactggctcatagacatctcctgccagatcacggagctcgacctttctgccaactgcctggcgaccctcccctcggttatcccctggggcctcatcaatctccggaagctgaacctctccgacaaccacctgggggagctgcctggcgtgcagtcatcggacgaaatcatctgttccaggctacttgaaattgacatttccagcaacaagttgtcccacctccctcctggattcttgcacctctcaaaacttcaaaaactgacagcttcaaaaaattgtttagaaaaattgttcgaagaagaaaatgccactaactggataggtttacggaagctacaggaacttgatatatctgacaataaattgacagaactccctgccctgttccttcactctttcaagtccctcaattctctgaatgtctccagaaacaacctgaaggtgtttccagatccctgggcctgccctttgaaatgttgtaaagcttccagaaatgccctggaatgtctgccagacaaaatggctgtcttttggaaaaatcacctgaaggatgtggatttctcagaaaacgcactcaaagaagttcccctgggacttttccagcttgatgccctcatgttcttgaggttacaggggaaccagctggcggcacttccacctcaagagaagtggacctgcaggcagctcaaaaccctggatctctccagaaaccaacttggcaaaaatgaagatggactgaaaacgaagcgtattgcctttttcaccaccagaggtcgccagcgctccgggactgaggcagcaagtgtgctggaatttccggccttcctaagtgagtctttggaagtcctttgcctgaacgacaaccacctcgacacagtccctccctcggtttgcctactgaagagcttatcagagctctacttgggaaacaaccctggcctccgggagctccctcctgagctggggcagctgggcaacctctggcagctggacactgaagacctgaccatcagcaatgtgcctgcagaaatccaaaaagaaggccccaaagcaatgctgtcttacctgcgtgctcagctgcggaaagcggaaaagtgcaagctgatgaagatgatcatcgtgggtcccccgcgccagggcaagtccaccctcctggagatcttacagacggggagggccccccaggtggtgcatggagaggccaccatcaggaccaccaagtgggagctccagaggccggctggctcgagagccaaggttgagtccgtggagttcaacgtctgggacatcgggggaccggccagcatggccactgtcaaccagtgcttcttcacggacaaggccctgtacgtggtggtctggaacctggcgctgggggaggaggccgtggccaacctccagttctggctgctcaacatcgaggccaaggccccaaacgccgtggtgctggtggtcgggacgcacctggatttaattgaagccaagttccgtgtggaaaggattgcaacgctgcgtgcctatgtgctggcactctgccgctccccctccggctccagggccacaggcttcccagacatcaccttcaaacacttacatgagatttcctgcaagagcctggaaggtcaggaagggctgcgacagctgattttccacgtcacgtgcagcatgaaggacgtgggcagcaccatcggctgccagcgactggcagggcggctgatccccaggagctacctgagcctgcaggaggccgtgctggcagagcagcagcgccgcagccgggacgacgacgtgcagtacctgacggacaggcagctggagcagctggtggagcagacgcccgacaacgacatcaaggactacgaggacctgcagtcagccatcagcttcctcatagaaaccggcaccctgctccatttcccggacaccagccacggcctgaggaacctctacttcctcgaccctatttggctctccgaatgtctgcagaggatctttaatattaagggctctcggtcagtggccaagaatggggtgatcagagcagaagacctcaggatgctgctggtggggactggcttcacgcagcagacggaagagcagtacttccagttcctggccaagtttgagatcgccctgcccgtcgccaatgacagctacctcctgccccatctccttccatctaaacctggcctggacacccacggtatgcggcaccccacagccaacaccattcagagggtatttaagatgagcttcgttcccgttggcttctggcaaaggtttatagcacggatgctgatcagcctggcggagatggacctgcagctttttgaaaacaagaagaatactaaaagcaggaacaggaaagtcaccatttacagttttacaggaaaccagagaaatcgctgtagcacattcagagtgaaaagaaatcagaccatctattggcaggaagggctcctggtcacttttgatgggggctacctcagtgtggaatcttccgacgtgaactggaaaaagaagaaaagcggaggaatgaaaattgtttgccaatcagaagtgagggacttctcagccatggctttcatcacggaccacgtcaattccttgattgatcagtggtttcccgccctgacagccacagagagcgacgggacgccactcatggagcagtacgtgccctgcccggtctgcgagacagcctgggcccagcacacggaccccagtgagaaatcagaggatgtgcagtacttcgacatggaagactgtgtcctgacggccatcgagcgggacttcatctcctgccccagacacccggacctccccgtgccgctgcaggagctggtccctgaactgttcatgaccgacttcccggccaggctcttcctggagaacagcaagctggagcacagcgaggacgagggcagcgtcctgggccagggcggcagtggcaccgtcatctaccgggcccggtaccagggccagcctgtggccgtcaagcgcttccacatcaaaaaattcaagaactttgctaacgtaccggcagacaccatgctgaggcacctgcgggccaccgatgccatgaagaacttctccgagttccggcaggaggccagcatgctgcacgcgctgcagcacccctgcatcgtggcgctcatcggcatcagcatccacccgctctgcttcgccctggagctcgcgccgctcagcagcctcaacaccgtgctgtccgagaacgccagagattcttcctttatacccctgggacacatgctcacccaaaaaatagcctaccagatcgcctcgggcctggcctacctgcacaagaaaaacatcatcttctgtgacctgaagtcggacaacattctggtgtggtcccttgacgtcaaggagcacatcaacatcaagctatctgactacgggatttcgaggcagtcattccatgagggcgccctaggcgtggagggcactcctggctaccaggccccagagatcaggcctcgcattgtatatgatgagaaggtagatatgttctcctatggaatggtgctctacgagttgctgtcaggacagcgccctgcactgggccaccaccagctccagattgccaagaagctgtccaagggcatccgcccggttctggggcagccggaggaagtgcagttccggcgactgcaggcgctcatgatggagtgctgggacactaagccagagaagcgaccgctggccctgtcggtggtgagccagatgaaggacccgacttttgccaccttcatgtatgaactgtgctgtgggaagcagacagccttcttctcatcccagggccaggagtacaccgtggtgttttgggatggaaaagaggagtccaggaactacacggtggtgaacacagagaagggcctcatggaggtgcagaggatgtgctgccctgggatgaaggtgagctgccagctccaggtccagagatccctgtggacagccaccgaggaccagaaaatctacatctacaccctcaagggcatgtgccccttaaacacaccccaacaggccttggatactccagctgtcgtcacctgcttcttggccgtgcctgttattaaaaagaattcctacctggtcttagcgggcctcgccgatgggcttgtggctgtgtttcccgtggtgcggggcaccccaaaggacagctgctcctacctgtgctcacacacagccaacaggtccaagttcagcatcgcggatgaagacgcacggcagaacccctacccagtgaaggccatggaggtggtcaacagcggctctgaggtctggtacagcaatgggccgggcctccttgtcatcgactgtgcctccctggagatctgcaggcggctggagccctacatggccccctccatggttacgtcagtcgtgtgcagctctgagggcagaggggaggaggtcgtctggtgcctggatgacaaggccaactccttggtgatgtaccactccaccacctaccagctgtgtgcccggtacttctgcggggtccccagccccctcagggacatgtttcccgtgcggcccttggacacggaacccccggcagccagccacacggccaacccaaaggtgcctgagggggactccatcgcggacgtgagcatcatgtacagtgaggagctgggcacgcagatcctgatccaccaggaatcactcactgactactgctccatgtcctcctactcctcatccccaccccgccaggctgccaggtccccctcaagcctccccagctccccagcaagttcttccagtgtgcctttctccaccgactgcgaggactcagacatgctacatacgcccggtgctgcctccgacaggtctgagcatgacctgacccccatggacggggagaccttcagccagcacctgcaggccgtgaagatcctcgccgtcagagacctcatttgggtccccaggcgcggtggagatgttatcgtcattggcctggagaaggattctggcgcccagcggggccgagtcattgccgtcttaaaagcccgagagctgactccgcatgggattatgccagtctcctctgtgaaggtatgctgggcagggtggcctgtccgggacatggtctacatggttgcagtgatgtga

SEQ ID NO: 315168 - DNA, 6039 bp, Artificial Sequence
  derived and/or modified sequence
atggagaccctgaacggcgccggcgacaccggcggcaagcccagcactagagggggcgaccccgctgcccggtcacgaaggaccgaaggaatccgagctgcctacaggcgaggcgaccgcggtggcgcacgagatttgctcgaagaggcttgtgatcagtgtgcgtctcagctggagaagggtcagctgcttagcatccccgccgcctacggagatttggagatggttcgttatctcctttcaaaaaggctagtggagcttccaacagagcctacggacgataaccccgcagtggtggctgcttacttcggccacaccgcagtcgttcaggaactgctcgagccactgaccccaaaacagacagagtgggagcagaccgcacccttctcaggaaccttcccactttcttgtcatttactgcctggaccttgtagtccacaacgtttgttaaactggatgctcgccctagcgtgtcagcgaggccatttgggtgtggtcaaactcttggtgctgacccatggcgccgatcccgaatcctacgccgtccgcaagaacgagttccctgtgatagtgagacttccactgtacgccgccatcaaatcagggaatgaggatatcgccatcttcctacttcgacatggcgcttatttctgctcatacattttgctggactcgcccgatccatccaagcatctgctgaggaagtactttatagaggcaagtcccttaccctctagctacccagggaaaactgccttacgtgtaaagtggagccaccttcggctcccctgggtggacctggactggctgatcgacataagctgccagattactgaactggatcttagtgctaattgtctggcgaccctgccgtcagttatcccatgggggctgattaacctgcggaaattaaatctgtcagataaccatctcggcgaactcccaggagtacaatcctccgatgagatcatttgctcaaggctgctggagatcgacatctcttcgaataagttgagtcacctgcctcctggatttctccatctttccaaactccagaagctgactgcaagtaaaaactgccttgagaaactgtttgaagaggaaaatgccactaactggatcgggctgcgtaagctccaagaactggacatttccgataataagctgacggaactaccagccctttttctgcacagcttcaagagcctaaactccctgaatgtgagcagaaacaatttaaaagtcttcccggacccctgggcttgcccactgaaatgttgtaaggcttcaaggaacgccctggagtgtctgccagacaaaatggcagtcttctggaaaaaccatctgaaggacgtcgactttagtgagaacgccctgaaggaggttcctctcgggctcttccaattggatgcgctgatgttcttacgattgcagggaaatcagttagcggcgcttcccccacaggagaagtggacctgtaggcagttaaaaacgttagatctttcgcggaaccagctgggcaaaaatgaagatgggctgaagactaagcgaatcgcattcttcaccacacgcgggagacagcgcagcggtaccgaagccgccagtgtgctcgaatttcccgcctttctgtcagaaagccttgaggtgttatgcctgaatgataaccacctggataccgtaccaccatctgtctgtttgctcaaatcactttcagagctctatctcggtaataaccccggccttagagagctgccacccgagctaggtcaactcggcaatctctggcaactggatactgaggatctgacaatcagcaacgtccctgcagaaatccagaaagaaggtcccaaggcgatgctcagttatttgcgcgcccagctccggaaggcagaaaagtgtaaactcatgaaaatgattatagtgggcccacccaggcagggtaagagtactttactggagatcctccagacagggcgtgctccccaggtcgtgcacggggaagcaactatcaggaccactaaatgggaattacagcggccggctgggtcccgcgccaaagtagaatcagtggagttcaatgtttgggatataggtggccctgcaagtatggccaccgttaaccaatgcttcttcacggataaggcgctatacgtggtagtctggaatctggccctaggtgaagaagctgttgccaacctgcagttctggctgttgaacatagaagccaaagcgccaaacgccgtggtgctggtagtgggaacacacttggatttgatagaggcaaagtttcgggtggagcgtatcgctaccctgcgagcatatgtccttgcgctgtgcagatctccctccgggtcacgtgcgacaggttttccagatatcaccttcaagcacctccatgagataagctgcaagtccctggagggccaggaaggtttacggcagcttattttccatgtgacctgttctatgaaagacgtgggctcgactattggatgtcagagactagccggccgactgattccacgttcatatctgagcctacaggaagctgtgctagccgagcagcagcgcaggtcacgcgacgacgatgtgcaatacctgaccgacagacaactggagcaactcgtggaacagacacccgacaacgacatcaaggattacgaggacttgcagagcgccataagcttcctcatcgagactggaacacttctgcatttccccgatacttcccacggcctgcgaaatctttactttctggatccaatctggctgtccgaatgcctgcaacgcatctttaatattaaagggagccgatcagtggccaagaatggtgtgatacgtgccgaggacttgaggatgcttctggtggggaccggctttacacagcagaccgaggaacagtatttccaattcttggcaaaatttgaaattgccctccccgtggctaatgacagctatctcctaccgcacctgcttcctagcaagccaggtcttgacacccatggaatgaggcacccaacagccaacacaatacagcgcgtctttaaaatgagcttcgtgccggtgggcttctggcagagatttatcgcgcgtatgttgatttcactggctgagatggacttgcaactgttcgagaacaaaaaaaacaccaaaagccggaacaggaaggtgaccatctactccttcactggcaaccagcgcaaccggtgtagcacctttagagtgaagcgaaatcagacaatctactggcaggagggattgttggtgacattcgacgggggatacctgtctgtcgaatcctccgacgtcaactggaagaaaaagaaaagcggcggaatgaagattgtatgtcagagcgaagtgcgggatttttcggccatggccttcattactgaccacgtcaatagccttatagatcagtggtttcctgctctgacagccacagagagtgacggcacccctcttatggagcaatacgtgccatgccccgtgtgcgagacagcctgggctcagcacaccgatccttcagaaaaatcagaggatgttcagtacttcgacatggaagactgtgttctcaccgcaattgaacgcgactttatctcctgtccacgacacccagacctccctgttcccttacaggaactggtaccagagctgtttatgactgactttcctgcacggctgtttctcgagaattcaaagctagagcactccgaagatgaggggagtgtcctagggcaaggaggctccggcactgtcatttatcgggcgcggtatcagggacaacccgtcgctgtgaagagattccatattaaaaagttcaaaaattttgccaacgtccccgcagatacaatgctgcgacacctccgggcgactgacgctatgaaaaacttctctgagttcaggcaagaagctagcatgcttcacgcccttcagcatccttgcatcgtggcccttatcggaatttctattcaccccctctgctttgcactcgagcttgccccactatccagccttaatactgtgctctctgagaatgctagagattccagctttatccctcttggacacatgctgacacagaaaatcgcataccaaattgcgagcggcttggcatatttgcacaagaagaacatcatattttgtgatctgaaaagtgataatatcctggtctggagccttgatgtgaaggagcatattaatatcaaattgtctgactacggcatttcccggcagagtttccacgagggcgccttaggagttgaggggaccccgggatatcaggcccctgagatccgtcctagaattgtgtacgacgaaaaagtggatatgtttagttacggcatggttttatatgaattgctgtcaggccagcgtccggcacttgggcaccaccagctgcagattgccaaaaaactctccaagggcatcagacccgtgcttgggcagcccgaagaagtgcagttccggcgcctgcaagcactcatgatggaatgttgggatacaaaaccagaaaagaggcctctggctctcagcgtggtttcacagatgaaggaccctacatttgctaccttcatgtatgagttatgttgcggaaagcaaaccgccttcttctcctcccagggccaggagtataccgtggtgttctgggatgggaaagaagagagccgcaactataccgtggtcaacaccgagaagggactgatggaggtgcaacgcatgtgctgtcctggaatgaaggtgagttgccaactgcaagtccagcggtccctctggactgccacggaggatcagaagatttacatttatactctcaaaggcatgtgccccctcaataccccccaacaagccctcgacacccccgccgtagtaacttgctttctggcagttccggttattaaaaagaatagctatctggtgctggccggcctcgctgatgggctggtggcggtgttccccgtcgtccgagggacacccaaagattcttgctcctacctgtgtagccacacggctaaccgctcaaaattctccattgccgatgaagatgcacgacagaacccataccctgtgaaagccatggaagtagtgaatagtggcagcgaagtttggtacagcaatggtcccggactgctggttatagactgtgcctctttggaaatttgtcggcgactagaaccctatatggcgccaagcatggtaactagcgtggtgtgttcatcagagggcagaggcgaagaggttgtttggtgtctcgacgataaagccaattcgctggttatgtaccactcaacgacctatcaactttgcgcgagatacttttgtggcgttcccagccctctccgtgacatgtttcctgtaagacctctggatacagagcctcccgccgcatctcataccgccaatcccaaggttcctgagggcgattcaattgccgatgtctccatcatgtatagtgaggagttgggcactcagatactgatacatcaggagagtctaactgattactgcagcatgtctagctactcatcttctccaccccggcaggccgcccgcagcccttcttcactcccatcaagccctgctagttcatcgtccgtccccttcagcacggactgcgaggactcagacatgctacatacacctggcgccgcaagtgacagaagcgagcatgatctgaccccaatggacggggagacgttcagccagcacctgcaagccgtgaaaattcttgcagtgagagatttgatctgggtcccgaggaggggtggagacgtcatcgtgattggactagagaaagatagcggagctcagcgtggtcgggtgatcgccgtgctgaaggctcgcgagctcaccccccacggagtgctggtggacgctgccgtagttgccaaagatacagttgtctgtactttcgaaaacgaaaacacagagtggtgcctagccgtttggaggggctggggcgcccgcgaatttgacatcttctaccagtcctacgaagaactgggaaggttggaggcctgcacgaggaagcgcagatag

SEQ ID NO: 315169 - DNA, 6048 bp, Artificial Sequence
  derived and/or modified sequence
atggccggcatgagccagcggccccccagcatgtactggtgcgtggggccagaagaaagcgcagtgtgccctgaacgggctatggagaccttgaatggcgctggggacactggtggcaagccaagtacacggggaggcgaccccgccgcccgcagtaggcggactgaaggaatcagagccgcgtacaggcgcggcgaccgcggcggtgcgagggatctcttggaggaggcttgtgaccaatgtgctagtcagcttgagaaggggcagctgttgtccattccagccgcatatggggatctagaaatggttaggtacctactaagtaagcgcctcgtggaattaccgactgaacctactgatgataaccccgctgttgtggccgcttattttggccacaccgcagtggttcaggagttgttggagagcctccctggcccttgctctccgcaacgattgctaaactggatgctggccctggcttgccagcgcggacatctgggcgttgtgaagctgctcgtgctgacacatggcgctgatcccgaaagttacgctgtgaggaagaatgaatttcccgtaatagtacgactcccactgtatgccgctattaaatcaggtaacgaagatatcgctatcttcctcctacgacatggcgcttacttctgctcatacatccttctcgatagccctgatcccagcaagcacctgttgcgaaagtacttcattgaggcatcgccactaccctcgtcctatcccgggaaaacagccctcagagtcaagtggagtcacctgagattgccatgggtggatctcgattggctgatcgacatctcctgtcagataacagaattagacctctctgccaattgtttagctacattgccctccgtgataccctgggggctgatcaatcttaggaagctgaatctgtctgacaatcacctgggggaactgccaggcgtccagagttctgatgagattatttgttcccgcctgctggagattgacatctctagtaataaactgtcacatctccctcctggtttcttacatctctccaaactgcaaaaattgaccgcctcaaagaactgcctcgagaagttatttgaggaggagaacgcaactaactggatcggccttaggaaactacaggagctggatatctccgacaataaacttacagagctgcctgctctcttcctgcattctttcaagtccctgaattcgttgaacgtgtcacggaacaatctcaaagtgtttccagatccctgggcatgtcctctgaaatgctgtaaggcttcgcgcaacgccttagagtgtctgccagataaaatggcagtgttctggaaaaatcacttgaaggatgtcgatttctccgagaacgctctcaaggaggtacctctggggctctttcagcttgacgctctgatgtttctacgtctgcagggcaaccaattagccgccctacccccccaggagaaatggacttgccgacagctgaaaacgttggacctgagcaggaatcagttggggaaaaacgaagacggattgaagacaaagaggattgccttcttcacgacaagagggcgtcagcgcagcggcacagaggcagcctcagtgctggaattccctgcatttctgtccgagtccttggaagtgctttgcctgaacgataaccatttggacacagtcccccccagcgtctgtctgctgaaatcactgtcagagttatacttgggcaataacccggggctgagagagctaccccccgaactggggcagttggggaacttgtggcagttagataccgaagacctgacaattagcaacgtaccagcagagattcaaaaagagggaccaaaggcaatgctgtcctacttgagggcacagttgcggaaagcagaaaagtgtaagcttatgaagatgataattgttggtcctccacgacaaggaaagtcaaccctgctagaaatcctgcagactggacgagcacctcaggtggtgcacggggaggctactatcaggacaactaagtgggaattacagaggccagctggatcacgcgcgaaggtagagtccgtcgagttcaacgtatgggatataggagggcctgcgtccatggccacagtgaaccaatgcttcttcacggacaaggcgctgtacgttgtggtgtggaatctggccctgggcgaggaagcggttgcaaatctccagttctggcttctgaacatcgaggctaaggcccccaacgccgtggtgctcgtcgtgggcactcatctggaccttatcgaggctaaattccgggtggaacgtatcgcaacattacgtgcatatgtgcttgccctctgtagatcaccttccgggagcagagctacagggttcccagacattacctttaaacaccttcacgagataagttgcaagtctctcgagggacaggaagggcttcggcagctcatctttcatgtcacctgttccatgaaagatgtgggctctaccatcggatgtcagcgtcttgcaggcagacttatcccaaggtcctacctctctctgcaggaggccgtgctcgcagagcaacaaagacgtagtagagatgatgacgtgcagtatcttacggataggcagctggagcagctcgtcgagcagacccccgacaatgacatcaaggattacgaggatcttcagtctgctatctccttcctaatagagaccggaacgctcctacacttcccagatacctctcacggtctgcgaaacctctactttctggatccaatatggttgtcagaatgcctccaacgaatttttaatattaaaggcagtcgctcagtggccaaaaacggtgtcattcgtgccgaagacctgcgaatgctcctcgttgggaccgggttcacacaacaaactgaggagcagtacttccagttcctggctaaattcgaaatagcactcccggttgctaatgactcctacttgcttccccacctgctcccctctaaaccagggttggacacacacggaatgcgccatccaaccgccaacacgatacagagggttttcaagatgtcgttcgtgcctgtaggcttctggcaacggttcattgccagaatgttgattagcctggccgaaatggacctacaactgttcgaaaacaaaaagaacactaagagcagaaatcgaaaagttactatttatagcttcacaggaaatcagagaaacaggtgttccacttttcgcgtcaagagaaaccagaccatttactggcaggaaggactgttggtcacttttgacggcgggtaccttagtgtggagtcctcagatgttaactggaaaaagaagaaatcgggcggcatgaaaatagtatgtcaaagtgaggtcagagatttctctgccatggcctttattaccgaccacgtgaactcactgatagatcaatggtttccagctttgacagccaccgagtccgacggcactcccctgatggaacaatacgtgccctgcccagtctgtgagacagcatgggcacaacacaccgacccaagcgaaaagagtgaagatgtgcagtatttcgatatggaagattgcgtacttactgctatcgagagggacttcatttcttgtcctagacatccagacctacccgtgcccctgcaagaattggtgccagagctgtttatgacagattttcctgccaggctgtttctggagaattcaaagctggaacatagcgaagatgaggggagcgtcctcggtcaggggggctccggaacggtcatttaccgagcccgataccagggacagccagtcgccgtcaagcgtttccacatcaagaagttcaagaactttgccaacgtgccggccgataccatgctgcgccacctgcgggccactgatgcgatgaagaatttttccgagtttcgacaggaagcatccatgctccacgccctgcagcatccttgtatcgtggcactaataggaatttctattcatccgctgtgcttcgccctggagctggctcccttaagctcactcaacaccgtgttaagtgaaaatgctcgagatagttcttttatacccctaggacacatgctcacacaaaagattgcataccagatcgcgtcaggcctcgcctacttgcataaaaaaaacatcatattttgtgacctgaagagcgacaacatcctggtgtggagcttagatgtgaaagaacacatcaatattaaactcagtgactatggaatttctcgccagagttttcatgaaggggcactgggagtggagggaacccccgggtaccaggccccagagatacggccacggatcgtttatgatgaaaaagtggatatgttctcgtacggaatggttctgtacgaactcctgagcggacagagacctgctctcggccaccatcaactgcagattgcaaaaaaactgtccaagggcatccgacccgttctcgggcagcccgaagaggtgcagtttcgtcgcctccaggccttgatgatggaatgctgggatacaaaacctgagaaaaggccgttagccctaagcgttgtttctcagatgaaagatcccacctttgccaccttcatgtacgagctgtgctgtgggaagcagacagctttcttttcttctcaaggacaggagtacacagtagtgttctgggatgggaaggaggagagccgaaactacactgtggtaaacacagaaaagggtctgatggaggtacaaagaatgtgctgccctggaatgaaagtatcctgccagctgcaggtacaacggtccttgtggactgccacagaagatcagaagatttatatttataccttgaaaggaatgtgcccactgaacacgccgcagcaggccctagacacacccgctgtggttacctgcttcctagctgtccccgtgatcaaaaagaatagctacctcgtactcgcagggttagcagacggattagtagcggtctttccggtcgttcgaggcacccccaaagacagctgctcttatttatgctctcacaccgcaaataggtcaaagtttagtattgctgatgaggatgcgcggcagaacccgtatcctgtcaaggcaatggaagtggtgaactcaggcagtgaggtctggtattctaacggtcccggtcttctcgtcatcgactgtgccagcctggaaatctgccggcgactcgagccatacatggcgcctagtatggttacctctgtggtctgttcctcagaaggtcgcggggaagaagtggtttggtgtcttgacgataaggcgaattccctggtgatgtaccacagcactacgtatcagttatgtgcgaggtacttttgcggggtaccctctcctctgagagacatgttccctgtaaggcccttagacacagaacctcccgccgcatctcataccgcgaatcccaaagtgcctgaaggagactccatcgcagacgtatctattatgtattccgaggagttaggcacacagatcctcatccatcaggagagcctgaccgactactgttctatgtcttcctattctagctctccccccaggcaggctgcgaggagcccttcgagtcttccttctagtcccgcttctagctcctcagtacctttttcaacggactgcgaggactcagatatgctccacaccccaggtgccgcctccgaccggtccgagcacgaccttacccctatggatggcgagacatttagccagcaccttcaggccgtgaagatcctggccgtccgcgacctcatctgggtgccacgtcgaggaggcgacgtcatagtgattggattggaaaaggacagcggagcacagcgcgggcgggtgattgccgtgttgaaagcccgggaactcacacctcacggcgtgctagtcgatgccgccgtggtggcaaaggataccgtggtctgtacgttcgagaatgagaatacagagtggtgcttagctgtttggcggggatggggtgcccgggagttcgatatcttctatcaaagctacgaagagcttggtcgtttagaggcgtgcacacgaaagagacgttag

SEQ ID NO: 315170 - DNA, 99 bp, Artificial Sequence
  derived and/or modified sequence
atggccggcatgagccagcggccccccagcatgtactggtgcgtgggacctgaggaatcagccgtctgtcccgaaagggctatggaaacgctgaactag

SEQ ID NO: 315171 - DNA, 6039 bp, Artificial Sequence
  derived and/or modified sequence
atggaaacacttaacggagccggagatacagggggaaagccatctactaggggaggtgaccccgcagccaggtcccggaggaccgaaggcatacgtgccgcatacagacggggagaccggggaggcgctcgcgatctgctcgaggaggcctgcgatcagtgtgcctcacagctggagaagggccaactattgtctatacccgctgcgtacggagatttagagatggttagataccttctaagcaagcgcctggtggagttgccaacggagccaaccgacgataacccagccgtcgtcgccgcttattttgggcacaccgcagtggtgcaggaactgctagagcccttgacaccgaaacagactgaatgggagcaaactgccccatttagtggaaccttccccctgtcctgccatcttttgcccggtccatgctctcctcagcggttactgaattggatgttggcactggcctgccagcgaggacacctgggtgttgtgaagctgctcgtcctcacccatggcgcagaccccgaaagttatgccgtgaggaagaacgaatttccagtaattgttagactgcctctatatgccgctatcaaatctgggaatgaggatatcgcaatatttctgcttaggcacggggcatacttctgctcttatattctgctcgattctccggatccttccaagcacctgctgagaaaatacttcattgaagcgtctccgctgccaagcagttatcccggaaagaccgctcttcgtgttaaatggtctcatctacggctaccatgggtggacctggactggctcattgacatttcgtgccaaatcacagagctcgacttgtccgcgaactgcctcgcgactctgccaagcgtaatcccatggggcttaatcaatctgcgcaagttaaatttgtccgataaccacctgggcgagttgccaggagtccagtccagtgatgaaatcatatgtagtaggctgctggagattgacatatcatccaacaaactgtcccacttgcctccgggatttctgcacctctccaagttacaaaaactaactgcgagcaagaactgtttagagaagctcttcgaggaggagaatgccactaactggattggactgcggaagttgcaggaattagatattagtgacaacaagctgaccgagcttcccgctttattcctccacagttttaaatcactcaacagcttgaacgtgtcccgcaacaatctcaaggtgttcccagacccctgggcgtgtcccctgaagtgttgcaaagcaagtagaaatgccttagagtgtctccccgacaagatggccgttttttggaagaatcatttaaaagatgtggacttttcagagaacgccctgaaggaagtgcctctcgggttgtttcagttagacgccctgatgttcctgcgtctccagggtaatcagttagccgctctgccaccccaggaaaaatggacatgcaggcagctgaagaccttggatctgtcgaggaaccagctggggaaaaacgaagacggtctgaaaacaaagcggatcgcattttttacgacacgaggaagacagagaagcggtacagaagcagctagcgtcctggaattccctgccttcctgagcgaatctctcgaagtcctgtgcctgaatgataatcacctcgacacagtacctcctagtgtgtgtctcctaaagagtctttccgagttgtacctgggcaataacccaggattacgggagcttcctcctgagctcggacagctcggtaacctgtggcagctggacacagaggacctgactataagtaatgtgccagctgagatccaaaaagagggccctaaggcaatgctgtcttacctcagggcacaactgcgcaaggctgagaagtgcaaattaatgaaaatgatcattgtggggcctcctaggcagggtaagagcaccctactggagattcttcagacaggacgggcaccacaggtggttcacggagaggcaactattcggaccacaaagtgggaactgcagcgtcctgctggtagcagagcaaaagtcgagagcgttgagtttaacgtttgggatattgggggaccagctagcatggcaacagtgaaccagtgcttttttacagacaaagctctctacgtcgtggtctggaatctcgcccttggagaggaggccgttgctaatttgcaattctggctgctaaacatcgaagcgaaagcccctaatgcggtggtattagtcgtgggcacccacctggacctgatcgaggccaagtttcgagtggagcggattgccactctccgtgcatacgtcctggctctgtgtcgctcaccttctggcagtcgcgctacaggattccccgacataaccttcaagcacttacacgaaatatcatgcaagagtctggaagggcaagagggactcaggcagttgatctttcacgttacctgttccatgaaggatgttggtagcacaataggctgccagaggctggccggacggctgattcctcgcagttacctcagcctgcaggaagctgttctggccgagcagcagagacgatcaagagacgacgatgtgcaatatctcactgatcgacagctggagcagttagttgaacagacgcccgataatgacatcaaagactacgaggatctgcagagtgccataagcttccttatagagaccggaacactgctgcactttcccgatacttctcacggtctccgaaacctgtacttcttggatcctatatggctgagcgagtgtctacagagaatctttaacatcaagggatccagatccgtggcaaaaaacggagtaattcgggcagaagacttgcgaatgcttctcgtaggtaccgggtttacccagcaaacagaagagcagtactttcagtttttggctaaattcgaaattgcactgccagtggccaacgactcctacttattgcctcacctcctgcctagcaagcccggactggacactcacggaatgcgccaccccaccgctaacactattcagagagttttcaagatgtcattcgtccctgtcggattctggcaaaggtttatcgccaggatgcttatctctctagccgagatggacttgcagcttttcgagaataagaagaatactaaatcccgtaacagaaaggtgacaatttactcattcactggtaatcagcgaaaccggtgtagcacatttcgtgttaaaagaaatcaaaccatatattggcaggaaggactgctagttacctttgatggtgggtacctgtctgtagagagctcagatgtaaactggaaaaagaagaagtccggcggtatgaagatcgtctgtcagtctgaagtgcgcgattttagcgcgatggcttttatcacggaccacgtgaacagtctgatcgaccagtggtttcctgcactcactgccacggaaagcgacggaactcctctgatggaacagtacgtgccatgccccgtatgtgagacagcatgggcacagcacacagatcctagtgagaagtcagaggacgtgcagtacttcgacatggaagattgtgtcctgacagctatcgagagggacttcatcagttgtccccgtcacccagacctgcccgttcctcttcaggagctcgtgcctgaactttttatgactgatttccctgcaaggcttttccttgaaaatagcaagcttgagcactcggaggacgaagggtccgtgcttggtcaaggaggctcaggcacggtaatttatcgggctcgttatcagggtcaacccgtggcagtgaaaaggtttcacatcaagaaattcaagaatttcgctaacgtccccgcagatacaatgctgaggcaccttcgggcaaccgacgccatgaaaaacttttcggaatttcgccaggaagcttcaatgctgcacgctctgcaacacccttgcatcgtagccctcatcggcatttctatccaccccctgtgtttcgccctcgagctggccccactcagcagcctcaacacagtgttgtctgagaatgcgagagacagttctttcattccactgggccatatgctgacacagaagattgcctaccaaatagcctccggcttagcatatttgcataagaagaatataattttctgcgacttgaagtctgacaatattctcgtgtggtccctcgatgtgaaagagcacattaacatcaaactaagcgactatggaatctccaggcagagctttcatgaaggcgctctaggggtcgaaggcacacctggctaccaggccccagaaatcaggcccaggattgtgtatgatgaaaaagtcgacatgttttcgtacggtatggtgctgtacgaattgttgtcaggccagcggcctgcgttgggacaccaccaactgcagatcgccaagaaattaagtaaaggtatccgaccagtgttgggacaacctgaggaagtgcagtttaggcggctgcaggctctaatgatggagtgctgggacacgaaacccgaaaagcgcccattagccctgagcgttgtttctcagatgaaggaccccaccttcgcaactttcatgtatgagctgtgctgtggcaaacaaaccgcctttttctcctcccaggggcaggagtacacagttgttttttgggacgggaaggaggagtctcggaattataccgtcgtgaatacagagaagggactcatggaggtacaacggatgtgctgtcccggtatgaaagtgagttgtcagttacaggtgcaaagatctctctggacggccaccgaggaccaaaagatttatatctacacgctgaaggggatgtgccccttgaacaccccacagcaggcgctggacactccagccgtcgtgacgtgctttctcgccgtgcctgtgattaaaaagaactcatatttggttctggctggcctggctgacgggcttgttgccgtctttcccgtagttcgagggaccccgaaggacagctgctcttatctgtgtagccataccgcgaaccgcagtaaattttcgattgcagacgaggacgctcgtcagaacccctaccctgtcaaggcaatggaggtcgtgaactcgggctctgaagtctggtacagtaatggacctggcctcctggtcattgactgtgcaagcctcgaaatctgtcgaagactggagccttatatggcaccaagcatggtcacatcagttgtttgttcttcagaaggacggggagaggaagttgtgtggtgccttgatgataaagcaaattcgttggtcatgtaccactccaccacctaccagctttgtgcccgttatttctgcggagtacccagtccactacgcgatatgttccctgtccggcctttggacacagaacccccagcagccagccataccgccaatccgaaggtccccgaaggcgatagtattgccgacgtgtcgattatgtattccgaggaattaggaactcaaattctaattcaccaggaaagcctgacagactactgcagcatgagttcctactcctcttccccgccacgacaggccgctaggtcacctagcagtctgccctcatcaccagcctcttcttcctccgtcccttttagtactgactgcgaagattctgacatgttacatactcccggtgccgcatccgaccggagcgagcatgatttgactcccatggacggtgagaccttttctcagcacctgcaggccgtgaaaatcttagccgtgcgggatctcatctgggtgccaagaagagggggagacgtgatcgtaattggcctggagaaggatagcggcgctcagcgcggaagggtgatagctgtactaaaggctcgggagctgacaccccacggtgtactagtggatgcggctgttgtggccaaagatactgtcgtctgtacctttgagaacgagaacaccgagtggtgtttggctgtctggagaggatggggggctagggagttcgacattttttatcagtcatacgaggagttaggcagactggaggcctgtacacgcaagaggcggtac

SEQ ID NO: 315172 - DNA, 6047 bp, Artificial Sequence
  derived and/or modified sequence
atggccggaatgagtcaacgaccgcctagcatgtactggtgcgtggggcctgaggagtccgcagtttgtcccgagcgtgccatggagaccctcaatggtgctggggatacagggggaaaaccctccacacggggaggtgaccctgcggcacggagcagacgaacagagggtatcagggcggcatatcgacgtggggataggggtggggctcgcgacctgctggaggaagcctgcgatcagtgcgcaagccagctggagaaagggcagctgctgagtatcccggctgcctatggggacctcgaaatggtacggtatctgctcagtaagcggctcgtagagcttcctacagagcccaccgacgataaccccgcagtggtggcagcctatttcggccacacagctgtggtccaggaactgctggagagcctacctgggccttgctcaccgcagcggctcttgaactggatgcttgcgcttgcatgccagcgtggccatctcggggtagtgaagctgctcgttctgacgcacggcgctgatcctgagtcttacgcggtgcgaaagaacgagtttccagtgatcgttcggttaccactgtatgctgctataaagagtggcaatgaggatatcgctatctttctgcttcgtcacggggcttacttctgctcatacatattgctcgattcgccagacccgtctaagcatctgctgcggaaatactttattgaagccagcccactgccctcatcctaccctggtaaaacagccttacgtgtgaagtggtcgcaccttaggctaccatgggtggatttggattggttaatcgacatctcatgccagataactgaactggacctaagtgccaattgcctggctacccttcctagtgtgatcccttggggactgatcaacttgcgcaaattgaatctgagcgacaaccacctgggcgaactacctggtgttcagagcagcgatgaaattatttgctccagactccttgaaatcgatatatcgagcaataaactgagccaccttccgccaggattcttgcatctgtctaaattgcaaaagctcacagcaagtaaaaattgcctggaaaagctttttgaggaggaaaatgccaccaattggattggcctgcgcaaacttcaagaactggacattagcgataataaattgaccgaattacctgccttgtttcttcacagtttcaaaagtttgaactctctgaacgtgtcacgcaataacctcaaggtatttcccgacccgtgggcttgtccattgaagtgttgtaaggcctcgcggaacgccctggaatgtctccctgacaagatggccgtgttctggaaaaaccatctgaaggatgtcgatttttccgagaatgccctcaaggaagtgcctctcggtctgttccagctggacgcactgatgttcctaagactgcagggcaatcagctagcagcgctgcctccacaggaaaagtggacctgtaggcagctcaagactctagatttgtctcggaaccagttgggcaagaacgaagatgggctcaaaaccaaacgaatcgccttttttaccacccgcggacggcaacgtagcggcaccgaggcagccagcgttctggagtttcctgctttcctaagcgaatcactcgaagttctctgcctgaacgataaccacctcgacacggttcccccttccgtgtgtctgctgaagtctctgagcgagctctatcttggaaacaatccgggactaagagagctcccacctgagcttggtcagttgggtaatttgtggcagctggatacagaggacctgacaatcagcaatgtgcctgcagaaatccagaaggagggtcctaaagctatgctgtcttatttgcgggctcaactccgtaaggccgagaaatgtaaacttatgaaaatgattatcgtggggccaccacgccagggaaaatccaccctcttagaaattcttcaaacaggccgtgcccctcaagttgtccatggagaggccaccatccgtactacaaagtgggagttgcagcggcctgcaggctctcgcgcaaaagtcgagagcgtagagttcaacgtatgggacattgggggacccgcttccatggccaccgttaatcagtgcttcttcaccgacaaggcgttgtatgtagtggtgtggaacctggccctcggtgaagaagccgtggctaaccttcagttttggctgttgaacatcgaagctaaggcacccaatgcagtggttctggtagtcgggactcacctggaccttatagaggccaagtttcgtgtggagaggattgccactctgagagcgtatgtccttgctctttgtcgatcgccatcaggcagccgggctaccggtttccccgacatcactttcaaacaccttcacgagattagctgtaaatccttagagggccaagagggattgcggcagctcatatttcacgtgacttgttcaatgaaggacgtgggttcaaccattggttgtcagcgcctcgccggacgtctaattccaagatcctacctttctctccaagaagccgttcttgccgagcagcaaaggcgttccagagatgacgacgtccagtacctcacagatagacagctcgaacaactggtcgagcaaactcccgataacgatattaaagactacgaggacctgcagagcgcaatcagctttctgatcgagactggcacacttctgcacttccccgacactagtcacgggcttagaaacctctactttcttgatcctatctggctgagcgagtgtttgcagcgcatttttaacataaagggctcccgcagtgtggctaagaacggcgtgatccgtgctgaagatctgcgcatgttgctggtcggaacagggtttacccagcaaactgaggaacagtacttccagtttttggctaaattcgaaatcgccttacccgtggcaaatgatagctacctgttaccccatctcttaccctccaagcctggtctcgacacgcatgggatgcgccaccccacggcaaacacgattcagcgcgtttttaaaatgtcattcgtacccgtggggttctggcagcgcttcatcgcgagaatgctgataagtctcgccgagatggatctccagctatttgagaataagaagaatacgaagagtaggaatcgcaaggtcactatctatagtttcacagggaaccagcgcaatcggtgttcaacttttagggtcaagaggaatcagacaatctactggcaggaaggcctgcttgtgacattcgatggcggttatctgagtgttgagagtagtgatgtgaattggaaaaaaaagaagtctggtgggatgaagatcgtctgccagtccgaggtcagagactttagcgctatggcctttatcactgatcacgtcaacagcctcatcgaccagtggttcccggctttgacagccactgagagcgacggaacacccctaatggagcaatacgtgccgtgcccagtctgcgagactgcttgggcccagcacactgaccccagtgagaagagtgaagacgtgcagtattttgatatggaagattgcgtcttgaccgcaattgaacgcgatttcatttcttgccctagacacccagatcttccagtgccattgcaggaactcgtgcctgagttgtttatgactgatttccccgctcggctctttctcgagaatagcaaacttgagcactccgaagacgaaggatcagtcctggggcaaggtggatcaggaacagtgatatatcgcgctcggtatcaggggcaacctgtggccgtcaaaagatttcatatcaaaaagtttaagaattttgccaacgtgccagctgacacaatgttgagacacctgagggctaccgatgccatgaaaaacttttccgagttcaggcaagaggcctcaatgctgcacgccttacagcacccctgcatagtggccttgatcggcatctccattcacccactgtgctttgccctagaacttgcaccgctctctagtctgaacaccgtgctgtccgagaacgctcgggacagcagctttatccccctcgggcatatgcttacgcaaaaaattgcatatcagatcgcgtctggacttgcatatctgcataaaaaaaatatcatcttctgcgacttgaagtcagataatatcctggtgtggagtcttgatgtcaaagagcatatcaacattaaactctccgactacggtatcagccgccagtcattccacgaaggtgctctgggagtggaaggtaccccgggataccaggcccctgagattcgcccacgcattgtatatgacgaaaaggtcgacatgttttcctatggcatggtgttgtacgaacttctttcaggacaacggcctgctctgggtcatcaccagttacagatcgctaagaaattgagtaagggcattaggcccgtgctagggcagccagaggaagtgcaatttcgcagactacaggcactcatgatggaatgttgggacacgaagccagaaaagcgcccactagccctgtctgtggtgtcccagatgaaggatcctacatttgcaacatttatgtacgaactgtgctgtggcaagcagaccgccttcttctcatcccagggccaggaatacaccgtcgtgttctgggatggtaaggaagagagtcgtaattacactgtagtcaacactgagaaaggcctcatggaagttcaaaggatgtgctgccccggaatgaaagtgagctgtcaattgcaggtgcagagatctctgtggaccgccaccgaagaccagaagatttatatctacacgctcaaaggcatgtgtcctctgaacaccccacagcaagcacttgatacaccagcagttgtgacatgtttcctggccgttcctgtgataaagaaaaattcatacctggtcctggccggtctggctgatggcctggtggcggtctttcctgtagtacgcggtacacccaaggactcatgttcctatttgtgctcccacacagcaaacagatctaaattctccatcgctgatgaggatgctaggcaaaatccttaccctgttaaggcaatggaggtggtgaacagtggcagtgaggtgtggtattccaacggacccggactcctagtgatcgattgtgcttctcttgaaatttgtcgcaggctggagccatacatggctccctccatggtcacaagtgtcgtttgcagtagcgaaggaagaggggaggaagtggtgtggtgtctcgatgataaagctaacagccttgtgatgtatcatagtactacctaccaactgtgtgcccgttatttctgcggggtacccagccctctgcgggatatgtttcctgtgcggccacttgatacagagcccccagcagcctcccacacagccaaccccaaagtgcccgaaggagacagcattgcagatgtctctattatgtactctgaggaactgggaactcaaatactgatccaccaggaatcactgacagactattgttcaatgagctcgtattcaagctcccctcccaggcaggctgctcgatctccaagttcattaccttcatcacctgcttcatcttcatccgtcccatttagcacagactgcgaggactcagacatgcttcacacccctggggcagcctctgaccggtcagaacacgacctcacccccatggacggtgagacctttagccaacatctgcaggctgtcaagattttagcagtaagagatctgatatgggttcctcgacgaggcggagatgtcattgtaattggattggagaaagacagtggggctcagagagggcgtgtcattgctgtgcttaaggcccgagagctgactccgcatggcgttcttgtcgatgcagcagtcgttgccaaggacacagtggtgtgtacctttgagaacgaaaacactgagtggtgtctggccgtgtggcggggatggggtgcccgagaattcgacatattctatcaatcctatgaagagctggggagactagaagcttgcactcgaaagaggcggta

SEQ ID NO: 315173 - DNA, 99 bp, Artificial Sequence
  derived and/or modified sequence
atggcaggaatgtctcagagacccccttcaatgtactggtgcgttggccctgaggaaagtgccgtgtgtcccgagagggcgatggagaccctgaactag

SEQ ID NO: 315174 - DNA, 6039 bp, Artificial Sequence
  derived and/or modified sequence
atggagaccctgaacggcgccggcgacaccggcggcaagcccagcaccagaggcggcgaccccgccgccagaagcagaagaaccgagggcatcagagccgcctacagaagaggcgacagaggcggcgccagagacctgctggaggaggcctgcgaccagtgcgccagccagctggagaagggccagctgctgagcatccccgccgcctacggcgacctggagatggtgagatacctgctgagcaagagactggtggagctgcccaccgagcccaccgacgacaaccccgccgtggtggccgcctacttcggccacaccgccgtggtgcaggagctgctggagcccctgacccccaagcagaccgagtgggagcagaccgcccccttcagcggcaccttccccctgagctgccacctgctgcccggcccctgcagcccccagagactgctgaactggatgctggccctggcctgccagagaggccacctgggcgtggtgaagctgctggtgctgacccacggcgccgaccccgagagctacgccgtgagaaagaacgagttccccgtgatcgtgagactgcccctgtacgccgccatcaagagcggcaacgaggacatcgccatcttcctgctgagacacggcgcctacttctgcagctacatcctgctggacagccccgaccccagcaagcacctgctgagaaagtacttcatcgaggccagccccctgcccagcagctaccccggcaagaccgccctgagagtgaagtggagccacctgagactgccctgggtggacctggactggctgatcgacatcagctgccagatcaccgagctggacctgagcgccaactgcctggccaccctgcccagcgtgatcccctggggcctgatcaacctgagaaagctgaacctgagcgacaaccacctgggcgagctgcccggcgtgcagagcagcgacgagatcatctgcagcagactgctggagatcgacatcagcagcaacaagctgagccacctgccccccggcttcctgcacctgagcaagctgcagaagctgaccgccagcaagaactgcctggagaagctgttcgaggaggagaacgccaccaactggatcggcctgagaaagctgcaggagctggacatcagcgacaacaagctgaccgagctgcccgccctgttcctgcacagcttcaagagcctgaacagcctgaacgtgagcagaaacaacctgaaggtgttccccgacccctgggcctgccccctgaagtgctgcaaggccagcagaaacgccctggagtgcctgcccgacaagatggccgtgttctggaagaaccacctgaaggacgtggacttcagcgagaacgccctgaaggaggtgcccctgggcctgttccagctggacgccctgatgttcctgagactgcagggcaaccagctggccgccctgcccccccaggagaagtggacctgcagacagctgaagaccctggacctgagcagaaaccagctgggcaagaacgaggacggcctgaagaccaagagaatcgccttcttcaccaccagaggcagacagagaagcggcaccgaggccgccagcgtgctggagttccccgccttcctgagcgagagcctggaggtgctgtgcctgaacgacaaccacctggacaccgtgccccccagcgtgtgcctgctgaagagcctgagcgagctgtacctgggcaacaaccccggcctgagagagctgccccccgagctgggccagctgggcaacctgtggcagctggacaccgaggacctgaccatcagcaacgtgcccgccgagatccagaaggagggccccaaggccatgctgagctacctgagagcccagctgagaaaggccgagaagtgcaagctgatgaagatgatcatcgtgggcccccccagacagggcaagagcaccctgctggagatcctgcagaccggcagagccccccaggtggtgcacggcgaggccaccatcagaaccaccaagtgggagctgcagagacccgccggcagcagagccaaggtggagagcgtggagttcaacgtgtgggacatcggcggccccgccagcatggccaccgtgaaccagtgcttcttcaccgacaaggccctgtacgtggtggtgtggaacctggccctgggcgaggaggccgtggccaacctgcagttctggctgctgaacatcgaggccaaggcccccaacgccgtggtgctggtggtgggcacccacctggacctgatcgaggccaagttcagagtggagagaatcgccaccctgagagcctacgtgctggccctgtgcagaagccccagcggcagcagagccaccggcttccccgacatcaccttcaagcacctgcacgagatcagctgcaagagcctggagggccaggagggcctgagacagctgatcttccacgtgacctgcagcatgaaggacgtgggcagcaccatcggctgccagagactggccggcagactgatccccagaagctacctgagcctgcaggaggccgtgctggccgagcagcagagaagaagcagagacgacgacgtgcagtacctgaccgacagacagctggagcagctggtggagcagacccccgacaacgacatcaaggactacgaggacctgcagagcgccatcagcttcctgatcgagaccggcaccctgctgcacttccccgacaccagccacggcctgagaaacctgtacttcctggaccccatctggctgagcgagtgcctgcagagaatcttcaacatcaagggcagcagaagcgtggccaagaacggcgtgatcagagccgaggacctgagaatgctgctggtgggcaccggcttcacccagcagaccgaggagcagtacttccagttcctggccaagttcgagatcgccctgcccgtggccaacgacagctacctgctgccccacctgctgcccagcaagcccggcctggacacccacggcatgagacaccccaccgccaacaccatccagagagtgttcaagatgagcttcgtgcccgtgggcttctggcagagattcatcgccagaatgctgatcagcctggccgagatggacctgcagctgttcgagaacaagaagaacaccaagagcagaaacagaaaggtgaccatctacagcttcaccggcaaccagagaaacagatgcagcaccttcagagtgaagagaaaccagaccatctactggcaggagggcctgctggtgaccttcgacggcggctacctgagcgtggagagcagcgacgtgaactggaagaagaagaagagcggcggcatgaagatcgtgtgccagagcgaggtgagagacttcagcgccatggccttcatcaccgaccacgtgaacagcctgatcgaccagtggttccccgccctgaccgccaccgagagcgacggcacccccctgatggagcagtacgtgccctgccccgtgtgcgagaccgcctgggcccagcacaccgaccccagcgagaagagcgaggacgtgcagtacttcgacatggaggactgcgtgctgaccgccatcgagagagacttcatcagctgccccagacaccccgacctgcccgtgcccctgcaggagctggtgcccgagctgttcatgaccgacttccccgccagactgttcctggagaacagcaagctggagcacagcgaggacgagggcagcgtgctgggccagggcggcagcggcaccgtgatctacagagccagataccagggccagcccgtggccgtgaagagattccacatcaagaagttcaagaacttcgccaacgtgcccgccgacaccatgctgagacacctgagagccaccgacgccatgaagaacttcagcgagttcagacaggaggccagcatgctgcacgccctgcagcacccctgcatcgtggccctgatcggcatcagcatccaccccctgtgcttcgccctggagctggcccccctgagcagcctgaacaccgtgctgagcgagaacgccagagacagcagcttcatccccctgggccacatgctgacccagaagatcgcctaccagatcgccagcggcctggcctacctgcacaagaagaacatcatcttctgcgacctgaagagcgacaacatcctggtgtggagcctggacgtgaaggagcacatcaacatcaagctgagcgactacggcatcagcagacagagcttccacgagggcgccctgggcgtggagggcacccccggctaccaggcccccgagatcagacccagaatcgtgtacgacgagaaggtggacatgttcagctacggcatggtgctgtacgagctgctgagcggccagagacccgccctgggccaccaccagctgcagatcgccaagaagctgagcaagggcatcagacccgtgctgggccagcccgaggaggtgcagttcagaagactgcaggccctgatgatggagtgctgggacaccaagcccgagaagagacccctggccctgagcgtggtgagccagatgaaggaccccaccttcgccaccttcatgtacgagctgtgctgcggcaagcagaccgccttcttcagcagccagggccaggagtacaccgtggtgttctgggacggcaaggaggagagcagaaactacaccgtggtgaacaccgagaagggcctgatggaggtgcagagaatgtgctgccccggcatgaaggtgagctgccagctgcaggtgcagagaagcctgtggaccgccaccgaggaccagaagatctacatctacaccctgaagggcatgtgccccctgaacaccccccagcaggccctggacacccccgccgtggtgacctgcttcctggccgtgcccgtgatcaagaagaacagctacctggtgctggccggcctggccgacggcctggtggccgtgttccccgtggtgagaggcacccccaaggacagctgcagctacctgtgcagccacaccgccaacagaagcaagttcagcatcgccgacgaggacgccagacagaacccctaccccgtgaaggccatggaggtggtgaacagcggcagcgaggtgtggtacagcaacggccccggcctgctggtgatcgactgcgccagcctggagatctgcagaagactggagccctacatggcccccagcatggtgaccagcgtggtgtgcagcagcgagggcagaggcgaggaggtggtgtggtgcctggacgacaaggccaacagcctggtgatgtaccacagcaccacctaccagctgtgcgccagatacttctgcggcgtgcccagccccctgagagacatgttccccgtgagacccctggacaccgagccccccgccgccagccacaccgccaaccccaaggtgcccgagggcgacagcatcgccgacgtgagcatcatgtacagcgaggagctgggcacccagatcctgatccaccaggagagcctgaccgactactgcagcatgagcagctacagcagcagcccccccagacaggccgccagaagccccagcagcctgcccagcagccccgccagcagcagcagcgtgcccttcagcaccgactgcgaggacagcgacatgctgcacacccccggcgccgccagcgacagaagcgagcacgacctgacccccatggacggcgagaccttcagccagcacctgcaggccgtgaagatcctggccgtgagagacctgatctgggtgcccagaagaggcggcgacgtgatcgtgatcggcctggagaaggacagcggcgcccagagaggcagagtgatcgccgtgctgaaggccagagagctgaccccccacggcgtgctggtggacgccgccgtggtggccaaggacaccgtggtgtgcaccttcgagaacgagaacaccgagtggtgcctggccgtgtggagaggctggggcgccagagagttcgacatcttctaccagagctacgaggagctgggcagactggaggcctgcaccagaaagagaagatag

SEQ ID NO: 315175 - DNA, 6048 bp, Artificial Sequence
  derived and/or modified sequence
atggccggcatgagccagagaccccccagcatgtactggtgcgtgggccccgaggagagcgccgtgtgccccgagagagccatggagaccctgaacggcgccggcgacaccggcggcaagcccagcaccagaggcggcgaccccgccgccagaagcagaagaaccgagggcatcagagccgcctacagaagaggcgacagaggcggcgccagagacctgctggaggaggcctgcgaccagtgcgccagccagctggagaagggccagctgctgagcatccccgccgcctacggcgacctggagatggtgagatacctgctgagcaagagactggtggagctgcccaccgagcccaccgacgacaaccccgccgtggtggccgcctacttcggccacaccgccgtggtgcaggagctgctggagagcctgcccggcccctgcagcccccagagactgctgaactggatgctggccctggcctgccagagaggccacctgggcgtggtgaagctgctggtgctgacccacggcgccgaccccgagagctacgccgtgagaaagaacgagttccccgtgatcgtgagactgcccctgtacgccgccatcaagagcggcaacgaggacatcgccatcttcctgctgagacacggcgcctacttctgcagctacatcctgctggacagccccgaccccagcaagcacctgctgagaaagtacttcatcgaggccagccccctgcccagcagctaccccggcaagaccgccctgagagtgaagtggagccacctgagactgccctgggtggacctggactggctgatcgacatcagctgccagatcaccgagctggacctgagcgccaactgcctggccaccctgcccagcgtgatcccctggggcctgatcaacctgagaaagctgaacctgagcgacaaccacctgggcgagctgcccggcgtgcagagcagcgacgagatcatctgcagcagactgctggagatcgacatcagcagcaacaagctgagccacctgccccccggcttcctgcacctgagcaagctgcagaagctgaccgccagcaagaactgcctggagaagctgttcgaggaggagaacgccaccaactggatcggcctgagaaagctgcaggagctggacatcagcgacaacaagctgaccgagctgcccgccctgttcctgcacagcttcaagagcctgaacagcctgaacgtgagcagaaacaacctgaaggtgttccccgacccctgggcctgccccctgaagtgctgcaaggccagcagaaacgccctggagtgcctgcccgacaagatggccgtgttctggaagaaccacctgaaggacgtggacttcagcgagaacgccctgaaggaggtgcccctgggcctgttccagctggacgccctgatgttcctgagactgcagggcaaccagctggccgccctgcccccccaggagaagtggacctgcagacagctgaagaccctggacctgagcagaaaccagctgggcaagaacgaggacggcctgaagaccaagagaatcgccttcttcaccaccagaggcagacagagaagcggcaccgaggccgccagcgtgctggagttccccgccttcctgagcgagagcctggaggtgctgtgcctgaacgacaaccacctggacaccgtgccccccagcgtgtgcctgctgaagagcctgagcgagctgtacctgggcaacaaccccggcctgagagagctgccccccgagctgggccagctgggcaacctgtggcagctggacaccgaggacctgaccatcagcaacgtgcccgccgagatccagaaggagggccccaaggccatgctgagctacctgagagcccagctgagaaaggccgagaagtgcaagctgatgaagatgatcatcgtgggcccccccagacagggcaagagcaccctgctggagatcctgcagaccggcagagccccccaggtggtgcacggcgaggccaccatcagaaccaccaagtgggagctgcagagacccgccggcagcagagccaaggtggagagcgtggagttcaacgtgtgggacatcggcggccccgccagcatggccaccgtgaaccagtgcttcttcaccgacaaggccctgtacgtggtggtgtggaacctggccctgggcgaggaggccgtggccaacctgcagttctggctgctgaacatcgaggccaaggcccccaacgccgtggtgctggtggtgggcacccacctggacctgatcgaggccaagttcagagtggagagaatcgccaccctgagagcctacgtgctggccctgtgcagaagccccagcggcagcagagccaccggcttccccgacatcaccttcaagcacctgcacgagatcagctgcaagagcctggagggccaggagggcctgagacagctgatcttccacgtgacctgcagcatgaaggacgtgggcagcaccatcggctgccagagactggccggcagactgatccccagaagctacctgagcctgcaggaggccgtgctggccgagcagcagagaagaagcagagacgacgacgtgcagtacctgaccgacagacagctggagcagctggtggagcagacccccgacaacgacatcaaggactacgaggacctgcagagcgccatcagcttcctgatcgagaccggcaccctgctgcacttccccgacaccagccacggcctgagaaacctgtacttcctggaccccatctggctgagcgagtgcctgcagagaatcttcaacatcaagggcagcagaagcgtggccaagaacggcgtgatcagagccgaggacctgagaatgctgctggtgggcaccggcttcacccagcagaccgaggagcagtacttccagttcctggccaagttcgagatcgccctgcccgtggccaacgacagctacctgctgccccacctgctgcccagcaagcccggcctggacacccacggcatgagacaccccaccgccaacaccatccagagagtgttcaagatgagcttcgtgcccgtgggcttctggcagagattcatcgccagaatgctgatcagcctggccgagatggacctgcagctgttcgagaacaagaagaacaccaagagcagaaacagaaaggtgaccatctacagcttcaccggcaaccagagaaacagatgcagcaccttcagagtgaagagaaaccagaccatctactggcaggagggcctgctggtgaccttcgacggcggctacctgagcgtggagagcagcgacgtgaactggaagaagaagaagagcggcggcatgaagatcgtgtgccagagcgaggtgagagacttcagcgccatggccttcatcaccgaccacgtgaacagcctgatcgaccagtggttccccgccctgaccgccaccgagagcgacggcacccccctgatggagcagtacgtgccctgccccgtgtgcgagaccgcctgggcccagcacaccgaccccagcgagaagagcgaggacgtgcagtacttcgacatggaggactgcgtgctgaccgccatcgagagagacttcatcagctgccccagacaccccgacctgcccgtgcccctgcaggagctggtgcccgagctgttcatgaccgacttccccgccagactgttcctggagaacagcaagctggagcacagcgaggacgagggcagcgtgctgggccagggcggcagcggcaccgtgatctacagagccagataccagggccagcccgtggccgtgaagagattccacatcaagaagttcaagaacttcgccaacgtgcccgccgacaccatgctgagacacctgagagccaccgacgccatgaagaacttcagcgagttcagacaggaggccagcatgctgcacgccctgcagcacccctgcatcgtggccctgatcggcatcagcatccaccccctgtgcttcgccctggagctggcccccctgagcagcctgaacaccgtgctgagcgagaacgccagagacagcagcttcatccccctgggccacatgctgacccagaagatcgcctaccagatcgccagcggcctggcctacctgcacaagaagaacatcatcttctgcgacctgaagagcgacaacatcctggtgtggagcctggacgtgaaggagcacatcaacatcaagctgagcgactacggcatcagcagacagagcttccacgagggcgccctgggcgtggagggcacccccggctaccaggcccccgagatcagacccagaatcgtgtacgacgagaaggtggacatgttcagctacggcatggtgctgtacgagctgctgagcggccagagacccgccctgggccaccaccagctgcagatcgccaagaagctgagcaagggcatcagacccgtgctgggccagcccgaggaggtgcagttcagaagactgcaggccctgatgatggagtgctgggacaccaagcccgagaagagacccctggccctgagcgtggtgagccagatgaaggaccccaccttcgccaccttcatgtacgagctgtgctgcggcaagcagaccgccttcttcagcagccagggccaggagtacaccgtggtgttctgggacggcaaggaggagagcagaaactacaccgtggtgaacaccgagaagggcctgatggaggtgcagagaatgtgctgccccggcatgaaggtgagctgccagctgcaggtgcagagaagcctgtggaccgccaccgaggaccagaagatctacatctacaccctgaagggcatgtgccccctgaacaccccccagcaggccctggacacccccgccgtggtgacctgcttcctggccgtgcccgtgatcaagaagaacagctacctggtgctggccggcctggccgacggcctggtggccgtgttccccgtggtgagaggcacccccaaggacagctgcagctacctgtgcagccacaccgccaacagaagcaagttcagcatcgccgacgaggacgccagacagaacccctaccccgtgaaggccatggaggtggtgaacagcggcagcgaggtgtggtacagcaacggccccggcctgctggtgatcgactgcgccagcctggagatctgcagaagactggagccctacatggcccccagcatggtgaccagcgtggtgtgcagcagcgagggcagaggcgaggaggtggtgtggtgcctggacgacaaggccaacagcctggtgatgtaccacagcaccacctaccagctgtgcgccagatacttctgcggcgtgcccagccccctgagagacatgttccccgtgagacccctggacaccgagccccccgccgccagccacaccgccaaccccaaggtgcccgagggcgacagcatcgccgacgtgagcatcatgtacagcgaggagctgggcacccagatcctgatccaccaggagagcctgaccgactactgcagcatgagcagctacagcagcagcccccccagacaggccgccagaagccccagcagcctgcccagcagccccgccagcagcagcagcgtgcccttcagcaccgactgcgaggacagcgacatgctgcacacccccggcgccgccagcgacagaagcgagcacgacctgacccccatggacggcgagaccttcagccagcacctgcaggccgtgaagatcctggccgtgagagacctgatctgggtgcccagaagaggcggcgacgtgatcgtgatcggcctggagaaggacagcggcgcccagagaggcagagtgatcgccgtgctgaaggccagagagctgaccccccacggcgtgctggtggacgccgccgtggtggccaaggacaccgtggtgtgcaccttcgagaacgagaacaccgagtggtgcctggccgtgtggagaggctggggcgccagagagttcgacatcttctaccagagctacgaggagctgggcagactggaggcctgcaccagaaagagaagatag

SEQ ID NO: 315176 - DNA, 99 bp, Artificial Sequence
  derived and/or modified sequence
atggccggcatgagccagagaccccccagcatgtactggtgcgtgggccccgaggagagcgccgtgtgccccgagagagccatggagaccctgaactag

SEQ ID NO: 315177 - protein, 674 aa, Artificial Sequence
  derived and/or modified sequence
MLHALQHPCIVALIGISIHPLCFALELAPLSSLNTVLSENARDSSFIPLGHMLTQKIAYQIASGLAYLHKKNIIFCDLKSDNILVWSLDVKEHINIKLSDYGISRQSFHEGALGVEGTPGYQAPEIRPRIVYDEKVDMFSYGMVLYELLSGQRPALGHHQLQIAKKLSKGIRPVLGQPEEVQFRRLQALMMECWDTKPEKRPLALSVVSQMKDPTFATFMYELCCGKQTAFFSSQGQEYTVVFWDGKEESRNYTVVNTEKGLMEVQRMCCPGMKVSCQLQVQRSLWTATEDQKIYIYTLKGMCPLNTPQQALDTPAVVTCFLAVPVIKKNSYLVLAGLADGLVAVFPVVRGTPKDSCSYLCSHTANRSKFSIADEDARQNPYPVKAMEVVNSGSEVWYSNGPGLLVIDCASLEICRRLEPYMAPSMVTSVVCSSEGRGEEVVWCLDDKANSLVMYHSTTYQLCARYFCGVPSPLRDMFPVRPLDTEPPAASHTANPKVPEGDSIADVSIMYSEELGTQILIHQESLTDYCSMSSYSSSPPRQAARSPSSLPSSPASSSSVPFSTDCEDSDMLHTPGAASDRSEHDLTPMDGETFSQHLQAVKILAVRDLIWVPRRGGDVIVIGLEKDSGAQRGRVIAVLKARELTPHGIMPVSSVKVCWAGWPVRDMVYMVAVM

SEQ ID NO: 315178 - protein, 501 aa, Artificial Sequence
  derived and/or modified sequence
MFSYGMVLYELLSGQRPALGHHQLQIAKKLSKGIRPVLGQPEEVQFRRLQALMMECWDTKPEKRPLALSVVSQMKDPTFATFMYELCCGKQTAFFSSQGQEYTVVFWDGKEESRNYTVVNTEKGLMEVQRMCCPGMKVSCQLQVQRSLWTATEDQKIYIYTLKGMCPLNTPQQALDTPAVVTCFLAVPVIKKNSYLVLAGLADGLVAVFPVVRGTPKDSCSYLCSHTANRSKFSIADEDARQNPYPVKAMEVVNSGSEVWYSNGPGLLVIDCASLEICRRLEPYMAPSMVTSVVCSSEGRGEEVVWCLDDKANSLVMYHSTTYQLCARYFCGVPSPLRDMFPVRPLDTEPPAASHTANPKVPEGDSIADVSIMYSEELGTQILIHQESLTDYCSMSSYSSSPPRQAARSPSSLPSSPASSSSVPFSTDCEDSDMLHTPGAASDRSEHDLTPMDGETFSQHLQAVKILAVRDLIWVPRRVEMLSSLAWRRILAPSGAESLPS

SEQ ID NO: 315179 - DNA, 2025 bp, Artificial Sequence
  derived and/or modified sequence
atgcttcacgcactccagcacccatgcatagttgcactgattggtatctctattcacccgctgtgtttcgcactggaacttgccccattgtccagcctcaacactgtgctgtctgagaatgcgcgggacagcagtttcatacccctggggcatatgcttacgcagaaaatcgcataccaaatagctagcggactcgcttatctgcataagaagaatatcatcttctgcgatctgaagagcgacaatattttagtgtggagcctagacgtgaaagagcacattaatatcaaactttcagactatggaatttccaggcaatcgtttcacgaaggtgcgctcggtgttgagggtacccccgggtaccaggcaccagagatccgtcctaggattgtgtatgacgagaaggtggacatgttctcgtatggcatggtcctgtacgaattgctgagcggccagcggcctgctctagggcatcaccagttacagattgctaagaagctgtccaaggggattagaccagtgcttggccagcctgaagaagtacaattccgccgtctgcaggccttgatgatggaatgttgggatactaagcctgagaaaaggcctctcgcattaagtgtggtgtcccagatgaaagatcctacctttgctacttttatgtatgaactttgttgtgggaagcagaccgcatttttttcttcccagggtcaggagtacaccgtagtgttttgggatggcaaagaagagagccgaaactataccgtggttaacactgaaaaaggcctgatggaagtgcagagaatgtgttgtcccggaatgaaagtgagctgtcagctgcaggttcagaggagtctatggaccgccactgaggatcaaaaaatctatatatacacccttaagggtatgtgcccattgaatacccctcagcaggcactggacaccccagctgtagtgacgtgttttctggccgtgcccgtgatcaaaaaaaactcttatttggtgttggccggtctggccgacggtctggttgctgtgttccctgtggtccggggcacgccaaaggacagctgctcttacctgtgttctcacacagccaacaggtccaagttttcaatcgctgacgaggatgccagacagaatccataccccgtcaaggcaatggaagtcgtcaacagcggttcagaggtctggtactcaaatgggccaggattgttagttatcgattgcgcctctttagaaatctgcaggcggttggaaccgtacatggcacccagtatggtgacgtcggtagtgtgtagcagcgaggggaggggcgaggaggtggtttggtgccttgatgacaaagccaatagtctggtaatgtaccattctacaacttatcaactttgcgccaggtatttttgcggagtgccaagccccttacgtgacatgttccccgtccggcctctggatactgagcccccagcggcctctcataccgcgaatccaaaggtccccgagggcgatagcatcgcagacgtgagtatcatgtattctgaagaattgggcacacagatcctgattcaccaagaatcactgaccgactactgttccatgtcgtcttattcatcttccccgccccggcaggcagcacgaagcccttcatcactgccatcctcaccagcgagctccagctcagttccattctctaccgactgcgaggactcagatatgcttcatactccaggtgccgcctccgatcgctcagagcacgatctgactcccatggatggggagacattttcacagcacctgcaagccgtgaaaatcctggccgtgagggacctcatttgggttccgagacgaggtggggatgtcatcgtcatcggactggagaaagactcaggcgctcagagagggcgagtgatagccgtcctgaaagctagagaattgactccgcacggtatcatgcctgtaagcagtgtcaaagtgtgctgggcagggtggcctgttcgggatatggtctatatggtcgcagtcatgtag

SEQ ID NO: 315180 - DNA, 1506 bp, Artificial Sequence
  derived and/or modified sequence
atgttcagctatggcatggtgttatatgagctcctgtcaggccaacgccccgctctgggccaccaccagctgcaaatcgcaaagaaattgtctaagggaatccgcccggtgctcgggcaacccgaggaagtgcagttccgtcgcctgcaggcgcttatgatggagtgttgggacacaaagccagagaagcggccacttgcactctctgttgtgagccaaatgaaggaccctacttttgccacctttatgtatgaattatgctgtggaaagcagacagccttcttctcatctcaaggccaagaatacactgtggtcttctgggacggcaaggaagagtcacggaattacaccgtagtgaacacggaaaagggactgatggaagttcagcggatgtgctgccccggcatgaaggtatcctgtcagttgcaagttcagcgaagcctgtggacagcgacagaagaccaaaagatctatatctacacactgaagggcatgtgccctctcaacaccccacagcaggccctagacacccccgccgttgtcacgtgttttttagccgtgcctgtgattaaaaagaacagctacctcgtactggccgggctggccgacgggctggtggccgtgtttcccgtcgtccgaggcacacctaaggactcatgctcctacctgtgctctcatacggctaatagatcaaaatttagtatagctgacgaggacgctcgacagaatccttacccggtcaaggccatggaggtggtgaactcgggaagtgaggtttggtatagcaacgggcctgggcttcttgtcatcgattgcgccagcctggagatatgtcggcgtcttgagccgtatatggcaccttctatggtaaccagtgttgtgtgtagtagcgagggcaggggcgaagaggtggtatggtgtttggatgataaggccaatagtcttgttatgtatcatagcacaacctaccagctgtgtgcaagatacttctgtggcgttccttcacccttgcgggatatgttcccggtgcgaccactagacaccgaaccacccgcggccagccacaccgccaatcctaaagtgccagagggagatagcatagcggatgtctcaattatgtattccgaagagctgggcacacagatactgatccaccaggaatcattaaccgattattgttcgatgtcctcctactcttcatctccacctcggcaggccgcacggtccccctcctccttgcctagttcccccgctagtagctccagtgtgcccttttcaaccgattgtgaagactcagacatgcttcacacacctggagctgcctctgatagaagtgaacatgacctcaccccaatggacggggagaccttcagccaacatctgcaggcggtgaagatcctcgccgtgagagatctcatctgggtacctcgccgtgtggagatgttatcctccttggcatggagacgcatcctggccccaagcggtgcggaatcacttccttcctag

SEQ ID NO: 315181 - DNA, 2025 bp, Artificial Sequence
  derived and/or modified sequence
atgctgcacgccctgcagcacccctgcatcgtggccctgattggcatcagcatccaccccctgtgctttgccctggagctggcccccctgagcagcctgaacacagtgctgtctgaaaatgcccgggacagcagcttcatccccctgggccacatgctgacccagaagatcgcctaccagatcgccagcggcctggcctacctgcacaagaagaacatcatcttctgtgacctgaagagtgacaacatcctggtgtggagcctggatgtgaaggagcacatcaacatcaagctgagtgactatggcatcagccggcagagcttccatgaaggagccctgggcgtggagggcaccccaggctaccaggcccctgagatccggccccgcatcgtgtatgatgagaaggtggacatgttctcctatggcatggtgctgtatgagctgctgagcggccagaggcctgccctgggccaccaccagctgcagatcgccaagaagctgagcaagggcatccggcctgtgctgggccagcctgaggaggtgcagttccggcggctgcaggccctgatgatggagtgctgggacaccaagccagagaagaggcccctggccctgtctgtggtgtcccagatgaaggaccccacctttgccaccttcatgtatgagctgtgctgcggcaagcagacagccttcttcagcagccagggccaggagtacacagtggtgttctgggatggcaaggaggagagcaggaactacacagtggtgaacacagagaagggcctgatggaggtgcagaggatgtgctgccccggcatgaaggtgtcctgccagctgcaggtgcagaggagcctgtggacagccacagaggaccagaagatctacatctacaccctgaagggcatgtgccccctgaacaccccccagcaggccctggacaccccagctgtggtgacctgcttcctggccgtgcctgtgatcaagaagaacagctacctggtgctggccggcctggctgatggcctggtggccgtgtttcctgtggtgcggggcacccccaaggacagctgcagctacctgtgcagccacacagccaacagaagcaagttcagcattgctgatgaagatgcccggcagaacccctaccctgtgaaggccatggaggtggtgaacagcggcagcgaggtgtggtacagcaatggacctggcctgctggtgattgactgtgccagcctggagatctgccggcggctggagccctacatggcccccagcatggtgacctctgtggtgtgcagcagcgagggccgcggggaggaggtggtgtggtgcctggatgacaaggccaacagcctggtgatgtaccacagcaccacctaccagctgtgtgcccgctacttctgtggggtgcccagccccctgcgggacatgtttcctgtgcggcccctggacacagagcccccagctgccagccacacagccaaccccaaggtgcctgagggggacagcattgctgatgtgtccatcatgtacagcgaggagctgggcacccagatcctgatccaccaggagagcctgacagactactgcagcatgagcagctacagcagcagccccccccggcaggccgcccggagccccagcagcctgcccagcagccctgccagcagcagctctgtgcccttcagcacagactgtgaagattctgacatgctgcacaccccaggagctgccagtgacagaagtgaacatgacctgacccccatggatggagagaccttcagccagcacctgcaggccgtgaagatcctggccgtgcgggacctgatctgggtgcccaggagaggaggagatgtgattgtcatcggcctggagaaggacagcggggcccagaggggccgggtgattgctgtgctgaaggcccgggagctgacccctcatggcatcatgcctgtgtcctctgtgaaggtgtgctgggccggctggcctgtgcgggacatggtgtacatggtggccgtgatgtag

SEQ ID NO: 315182 - DNA, 1506 bp, Artificial Sequence
  derived and/or modified sequence
atgttctcctatggcatggtgctgtatgagctgctgagcggccagaggcctgccctgggccaccaccagctgcagatcgccaagaagctgagcaagggcatccggcctgtgctgggccagcctgaggaggtgcagttccggcggctgcaggccctgatgatggagtgctgggacaccaagccagagaagaggcccctggccctgtctgtggtgtcccagatgaaggaccccacctttgccaccttcatgtatgagctgtgctgcggcaagcagacagccttcttcagcagccagggccaggagtacacagtggtgttctgggatggcaaggaggagagcaggaactacacagtggtgaacacagagaagggcctgatggaggtgcagaggatgtgctgccccggcatgaaggtgtcctgccagctgcaggtgcagaggagcctgtggacagccacagaggaccagaagatctacatctacaccctgaagggcatgtgccccctgaacaccccccagcaggccctggacaccccagctgtggtgacctgcttcctggccgtgcctgtgatcaagaagaacagctacctggtgctggccggcctggctgatggcctggtggccgtgtttcctgtggtgcggggcacccccaaggacagctgcagctacctgtgcagccacacagccaacagaagcaagttcagcattgctgatgaagatgcccggcagaacccctaccctgtgaaggccatggaggtggtgaacagcggcagcgaggtgtggtacagcaatggacctggcctgctggtgattgactgtgccagcctggagatctgccggcggctggagccctacatggcccccagcatggtgacctctgtggtgtgcagcagcgagggccgcggggaggaggtggtgtggtgcctggatgacaaggccaacagcctggtgatgtaccacagcaccacctaccagctgtgtgcccgctacttctgtggggtgcccagccccctgcgggacatgtttcctgtgcggcccctggacacagagcccccagctgccagccacacagccaaccccaaggtgcctgagggggacagcattgctgatgtgtccatcatgtacagcgaggagctgggcacccagatcctgatccaccaggagagcctgacagactactgcagcatgagcagctacagcagcagccccccccggcaggccgcccggagccccagcagcctgcccagcagccctgccagcagcagctctgtgcccttcagcacagactgtgaggacagcgacatgctgcacacccctggggccgccagtgacagaagtgaacatgacctgacccccatggatggagagaccttcagccagcacctgcaggccgtgaagatcctggccgtgcgggacctgatctgggtgcccaggagagtggagatgctgagcagcctggcctggaggcgcatcctggcccccagcggggctgagagcctgcccagctag

SEQ ID NO: 315183 - DNA, 3112 bp, Artificial Sequence
  derived and/or modified sequence
cgtcaaggagcacatcaacatcaagctatctgactacgggatttcgaggcagtcattccatgagggcgccctaggcgtggagggcactcctggctaccaggccccagagatcaggcctcgcattgtatatgatgagaaggtagatatgttctcctatggaatggtgctctacgagttgctgtcaggacagcgccctgcactgggccaccaccagctccagattgccaagaagctgtccaagggcatccgcccggttctggggcagccggaggaagtgcagttccggcgactgcaggcgctcatgatggagtgctgggacactaagccagagaagcgaccgctggccctgtcggtggtgagccagatgaaggacccgacttttgccaccttcatgtatgaactgtgctgtgggaagcagacagccttcttctcatcccagggccaggagtacaccgtggtgttttgggatggaaaagaggagtccaggaactacacggtggtgaacacagagaagggcctcatggaggtgcagaggatgtgctgccctgggatgaaggtgagctgccagctccaggtccagagatccctgtggacagccaccgaggaccagaaaatctacatctacaccctcaagggcatgtgccccttaaacacaccccaacaggccttggatactccagctgtcgtcacctgcttcttggccgtgcctgttattaaaaagaattcctacctggtcttagcgggcctcgccgatgggcttgtggctgtgtttcccgtggtgcggggcaccccaaaggacagctgctcctacctgtgctcacacacagccaacaggtccaagttcagcatcgcggatgaagacgcacggcagaacccctacccagtgaaggccatggaggtggtcaacagcggctctgaggtctggtacagcaatgggccgggcctccttgtcatcgactgtgcctccctggagatctgcaggcggctggagccctacatggccccctccatggttacgtcagtcgtgtgcagctctgagggcagaggggaggaggtcgtctggtgcctggatgacaaggccaactccttggtgatgtaccactccaccacctaccagctgtgtgcccggtacttctgcggggtccccagccccctcagggacatgtttcccgtgcggcccttggacacggaacccccggcagccagccacacggccaacccaaaggtgcctgagggggactccatcgcggacgtgagcatcatgtacagtgaggagctgggcacgcagatcctgatccaccaggaatcactcactgactactgctccatgtcctcctactcctcatccccaccccgccaggctgccaggtccccctcaagcctccccagctccccagcaagttcttccagtgtgcctttctccaccgactgcgaggactcagacatgctacatacgcccggtgctgcctccgacaggtctgagcatgacctgacccccatggacggggagaccttcagccagcacctgcaggccgtgaagatcctcgccgtcagagacctcatttgggtccccaggcgcgtggagatgttatcgtcattggcctggagaaggattctggcgcccagcggggccgagtcattgccgtcttaaaagcccgagagctgactccgcatggggtgctggtggatgctgccgtggtggcaaaggacactgttgtgtgcacctttgaaaatgaaaacacagagtggtgcctggccgtctggaggggctggggcgccagggagttcgacattttctaccagtcctacgaggagctgggccggctggaggcttgcactcgcaagagaaggtaattcctgtggaatgactgtcacacatcagagctggctggcccggggctgcagcctgacccctctgccatcggcctctagttctccaaggacctagaagacagatggagttctcccctgaactccttgctgctaagaagtgctgagaagttactcgcctggcggtggctccagggttctctggttctctggagcagagttctctgaataccccatcccccaactgctgattttacagccccagggaagacagtggtatcaggctgggagcggcctcctctggcctcccccatcagtttgcaggagcaggggtgcaggatcctgttctgagctgggtcaaacaaagcagggccgggccttcctgccatccccaggtctcagatggaattacactagaggccctccgctgggaagcacttgaggtagggcaggaggggggctgtgacccctgccctttccccgccagagacctcaggctctcagcacattccacaggctcctgagtccccgaggcctgggccagcttgggcaagccaagatcagatgtctctgtgttcgggaaggtctccgtgtgggaaagcccttgggggatcccgggtgaggagtgttgccccatccagagaatgaatgagttcctttaagtgccaccgccagcaagcccagaggcacacagtccgagtgcacccgcttagcctttacattcctctccaccgacaaaaggaaggggaaactcaatcagcaggacttcagaaagggccttgtgtttatagctttgtcaagtaaatttggacgcagctggagcacaggccctgtttgtttgcacataataatcttgtttatcactttaaaaaattcagtaatatctcagcagtcaggcttctggttgtgaaatcacattgtatgggatttataccaaattatgtatttgctaaacattcactgcacacgtgtacagcggagtacgaaaaggaacgttgtccacaggggatttatggatacaacagcaaacattttataaactatgcacatgcattacacacatgcacacacatatgcacacacatgtgcaaacatagccacttttttgtcaagagttaccctttggggctccttaaaccagaatgggagtttgaaagagagatcatactccagctgaagtttgttgacccttttctaaaattaaaaagatcaaatttagtatttgctggatatgcagggagatgagactcttttaatctcaaaataaacagattctttcaag

SEQ ID NO: 315184 - DNA, 2025 bp, Artificial Sequence
  derived and/or modified sequence
atgctgcacgccctgcagcacccctgcatcgtggccctgatcggcatctcaatacatccattgtgcttcgctttggaactagcccctctctcgtctctaaacactgttctgagtgaaaatgctcgggattcatctttcatccctctgggccacatgctcactcagaaaatagcttaccagatcgcgtctggcctggcataccttcataaaaaaaacattatcttttgtgatctaaagtctgacaacatcctggtttggtccctggacgtgaaggaacatattaacattaagctttcagactatgggatctcgaggcagagctttcatgaaggagccttaggcgtcgagggtacgcctggataccaggctcccgagattcgtccacgaatagtctatgacgagaaggttgatatgttttcctatggcatggtgctttatgagctgctctccggccaacggccagctttgggccatcaccagctgcagatcgccaagaagctcagtaaagggattcgccctgtcttagggcagcctgaagaggtgcaattcaggcggttgcaggcgctcatgatggagtgctgggacaccaagccagagaagcgccctctcgctctctctgtagtgagtcaaatgaaggatcccactttcgctaccttcatgtatgagctttgctgcggcaagcagactgctttcttttcaagccagggccaggagtatacagtggtcttctgggacggaaaggaagagtccagaaactacactgtggtgaataccgaaaaaggcctgatggaggtacagagaatgtgttgcccaggcatgaaggtgagttgtcagctgcaggtacagcggtccctgtggactgcaaccgaagaccagaagatatacatctataccctcaagggcatgtgcccactgaacaccccccagcaggccctggacacccccgccgtcgtgacttgcttccttgcagtgccagtaatcaagaagaactcctatttagtgttagcggggttggccgacggattagtggccgtctttcctgtcgtccggggcaccccgaaggatagttgctcatatctgtgcagccacaccgctaatcgctctaaattttcaatcgccgacgaggatgccagacaaaacccgtatcccgtgaaggcaatggaggttgtcaactccggatccgaagtgtggtacagcaacggcccaggactcctcgtaatcgattgtgcaagtttggagatttgccggcgtctagagccttatatggcgcccagcatggtgacttccgtggtctgcagttctgaggggagaggagaagaagttgtgtggtgcctggacgataaagctaacagcttggttatgtatcattcaaccacatatcagctctgtgcaagatacttttgtggtgtgccgagtcctcttagagatatgttccccgtacgccccctggatacagagcctcccgccgccagccatactgcaaatcctaaagtgcccgagggcgactcaatcgctgacgtcagtataatgtactccgaggagctgggaactcagatacttatccaccaggagtcactgacggactactgctcgatgtcatcatatagctccagccctcctcgccaagcggctagatcgcctagcagtctgcctagttccccagcctcatcctccagcgtaccttttagcactgattgcgaagactccgatatgctgcacacccccggcgccgcatccgataggagcgaacacgacctgacacccatggatggcgagaccttcagccagcacctccaggccgttaagatcctcgcggtgcgcgacctgatttgggtgccgcgccgaggcggcgatgttatcgtgatcggcctggaaaaggactccggcgctcaacggggcagagttatcgcggttcttaaggcaagagagctcactccacacggtattatgccagttagtagcgtcaaagtttgttgggcggggtggcctgtaagagacatggtgtatatggtcgccgtcatgtag

SEQ ID NO: 315185 - DNA, 1506 bp, Artificial Sequence
  derived and/or modified sequence
atgttcagctacggcatggtgctgtacgagctgctgagcggccagcggcccgccttaggtcatcatcagctccaaattgccaagaaactgtcaaaagggattcggccggtgcttggccagcctgaagaagtgcaattcaggaggctgcaggcattaatgatggagtgctgggacactaaaccagagaagagacccctggctttgagcgtcgttagccagatgaaggaccccacgttcgctacctttatgtacgaactttgctgtggaaagcaaactgccttcttcagtagccaggggcaggaatatacagttgtgttctgggatgggaaggaagagtccagaaactacacagtagtaaacaccgagaaaggcttaatggaggtccagagaatgtgctgtccaggtatgaaggttagctgtcagcttcaggtccagcgtagcctgtggactgccactgaagatcaaaaaatatatatatatacgctcaagggtatgtgcccccttaacaccccacagcaggccctcgacacccctgctgtcgtcacatgttttttggccgtccctgttattaagaagaattcgtatcttgtgctggccgggctagccgatggtctggtggcagtttttccggtcgtgcggggcacgccaaaagatagctgttcatacctatgttcccacacagccaataggtcaaaattttctatcgctgatgaagacgccagacagaacccctaccccgtcaaagctatggaagtggtgaacagcggctctgaagtttggtattctaacggacctgggctgctggtgatcgactgcgcttctctcgaaatctgccgccgcttggaaccctacatggccccctcaatggtcacttccgtcgtgtgctctagtgaagggaggggtgaagaggtagtatggtgcttggatgataaggctaactcccttgtgatgtaccatagcaccacgtaccagctctgcgctcgatatttttgtggtgtcccctcccctctgcgtgacatgtttcctgtccgaccactggacaccgaaccccccgctgcctctcatactgcaaaccctaaggtgccagaaggagacagcatcgctgacgtctctatcatgtattccgaagagttgggcactcaaatcctgatacaccaggagagcctgacagattattgttccatgtcttcatatagctcatccccaccgaggcaggctgcccgatcaccttcttctctgcctagttccccagcttccagctcatctgtccccttcagtactgactgtgaggactctgatatgctccacacacccggggccgcctctgatcggagcgaacatgatttaacaccgatggacggcgagacattttctcagcatctccaggcagtgaaaattctcgcggttcgagacttgatctgggtccctaggcgtgttgagatgctgtcttccctggcttggcggcggattcttgccccgtccggtgctgaatcccttcctagttag

SEQ ID NO: 315186 - DNA, 2025 bp, Artificial Sequence
  derived and/or modified sequence
atgcttcacgctctccagcacccatgtattgtcgcactaataggaataagtattcaccccctgtgctttgcactggagttagcaccactctcaagtcttaataccgtgttgtccgagaacgctcgcgattcatcattcatccctctcggccacatgctgacacagaagatcgcataccagatagccagcggcctcgcttatcttcacaaaaagaacatcattttctgcgatctgaaaagcgacaacattctggtgtggtcactggatgtgaaggaacacattaacattaaactgtcagattacgggatttcacgacagagcttccacgagggtgctctgggggtggagggcaccccgggataccaggccccagagatcagacctagaatcgtctatgacgagaaagtggatatgtttagctacgggatggtcctatatgaactgctgagcggacagcgaccagcactgggccaccaccagctccagatagccaagaaattgtcaaagggaatccgcccagttcttgggcagcctgaggaggtgcagtttagacgacttcaagcccttatgatggaatgctgggacactaagccagagaagaggcccctggcactgagcgtagtgtcccagatgaaggatcctactttcgccacttttatgtatgagctgtgctgcggaaaacagactgcatttttctcttcccagggccaggagtataccgtggtgttttgggacggcaaagaagagtcgcgcaactatacggtggtaaataccgaaaagggcctgatggaggtccaaaggatgtgttgccccggaatgaaagtgagctgtcagctccaagtgcagaggtccctttggactgctacagaggaccagaaaatctacatctacacactgaaagggatgtgcccgctcaacactccccagcaagctctcgatacacccgcagtcgtgacttgcttcttggccgtgcctgtgattaaaaaaaacagctatcttgtgcttgcaggtttggccgatgggctcgtggccgttttccccgtggtccggggaacacccaaagacagctgttcatacctgtgtagccataccgcaaaccggagtaaatttagcatagccgatgaggatgcacggcagaacccctaccccgtgaaggccatggaagttgtcaattccggctcagaggtatggtatagcaatggcccaggcctcctggtcattgattgcgcctcacttgaaatctgtcggcgactggagccctacatggcaccaagcatggtcaccagcgttgtttgcagctcagagggacgcggagaggaggtcgtatggtgcctggatgacaaggcaaactctctggtgatgtaccactctaccacataccaactgtgtgcaagatacttttgtggtgtcccctcacccctcagggacatgtttccggtgcgcccactggacactgagccccctgcagccagccacaccgcgaatcctaaggttcccgagggagacagtattgcagacgtgtccattatgtactccgaagagctaggcacccagatcctgattcatcaggagtctctcaccgattactgctctatgtcctcctacagcagctccccgcctaggcaagctgcacgtagcccttcttcattgccaagctctccagcctcatccagtagcgtcccctttagcaccgactgcgaggatagtgacatgctgcatacacctggtgcagcttctgaccgtagcgaacacgatttgacaccaatggacggggagacattctcacaacatttgcaagctgttaagatcctggctgtgagggatttgatttgggtccctaggaggggcggagacgtcatagtcattggcctcgagaaagactcaggtgcacagcggggtagagtgattgctgttctcaaagccagggagctgaccccccatggtattatgccagtctcgtctgtaaaggtatgctgggctggatggcccgttagagacatggtctacatggttgccgttatgtag

SEQ ID NO: 315187 - DNA, 1506 bp, Artificial Sequence
  derived and/or modified sequence
atgttttcctacggtatggtcttatacgagcttctcagcggacagcggccagcattaggacaccatcagctccagatagcgaagaaactcagtaaagggattagaccagtcttgggtcagcccgaggaagtccaatttcgcagacttcaagccttgatgatggagtgttgggacaccaaacctgaaaagcgtcctttggcactgagtgtcgtctctcaaatgaaagaccctacatttgcaacattcatgtacgagctctgctgtggcaagcaaacagccttctttagcagccaggggcaggagtacaccgttgtgttctgggacggcaaagaggagtctcgaaattacaccgtagtcaataccgagaagggtctgatggaggtgcagcggatgtgttgccctggaatgaaggtgtcgtgccagctgcaggtgcagcggagtctgtggaccgcaaccgaagatcagaagatttacatttatactctcaaaggtatgtgccctctcaacacgccacagcaagcgctagatacccccgcagtggtcacctgttttctagccgtgccagtgatcaagaaaaatagttatctcgtgctggctggtttagctgacggacttgtggcagtgttccccgttgtgcggggaacgcctaaagactcttgttcctatctatgctctcacactgctaaccgttctaagttttctatcgccgacgaagacgccaggcagaacccataccccgtgaaggccatggaggtggttaactctggtagtgaggtgtggtacagcaacgggccaggactgctggtgattgactgcgcctcccttgaaatttgcagacgcttagagccttacatggctccttccatggtcacatcagtggtctgttcttcagagggcagaggagaggaggttgtgtggtgcctggacgataaagccaactctctggtaatgtatcactctacgacatatcagctgtgtgctaggtatttttgcggagtgcctagccctttgcgggacatgtttcctgtgaggccactggacactgagcctcccgcagcctcccacaccgcaaatcctaaagtcccagaaggcgattcaatcgcggacgtttcgataatgtactctgaggaactggggacacaaattctgattcaccaggaatcgcttactgactactgctccatgtctagctattccagttcacctccaaggcaggctgcccgaagtccgtccagcctgccaagctctccagcatcctccagtagcgtcccatttagtacagactgcgaggattcagacatgctgcatacaccaggcgcagcttccgatcggagcgagcatgacctgacaccaatggatggcgagacattcagccagcatctacaggctgtaaaaatcctggctgtgcgcgacttaatttgggtaccgcgtagggtcgagatgctctcatcactggcctggcggaggatactggccccaagtggggcagaaagcctgccctcatag

SEQ ID NO: 315188 - DNA, 2025 bp, Artificial Sequence
  derived and/or modified sequence
atgctgcacgccctgcagcacccctgcatcgtggccctgatcggcatcagcatccaccccctgtgcttcgccctggagctggcccccctgagcagcctgaacaccgtgctgagcgagaacgccagagacagcagcttcatccccctgggccacatgctgacccagaagatcgcctaccagatcgccagcggcctggcctacctgcacaagaagaacatcatcttctgcgacctgaagagcgacaacatcctggtgtggagcctggacgtgaaggagcacatcaacatcaagctgagcgactacggcatcagcagacagagcttccacgagggcgccctgggcgtggagggcacccccggctaccaggcccccgagatcagacccagaatcgtgtacgacgagaaggtggacatgttcagctacggcatggtgctgtacgagctgctgagcggccagagacccgccctgggccaccaccagctgcagatcgccaagaagctgagcaagggcatcagacccgtgctgggccagcccgaggaggtgcagttcagaagactgcaggccctgatgatggagtgctgggacaccaagcccgagaagagacccctggccctgagcgtggtgagccagatgaaggaccccaccttcgccaccttcatgtacgagctgtgctgcggcaagcagaccgccttcttcagcagccagggccaggagtacaccgtggtgttctgggacggcaaggaggagagcagaaactacaccgtggtgaacaccgagaagggcctgatggaggtgcagagaatgtgctgccccggcatgaaggtgagctgccagctgcaggtgcagagaagcctgtggaccgccaccgaggaccagaagatctacatctacaccctgaagggcatgtgccccctgaacaccccccagcaggccctggacacccccgccgtggtgacctgcttcctggccgtgcccgtgatcaagaagaacagctacctggtgctggccggcctggccgacggcctggtggccgtgttccccgtggtgagaggcacccccaaggacagctgcagctacctgtgcagccacaccgccaacagaagcaagttcagcatcgccgacgaggacgccagacagaacccctaccccgtgaaggccatggaggtggtgaacagcggcagcgaggtgtggtacagcaacggccccggcctgctggtgatcgactgcgccagcctggagatctgcagaagactggagccctacatggcccccagcatggtgaccagcgtggtgtgcagcagcgagggcagaggcgaggaggtggtgtggtgcctggacgacaaggccaacagcctggtgatgtaccacagcaccacctaccagctgtgcgccagatacttctgcggcgtgcccagccccctgagagacatgttccccgtgagacccctggacaccgagccccccgccgccagccacaccgccaaccccaaggtgcccgagggcgacagcatcgccgacgtgagcatcatgtacagcgaggagctgggcacccagatcctgatccaccaggagagcctgaccgactactgcagcatgagcagctacagcagcagcccccccagacaggccgccagaagccccagcagcctgcccagcagccccgccagcagcagcagcgtgcccttcagcaccgactgcgaggacagcgacatgctgcacacccccggcgccgccagcgacagaagcgagcacgacctgacccccatggacggcgagaccttcagccagcacctgcaggccgtgaagatcctggccgtgagagacctgatctgggtgcccagaagaggcggcgacgtgatcgtgatcggcctggagaaggacagcggcgcccagagaggcagagtgatcgccgtgctgaaggccagagagctgaccccccacggcatcatgcccgtgagcagcgtgaaggtgtgctgggccggctggcccgtgagagacatggtgtacatggtggccgtgatgtag

SEQ ID NO: 315189 - DNA, 1506 bp, Artificial Sequence
  derived and/or modified sequence
atgttcagctacggcatggtgctgtacgagctgctgagcggccagagacccgccctgggccaccaccagctgcagatcgccaagaagctgagcaagggcatcagacccgtgctgggccagcccgaggaggtgcagttcagaagactgcaggccctgatgatggagtgctgggacaccaagcccgagaagagacccctggccctgagcgtggtgagccagatgaaggaccccaccttcgccaccttcatgtacgagctgtgctgcggcaagcagaccgccttcttcagcagccagggccaggagtacaccgtggtgttctgggacggcaaggaggagagcagaaactacaccgtggtgaacaccgagaagggcctgatggaggtgcagagaatgtgctgccccggcatgaaggtgagctgccagctgcaggtgcagagaagcctgtggaccgccaccgaggaccagaagatctacatctacaccctgaagggcatgtgccccctgaacaccccccagcaggccctggacacccccgccgtggtgacctgcttcctggccgtgcccgtgatcaagaagaacagctacctggtgctggccggcctggccgacggcctggtggccgtgttccccgtggtgagaggcacccccaaggacagctgcagctacctgtgcagccacaccgccaacagaagcaagttcagcatcgccgacgaggacgccagacagaacccctaccccgtgaaggccatggaggtggtgaacagcggcagcgaggtgtggtacagcaacggccccggcctgctggtgatcgactgcgccagcctggagatctgcagaagactggagccctacatggcccccagcatggtgaccagcgtggtgtgcagcagcgagggcagaggcgaggaggtggtgtggtgcctggacgacaaggccaacagcctggtgatgtaccacagcaccacctaccagctgtgcgccagatacttctgcggcgtgcccagccccctgagagacatgttccccgtgagacccctggacaccgagccccccgccgccagccacaccgccaaccccaaggtgcccgagggcgacagcatcgccgacgtgagcatcatgtacagcgaggagctgggcacccagatcctgatccaccaggagagcctgaccgactactgcagcatgagcagctacagcagcagcccccccagacaggccgccagaagccccagcagcctgcccagcagccccgccagcagcagcagcgtgcccttcagcaccgactgcgaggacagcgacatgctgcacacccccggcgccgccagcgacagaagcgagcacgacctgacccccatggacggcgagaccttcagccagcacctgcaggccgtgaagatcctggccgtgagagacctgatctgggtgcccagaagagtggagatgctgagcagcctggcctggagaagaatcctggcccccagcggcgccgagagcctgcccagctag

SEQ ID NO: 315190 - protein, 32 aa, Artificial Sequence
  derived and/or modified sequence
MAGMSQRPPSMYWCVGPEESAVCPERAMETLN

SEQ ID NO: 315191 - DNA, 569 bp, Artificial Sequence
  derived and/or modified sequence
gcgtctgggcccggccccggcgcggggggcagacggcggtgggacggccaggccccggccccgccagtgtgtccgcccggccccgcgtcccggagcgcccgcacccggccccgccgccgcctcaggtggtctctggctggcgcagatacaactgctctgtctaccatggtctctgcaagctacaggggaccttcctggcaggcagggacgcgggaaggaagcctaggaaggccggggtcagcgaggagacgctggtggagaatctgagaacccccgtggccatctcaacctaccccttcacagtatgaggccgcgaagtttttctcccacgaacacttcccctgcaacagagcaagaaagctttctgctcagccatggctacgagtccacgccttaatgcaccccacagccagcggcagtggcagtgacaacagcgggacctgcctttgaagatcggctgctgcaagggttgatggctggcatgtcgcaaagaccccccagcatgtactggtgtgtggggccggaggagtcagctgtgtgtccagaacgtgccatggagacgcttaacg

SEQ ID NO: 315192 - DNA, 4147 bp, Artificial Sequence
  derived and/or modified sequence
gcggccgccgaggcctgggtggaagttggcgctgctgccgccgccctgcagcccactcgctgcctcggcagcgcgctgctcttctaagatggctgccgctaccggtgcggtggcagcctcggccgcctcgggtcaggcggaaggtaaaaagatcaccgatctgcgggtcatcgatctgaagtccgagctgaagcggcggaacttagacatcaccggagtcaagaccgtgctcatctcccgactcaagcaggctattgaagaggaaggaggcgatccagataatattgaattaactgtttcaactgatactccaaacaagaaaccaactaaaggcaaaggtaaaaaacatgaagcagatgagttgagtggagatgcttctgtggaagatgatgcttttatcaaggactgtgaattggagaatcaagaggcacatgagcaagatggaaatgatgaactaaaggactctgaagaatttggtgaaaatgaagaagaaaatgtgcattccaaggagttactctctgcagaagaaaacaagagagctcatgaattaatagaggcagaaggaatagaagatatagaaaaagaggacatcgaaagtcaggaaattgaagctcaagaaggtgaagatgatacctttctaacagcccaagatggtgaggaagaagaaaatgagaaagatatagcaggttctggtgatggtacacaagaagtatctaaacctcttccttcagaagggagcctagctgaggctgatcacacagctcatgaagagatggaagctcatacgactgtgaaagaagctgaggatgacaacatctcggtcacaatccaggctgaagatgccatcactctggattttgatggtgatgacctcctagaaacaggtaaaaatgtgaaaattacagattctgaagcaagtaagccaaaagatgggcaggacgccattgcacagagcccggagaaggaaagcaaggattatgagatgaatgcgaaccataaagatggtaagaaggaagactgcgtgaagggtgaccctgtcgagaaggaagccagagaaagttctaagaaagcagaatctggagacaaagaaaaggatactttgaagaaagggccctcgtctactggggcctctggtcaagcaaagagctcttcaaaggaatctaaagacagcaagacatcatctaaagatgacaaaggaagtacaagtagtactagtggtagcagtggaagctcaactaaaaatatctgggttagtggactttcatctaataccaaagctgctgatttgaagaacctctttggcaaatatggaaaggttctgagtgcaaaagtagttacaaatgctcgaagtcctggggcaaaatgctatggcattgtaactatgtcttcaagcacagaggtgtccaggtgtattgcacatcttcatcgcactgagctgcatggacagctgatttctgttgaaaaagtaaaaggtgatccctctaagaaagaaatgaagaaagaaaatgatgaaaagagtagttcaagaagttctggagataaaaaaaatacgagtgatagaagtagcaagacacaagcctctgtcaaaaaagaagagaaaagatcgtctgagaaatctgaaaaaaaagaaagcaaggatactaagaaaatagaaggtaaagatgagaagaatgataatggagcaagtggccaaacatcagaatcgattaaaaaaagtgaagaaaagaagcgaataagttccaagagtccaggacatatggtaatactagaccaaactaaaggagatcattgtagaccatcaagaagaggaagatatgagaaaattcatggaagaagtaaggaaaaggagagagctagtctagataaaaaaagagataaagactacagaaggaaagagatcttgccttttgaaaagatgaaggaacaaaggttgagagaacatttagttcgttttgaaaggctgcgacgagcaatggaacttcgaagacgaagagagattgcagagagagagcgtcgagagcgagaacgcattagaataattcgtgaacgggaagaacgggaacgcttacagagagagagagagcgcctagaaattgaaaggcaaaaactagagagagagagaatggaacgcgaacgcttggaaagggaacgcattcgtattgaacaggaacgtcgtaaggaagctgaacggattgctcgagaaagagaggaactcagaaggcaacaacagcagcttcgttatgaacaagaaaaaaggaattccttgaaacgcccacgtgatgtagatcataggcgagatgatccttactggagcgagaataaaaagttgtctctagatacagatgcacgatttggccatggatccgactactctcgccaacagaacagatttaatgactttgatcaccgagagaggggcaggtttcctgagagttcagcagtacagtcttcatcttttgaaaggcgggatcgctttgttggtcaaagtgaggggaaaaaagcacgacctactgcacgaagggaagatccaagcttcgaaagatatcccaaaaatttcagtgactccagaagaaatgagcctccaccaccaagaaatgaacttagagaatcagacaggcgagaagtacgaggggagcgagacgaaaggagaacggtgattattcatgacaggcctgatatcactcatcctagacatcctcgagaggcagggcccaatccttccagacccaccagctggaaaagtgaaggaagcatgtccactgacaaacgggaaacaagagttgaaaggccagaacgatctgggagagaagtatcagggcacagtgtgagaggcgctccccctgggaatcgtagcagcgcttcggggtacgggagcagagagggagacagaggagtcatcacagaccgaggaggtggatcacagcactatcctgaggagcgacatgtggttgaacgccatggacgggacacaagcggaccaaggaaagagtggcatggtccaccctctcaagggcctagctatcatgatacgaggcgaatgggtgacggccgggcaggagcaggcatgataacccaacattcaagtaacgcatccccaattaatagaattgtacaaatcagtggcaattccatgccaagaggaagtggctccggatttaagccatttaagggtggacctccgcgacgattctgaaaatgagctctctgccaaggttttaagataatttattgaaatctcctgtaaactttacttgactacttatgaagaggacctctgacttgcttgagagttctgtcagacttttctttttaaaaatttaacatgattgcttttctcaattttggagaagatgtttaaatagttctgttgtaacttttaatagttttgtgtatcattcaactttttttcttgcagcaccgaggcacatttgaaaagatggaattgaagtcgttttgtttaacgctgtgtgaatataaagagtagtttgcagctgtgtggtagtggtttaatttgcagccttagctctgtggtgtctggctctagagttacttctttttaccaagcattttcagcctccattttgaaggctgtctacacttaagaagtcttagctgtctaatttttagagaataagattgttcattgcatttctgagtattatgtaacctatttttgcagaaggtactgttacattaagtgcatctgtgtatcctggtttaaaaaaatgtaatcttttttgaaataaaccttcatattctgtatagttgctaaagtgttgagaacctttttaattgtaaaatgagaaccgattttcagtttagtgtagcagcacacttgttcaggtttgcatggtatgaaaccaaatagattcatgaaaccttggccatgaggtttgtttcacaaggttcttagaccgagttgtgcaggtaagtgcacttttaggtaatctgcactgtttgtttgatggataaattccatctctgggaattgtgtgggtattaatgtttccatgttcccaactatgttgagaagtggaaaaaaacccaggttctagatgggtgaatcagttgggttttgtaaatacttgtatgtggggaagacattgttgtctttttgtgaaaataaaaatccacacctggaagtgta

SEQ ID NO: 315193 - DNA, 162 bp, Artificial Sequence
  derived and/or modified sequence
atgttctgcagcgagaagaagctgagagaggtggagagaatcgtgaaggccaacgacagagagtacaacgagaagttccagtacgccgacaacagaatccacaccagcaagtacaacatcctgaccttcctgcccatcaacctgttcgagcagttccagtag

SEQ ID NO: 315194 - DNA, 162 bp, Artificial Sequence
  derived and/or modified sequence
atgttttgcagtgagaagaaactgcgggaggtcgagcggatcgtcaaagccaatgaccgggagtacaacgagaagttccagtatgccgacaatcgtatccacacctctaagtacaacatcctaacattccttccgatcaacttatttgagcagttccagtag

SEQ ID NO: 315195 - DNA, 162 bp, Artificial Sequence
  derived and/or modified sequence
atgttctgcagcgagaagaagctgcgggaggtggagcgcatcgtgaaggccaatgaccgggagtacaatgagaagttccagtatgctgacaaccgcatccacaccagcaagtacaacatcctgaccttcctgcccatcaacctgtttgagcagttccagtag

SEQ ID NO: 315196 - DNA, 162 bp, Artificial Sequence
  derived and/or modified sequence
atgttctgcagcgagaagaagctgcgggaggtggagcggatcgtgaaagccaatgaccgcgagtataacgaaaaattccaatatgctgataaccgcatacacacaagcaagtataatatcctaacctttctgcctattaacttgttcgagcagtttcagtag

SEQ ID NO: 315197 - DNA, 162 bp, Artificial Sequence
  derived and/or modified sequence
atgttctgctctgaaaagaagctccgcgaggtggagcgtattgtaaaggccaatgacagggagtataatgagaagtttcagtacgcagataataggattcatacaagcaagtacaacatcctgacgttcctgcccatcaacctattcgaacagtttcaatag

SEQ ID NO: 315198 - protein, 53 aa, Artificial Sequence
  derived and/or modified sequence
MFCSEKKLREVERIVKANDREYNEKFQYADNRIHTSKYNILTFLPINLFEQFQ

SEQ ID NO: 315199 - DNA, 69 bp, Artificial Sequence
  derived and/or modified sequence
atgagagtgttcctgctgtgcgcctacatcctgctgctgatggtgagccagctgagagccgtgagctag

SEQ ID NO: 315200 - DNA, 69 bp, Artificial Sequence
  derived and/or modified sequence
atgagggtattcctcctgtgcgcctacatcctactgctgatggtctcacaactcagagccgtgtcctag

SEQ ID NO: 315201 - DNA, 69 bp, Artificial Sequence
  derived and/or modified sequence
atgagggtcttcctgctgtgtgcctacatcctgctgctgatggtgtcccagctgcgggctgtgtcctag

SEQ ID NO: 315202 - DNA, 69 bp, Artificial Sequence
  derived and/or modified sequence
atgcgggtgttcctgctgtgcgcctacatcctgctgctgatggtgtcacagcttagagcagtgagctag

SEQ ID NO: 315203 - DNA, 69 bp, Artificial Sequence
  derived and/or modified sequence
atgcgggtgttcttgctttgcgcttatattttactcctgatggtgtcacagctaagagctgtgagctag

SEQ ID NO: 315204 - protein, 1030 aa, Artificial Sequence
  derived and/or modified sequence
MRVFLLCAYILLLMVSQLRAVSFPEDDEPLNTVDYHYSRQYPVFRGRPSGNESQHRLDFQLMLKIRDTLYIAGRDQVYTVNLNEMPKTEVIPNKKLTWRSRQQDRENCAMKGKHKDECHNFIKVFVPRNDEMVFVCGTNAFNPMCRYYRLSTLEYDGEEISGLARCPFDARQTNVALFADGKLYSATVADFLASDAVIYRSMGDGSALRTIKYDSKWIKEPHFLHAIEYGNYVYFFFREIAVEHNNLGKAVYSRVARICKNDMGGSQRVLEKHWTSFLKARLNCSVPGDSFFYFDVLQSITDIIQINGIPTVVGVFTTQLNSIPGSAVCAFSMDDIEKVFKGRFKEQKTPDSVWTAVPEDKVPKPRPGCCAKHGLAEAYKTSIDFPDETLSFIKSHPLMDSAVPPIADEPWFTKTRVRYRLTAISVDHSAGPYQNYTVIFVGSEAGMVLKVLAKTSPFSLNDSVLLEEIEAYNHAKCSAENEEDKKVISLQLDKDHHALYVAFSSCIIRIPLSRCERYGSCKKSCIASRDPYCGWLSQGSCGRVTPGMLLLTEDFFAFHNHSAEGYEQDTEFGNTAHLGDCHEILPTSTTPDYKIFGGPTSGVRWEVQSGESNQMVHMNVLITCVFAAFVLGAFIAGVAVYCYRDMFVRKNRKIHKDAESAQSCTDSSGSFAKLNGLFDSPVKEYQQNIDSPKLYSNLLTSRKELPPNGDTKSMVMDHRGQPPELAALPTPESTPVLHQKTLQAMKSHSEKAHGHGASRKETPQFFPSSPPPHSPLSHGHIPSAIVLPNATHDYNTSFSNSNAHKAEKKLQNIDHPLTKSSSKRDHRRSVDSRNTLNDLLKHLNDPNSNPKAIMGDIQMAHQNLMLDPMGSMSEVPPKVPNREASLYSPPSTLPRNSPTKRVDVPTTPGVPMTSLERQRGYHKNSSQRHSISAMPKNLNSPNGVLLSRQPSMNRGGYMPTPTGAKVDYIQGTPVSVHLQPSLSRQSSYTSNGTLPRTGLKRTPSLKPDVPPKPSFVPQTPSVRPLNKYTY

SEQ ID NO: 315205 - DNA, 3093 bp, Artificial Sequence
  derived and/or modified sequence
atgagagtgttcctgctgtgcgcctacatcctgctgctgatggtgagccagctgagagccgtgagcttccccgaggacgacgagcccctgaacaccgtggactaccactacagcagacagtaccccgtgttcagaggcagacccagcggcaacgagagccagcacagactggacttccagctgatgctgaagatcagagacaccctgtacatcgccggcagagaccaggtgtacaccgtgaacctgaacgagatgcccaagaccgaggtgatccccaacaagaagctgacctggagaagcagacagcaggacagagagaactgcgccatgaagggcaagcacaaggacgagtgccacaacttcatcaaggtgttcgtgcccagaaacgacgagatggtgttcgtgtgcggcaccaacgccttcaaccccatgtgcagatactacagactgagcaccctggagtacgacggcgaggagatcagcggcctggccagatgccccttcgacgccagacagaccaacgtggccctgttcgccgacggcaagctgtacagcgccaccgtggccgacttcctggccagcgacgccgtgatctacagaagcatgggcgacggcagcgccctgagaaccatcaagtacgacagcaagtggatcaaggagccccacttcctgcacgccatcgagtacggcaactacgtgtacttcttcttcagagagatcgccgtggagcacaacaacctgggcaaggccgtgtacagcagagtggccagaatctgcaagaacgacatgggcggcagccagagagtgctggagaagcactggaccagcttcctgaaggccagactgaactgcagcgtgcccggcgacagcttcttctacttcgacgtgctgcagagcatcaccgacatcatccagatcaacggcatccccaccgtggtgggcgtgttcaccacccagctgaacagcatccccggcagcgccgtgtgcgccttcagcatggacgacatcgagaaggtgttcaagggcagattcaaggagcagaagacccccgacagcgtgtggaccgccgtgcccgaggacaaggtgcccaagcccagacccggctgctgcgccaagcacggcctggccgaggcctacaagaccagcatcgacttccccgacgagaccctgagcttcatcaagagccaccccctgatggacagcgccgtgccccccatcgccgacgagccctggttcaccaagaccagagtgagatacagactgaccgccatcagcgtggaccacagcgccggcccctaccagaactacaccgtgatcttcgtgggcagcgaggccggcatggtgctgaaggtgctggccaagaccagccccttcagcctgaacgacagcgtgctgctggaggagatcgaggcctacaaccacgccaagtgcagcgccgagaacgaggaggacaagaaggtgatcagcctgcagctggacaaggaccaccacgccctgtacgtggccttcagcagctgcatcatcagaatccccctgagcagatgcgagagatacggcagctgcaagaagagctgcatcgccagcagagacccctactgcggctggctgagccagggcagctgcggcagagtgacccccggcatgctgctgctgaccgaggacttcttcgccttccacaaccacagcgccgagggctacgagcaggacaccgagttcggcaacaccgcccacctgggcgactgccacgagatcctgcccaccagcaccacccccgactacaagatcttcggcggccccaccagcggcgtgagatgggaggtgcagagcggcgagagcaaccagatggtgcacatgaacgtgctgatcacctgcgtgttcgccgccttcgtgctgggcgccttcatcgccggcgtggccgtgtactgctacagagacatgttcgtgagaaagaacagaaagatccacaaggacgccgagagcgcccagagctgcaccgacagcagcggcagcttcgccaagctgaacggcctgttcgacagccccgtgaaggagtaccagcagaacatcgacagccccaagctgtacagcaacctgctgaccagcagaaaggagctgccccccaacggcgacaccaagagcatggtgatggaccacagaggccagccccccgagctggccgccctgcccacccccgagagcacccccgtgctgcaccagaagaccctgcaggccatgaagagccacagcgagaaggcccacggccacggcgccagcagaaaggagaccccccagttcttccccagcagcccccccccccacagccccctgagccacggccacatccccagcgccatcgtgctgcccaacgccacccacgactacaacaccagcttcagcaacagcaacgcccacaaggccgagaagaagctgcagaacatcgaccaccccctgaccaagagcagcagcaagagagaccacagaagaagcgtggacagcagaaacaccctgaacgacctgctgaagcacctgaacgaccccaacagcaaccccaaggccatcatgggcgacatccagatggcccaccagaacctgatgctggaccccatgggcagcatgagcgaggtgccccccaaggtgcccaacagagaggccagcctgtacagcccccccagcaccctgcccagaaacagccccaccaagagagtggacgtgcccaccacccccggcgtgcccatgaccagcctggagagacagagaggctaccacaagaacagcagccagagacacagcatcagcgccatgcccaagaacctgaacagccccaacggcgtgctgctgagcagacagcccagcatgaacagaggcggctacatgcccacccccaccggcgccaaggtggactacatccagggcacccccgtgagcgtgcacctgcagcccagcctgagcagacagagcagctacaccagcaacggcaccctgcccagaaccggcctgaagagaacccccagcctgaagcccgacgtgccccccaagcccagcttcgtgccccagacccccagcgtgagacccctgaacaagtacacctactag

SEQ ID NO: 315206 - DNA, 3093 bp, Artificial Sequence
  derived and/or modified sequence
atgcgtgttttcctgttgtgcgcatacatcctgctgctgatggtcagccagcttcgggcagtgtcttttccagaggatgatgaacctctgaatactgttgactaccactattctagacagtaccccgtgttccgcggaagaccttcggggaatgaatctcagcaccggctggacttccaactaatgttaaaaatacgggacacactgtatatcgcgggaagggatcaggtctatactgtcaacctgaacgagatgcctaagacagaagtgatccccaataagaagctaacctggcggtcccggcaacaggacagagaaaactgcgcaatgaagggcaagcacaaggacgagtgccataacttcatcaaagtgttcgtcccaagaaacgatgagatggtatttgtctgcggtacaaacgcattcaatcctatgtgcaggtattaccgcttatcaactctggaatacgacggcgaggagatcagtggtctcgcccgctgccctttcgatgcgaggcagactaacgtcgcgctctttgcagacggcaaactctattccgctaccgtggcagactttctggcttcagatgcagtgatctaccgttcaatgggagatggctctgcactgcggaccatcaagtacgactctaagtggataaaagaaccacatttcctccacgccattgagtacgggaattatgtgtacttctttttcagagaaattgccgttgagcacaataatcttggaaaagcggtgtacagccgagtggcccgcatctgcaagaatgatatgggggggagccagcgggtgcttgaaaagcattggacatcctttctgaaggccaggctaaactgctcggtacccggggattcttttttttactttgacgtcctgcagtcgattaccgacattatacagatcaatggaatccccaccgtggttggagtgtttactacgcaactgaattccatccccggctcggcggtctgcgctttctccatggacgacattgaaaaagtgttcaagggtaggttcaaagagcagaagaccccagatagcgtctggacggctgtccccgaggacaaggtacctaagcctagacccggctgttgcgcaaagcacggactcgccgaggcttacaaaacttctattgattttcccgacgagacattatctttcatcaaatcccacccgctaatggactccgctgtaccgcccatcgctgatgaaccgtggtttactaagactagagtccggtacagactcacagcaatcagcgtcgaccacagcgcagggccgtaccagaactacacagtgatcttcgtcgggtcggaggccgggatggtcctaaaagtcttagcaaagacctcaccgttttccctgaacgactcagtgctgcttgaagagattgaagcttacaaccatgccaagtgcagtgccgagaatgaggaggacaaaaaagtcatttctctgcagcttgataaggatcaccatgctctctatgtggcgtttagttcctgtatcattcgcatacctctatcgcgttgtgagaggtacggatcgtgtaagaaatcttgtatcgctagccgtgatccatactgcgggtggctgtcccaagggagctgtggacgggtaacacctgggatgttgctcctgactgaagacttcttcgcctttcataatcacagcgcagagggctatgagcaggacaccgaattcggcaacactgctcacctcggggactgtcacgagattctaccaacatcaacgaccccggattacaagattttcggcggcccaacgtccggcgtccggtgggaagtgcagtccggcgaatctaaccagatggtccatatgaacgttttaatcacctgcgtattcgccgcattcgtgctgggagccttcatcgcaggggtggcggtctattgctatcgggatatgttcgtgcgtaagaacaggaagattcacaaggacgcagaaagcgcacagagctgcactgacagtagtggatcttttgcaaagctgaacggactctttgactcaccggttaaggagtatcagcagaatatcgactccccgaaactgtacagcaacctcttgaccagtcggaaagagcttccaccaaatggcgacacgaagagcatggtgatggaccatcgaggtcagccgcccgaactcgctgcactccccacgcccgagtccactcccgtgttgcaccagaaaacactacaggccatgaagtcccacagtgagaaggcgcacgggcacggagccagtaggaaggaaactccccagttcttcccctcaagtcctccgccacactctcccctttcacacgggcacattcccagcgcaattgttctcccaaatgctacacacgactataatacgagcttctctaattcgaacgcccacaaggcggagaagaagctgcaaaacattgaccatccacttacaaagagctccagtaagcgcgaccatcgacgctctgtggactctcggaatactcttaatgatctattgaagcatcttaacgatcctaactcaaaccctaaggccataatgggtgatatccagatggcccatcagaatctaatgttagatcccatggggtctatgagcgaggttccccctaaggtacctaatagggaggctagcttgtattcacccccatccactctcccgagaaatagtcctaccaaacgtgtggacgtccccaccacccctggggtgcccatgaccagcctggagaggcaacgaggctatcacaagaattccagccagaggcattcaatctctgcaatgcctaagaacctcaacagtccaaacggtgtgctgctgagcagacagccgtccatgaacagggggggatacatgcccacccccaccggggccaaggtggactacattcaaggcacacccgtgagtgtgcatttacagccatccttgtctcgtcagtccagctatacatcaaatggcactctcccccgaacaggccttaagagaacgcctagtctcaaacccgacgttccccccaagccgagctttgtgccacagacaccttctgttagacccctgaataagtacacatattag

SEQ ID NO: 315207 - DNA, 3093 bp, Artificial Sequence
  derived and/or modified sequence
atgagggtcttcctgctgtgtgcctacatcctgctgctgatggtgtcccagctgcgggctgtgtccttcccagaagatgatgagcccctgaacacagtggactaccactacagccggcagtaccctgtgttccggggccggcccagcggaaatgaaagccagcaccggctggacttccagctgatgctgaagatccgggacaccctgtacatcgccggccgggaccaggtgtacacagtgaacctgaatgagatgcccaagacagaggtgatccccaacaagaagctgacctggaggagccggcagcaggaccgggagaactgtgccatgaagggcaagcacaaggatgagtgccacaacttcatcaaggtgtttgtgcccagaaatgatgagatggtgtttgtgtgtggcaccaatgccttcaaccccatgtgccgctactaccgcctgagcaccctggagtatgatggagaggagatcagcggcctggcccgctgcccctttgatgcccggcagaccaacgtggccctgtttgctgatggcaagctgtacagcgccaccgtggccgacttcctggccagtgatgctgtgatctaccgctccatgggagatggcagcgccctgcggaccatcaagtatgacagcaagtggatcaaggagccccacttcctgcacgccattgaatatggcaactacgtgtacttcttcttccgggagattgctgtggagcacaacaacctgggcaaggctgtgtacagccgggtggcccgcatctgcaagaatgacatgggcggcagccagagggtgctggagaagcactggaccagcttcctgaaggcccggctgaactgcagcgtgcctggggacagcttcttctactttgatgtgctgcagagcatcacagacatcatccagatcaatggcatccccaccgtggtgggcgtcttcaccacccagctgaacagcatccctggcagcgctgtgtgtgccttctccatggatgacatcgagaaggtgttcaagggccgcttcaaggagcagaagaccccagacagcgtgtggacagctgtgcctgaggacaaggtgcccaagcccaggcctggctgctgtgccaagcacggcctggccgaggcctacaagaccagcattgacttcccagatgagaccctgtccttcatcaagagccaccccctgatggattctgctgtgccccccatcgcagatgagccctggttcaccaagaccagggtgcgctaccgcctgacagccatctctgtggaccacagcgctggcccctaccagaactacaccgtcatctttgtgggcagcgaggccggcatggtgctgaaggtgctggccaagaccagccccttcagcctgaatgattctgtgctgctggaggagattgaggcctacaaccacgccaagtgcagcgcagaaaatgaggaggacaagaaggtgatcagcctgcagctggacaaggaccaccacgccctgtatgtggccttcagcagctgcatcatccgcatccccctgagccgctgtgaaagatatggcagctgcaagaagagctgcatcgccagccgggacccctactgcggctggctgagccagggcagctgtggccgggtgaccccaggcatgctgctgctgacagaggacttctttgccttccacaaccacagcgctgagggctatgagcaggacacagaatttggaaacacagcccacctgggggactgccacgagatcctgcccaccagcaccaccccagactacaagatctttggaggccccaccagcggcgtgcgctgggaggtgcagagcggggagagcaaccagatggtgcacatgaatgtgctgatcacctgtgtgtttgctgcctttgtgctgggcgccttcatcgccggcgtggccgtgtactgctacagagacatgtttgtgaggaagaacaggaagatccacaaggatgctgagagcgcccagagctgcacagacagcagcggcagctttgccaagctgaatggcctgtttgacagccctgtgaaggagtaccagcagaacatcgacagccccaagctgtacagcaacctgctgaccagcaggaaggagctgccccccaacggggacaccaagtccatggtgatggaccaccggggccagcccccagagctggccgccctgcccaccccagagagcacccctgtgctgcaccagaagaccctgcaggccatgaagagccacagcgagaaggcccacggccatggagccagcaggaaggagaccccccagttcttccccagcagccccccaccccacagccccctgagccacggccacatccccagcgccatcgtgctgcccaatgccacccatgactacaacaccagcttcagcaacagcaatgcccacaaggccgagaagaagctgcagaacatcgaccaccccctgaccaagagcagcagcaagagggaccacagaagatctgtggacagcaggaacaccctgaatgacctgctgaagcacctgaatgaccccaacagcaaccccaaggccatcatgggagacatccagatggcccaccagaacctgatgctggaccccatgggctccatgtctgaggtgccccccaaggtgcccaaccgggaggccagcctgtacagcccccccagcaccctgcccaggaacagccccaccaagagggtggatgtgcccaccaccccaggagtgcccatgaccagcctggagcggcagaggggctaccacaagaacagcagccagaggcacagcatcagcgccatgcccaagaacctgaacagccccaacggggtgctgctgagccggcagcccagcatgaacagaggaggctacatgcccacccccaccggggccaaggtggactacatccagggcacccctgtgtctgtgcacctgcagcccagcctgagccggcagagcagctacaccagcaatggcaccctgcccaggacaggcctgaagaggacccccagcctgaagccagatgtgccccccaagcccagctttgtgccccagaccccatctgtgcggcccctgaacaagtacacctactag

SEQ ID NO: 315208 - DNA, 3093 bp, Artificial Sequence
  derived and/or modified sequence
atgcgggtgttcctgctgtgcgcctacatcctgctgctgatggtgagccagctccgtgccgtcagttttccggaagatgatgagcccctgaacaccgtggattaccattactctaggcagtatcccgtgttcagaggccgtccttcagggaatgagagtcaacatcggcttgacttccagcttatgctgaagattagagacacactgtatatcgctggcagagaccaggtctatactgtaaatcttaatgagatgccaaaaaccgaagttatccctaacaaaaaattaacctggcgctcccggcagcaagaccgggagaattgcgctatgaaaggcaagcataaagatgaatgccacaacttcatcaaagtcttcgtacctcgcaatgacgaaatggtgtttgtctgcgggaccaacgccttcaaccccatgtgtcggtactaccggctgtcaacactggaatacgatggagaagagatcagcggcctcgcccggtgtcccttcgatgctcggcaaaccaatgtggctttgttcgccgacgggaaactgtactcagcaaccgtggccgactttctcgcttccgacgctgtcatctatagaagcatgggagatggcagcgcactcagaacaattaaatacgattcgaagtggatcaaggaaccacattttttgcacgcaatcgaatatggcaattacgtctacttcttctttagggaaatcgctgttgagcataataacctgggtaaggccgtgtatagtagagttgcccgtatctgtaaaaatgatatgggaggctcccaaagagtgctggaaaagcattggacctctttcctcaaggcccggctcaattgctctgtcccaggagattctttcttttacttcgatgtactccagagcattacagacattattcagattaacggtatcccaactgtggtaggcgtctttaccactcaattgaactctatcccaggctctgcagtctgtgctttcagcatggatgacatcgagaaggtattcaagggccgattcaaggaacagaaaacacccgatagtgtctggactgcagtgccggaagacaaggttcccaagccgcggcccggatgctgcgccaaacatgggttagccgaagcatacaaaacttccatcgatttcccggacgagacattaagctttatcaaaagtcacccactgatggattcagccgtccctcccatagccgacgaaccctggtttacgaagactcgtgtgcgctataggcttaccgcaatttccgtggaccatagtgcgggaccgtaccagaattacacagtgatattcgttggctccgaagcggggatggtgttaaaggtgctcgccaagacttccccgttctcactgaatgactccgtattgctggaggaaattgaggcctataaccacgccaagtgtagcgcagagaatgaggaggataaaaaggtgatatcactgcagctggacaaggaccatcacgccctctacgtggcattctcatcttgcattatacgtattcccctgtcgcggtgcgaacggtacggtagctgtaaaaagagctgcatagcaagtcgggacccatactgtgggtggctgagtcaaggaagttgcgggcgtgtcacccctggcatgctcttgttgactgaggacttcttcgcctttcacaaccattctgccgaagggtatgaacaggatacggaatttggcaatacggctcacctgggagactgccacgaaatacttccgacctccacgacgcctgattacaaaatcttcggaggccccacttccggggtcagatgggaagtgcagagtggcgaatctaaccagatggtgcatatgaacgttctgattacatgtgtgttcgccgctttcgttctaggcgcctttattgccggcgtggccgtatactgctatcgggacatgttcgtcaggaaaaaccgcaaaatacacaaggatgctgagtccgcccagtcgtgcacggactctagcgggagctttgcgaaactgaatggtctgttcgattctcccgtcaaagaatatcagcagaacatcgacagccccaaactgtacagcaaccttctgacgtcccggaaggagctgcctcctaacggggacactaaaagtatggtgatggatcacagggggcagcctcctgagctcgccgctctgcccacacccgagagcacacccgttctgcatcagaagactctccaggccatgaaatcccattccgagaaggcccacggtcacggcgccagccgcaaggaaacccctcagttcttcccatcatctccccctccacactcacctctatctcacggacacattccatccgcgatagtccttcccaatgcaacccacgattacaacacgtcattcagtaacagcaatgcacacaaggccgagaagaagcttcagaacatcgaccatccccttacaaagagttctagcaagagagatcacagaaggagcgtggactctcgcaacacgctcaacgatctcttaaagcacctgaatgaccctaactcaaaccctaaggccatcatgggtgatatccagatggctcaccagaacctcatgctggatcctatggggagcatgtctgaagtgccccccaaagtgcccaatcgggaagcatctttgtattcacctcccagcaccctgccaaggaattcccctaccaaaagggttgatgtgccaaccacaccaggcgtgcccatgacttccttggaaaggcagagaggttatcataaaaacagctctcagagacacagcatctcagcaatgcccaaaaacctgaatagcccgaacggggttctgctatcacgtcaaccgagcatgaacaggggcggctatatgccaactcccacaggcgcaaaggtggattacatccagggcaccccggtgtcggtgcaccttcagccttcactgtcgaggcagagctcctacacctctaacggaaccttgccacggaccggtctaaagagaacccctagcctgaaaccagacgttcctccgaaaccaagttttgtgccgcaaactccctctgtgagaccgctaaataaatatacatactag

SEQ ID NO: 315209 - DNA, 3093 bp, Artificial Sequence
  derived and/or modified sequence
atgagggtgttcctcctctgcgcttatatcctgttgctcatggtaagtcagctgcgagcggtgtccttccccgaagacgacgaaccactgaatacagtcgattaccactattcaagacaataccccgtctttagaggtaggccctcgggcaatgagtcccagcataggctcgactttcagctgatgctcaagatacgcgataccctctacatcgccggtcgggaccaggtgtatacagtaaacttaaatgaaatgcccaagacggaggtgataccaaataaaaagttgacttggagatcccggcaacaggaccgggaaaactgtgccatgaaggggaagcataaagacgagtgccacaacttcatcaaagtcttcgtccccaggaacgacgaaatggtgttcgtgtgcggtactaatgccttcaaccctatgtgtcgatactaccgtcttagcactctggagtatgatggtgaggagattagtgggctcgctagatgccccttcgacgcgcgacaaacaaatgttgcattgttcgctgatggcaagctgtactccgccaccgtcgctgattttctggcctcggacgctgtcatctaccgttccatgggggacggctcagctctgagaactatcaagtatgacagcaaatggatcaaggaaccccactttctgcatgcaattgagtacgggaattatgtttactttttttttagggaaattgctgtcgagcacaacaatcttgggaaagcagtgtactcacgggtagccagaatctgtaagaacgacatgggcggtagccaacgggttttggaaaagcattggacctccttcttgaaggctcgactgaactgtagcgtacctggcgacagctttttctactttgatgtcctgcagtcaattacggacattatccagattaatggaatacctacagtggtcggggtttttacgacacagctgaacagcattccaggatcagcagtatgcgcttttagcatggacgacatcgaaaaagtgttcaaagggcgtttcaaagagcagaaaacccccgattccgtttggacggcagtaccggaagacaaggtgcctaagcctcggccaggatgctgcgctaaacacgggctggccgaggcatacaaaacatctatagactttcccgatgaaacacttagctttattaagtctcatcccctcatggattccgctgtgccccctattgccgacgaaccatggttcacaaagacaagggtgcgctaccgtttaaccgccatttctgtggaccattctgcaggcccatatcagaattatacagtcatttttgtcggctcagaagctggcatggtcctcaaagtgctggcgaagacaagccccttctcattaaatgactcggtgcttctagaagaaattgaagcttataaccacgccaaatgttctgctgaaaacgaagaagataaaaaggtgattagccttcagctggataaggatcaccatgctctgtacgttgcctttagttcctgcattatccgaatccctctgagcaggtgcgagaggtacggttcttgtaagaagtcatgcattgcctctagggatccttattgcggctggctgagccagggctcctgtggacgcgtaacccctggaatgctgcttctgaccgaggacttctttgccttccataatcactccgccgaaggctatgagcaggatacagaatttggtaacacagctcatctgggagactgtcacgagatactaccaacatctactaccccagactacaaaatttttggaggcccaacctcaggcgttcgctgggaagttcagtctggggagagcaaccagatggtccacatgaacgtgctcatcacctgcgtctttgccgctttcgtgttgggagctttcattgcgggtgtcgcagtttattgttacagagacatgttcgtcagaaaaaaccgcaaaatacataaggacgctgagagtgcccagagctgtactgacagttccggaagcttcgccaagttgaatggactgttcgacagccccgtgaaagaataccagcagaatatagacagccccaaattgtacagcaacctgctgacaagcagaaaggagctgccaccaaatggagacacgaagagcatggtgatggatcatcggggacagccgccagagctcgcagccctcccgacacctgaaagtacccctgtgcttcaccagaagactctacaggccatgaaaagccattccgagaaagctcatgggcatggagcttctaggaaggagaccccacagttctttcctagctctccccctccccattcaccccttagccatgggcatatcccgtcggcgatcgttctccctaatgctacccatgattacaacaccagtttctcgaatagtaacgcacataaggccgagaaaaaactgcagaatatcgaccaccccttgaccaagtcgtcatctaaacgggatcatagaaggagcgtggactcgcgaaacacactgaacgatctgctgaaacatctaaacgacccaaattctaaccctaaggccattatgggcgatattcaaatggcgcaccagaatcttatgcttgatccgatgggctcaatgtccgaggtgcctccgaaagttcccaatagggaggcatctttatacagccccccttcaaccctaccaaggaattccccaacaaagagagtagacgtgcctaccacacccggagttcctatgacttccttagagaggcaaagaggttaccacaaaaactctagccagcgtcattctatttccgcaatgccaaagaacctgaactcacccaatggcgtgctgctgtctaggcagccgagtatgaatcgcggtggctatatgcccactcctaccggcgcaaaagtcgactacattcagggaacaccggtgagcgtccacttacagccctctctttcaaggcagagcagttacaccagcaatggcactcttccccgaaccgggctgaaaaggaccccctccctcaaacctgatgttccccctaagcctagcttcgtgcctcagacaccttcggttaggcccctgaacaaatacacctattag

SEQ ID NO: 315210 - DNA, 5967 bp, Artificial Sequence
  derived and/or modified sequence
gcggccgcttcccaccgtccctctccccttactggcagagcgcgctgcgggcggactcccgggcccggagcagcccaccggccaccccaccgcccacccggctcccggtgtctcctcccggccgctctacccagcaactttccgtgctttgttccccgactggaaatgctttacggaagcgtcttggacagggtctccgccaggcgacaagagctcggtgctgagatgtgttacgttctcatctccccatcaattatggatggaaacaaataaggaagagtcaattttgctgagccccttctccggcaacgagaggcgttctgcagccgggagggagccgccgctcgcgccggcagccgctggcaggggcatggtgaggaggaaggtagctcagtggcatttctgagcaggggccaccctgacttcaccttggcccaccatgagggtcttcctgctttgtgcctacatactgctgctgatggtttcccagttgagggcagtcagctttcctgaagatgatgaaccccttaatactgtcgactatcactattcaaggcaatatccggtttttagaggacgcccttcaggcaatgaatcgcagcacaggctggactttcagctgatgttgaaaattcgagacacactttatattgctggcagggatcaagtttatacagtaaacttaaatgaaatgcccaaaacagaagtaatacccaacaagaaactgacatggcgatcaagacaacaggatcgagaaaactgtgctatgaaaggcaagcataaagatgaatgccacaactttatcaaagtatttgttccaagaaacgatgagatggtttttgtttgtggtaccaatgcattcaatcccatgtgtagatactacaggttgagtaccttagaatatgatggggaagaaattagtggcctggcaagatgcccatttgatgccagacaaaccaatgttgccctctttgctgatgggaagctgtattctgccacagtggctgacttcttggccagcgatgccgttatttatcgaagcatgggtgatggatctgcccttcgcacaataaaatatgattccaaatggataaaagagccacactttcttcatgccatagaatatggaaactatgtctatttcttctttcgagaaatcgctgtcgaacataataatttaggcaaggctgtgtattcccgcgtggcccgcatatgtaaaaacgacatgggtggttcccagcgggtcctggagaaacactggacttcatttctaaaggctcggctgaactgttctgtccctggagattcgtttttctactttgatgttctgcagtctattacagacataatacaaatcaatggcatccccactgtggtcggggtgtttaccacgcagctcaatagcatccctggttctgctgtctgtgcatttagcatggatgacattgaaaaagtattcaaaggacggtttaaggaacagaaaactccagattctgtttggacagcagttcccgaagacaaagtgccaaagccaaggcctggctgttgtgcaaaacacggccttgccgaagcttataaaacctccatcgatttcccggatgaaactctgtcattcatcaaatctcatcccctgatggactctgccgttccacccattgccgatgagccctggttcacaaagactcgggtcaggtacagactgacggccatctcagtggaccattcagccggaccctaccagaactacacagtcatctttgttggctctgaagctggcatggtacttaaagttctggcaaagaccagtcctttctctttgaacgacagcgtattactggaagagattgaagcctacaaccatgcaaagtgcagtgctgagaatgaggaagacaaaaaggtcatctcattacagttggataaagatcaccacgctttatatgtggcgttctctagctgcattatccgcatccccctcagtcgctgtgagcgttatggatcatgtaaaaagtcttgtattgcatctcgtgacccgtattgtggctggttaagccagggatcctgtggtagagtgaccccagggatgctgctgttaaccgaagacttctttgctttccataaccacagtgctgaaggatatgaacaagacacagaattcggcaacacagctcatctaggggactgccatgaaattttgcctacttcaactacaccagattacaaaatatttggcggtccaacatctggtgtacgatgggaagtccagtctggagagtccaaccagatggtccacatgaatgtcctcatcacctgtgtctttgctgcttttgttttgggggcattcattgcaggtgtggcagtatactgctatcgagacatgtttgttcggaaaaacagaaagatccataaagatgcagagtccgcccagtcatgcacagactccagtggaagttttgccaaactgaatggtctctttgacagccctgtcaaggaataccaacagaatattgattctcctaaactgtatagtaacctgctaaccagtcggaaagagctaccacccaatggagatactaaatccatggtaatggaccatcgagggcaacctccagagttggctgctcttcctactcctgagtctacacccgtgcttcaccagaagaccctgcaggccatgaagagccactcagaaaaggcccatggccatggagcttcaaggaaagaaacccctcagttttttccgtctagtccgccacctcattccccattaagtcatgggcatatccccagtgccattgttcttccaaatgctacccatgactacaacacgtctttctcaaactccaatgctcacaaagctgaaaagaagcttcaaaacattgatcaccctctcacaaagtcatccagtaagagagatcaccggcgttctgttgattccagaaataccctcaatgatctcctgaagcatctgaatgacccaaatagtaaccccaaagccatcatgggagacatccagatggcacaccagaacttaatgctggatcccatgggatcgatgtctgaggtcccacctaaagtccctaaccgggaggcatcgctatactcccctccttcaactctccccagaaatagcccaaccaagcgagtggatgtccccaccactcctggagtcccaatgacttctctggaaagacaaagaggttatcacaaaaattcctcccagaggcactctatatctgctatgcctaaaaacttaaactcaccaaatggtgttttgttatccagacagcctagtatgaaccgtggaggatatatgcccacccccactggggcgaaggtggactatattcagggaacaccagtgagtgttcatctgcagccttccctctccagacagagcagctacaccagtaatggcactcttcctaggacgggactaaagaggacgccgtccttaaaacctgacgtgccaccaaagccttcctttgttcctcaaaccccatctgtcagaccactgaacaaatacacatactaggcctcaagtgtgctattcccatgtggctttatcctgtccgtgttgttgagaggatgatgttgtaagggtaccttaaaacaagagactcgcttgtattttaagagaaccaagtggccaaagaaactctttctaactttggcaacatcagaacttgccacatgtagctactgcagcaaggcttctgtgtacttgcctgaaaacaaaggaaggtgctggtcattccatttcttttgtttgaagctaaagagatgtgtagctcacaggggctaccttaccagtataaagagctgataacagtactcagaagaatctgtgaacaaatacttgaaaatgggttcaatgtagactgccattatgtgtggtcttcccattaaatgtgaacattttaatatgtatgcattcaccttgcctcttgcacaaatgtcaaaaaaaagatggtaatatctcaaagaaatgaacttgtagattaccaagcagtttgctaaaaattcaatctttgacccaagctgtagcatttttttttcatgtgtggcatctttttcatgccaccaacaaacttgttgtgtgtgtgcgtgtgtgtgtgtgtgtgtgtgtgtgtgtgtgtgttctgtacccactaggatttgtttaggtgcccattgcatctttttgtgctatggagttgtttacattaagcatgaccgaacgagagacaatactatttcccacaggagtccattgggttcagctttgaaagaggaatagaatcgaggctcctttgaccatcaaaatgatgaactttacttatgtggtacccaatgccagaatgtaagagttgcaagtgattttgtgctgctattcattaaaacttgtattccagtcttgccagcttaaggagatcaagatattaagaggtatccttgatttattttccagtattcagtagtaaaattttcctgtccactgtgaatcaaagcctgagtcactctatttaaccttggacacactaataaggttttattttgattgtgttcgtttccccccccccaatagtaaaatttctcctcctttaactcctcctaccccccaaggtaagaaacaaaaaacaaacaaacaaacaaaaatagaagacaaaagaaagacatatgaaaggaattgtaattggcttaacagaaacagtctgtaaaaacctaacagtggtgcaatcatgttgtctgtgttgtgttatgtgagaattttctcctaagtcatgcaggtaatgacaatatactgtaaataccacatgtgagtttacctgaatctgtgcattttgtgccttattcatgagaatgatagaagtactaaaatctgtcaagtgttttcagtatagcacattatttactgagtgccagttgtaaatgtttttcaaccagcacctaaaaagactcttttcaaaaaatcacagaaacaacctaggacaattatttgttacataatccgacctcatagcagcattacattctttgccgtgataaacattccactcctgctttcctaaggatgaaacagtgataatgtgaactcaaatgaggtttcctgggtaatgtgacacctgcagaaactatagagcgtcatttatacgtagtttggcagaaaccacttacggctgatgatgcgcaaccctgctgactgtttcagttaatatgctgcacaccacacacttgtttagtgaaccaaatctagaaagtaccaaggcagaggtatgctcctgctgtaatcaggcaaatgagttcaactggatttcttttgacaatactgttggtacctattacttgggggaggacatgttgcagaagaccagatcatttttatacagaatgtgaaatactgatacagttattcttttttttaaagaacattgttttataaagaacgtgatttccagtgatctctggaagcgctaaagctaaaatttctgttcttgaaacacttcagctttgcaactaaaatattacagattaataataaattaaaccaaccaatgataaacactactcagtccaccaacaacaaacgtgtttgaattcaccttaccaatattaatcccagcgtgtgtaaaacagaacagtaactctatgtgaccccagataacattttgtaacattgtgcttccttgtagtttgtaatgtgagttcaatcagtatttatgttgaaatttctaacattaaatctagtctctatcctgttaatttaatttttaaatgctttatccatttgtgcaaaggtaaacgcagattgtatcttttttaatggtacggcataaaaagtaaccctcaagtgaagtgtctctatactgttttatagagtactttaacatgaatagataccttgtaaacttgtattgtggatgtgtaaataatatgtactttgggtttttaacaccgcatgtaaagtcaaaataaaatatacaaatcatt

SEQ ID NO: 315211 - protein, 1017 aa, Artificial Sequence
  derived and/or modified sequence
MRVFLLCAYILLLMVSQLRAVSFPEDDEPLNTVDYHYSRQYPVFRGRPSGNESQHRLDFQLMLKIRDTLYIAGRDQVYTVNLNEMPKTEVIPNKKLTWRSRQQDRENCAMKGKHKDECHNFIKVFVPRNDEMVFVCGTNAFNPMCRYYRLSTLEYDGEEISGLARCPFDARQTNVALFADGKLYSATVADFLASDAVIYRSMGDGSALRTIKYDSKWIKEPHFLHAIEYGNYVYFFFREIAVEHNNLGKAVYSRVARICKNDMGGSQRVLEKHWTSFLKARLNCSVPGDSFFYFDVLQSITDIIQINGIPTVVGVFTTQLNSIPGSAVCAFSMDDIEKVFKGRFKEQKTPDSVWTAVPEDKVPKPRPGCCAKHGLAEAYKTSIDFPDETLSFIKSHPLMDSAVPPIADEPWFTKTRVRYRLTAISVDHSAGPYQNYTVIFVGSEAGMVLKVLAKTSPFSLNDSVLLEEIEAYNHAKCSAENEEDKKVISLQLDKDHHALYVAFSSCIIRIPLSRCERYGSCKKSCIASRDPYCGWLSQGSCGRVTPGMLAEGYEQDTEFGNTAHLGDCHEILPTSTTPDYKIFGGPTSGVRWEVQSGESNQMVHMNVLITCVFAAFVLGAFIAGVAVYCYRDMFVRKNRKIHKDAESAQSCTDSSGSFAKLNGLFDSPVKEYQQNIDSPKLYSNLLTSRKELPPNGDTKSMVMDHRGQPPELAALPTPESTPVLHQKTLQAMKSHSEKAHGHGASRKETPQFFPSSPPPHSPLSHGHIPSAIVLPNATHDYNTSFSNSNAHKAEKKLQNIDHPLTKSSSKRDHRRSVDSRNTLNDLLKHLNDPNSNPKAIMGDIQMAHQNLMLDPMGSMSEVPPKVPNREASLYSPPSTLPRNSPTKRVDVPTTPGVPMTSLERQRGYHKNSSQRHSISAMPKNLNSPNGVLLSRQPSMNRGGYMPTPTGAKVDYIQGTPVSVHLQPSLSRQSSYTSNGTLPRTGLKRTPSLKPDVPPKPSFVPQTPSVRPLNKYTY

SEQ ID NO: 315212 - DNA, 3054 bp, Artificial Sequence
  derived and/or modified sequence
atgagagtgttcctgctgtgcgcctacatcctgctgctgatggtgagccagctgagagccgtgagcttccccgaggacgacgagcccctgaacaccgtggactaccactacagcagacagtaccccgtgttcagaggcagacccagcggcaacgagagccagcacagactggacttccagctgatgctgaagatcagagacaccctgtacatcgccggcagagaccaggtgtacaccgtgaacctgaacgagatgcccaagaccgaggtgatccccaacaagaagctgacctggagaagcagacagcaggacagagagaactgcgccatgaagggcaagcacaaggacgagtgccacaacttcatcaaggtgttcgtgcccagaaacgacgagatggtgttcgtgtgcggcaccaacgccttcaaccccatgtgcagatactacagactgagcaccctggagtacgacggcgaggagatcagcggcctggccagatgccccttcgacgccagacagaccaacgtggccctgttcgccgacggcaagctgtacagcgccaccgtggccgacttcctggccagcgacgccgtgatctacagaagcatgggcgacggcagcgccctgagaaccatcaagtacgacagcaagtggatcaaggagccccacttcctgcacgccatcgagtacggcaactacgtgtacttcttcttcagagagatcgccgtggagcacaacaacctgggcaaggccgtgtacagcagagtggccagaatctgcaagaacgacatgggcggcagccagagagtgctggagaagcactggaccagcttcctgaaggccagactgaactgcagcgtgcccggcgacagcttcttctacttcgacgtgctgcagagcatcaccgacatcatccagatcaacggcatccccaccgtggtgggcgtgttcaccacccagctgaacagcatccccggcagcgccgtgtgcgccttcagcatggacgacatcgagaaggtgttcaagggcagattcaaggagcagaagacccccgacagcgtgtggaccgccgtgcccgaggacaaggtgcccaagcccagacccggctgctgcgccaagcacggcctggccgaggcctacaagaccagcatcgacttccccgacgagaccctgagcttcatcaagagccaccccctgatggacagcgccgtgccccccatcgccgacgagccctggttcaccaagaccagagtgagatacagactgaccgccatcagcgtggaccacagcgccggcccctaccagaactacaccgtgatcttcgtgggcagcgaggccggcatggtgctgaaggtgctggccaagaccagccccttcagcctgaacgacagcgtgctgctggaggagatcgaggcctacaaccacgccaagtgcagcgccgagaacgaggaggacaagaaggtgatcagcctgcagctggacaaggaccaccacgccctgtacgtggccttcagcagctgcatcatcagaatccccctgagcagatgcgagagatacggcagctgcaagaagagctgcatcgccagcagagacccctactgcggctggctgagccagggcagctgcggcagagtgacccccggcatgctggccgagggctacgagcaggacaccgagttcggcaacaccgcccacctgggcgactgccacgagatcctgcccaccagcaccacccccgactacaagatcttcggcggccccaccagcggcgtgagatgggaggtgcagagcggcgagagcaaccagatggtgcacatgaacgtgctgatcacctgcgtgttcgccgccttcgtgctgggcgccttcatcgccggcgtggccgtgtactgctacagagacatgttcgtgagaaagaacagaaagatccacaaggacgccgagagcgcccagagctgcaccgacagcagcggcagcttcgccaagctgaacggcctgttcgacagccccgtgaaggagtaccagcagaacatcgacagccccaagctgtacagcaacctgctgaccagcagaaaggagctgccccccaacggcgacaccaagagcatggtgatggaccacagaggccagccccccgagctggccgccctgcccacccccgagagcacccccgtgctgcaccagaagaccctgcaggccatgaagagccacagcgagaaggcccacggccacggcgccagcagaaaggagaccccccagttcttccccagcagcccccccccccacagccccctgagccacggccacatccccagcgccatcgtgctgcccaacgccacccacgactacaacaccagcttcagcaacagcaacgcccacaaggccgagaagaagctgcagaacatcgaccaccccctgaccaagagcagcagcaagagagaccacagaagaagcgtggacagcagaaacaccctgaacgacctgctgaagcacctgaacgaccccaacagcaaccccaaggccatcatgggcgacatccagatggcccaccagaacctgatgctggaccccatgggcagcatgagcgaggtgccccccaaggtgcccaacagagaggccagcctgtacagcccccccagcaccctgcccagaaacagccccaccaagagagtggacgtgcccaccacccccggcgtgcccatgaccagcctggagagacagagaggctaccacaagaacagcagccagagacacagcatcagcgccatgcccaagaacctgaacagccccaacggcgtgctgctgagcagacagcccagcatgaacagaggcggctacatgcccacccccaccggcgccaaggtggactacatccagggcacccccgtgagcgtgcacctgcagcccagcctgagcagacagagcagctacaccagcaacggcaccctgcccagaaccggcctgaagagaacccccagcctgaagcccgacgtgccccccaagcccagcttcgtgccccagacccccagcgtgagacccctgaacaagtacacctactag

SEQ ID NO: 315213 - DNA, 3054 bp, Artificial Sequence
  derived and/or modified sequence
atgcgagtgttcctcctctgtgcctacattctgttgctgatggtgtctcaactgcgcgctgtgtccttccctgaagacgacgagcctctgaatacagtagattaccattatagtcgccagtaccccgttttccgcggccgaccaagtggcaatgagtcacagcatcgactggattttcagctcatgctgaaaatccgtgacaccctctacatagcaggtcgcgatcaggtatacacggttaatttgaacgaaatgccaaaaaccgaggtgatcccaaataaaaagctcacctggagatcccggcagcaggaccgtgagaactgcgccatgaaaggcaaacacaaagacgagtgtcataactttattaaggtgtttgtgccacggaatgatgagatggtcttcgtctgcggcactaatgcattcaatccaatgtgcaggtattataggctgagcactttggaatacgacggggaggaaatctctggccttgcgcgctgccccttcgatgctcgtcagacaaatgtggctcttttcgcagatggcaagctttactccgccaccgtcgccgactttctggcgtctgatgccgtgatctatcgttcaatgggcgacggttctgcccttaggacaataaaatatgattccaagtggatcaaggaaccccacttcctacacgcaatcgagtatgggaattatgtgtatttcttctttcgagagatcgccgttgagcacaataacttgggtaaagctgtgtactctcgtgtggcaagaatctgtaagaacgatatgggcggctcccagcgagtactggagaaacactggacatcctttttgaaagctcggttgaactgcagcgtgcccggcgacagttttttctactttgacgtgctccagtccattactgatattattcagattaacggcatccctactgtggttggcgtctttactacacagctgaatagtattccggggagtgctgtttgtgccttttccatggatgatattgagaaggtattcaaaggccgattcaaggagcagaagacccctgactccgtatggacagctgtgcctgaagataaggtccccaaacccagaccaggatgctgcgctaagcatgggctggcagaggcctataaaacttccattgacttccccgatgagaccctaagttttattaagtcccatcccctgatggactcagccgtccccccaattgctgatgagccttggtttacaaagacaagagtgaggtatcgactcaccgccataagtgtagaccactccgcaggaccttaccagaattacacagtcatattcgtgggtagtgaggccggtatggttctgaaggtgttagcaaagacatctcccttttccctcaacgactcagtgttgctcgaggagattgaggcttataaccacgcgaaatgctcagccgagaatgaagaagataaaaaagtgattagccttcagctcgacaaggatcatcacgccttatacgttgctttctcgtcctgtatcattaggattcccctgtccagatgcgaacggtacgggtcatgtaaaaagtcctgcatagcgtcccgtgacccatactgcggctggctgtctcaaggttcctgtggcagagtgaccccggggatgcttgctgaaggatacgaacaagatacagagttcggaaataccgcacatctgggcgactgtcatgagatccttcccacctctactacccctgattacaaaatctttggtgggcccacaagcggtgtgcgatgggaggtccagtctggcgaatctaatcagatggtgcatatgaacgtgttaattacatgcgtttttgccgcgttcgtcctcggtgcgttcattgcaggggttgctgtatactgttacagggacatgttcgtgaggaagaataggaagatacataaagacgcagagagcgctcagtcatgcactgactccagtgggagctttgccaagctgaatgggctttttgactcgccagtcaaggaatatcagcaaaatatagattcacctaaactttatagtaacctgctgacatctcggaaagagctgccaccaaacggtgacactaagtcgatggtcatggaccaccgcggacagccaccagaattagccgctctgccaacacccgagtctactccagtgctgcaccagaagactcttcaagcaatgaaatcgcactcagagaaggctcacggccatggggcgtccagaaaagagacaccccagtttttccctagtagcccacctccccacagccccctgtcgcatggacatatcccttcggctatcgtgctgcctaatgccacgcatgactataatacatctttctccaatagcaacgcacacaaggcagaaaagaagcttcagaacattgaccatcccctgaccaaatcatctagcaagcgggatcatcgtagatctgtggattcccgcaatactctgaacgacctgctgaagcatctgaatgatcctaatagcaaccccaaagccattatgggcgacattcagatggcccaccagaatcttatgctggatccgatgggttctatgtccgaggttccaccaaaggtgccgaaccgcgaagcatccctgtactctcctccctctacacttcctaggaattctccgactaagcgggtagacgtgccaactactcctggtgtaccaatgacctctctggagcgccaacgagggtaccataagaattcatcgcagcgtcactcgatctctgcaatgccaaagaatctgaattcacccaacggtgtactgctgtctcgccaaccttccatgaaccgcggcggctatatgccgaccccaaccggcgccaaagtggactatatacagggaacccctgtctccgtgcacctgcagccaagcctgtccaggcaatcatcctacactagcaacggtacacttcctaggactggtcttaaacgtaccccttccctcaaacctgacgttcccccgaagccttcattcgtccctcagacacctagcgtccggccccttaacaaatatacctactag

SEQ ID NO: 315214 - DNA, 3054 bp, Artificial Sequence
  derived and/or modified sequence
atgagggtcttcctgctgtgtgcctacatcctgctgctgatggtgtcccagctgcgggctgtgtccttcccagaagatgatgagcccctgaacacagtggactaccactacagccggcagtaccctgtgttccggggccggcccagcggaaatgaaagccagcaccggctggacttccagctgatgctgaagatccgggacaccctgtacatcgccggccgggaccaggtgtacacagtgaacctgaatgagatgcccaagacagaggtgatccccaacaagaagctgacctggaggagccggcagcaggaccgggagaactgtgccatgaagggcaagcacaaggatgagtgccacaacttcatcaaggtgtttgtgcccagaaatgatgagatggtgtttgtgtgtggcaccaatgccttcaaccccatgtgccgctactaccgcctgagcaccctggagtatgatggagaggagatcagcggcctggcccgctgcccctttgatgcccggcagaccaacgtggccctgtttgctgatggcaagctgtacagcgccaccgtggccgacttcctggccagtgatgctgtgatctaccgctccatgggagatggcagcgccctgcggaccatcaagtatgacagcaagtggatcaaggagccccacttcctgcacgccattgaatatggcaactacgtgtacttcttcttccgggagattgctgtggagcacaacaacctgggcaaggctgtgtacagccgggtggcccgcatctgcaagaatgacatgggcggcagccagagggtgctggagaagcactggaccagcttcctgaaggcccggctgaactgcagcgtgcctggggacagcttcttctactttgatgtgctgcagagcatcacagacatcatccagatcaatggcatccccaccgtggtgggcgtcttcaccacccagctgaacagcatccctggcagcgctgtgtgtgccttctccatggatgacatcgagaaggtgttcaagggccgcttcaaggagcagaagaccccagacagcgtgtggacagctgtgcctgaggacaaggtgcccaagcccaggcctggctgctgtgccaagcacggcctggccgaggcctacaagaccagcattgacttcccagatgagaccctgtccttcatcaagagccaccccctgatggattctgctgtgccccccatcgcagatgagccctggttcaccaagaccagggtgcgctaccgcctgacagccatctctgtggaccacagcgctggcccctaccagaactacaccgtcatctttgtgggcagcgaggccggcatggtgctgaaggtgctggccaagaccagccccttcagcctgaatgattctgtgctgctggaggagattgaggcctacaaccacgccaagtgcagcgcagaaaatgaggaggacaagaaggtgatcagcctgcagctggacaaggaccaccacgccctgtatgtggccttcagcagctgcatcatccgcatccccctgagccgctgtgaaagatatggcagctgcaagaagagctgcatcgccagccgggacccctactgcggctggctgagccagggcagctgtggccgggtgaccccaggcatgctggccgagggctatgagcaggacacagaatttggaaacacagcccacctgggggactgccacgagatcctgcccaccagcaccaccccagactacaagatctttggaggccccaccagcggcgtgcgctgggaggtgcagagcggggagagcaaccagatggtgcacatgaatgtgctgatcacctgtgtgtttgctgcctttgtgctgggcgccttcatcgccggcgtggccgtgtactgctacagagacatgtttgtgaggaagaacaggaagatccacaaggatgctgagagcgcccagagctgcacagacagcagcggcagctttgccaagctgaatggcctgtttgacagccctgtgaaggagtaccagcagaacatcgacagccccaagctgtacagcaacctgctgaccagcaggaaggagctgcccccaaatggagacaccaagtccatggtgatggaccaccggggccagcccccagagctggccgccctgcccaccccagagagcacccctgtgctgcaccagaagaccctgcaggccatgaagagccacagcgagaaggcccacggccacggggccagcaggaaggagaccccccagttcttccccagcagccccccaccccacagccccctgagccacggccacatccccagcgccatcgtgctgcccaatgccacccatgactacaacaccagcttcagcaacagcaatgcccacaaggccgagaagaagctgcagaacatcgaccaccccctgaccaagagcagcagcaagagggaccaccggcgctctgtggacagcaggaacaccctgaatgacctgctgaagcacctgaatgaccccaacagcaaccccaaggccatcatgggagacatccagatggcccaccagaacctgatgctggaccccatgggctccatgtctgaggtgccccccaaggtgcccaaccgggaggccagcctgtacagcccccccagcaccctgcccaggaacagccccaccaagagggtggatgtgcccaccaccccaggagtgcccatgaccagcctggagcggcagaggggctaccacaagaacagcagccagaggcacagcatcagcgccatgcccaagaacctgaacagccccaatggagtgctgctgagccggcagcccagcatgaacagaggaggctacatgcccacccccactggagccaaggtggactacatccagggcacccctgtgtctgtgcacctgcagcccagcctgagccggcagagcagctacaccagcaatggcaccctgcccaggacaggcctgaagaggacccccagcctgaagccagatgtgccccccaagcccagctttgtgccccagacccccagcgtgcggcccctgaacaagtacacctactag

SEQ ID NO: 315215 - DNA, 3054 bp, Artificial Sequence
  derived and/or modified sequence
atgcgggtgttcctgctgtgcgcctacatcctgctgctgatggtgtcccagctgcgggctgtctcctttcccgaagacgatgagcctctaaataccgtggattatcactactcgaggcagtacccggtgtttaggggtaggccatctggtaatgagtctcagcacaggctcgatttccagctgatgttaaagatacgggacacactgtacattgcagggcgagatcaggtgtacacagtgaacctgaatgaaatgcctaagacagaggttatcccaaacaaaaaacttacctggaggagtcgacagcaagacagggagaattgtgcaatgaaaggcaagcacaaggacgaatgccacaacttcataaaggtctttgttccacgcaacgacgaaatggtattcgtgtgcggcactaacgccttcaatccaatgtgccgatattaccggttgtcgactctggagtatgacggggaggagatctcaggtctggcaagatgtcccttcgatgcgcgacagaccaatgtcgctctcttcgctgatggaaagttgtatagtgctacagtggccgattttttagctagcgatgccgtcatatatagatctatgggtgacgggagcgccctccgcactatcaaatacgacagcaaatggatcaaggagccacacttccttcatgcaatcgagtacggtaattatgtgtatttttttttccgggagatagcagttgagcacaataatctgggcaaggccgtgtattccagggtggcccggatttgcaaaaatgacatggggggctctcaacgtgtgttggaaaagcactggacatctttcttgaaagcacgcttgaactgttcggtccccggcgattcattcttctattttgatgttttacagagcattacagatatcattcagatcaacgggataccgacagtggtcggtgtgttcacaacccagctgaatagcattcctggctcagcagtctgtgcgttttcgatggacgatatcgagaaagtgtttaaggggagattcaaggagcagaagacccctgactccgtgtggactgccgttcctgaagacaaggtgcctaaaccaagacctggatgctgcgctaagcacggattagccgaagcctataaaactagtattgactttcctgacgagaccctcagctttatcaaatctcatcctctgatggactcagctgtcccccctatcgccgatgagccttggttcactaagacccgagtacggtatcgccttacagccattagtgtggaccacagcgccggcccataccaaaactacaccgttatatttgtcggaagtgaagcaggcatggtactcaaggtgttagccaaaacctctccattcagcctgaacgattccgtgctcctcgaggagatagaggcctacaatcacgctaagtgctctgcagaaaacgaagaggataagaaggtgataagtctccagctggacaaagatcaccacgcgctctatgtagccttcagtagttgcattatccgaatccccttgtcccggtgtgaacggtatggatcatgcaaaaaatcatgcatagcatctcgcgacccgtactgtgggtggctctcgcaaggcagttgtggaagggtgacacctgggatgctggctgagggctatgagcaagacacagagttcgggaataccgcacacctgggggattgccatgagatcctccccacaagcaccacccccgattataagatctttggcggtccaactagcggggtcagatgggaagtccagtcaggggagtcaaatcagatggtccacatgaatgttctaatcacatgtgtcttcgcagcctttgtccttggcgcttttatcgcgggggtcgccgtctactgttaccgggatatgttcgttagaaagaaccggaaaatccataaagacgctgaaagtgcccagtcttgtacagactctagcggtagctttgccaaactgaatggactttttgatagtccagtgaaagaatatcagcagaatatcgatagcccaaagctgtatagtaatctgttaaccagccgtaaggaacttcccccaaatggagacaccaaaagcatggtaatggaccacaggggccagcctcccgagcttgcagcgctgcctactccggagagcactccagtgttacatcagaaaaccctgcaggccatgaagtctcattcagagaaggcacacggccacggggcgagtaggaaggagacacctcaatttttcccatctagtcctcccccacattcccctctgagccatggacacattcctagtgcaatcgtgctcccgaatgcaactcacgactacaacacatccttctccaacagtaacgcacacaaggccgaaaagaagttacagaatatcgatcatccgctgacgaagtcaagctccaaacgagaccacagacgttccgtcgattcaagaaatacgctgaacgatctacttaagcacctgaatgaccccaatagtaacccgaaggccatcatgggcgatatacagatggcacatcagaatctgatgctggatcccatgggatccatgtcagaagtgccacctaaagtccccaatcgggaagcctctctctactctccccccagtacactcccccggaactctcccaccaagcgcgtggacgtcccaacaacacctggcgttcccatgacatcgctagaacgccagagaggctatcacaaaaattctagccagaggcattccataagtgcaatgccgaagaacctaaacagcccaaatggtgttttgttaagcaggcagccttcgatgaatcgaggtggttatatgcctaccccaaccggcgctaaagtggattatatccaaggcacaccggtatcagtgcacctgcagcccagcctcagccgacagtcaagttacacctcgaatggcactctgcccaggaccggattgaagcgtaccccgtcactgaaaccagacgtcccccctaaaccttcctttgtgccacaaacacccagcgtgaggccattgaacaagtatacctactag

SEQ ID NO: 315216 - DNA, 3054 bp, Artificial Sequence
  derived and/or modified sequence
atgcgcgtcttcctgctctgcgcctatattcttctgctgatggtctcccaacttagggccgtgtcctttcccgaagatgacgagcccctgaatacggtcgattaccactactcacggcagtaccctgtttttaggggtaggccctccggtaacgagtcacaacaccggctggacttccaacttatgcttaaaattcgcgatacgctgtacattgctgggcgagaccaggtttacaccgttaacctgaacgaaatgcctaagacagaggtcatcccgaataaaaaactgacctggcgatctaggcaacaggacagagagaattgtgcaatgaaaggcaagcacaaggatgaatgccataattttattaaggtgttcgtacccaggaatgatgaaatggtgttcgtgtgcggcacaaacgcctttaaccctatgtgccgatactatcgcctgagcaccctagaatacgacggggaggagatttctggactcgccaggtgccccttcgatgcaaggcaaaccaatgtggccttgtttgccgatgggaagctttactccgcaaccgtggccgattttctcgcttccgacgccgtcatataccgttctatgggcgacggatctgccctccgaaccataaaatatgactctaagtggatcaaagagccccactttctgcacgccattgagtatggaaactatgtgtatttctttttcagggaaatagcggtagaacataacaacctgggcaaggctgtttacagtagggtcgctaggatatgcaaaaacgatatggggggatcacagcgcgtgcttgaaaagcactggacatcctttcttaaggccagactgaactgctctgtgccaggtgatagcttcttttacttcgatgtcctgcagagcataacagacatcattcagataaacgggatcccaaccgtcgttggagtatttactacccagctcaactccattcccggttctgcagtttgcgcattttccatggatgacatcgagaaagtctttaaggggcgattcaaggagcaaaaaacccctgactccgtttggacagctgtgcccgaggacaaggtgcccaaacccagacctggctgctgtgcaaaacacggtctggcagaggcgtataaaacatcgatagacttccccgacgaaaccctgtcatttataaaaagccaccctctgatggattcggccgtgccccctattgcggatgaaccttggtttaccaagacccgggtcagataccgccttacagctatttctgtcgatcacagcgccggaccgtatcagaattatactgtgatctttgtcggcagcgaggcgggaatggtgctgaaagtactagccaagactagcccgttctcgttgaacgattcagtgctcctcgaggagatcgaggcctacaaccacgctaagtgcagcgccgaaaacgaagaggacaagaaagttattagcttgcagctggacaaggatcaccacgctctttacgtagcgttctcgtcttgtattattaggattccactgagccgttgcgaacgttacggctcttgtaaaaaatcatgtattgcatctagggacccttactgtgggtggctgtctcagggctcttgtggcagggtgacaccgggtatgctggcggaggggtacgagcaagatacagagtttggaaatactgcgcatcttggagattgccatgagattctccctacgagtacaacaccagactataagatcttcggagggccaacatcgggagtgagatgggaagtccagtcaggcgagagtaaccagatggtgcatatgaatgtactgatcacctgtgtgtttgcggcatttgttctgggcgctttcatcgccggagtggctgtttactgttatagggacatgtttgtccgtaagaacagaaaaatacacaaggatgctgaatctgcccagagttgtactgacagctctggatcattcgcaaaactaaatggtctgttcgacagtccagtgaaagagtatcagcagaatatcgacagccccaaattgtatagcaacttactcacctcacgaaaagagcttccacccaacggggataccaaatcaatggtgatggatcatagaggccagccacccgagcttgccgctcttccaaccccagagtctacccctgtgctccaccagaagactctccaggctatgaaatcccatagcgaaaaggcgcacggccatggcgcaagccgcaaggaaacgccccaattctttccgtcgagtccacctccgcacagtccactaagccatggccacatcccctccgcaattgtcctccctaacgcaacccatgattacaatacttcgtttagcaacagcaatgcccacaaagcagagaagaagctacaaaacatagaccaccccctgaccaagtcatcttcaaagcgagaccatagacgtagtgtagattcccggaacacattgaacgatttactcaagcatctcaacgacccaaactccaatcctaaggcaatcatgggagacatccagatggcgcaccagaacctgatgttggacccaatgggtagcatgagcgaagtacccccaaaggtgcccaaccgcgaggcttctctgtacagtcccccttcaactctaccaagaaattctcccactaagcgggtggatgttccaaccacgcctggagtgccgatgacttcactggaacgacagagaggctatcataagaacagcagccagagacatagcatcagtgcaatgccaaagaatctgaacagtccgaatggcgtgctgctgtccaggcagccctccatgaaccgaggcggatatatgcccacccccactggagcaaaggtggactatatacaaggtacccctgttagcgtccacttgcagcccagtctctctagacagtcgtcctacacaagcaacgggacgctcccgcgtacgggtttaaaacgcacccccagcttaaagcctgatgtgccccctaaaccttcgttcgtcccccaaaccccttctgttcgcccactgaacaagtatacctattag

SEQ ID NO: 315217 - DNA, 5931 bp, Artificial Sequence
  derived and/or modified sequence
gcggccgcttcccaccgtccctctccccttactggcagagcgcgctgcgggcggactcccgggcccggagcagcccaccggccaccccaccgcccacccggctcccggtgtctcctcccggccgctctacccagcaactttccgtgctttgttccccgactggaaatgctttacggaagcgtcttggacagggtctccgccaggcgacaagagctcggtgctgagatgtgttacgttctcatctccccatcaattatggatggaaacaaataaggaagagtcaattttgctgagccccttctccggcaacgagaggcgttctgcagccgggagggagccgccgctcgcgccggcagccgctggcaggggcatggtgaggaggaaggtagctcagtggcatttctgagcaggggccaccctgacttcaccttggcccaccatgagggtcttcctgctttgtgcctacatactgctgctgatggtttcccagttgagggcagtcagctttcctgaagatgatgaaccccttaatactgtcgactatcactattcaaggcaatatccggtttttagaggacgcccttcaggcaatgaatcgcagcacaggctggactttcagctgatgttgaaaattcgagacacactttatattgctggcagggatcaagtttatacagtaaacttaaatgaaatgcccaaaacagaagtaatacccaacaagaaactgacatggcgatcaagacaacaggatcgagaaaactgtgctatgaaaggcaagcataaagatgaatgccacaactttatcaaagtatttgttccaagaaacgatgagatggtttttgtttgtggtaccaatgcattcaatcccatgtgtagatactacaggttgagtaccttagaatatgatggggaagaaattagtggcctggcaagatgcccatttgatgccagacaaaccaatgttgccctctttgctgatgggaagctgtattctgccacagtggctgacttcttggccagcgatgccgttatttatcgaagcatgggtgatggatctgcccttcgcacaataaaatatgattccaaatggataaaagagccacactttcttcatgccatagaatatggaaactatgtctatttcttctttcgagaaatcgctgtcgaacataataatttaggcaaggctgtgtattcccgcgtggcccgcatatgtaaaaacgacatgggtggttcccagcgggtcctggagaaacactggacttcatttctaaaggctcggctgaactgttctgtccctggagattcgtttttctactttgatgttctgcagtctattacagacataatacaaatcaatggcatccccactgtggtcggggtgtttaccacgcagctcaatagcatccctggttctgctgtctgtgcatttagcatggatgacattgaaaaagtattcaaaggacggtttaaggaacagaaaactccagattctgtttggacagcagttcccgaagacaaagtgccaaagccaaggcctggctgttgtgcaaaacacggccttgccgaagcttataaaacctccatcgatttcccggatgaaactctgtcattcatcaaatctcatcccctgatggactctgccgttccacccattgccgatgagccctggttcacaaagactcgggtcaggtacagactgacggccatctcagtggaccattcagccggaccctaccagaactacacagtcatctttgttggctctgaagctggcatggtacttaaagttctggcaaagaccagtcctttctctttgaacgacagcgtattactggaagagattgaagcctacaaccatgcaaagtgcagtgctgagaatgaggaagacaaaaaggtcatctcattacagttggataaagatcaccacgctttatatgtggcgttctctagctgcattatccgcatccccctcagtcgctgtgagcgttatggatcatgtaaaaagtcttgtattgcatctcgtgacccgtattgtggctggttaagccagggatcctgtggtagagtgaccccagggatgcttgctgaaggatatgaacaagacacagaattcggcaacacagctcatctaggggactgccatgaaattttgcctacttcaactacaccagattacaaaatatttggcggtccaacatctggtgtacgatgggaagtccagtctggagagtccaaccagatggtccacatgaatgtcctcatcacctgtgtctttgctgcttttgttttgggggcattcattgcaggtgtggcagtatactgctatcgagacatgtttgttcggaaaaacagaaagatccataaagatgcagagtccgcccagtcatgcacagactccagtggaagttttgccaaactgaatggtctctttgacagccctgtcaaggaataccaacagaatattgattctcctaaactgtatagtaacctgctaaccagtcggaaagagctaccacccaatggagatactaaatccatggtaatggaccatcgagggcaacctccagagttggctgctcttcctactcctgagtctacacccgtgcttcaccagaagaccctgcaggccatgaagagccactcagaaaaggcccatggccatggagcttcaaggaaagaaacccctcagttttttccgtctagtccgccacctcattccccattaagtcatgggcatatccccagtgccattgttcttccaaatgctacccatgactacaacacgtctttctcaaactccaatgctcacaaagctgaaaagaagcttcaaaacattgatcaccctctcacaaagtcatccagtaagagagatcaccggcgttctgttgattccagaaataccctcaatgatctcctgaagcatctgaatgacccaaatagtaaccccaaagccatcatgggagacatccagatggcacaccagaacttaatgctggatcccatgggatcgatgtctgaggtcccacctaaagtccctaaccgggaggcatcgctatactcccctccttcaactctccccagaaatagcccaaccaagcgagtggatgtccccaccactcctggagtcccaatgacttctctggaaagacaaagaggttatcacaaaaattcctcccagaggcactctatatctgctatgcctaaaaacttaaactcaccaaatggtgttttgttatccagacagcctagtatgaaccgtggaggatatatgcccacccccactggggcgaaggtggactatattcagggaacaccagtgagtgttcatctgcagccttccctctccagacagagcagctacaccagtaatggcactcttcctaggacgggactaaagaggacgccgtccttaaaacctgacgtgccaccaaagccttcctttgttcctcaaaccccatctgtcagaccactgaacaaatacacatactaggcctcaagtgtgctattcccatgtggctttatcctgtccgtgttgttgagaggatgatgttgtaagggtaccttaaaacaagagactcgcttgtattttaagagaaccaagtggccaaagaaactctttctaactttggcaacatcagaacttgccacatgtagctactgcagcaaggcttctgtgtacttgcctgaaaacaaaggaaggtgctggtcattccatttcttttgtttgaagctaaagagatgtgtagctcacaggggctaccttaccagtataaagagctgataacagtactcagaagaatctgtgaacaaatacttgaaaatgggttcaatgtagactgccattatgtgtggtcttcccattaaatgtgaacattttaatatgtatgcattcaccttgcctcttgcacaaatgtcaaaaaaaagatggtaatatctcaaagaaatgaacttgtagattaccaagcagtttgctaaaaattcaatctttgacccaagctgtagcatttttttttcatgtgtggcatctttttcatgccaccaacaaacttgttgtgtgtgtgcgtgtgtgtgtgtgtgtgtgtgtgtgtgtgtgtgttctgtacccactaggatttgtttaggtgcccattgcatctttttgtgctatggagttgtttacattaagcatgaccgaacgagagacaatactatttcccacaggagtccattgggttcagctttgaaagaggaatagaatcgaggctcctttgaccatcaaaatgatgaactttacttatgtggtacccaatgccagaatgtaagagttgcaagtgattttgtgctgctattcattaaaacttgtattccagtcttgccagcttaaggagatcaagatattaagaggtatccttgatttattttccagtattcagtagtaaaattttcctgtccactgtgaatcaaagcctgagtcactctatttaaccttggacacactaataaggttttattttgattgtgttcgtttccccccccccaatagtaaaatttctcctcctttaactcctcctaccccccaaggtaagaaacaaaaaacaaacaaacaaacaaaaatagaagacaaaagaaagacatatgaaaggaattgtaattggcttaacagaaacagtctgtaaaaacctaacagtggtgcaatcatgttgtctgtgttgtgttatgtgagaattttctcctaagtcatgcaggtaatgacaatatactgtaaataccacatgtgagtttacctgaatctgtgcattttgtgccttattcatgagaatgatagaagtactaaaatctgtcaagtgttttcagtatagcacattatttactgagtgccagttgtaaatgtttttcaaccagcacctaaaaagactcttttcaaaaaatcacagaaacaacctaggacaattatttgttacataatccgacctcatagcagcattacattctttgccgtgataaacattccactcctgctttcctaaggatgaaacagtgataatgtgaactcaaatgaggtttcctgggtaatgtgacacctgcagaaactatagagcgtcatttatacgtagtttggcagaaaccacttacggctgatgatgcgcaaccctgctgactgtttcagttaatatgctgcacaccacacacttgtttagtgaaccaaatctagaaagtaccaaggcagaggtatgctcctgctgtaatcaggcaaatgagttcaactggatttcttttgacaatactgttggtacctattacttgggggaggacatgttgcagaagaccagatcatttttatacagaatgtgaaatactgatacagttattcttttttttaaagaacattgttttataaagaacgtgatttccagtgatctctggaagcgctaaagctaaaatttctgttcttgaaacacttcagctttgcaactaaaatattacagattaataataaattaaaccaaccaatgataaacactactcagtccaccaacaacaaacgtgtttgaattcaccttaccaatattaatcccagcgtgtgtaaaacagaacagtaactctatgtgaccccagataacattttgtaacattgtgcttccttgtagtttgtaatgtgagttcaatcagtatttatgttgaaatttctaacattaaatctagtctctatcctgttaatttaatttttaaatgctttatccatttgtgcaaaggtaaacgcagattgtatcttttttaatggtacggcataaaaagtaaccctcaagtgaagtgtctctatactgttttatagagtactttaacatgaatagataccttgtaaacttgtattgtggatgtgtaaataatatgtactttgggtttttaacaccgcatgtaaagtcaaaataaaatatacaaatcattata

SEQ ID NO: 315218 - protein, 998 aa, Artificial Sequence
  derived and/or modified sequence
MRVFLLCAYILLLMVSQLRAVSFPEDDEPLNTVDYHYSRQYPVFRGRPSGNESQHRLDFQLMLKIRDTLYIAGRDQVYTVNLNEMPKTEVIPNKKLTWRSRQQDRENCAMKGKHKDECHNFIKVFVPRNDEMVFVCGTNAFNPMCRYYRLSTLEYDGEEISGLARCPFDARQTNVALFADGKLYSATVADFLASDAVIYRSMGDGSALRTIKYDSKWIKEPHFLHAIEYGNYVYFFFREIAVEHNNLGKAVYSRVARICKNDMGGSQRVLEKHWTSFLKARLNCSVPGDSFFYFDVLQSITDIIQINGIPTVVGVFTTQLNSIPGSAVCAFSMDDIEKVFKGRFKEQKTPDSVWTAVPEDKVPKPRPGCCAKHGLAEAYKTSIDFPDETLSFIKSHPLMDSAVPPIADEPWFTKTRVRYRLTAISVDHSAGPYQNYTVIFVGSEAGMVLKVLAKTSPFSLNDSVLLEEIEAYNHAKCSAENEEDKKVISLQLDKDHHALYVAFSSCIIRIPLSRCERYGSCKKSCIASRDPYCGWLSQGSCGRVTPGMLAEGYEQDTEFGNTAHLGDCHGVRWEVQSGESNQMVHMNVLITCVFAAFVLGAFIAGVAVYCYRDMFVRKNRKIHKDAESAQSCTDSSGSFAKLNGLFDSPVKEYQQNIDSPKLYSNLLTSRKELPPNGDTKSMVMDHRGQPPELAALPTPESTPVLHQKTLQAMKSHSEKAHGHGASRKETPQFFPSSPPPHSPLSHGHIPSAIVLPNATHDYNTSFSNSNAHKAEKKLQNIDHPLTKSSSKRDHRRSVDSRNTLNDLLKHLNDPNSNPKAIMGDIQMAHQNLMLDPMGSMSEVPPKVPNREASLYSPPSTLPRNSPTKRVDVPTTPGVPMTSLERQRGYHKNSSQRHSISAMPKNLNSPNGVLLSRQPSMNRGGYMPTPTGAKVDYIQGTPVSVHLQPSLSRQSSYTSNGTLPRTGLKRTPSLKPDVPPKPSFVPQTPSVRPLNKYTY

SEQ ID NO: 315219 - DNA, 2997 bp, Artificial Sequence
  derived and/or modified sequence
atgagagtgttcctgctgtgcgcctacatcctgctgctgatggtgagccagctgagagccgtgagcttccccgaggacgacgagcccctgaacaccgtggactaccactacagcagacagtaccccgtgttcagaggcagacccagcggcaacgagagccagcacagactggacttccagctgatgctgaagatcagagacaccctgtacatcgccggcagagaccaggtgtacaccgtgaacctgaacgagatgcccaagaccgaggtgatccccaacaagaagctgacctggagaagcagacagcaggacagagagaactgcgccatgaagggcaagcacaaggacgagtgccacaacttcatcaaggtgttcgtgcccagaaacgacgagatggtgttcgtgtgcggcaccaacgccttcaaccccatgtgcagatactacagactgagcaccctggagtacgacggcgaggagatcagcggcctggccagatgccccttcgacgccagacagaccaacgtggccctgttcgccgacggcaagctgtacagcgccaccgtggccgacttcctggccagcgacgccgtgatctacagaagcatgggcgacggcagcgccctgagaaccatcaagtacgacagcaagtggatcaaggagccccacttcctgcacgccatcgagtacggcaactacgtgtacttcttcttcagagagatcgccgtggagcacaacaacctgggcaaggccgtgtacagcagagtggccagaatctgcaagaacgacatgggcggcagccagagagtgctggagaagcactggaccagcttcctgaaggccagactgaactgcagcgtgcccggcgacagcttcttctacttcgacgtgctgcagagcatcaccgacatcatccagatcaacggcatccccaccgtggtgggcgtgttcaccacccagctgaacagcatccccggcagcgccgtgtgcgccttcagcatggacgacatcgagaaggtgttcaagggcagattcaaggagcagaagacccccgacagcgtgtggaccgccgtgcccgaggacaaggtgcccaagcccagacccggctgctgcgccaagcacggcctggccgaggcctacaagaccagcatcgacttccccgacgagaccctgagcttcatcaagagccaccccctgatggacagcgccgtgccccccatcgccgacgagccctggttcaccaagaccagagtgagatacagactgaccgccatcagcgtggaccacagcgccggcccctaccagaactacaccgtgatcttcgtgggcagcgaggccggcatggtgctgaaggtgctggccaagaccagccccttcagcctgaacgacagcgtgctgctggaggagatcgaggcctacaaccacgccaagtgcagcgccgagaacgaggaggacaagaaggtgatcagcctgcagctggacaaggaccaccacgccctgtacgtggccttcagcagctgcatcatcagaatccccctgagcagatgcgagagatacggcagctgcaagaagagctgcatcgccagcagagacccctactgcggctggctgagccagggcagctgcggcagagtgacccccggcatgctggccgagggctacgagcaggacaccgagttcggcaacaccgcccacctgggcgactgccacggcgtgagatgggaggtgcagagcggcgagagcaaccagatggtgcacatgaacgtgctgatcacctgcgtgttcgccgccttcgtgctgggcgccttcatcgccggcgtggccgtgtactgctacagagacatgttcgtgagaaagaacagaaagatccacaaggacgccgagagcgcccagagctgcaccgacagcagcggcagcttcgccaagctgaacggcctgttcgacagccccgtgaaggagtaccagcagaacatcgacagccccaagctgtacagcaacctgctgaccagcagaaaggagctgccccccaacggcgacaccaagagcatggtgatggaccacagaggccagccccccgagctggccgccctgcccacccccgagagcacccccgtgctgcaccagaagaccctgcaggccatgaagagccacagcgagaaggcccacggccacggcgccagcagaaaggagaccccccagttcttccccagcagcccccccccccacagccccctgagccacggccacatccccagcgccatcgtgctgcccaacgccacccacgactacaacaccagcttcagcaacagcaacgcccacaaggccgagaagaagctgcagaacatcgaccaccccctgaccaagagcagcagcaagagagaccacagaagaagcgtggacagcagaaacaccctgaacgacctgctgaagcacctgaacgaccccaacagcaaccccaaggccatcatgggcgacatccagatggcccaccagaacctgatgctggaccccatgggcagcatgagcgaggtgccccccaaggtgcccaacagagaggccagcctgtacagcccccccagcaccctgcccagaaacagccccaccaagagagtggacgtgcccaccacccccggcgtgcccatgaccagcctggagagacagagaggctaccacaagaacagcagccagagacacagcatcagcgccatgcccaagaacctgaacagccccaacggcgtgctgctgagcagacagcccagcatgaacagaggcggctacatgcccacccccaccggcgccaaggtggactacatccagggcacccccgtgagcgtgcacctgcagcccagcctgagcagacagagcagctacaccagcaacggcaccctgcccagaaccggcctgaagagaacccccagcctgaagcccgacgtgccccccaagcccagcttcgtgccccagacccccagcgtgagacccctgaacaagtacacctactag

SEQ ID NO: 315220 - DNA, 2997 bp, Artificial Sequence
  derived and/or modified sequence
atgcgggttttccttctgtgtgcctatattctgcttttgatggtgtcgcagctgcgcgccgtgagtttccctgaagacgatgagcctttaaacacagtagattaccattattcacgtcaatatcccgtgttcagagggcggccttcaggaaacgagtcccagcataggcttgattttcagttgatgcttaagattcgcgacacactgtatatagcaggcagagaccaggtatacacagtaaatctgaatgagatgccaaagacagaggtgatccctaacaaaaagctgacgtggcgctcccggcaacaggaccgagaaaactgtgcgatgaaggggaagcataaggacgagtgtcacaacttcatcaaagtcttcgtgcctcgaaacgatgagatggtgttcgtgtgcggtacgaacgcattcaaccctatgtgtcgctactacaggctgagtactctggagtacgatggtgaggagatcagcggccttgccaggtgcccctttgatgccaggcagacaaatgtcgcactgtttgccgacggtaagctttactcggccacagtggctgactttctcgcctcagacgctgtgatttatcgatccatgggtgatggaagcgctctacgcactatcaaatacgacagcaagtggataaaagagcctcactttcttcacgcaatcgagtatggaaactacgtgtatttttttttccgcgaaatcgccgtggaacacaacaacctgggcaaggccgtctattcaagagtagcacgtatctgcaagaatgatatgggcggttcccaaagggtgctggaaaagcattggaccagctttctgaaagctcgacttaattgcagtgtaccgggcgactcgttcttttatttcgacgtattgcagtctattacagatatcatacagatcaacggcattcccactgtggtgggggtcttcaccactcagttgaatagcatcccaggctctgctgtgtgcgccttttcaatggacgacattgaaaaggtctttaaggggcgtttcaaggagcagaaaacccccgattccgtgtggacggcagttcccgaggacaaggtgcccaagccacgccctggatgctgtgcgaagcatggactagctgaggcctacaaaacatctattgactttcccgacgagaccctatcctttattaagtcccacccgctcatggacagcgctgtaccacccatagctgacgaaccatggttcacaaagactagagtgaggtatagactgaccgccatttctgttgaccactccgctggaccttatcagaattacacagtgatcttcgtggggtctgaagctggcatggtgctaaaagtgctggctaagacctcccctttctccctcaatgatagtgtgctgctcgaagagattgaggcgtacaaccatgcaaagtgctcagccgagaatgaggaggataagaaggttatctccctccagttggataaggaccaccatgccttgtatgtcgcatttagtagctgcatcatcagaatcccactctcacgctgcgaacgatatgggtcttgtaagaagagttgtatcgcttcacgagatccttactgcggttggttatcacagggatcttgtggcagggtgacccctggcatgttggcggaaggctatgagcaggacacagagtttggcaataccgcacatcttggcgattgtcacggagtgcggtgggaggtgcagtctggtgagtccaaccagatggtgcacatgaatgtcctaataacatgcgtattcgccgcctttgtgctgggggcttttatcgccggcgtagccgtgtactgctatagagatatgtttgtgaggaagaatcggaagattcacaaggacgcagagtcagcccagtcctgtactgactccagcggctcttttgccaagctgaacggtctgtttgatagtcccgtgaaagaatatcagcaaaacatagacagtccgaagctatactccaacttactcacctctcgcaaggaactacctcctaatggcgacaccaagagcatggtgatggatcacagagggcagccccccgagttggcagctttaccgacccctgagtctacacccgtgcttcatcaaaaaacactgcaggccatgaaaagccattccgagaaggctcacggtcatggcgcttctaggaaagaaaccccacagttctttcctagctctccccccccccactcacccctctctcacgggcacatcccaagtgcaattgtcctgcctaacgccacccacgactacaacacctcgttttcgaactccaacgcccacaaagccgagaagaagcttcagaatattgatcatccccttaccaaatcttcttctaaacgggatcatcgacgatccgttgattcccggaacacattgaacgatctattaaagcacctgaatgatcccaactcaaacccgaaggctattatgggtgacatacagatggcacaccagaatctcatgctggatccaatggggtcgatgagcgaggtacctcctaaagtcccaaatcgggaggcaagcctctatagcccgcccagcaccctcccccgcaacagtcctactaagagagtggacgttcccacaactccaggggtgccgatgaccagcttagaacggcagcgtggttatcacaagaatagctcccagagacacagcatttccgcgatgcctaaaaatttgaactctcctaacggcgttctgttgagcaggcaacccagtatgaatcgaggaggctatatgccaacccccaccggggccaaggtcgattacatccagggcactcccgttagcgtccatctgcaaccaagcctgtccagacagagcagctatacgtctaacggtacgctacctaggaccggtctaaaaaggactccctcgcttaaaccggacgttcctcctaagccgtccttcgtgccgcagactccgtccgtcaggcctctgaataaatatacatactag

SEQ ID NO: 315221 - DNA, 2997 bp, Artificial Sequence
  derived and/or modified sequence
atgagggtcttcctgctgtgtgcctacatcctgctgctgatggtgtcccagctgcgggctgtgtccttcccagaagatgatgagcccctgaacacagtggactaccactacagccggcagtaccctgtgttccggggccggcccagcggaaatgaaagccagcaccggctggacttccagctgatgctgaagatccgggacaccctgtacatcgccggccgggaccaggtgtacacagtgaacctgaatgagatgcccaagacagaggtgatccccaacaagaagctgacctggaggagccggcagcaggaccgggagaactgtgccatgaagggcaagcacaaggatgagtgccacaacttcatcaaggtgtttgtgcccagaaatgatgagatggtgtttgtgtgtggcaccaatgccttcaaccccatgtgccgctactaccgcctgagcaccctggagtatgatggagaggagatcagcggcctggcccgctgcccctttgatgcccggcagaccaacgtggccctgtttgctgatggcaagctgtacagcgccaccgtggccgacttcctggccagtgatgctgtgatctaccgctccatgggagatggcagcgccctgcggaccatcaagtatgacagcaagtggatcaaggagccccacttcctgcacgccattgaatatggcaactacgtgtacttcttcttccgggagattgctgtggagcacaacaacctgggcaaggctgtgtacagccgggtggcccgcatctgcaagaatgacatgggcggcagccagagggtgctggagaagcactggaccagcttcctgaaggcccggctgaactgcagcgtgcctggggacagcttcttctactttgatgtgctgcagagcatcacagacatcatccagatcaatggcatccccaccgtggtgggcgtcttcaccacccagctgaacagcatccctggcagcgctgtgtgtgccttctccatggatgacatcgagaaggtgttcaagggccgcttcaaggagcagaagaccccagacagcgtgtggacagctgtgcctgaggacaaggtgcccaagcccaggcctggctgctgtgccaagcacggcctggccgaggcctacaagaccagcattgacttcccagatgagaccctgtccttcatcaagagccaccccctgatggattctgctgtgccccccatcgcagatgagccctggttcaccaagaccagggtgcgctaccgcctgacagccatctctgtggaccacagcgctggcccctaccagaactacaccgtcatctttgtgggcagcgaggccggcatggtgctgaaggtgctggccaagaccagccccttcagcctgaatgattctgtgctgctggaggagattgaggcctacaaccacgccaagtgcagcgcagaaaatgaggaggacaagaaggtgatcagcctgcagctggacaaggaccaccacgccctgtatgtggccttcagcagctgcatcatccgcatccccctgagccgctgtgaaagatatggcagctgcaagaagagctgcatcgccagccgggacccctactgcggctggctgagccagggcagctgtggccgggtgaccccaggcatgctggccgagggctatgagcaggacacagaatttggaaacacagcccacctgggggactgccacggcgtgcgctgggaggtgcagagcggggagagcaaccagatggtgcacatgaatgtgctgatcacctgtgtgtttgctgcctttgtgctgggcgccttcatcgccggcgtggccgtgtactgctacagagacatgtttgtgaggaagaacaggaagatccacaaggatgctgagagcgcccagagctgcacagacagcagcggcagctttgccaagctgaatggcctgtttgacagccctgtgaaggagtaccagcagaacatcgacagccccaagctgtacagcaacctgctgaccagcaggaaggagctgccccccaacggggacaccaagtccatggtgatggaccaccggggccagcccccagagctggccgccctgcccaccccagagagcacccctgtgctgcaccagaagaccctgcaggccatgaagagccacagcgagaaggcccacggccatggagccagcaggaaggagaccccccagttcttccccagcagccccccaccccacagccccctgagccacggccacatccccagcgccatcgtgctgcccaatgccacccatgactacaacaccagcttcagcaacagcaatgcccacaaggccgagaagaagctgcagaacatcgaccaccccctgaccaagagcagcagcaagagggaccacagaagatctgtggacagcaggaacaccctgaatgacctgctgaagcacctgaatgaccccaacagcaaccccaaggccatcatgggagacatccagatggcccaccagaacctgatgctggaccccatgggctccatgtctgaggtgccccccaaggtgcccaaccgggaggccagcctgtacagcccccccagcaccctgcccaggaacagccccaccaagagggtggatgtgcccaccaccccaggagtgcccatgaccagcctggagcggcagaggggctaccacaagaacagcagccagaggcacagcatcagcgccatgcccaagaacctgaacagccccaacggggtgctgctgagccggcagcccagcatgaacagaggaggctacatgcccacccccaccggggccaaggtggactacatccagggcacccctgtgtctgtgcacctgcagcccagcctgagccggcagagcagctacaccagcaatggcaccctgcccaggacaggcctgaagaggacccccagcctgaagccagatgtgccccccaagcccagctttgtgccccagaccccatctgtgcggcccctgaacaagtacacctactag

SEQ ID NO: 315222 - DNA, 2997 bp, Artificial Sequence
  derived and/or modified sequence
atgcgggtgttcctgctgtgcgcctacatcctgctgctgatggtgagtcagctgcgcgccgttagctttcctgaggacgatgagccacttaacaccgtagactaccattatagcaggcagtaccctgtgttccgagggaggccctcgggaaacgaatctcaacatcggttagattttcagcttatgctgaagataagggatacattgtacatcgcaggccgtgaccaagtgtatacagtcaatctgaatgaaatgcccaaaacagaagttatacccaataagaaattgacatggaggagccgccaacaagatagggaaaattgcgccatgaaggggaaacataaagacgaatgccataacttcattaaggtgtttgtgccgcgcaatgatgagatggtgttcgtgtgcgggaccaacgcattcaatcccatgtgtcggtattaccggctttctacccttgagtacgacggagaggagatctctggattagctagatgtcctttcgatgccaggcagacaaatgtggctttatttgccgacggcaagttatactcagccaccgtggcagattttctggcctccgacgcggtgatctaccgcagcatgggggacggcagtgcactgcggactatcaaatacgacagcaaatggatcaaagagccccattttctgcatgcgatcgaatacggtaattacgtctacttcttctttcgagaaattgccgtggaacataataacctcggtaaagccgtatatagtagggtggcaagaatttgcaaaaacgacatggggggatctcaaagagtcctcgagaagcactggacttccttcttgaaagcaaggctgaactgttccgtgccgggcgacagtttcttttactttgacgttctacagtctatcacagatataatacagattaacggcatcccgacagtggtgggcgtattcaccacccaactgaacagtatccctggctcggcggtttgcgcattctccatggacgatattgaaaaggtgttcaagggtcggtttaaagaacagaaaacaccagactccgtctggacagcagtcccggaggataaggttcctaagccaaggcccggctgctgcgccaaacatggactggctgaagcttataagacttccattgattttcccgacgagactttgtcattcatcaaatcacatcctctcatggactccgccgttccccccatcgcggacgagccatggttcactaagacgagggttcgatatcgcctaactgcgatttcggtggatcacagcgcggggccataccaaaactatacggtcatctttgtgggctccgaggctggtatggtgctgaaggttctggctaagacgtcccccttttctctgaacgacagcgttctgctcgaagaaatcgaagcctataaccatgctaagtgcagcgcagagaatgaagaagataaaaaagtgatctcgttgcaactggataaagaccatcacgccttgtatgtagccttctcatcttgcattatccggattccactgtctcggtgtgagcgatacggttcttgcaaaaaatcatgtatcgccagtagggacccatattgtggctggctgtctcagggaagctgcggccgagtgacacctggcatgttagccgaggggtacgaacaggacaccgaattcggaaataccgcccatcttggcgattgccacggcgtgcggtgggaagtccagagtggtgagtccaatcagatggtgcacatgaacgtcctgataacgtgtgtgtttgccgctttcgtgctgggcgctttcatcgccggagtggctgtatattgttacagggacatgtttgtgagaaaaaataggaagatccataaagacgccgagtctgcacagtcctgtacggattcgagtgggtcattcgcgaaattaaatgggctgttcgacagtcctgtcaaggaataccagcaaaacattgacagccctaagctgtatagtaacctgctcacaagccgtaaagagctgccaccgaatggcgataccaagtcaatggttatggaccatcgcggccagccccctgaacttgcggcactgccgacacctgagtccaccccggttcttcaccaaaaaaccctgcaggctatgaagtcacattccgaaaaggcccacggtcacggggcctctcgcaaggagactcctcagtttttcccatcaagcccccctcctcacagtccactgtcccatgggcatattcctagcgccatcgtcctgcctaatgcaacacatgactataacaccagctttagcaacagcaacgcccataaggcggagaaaaaactccagaatatcgaccacccattaacaaagtctagtagtaagagggatcacaggaggtccgttgacagccgcaacaccctgaacgatctcctcaaacacctgaatgatcctaacagtaatccaaaggcaatcatgggagatatccaaatggcacaccaaaacctcatgctggatccaatgggcagtatgtctgaggtaccacctaaggttcccaaccgcgaagctagcctgtatagcccaccgagtacactgccacgtaacagccccactaaacgggttgatgtgccaacgactcccggggtgcctatgactagccttgaaagacaaagaggttaccacaagaatagcagccaaaggcactctattagcgcaatgccgaagaatttgaactctcctaatggcgtgttactgtcaaggcaaccttcaatgaaccgcggaggctatatgcccacccccaccggggcaaaggtggattacatacaaggaacacctgtcagtgtgcatttacaaccatccctctcacggcagtcatcgtacacatctaacggcacccttccccggaccggcctcaagcgaaccccgtctctgaagccagacgttcccccaaagccttcgtttgtccctcagacccccagcgttcgcccactcaataaatatacttattag

SEQ ID NO: 315223 - DNA, 2997 bp, Artificial Sequence
  derived and/or modified sequence
atgcgagtgtttttgctctgtgcttatatcctgctgctcatggtgtcccaactccgggcagtttcgttcccagaagatgacgaacccctgaatactgtggattatcactactctcgtcaatatccagttttcagagggaggccttcgggaaacgagtctcagcaccgcctcgatttccagctgatgttaaaaatcagggacaccctctacattgccggtcgggatcaagtttacaccgtcaacttgaacgagatgcccaagacggaagtcatcccgaataaaaagctgacatggagatctagacagcaggacagagagaattgcgccatgaaaggcaagcataaggacgaatgccacaatttcatcaaagtcttcgtaccacgcaatgatgagatggtcttcgtttgcggcaccaacgcttttaatcccatgtgccggtactaccgtctgtccacattggagtatgatggggaggaaatcagcggactcgcgcgttgccctttcgacgcccgacagactaacgttgctctgttcgctgacggcaagctgtacagtgccactgtggccgactttctggcttccgatgccgttatataccgctcaatgggcgatggttctgcacttcggaccatcaaatacgatagtaaatggattaaagagccccactttttacacgccatcgagtatggaaattatgtgtactttttctttcgggagattgccgtggaacataacaatttgggcaaagcagtctattctcgagtcgcgaggatctgcaagaatgacatgggaggctcacagcgcgtcctggagaaacactggaccagttttcttaaagccaggctaaactgttccgtccccggtgactcatttttttattttgacgtgctccagtcaataactgacatcatccaaattaatggcattcccacggtagtgggtgtgttcacaacacagctgaactccatcccgggatctgccgtatgcgctttctctatggatgacatcgagaaggtattcaagggcaggttcaaggaacagaaaactcccgattccgtgtggaccgccgtgccagaagataaagtgcctaagcccaggccaggatgttgcgcaaagcatggactagccgaggcatacaagactagtattgatttccccgatgaaaccctcagcttcattaaaagccacccactgatggactccgccgtccctccaatcgcggacgaaccttggttcacaaaaacacgcgtgagataccgcctcacggctatatctgtggatcactccgctggcccataccagaactacaccgtgattttcgtgggcagcgaagccggaatggtactaaaagtgcttgccaaaactagcccattttcccttaatgactctgttctgctggaagaaattgaggcttacaaccacgctaagtgcagtgccgagaacgaggaggacaagaaagtgatctccctgcagctggacaaggaccaccatgccctgtacgtcgccttctcatcttgtattatcaggatcccactctctcgatgtgaacggtacgggtcatgtaagaagtcgtgcatcgcctctcgtgatccctactgcggatggctgagccaggggtcgtgcggcagggtgacacctggcatgctggccgagggctacgaacaagacacagagttcggaaacaccgcccaccttggcgattgtcatggtgtacggtgggaggttcaaagcggcgaatcaaatcagatggtgcacatgaacgtgctgataacatgcgtgttcgcagctttcgtgttgggagccttcatcgccggtgttgccgtttattgttaccgggatatgtttgtgcgaaaaaaccgaaagatccataaggacgctgaatctgctcagtcctgcactgactcaagcggaagtttcgccaagcttaacggcctttttgacagccccgtgaaggagtatcagcagaacatcgattcccctaagttgtactccaatctattaacaagtcgcaaggaactcccacctaacggagatacaaagagtatggtgatggatcaccgcggacaaccaccagaactggccgctctccctactcctgaatcgacccccgttttgcaccagaaaactctacaagccatgaagtcacactcagaaaaagcccacgggcacggggcatccagaaaggagactccccaattcttcccgtccagtccgcctccacattctcctctgtcccacgggcacatcccatcagcaatagtgctgccaaacgctactcacgattataacacatcattctcaaattccaacgcccacaaggccgaaaagaagctgcagaatattgaccacccactgactaagtctagctctaagcgcgatcatagaaggtccgtggatagtcgcaacacattgaatgatctgctgaaacacctgaacgaccccaatagcaatcccaaggccattatgggggacatacagatggcgcaccagaatcttatgctggatcctatgggatctatgagcgaagtcccccctaaggtccctaaccgagaggcatcgctgtactcacccccatcaacattacctagaaactcacctaccaaaagagtggacgtaccaactaccccaggagttccgatgacctctttggagagacaacggggatatcacaaaaactcttcgcaacgacatagcatttccgcgatgcctaagaaccttaacagtccgaacggagtcttactaagcagacagccttctatgaatcgtgggggatacatgcctacacctaccggtgccaaggtcgactatattcagggtacccctgtaagcgtgcacctccagcccagtctttcgagacagtcgagctacacctcgaacggcactctcccaagaactggcctgaaacgaaccccatcgctcaagcccgacgtccctccaaagcccagtttcgttcctcaaacccccagtgtaagacccctgaataagtatacatactag

SEQ ID NO: 315224 - DNA, 5874 bp, Artificial Sequence
  derived and/or modified sequence
gcggccgcttcccaccgtccctctccccttactggcagagcgcgctgcgggcggactcccgggcccggagcagcccaccggccaccccaccgcccacccggctcccggtgtctcctcccggccgctctacccagcaactttccgtgctttgttccccgactggaaatgctttacggaagcgtcttggacagggtctccgccaggcgacaagagctcggtgctgagatgtgttacgttctcatctccccatcaattatggatggaaacaaataaggaagagtcaattttgctgagccccttctccggcaacgagaggcgttctgcagccgggagggagccgccgctcgcgccggcagccgctggcaggggcatggtgaggaggaaggtagctcagtggcatttctgagcaggggccaccctgacttcaccttggcccaccatgagggtcttcctgctttgtgcctacatactgctgctgatggtttcccagttgagggcagtcagctttcctgaagatgatgaaccccttaatactgtcgactatcactattcaaggcaatatccggtttttagaggacgcccttcaggcaatgaatcgcagcacaggctggactttcagctgatgttgaaaattcgagacacactttatattgctggcagggatcaagtttatacagtaaacttaaatgaaatgcccaaaacagaagtaatacccaacaagaaactgacatggcgatcaagacaacaggatcgagaaaactgtgctatgaaaggcaagcataaagatgaatgccacaactttatcaaagtatttgttccaagaaacgatgagatggtttttgtttgtggtaccaatgcattcaatcccatgtgtagatactacaggttgagtaccttagaatatgatggggaagaaattagtggcctggcaagatgcccatttgatgccagacaaaccaatgttgccctctttgctgatgggaagctgtattctgccacagtggctgacttcttggccagcgatgccgttatttatcgaagcatgggtgatggatctgcccttcgcacaataaaatatgattccaaatggataaaagagccacactttcttcatgccatagaatatggaaactatgtctatttcttctttcgagaaatcgctgtcgaacataataatttaggcaaggctgtgtattcccgcgtggcccgcatatgtaaaaacgacatgggtggttcccagcgggtcctggagaaacactggacttcatttctaaaggctcggctgaactgttctgtccctggagattcgtttttctactttgatgttctgcagtctattacagacataatacaaatcaatggcatccccactgtggtcggggtgtttaccacgcagctcaatagcatccctggttctgctgtctgtgcatttagcatggatgacattgaaaaagtattcaaaggacggtttaaggaacagaaaactccagattctgtttggacagcagttcccgaagacaaagtgccaaagccaaggcctggctgttgtgcaaaacacggccttgccgaagcttataaaacctccatcgatttcccggatgaaactctgtcattcatcaaatctcatcccctgatggactctgccgttccacccattgccgatgagccctggttcacaaagactcgggtcaggtacagactgacggccatctcagtggaccattcagccggaccctaccagaactacacagtcatctttgttggctctgaagctggcatggtacttaaagttctggcaaagaccagtcctttctctttgaacgacagcgtattactggaagagattgaagcctacaaccatgcaaagtgcagtgctgagaatgaggaagacaaaaaggtcatctcattacagttggataaagatcaccacgctttatatgtggcgttctctagctgcattatccgcatccccctcagtcgctgtgagcgttatggatcatgtaaaaagtcttgtattgcatctcgtgacccgtattgtggctggttaagccagggatcctgtggtagagtgaccccagggatgcttgctgaaggatatgaacaagacacagaattcggcaacacagctcatctaggggactgccatggtgtacgatgggaagtccagtctggagagtccaaccagatggtccacatgaatgtcctcatcacctgtgtctttgctgcttttgttttgggggcattcattgcaggtgtggcagtatactgctatcgagacatgtttgttcggaaaaacagaaagatccataaagatgcagagtccgcccagtcatgcacagactccagtggaagttttgccaaactgaatggtctctttgacagccctgtcaaggaataccaacagaatattgattctcctaaactgtatagtaacctgctaaccagtcggaaagagctaccacccaatggagatactaaatccatggtaatggaccatcgagggcaacctccagagttggctgctcttcctactcctgagtctacacccgtgcttcaccagaagaccctgcaggccatgaagagccactcagaaaaggcccatggccatggagcttcaaggaaagaaacccctcagttttttccgtctagtccgccacctcattccccattaagtcatgggcatatccccagtgccattgttcttccaaatgctacccatgactacaacacgtctttctcaaactccaatgctcacaaagctgaaaagaagcttcaaaacattgatcaccctctcacaaagtcatccagtaagagagatcaccggcgttctgttgattccagaaataccctcaatgatctcctgaagcatctgaatgacccaaatagtaaccccaaagccatcatgggagacatccagatggcacaccagaacttaatgctggatcccatgggatcgatgtctgaggtcccacctaaagtccctaaccgggaggcatcgctatactcccctccttcaactctccccagaaatagcccaaccaagcgagtggatgtccccaccactcctggagtcccaatgacttctctggaaagacaaagaggttatcacaaaaattcctcccagaggcactctatatctgctatgcctaaaaacttaaactcaccaaatggtgttttgttatccagacagcctagtatgaaccgtggaggatatatgcccacccccactggggcgaaggtggactatattcagggaacaccagtgagtgttcatctgcagccttccctctccagacagagcagctacaccagtaatggcactcttcctaggacgggactaaagaggacgccgtccttaaaacctgacgtgccaccaaagccttcctttgttcctcaaaccccatctgtcagaccactgaacaaatacacatactaggcctcaagtgtgctattcccatgtggctttatcctgtccgtgttgttgagaggatgatgttgtaagggtaccttaaaacaagagactcgcttgtattttaagagaaccaagtggccaaagaaactctttctaactttggcaacatcagaacttgccacatgtagctactgcagcaaggcttctgtgtacttgcctgaaaacaaaggaaggtgctggtcattccatttcttttgtttgaagctaaagagatgtgtagctcacaggggctaccttaccagtataaagagctgataacagtactcagaagaatctgtgaacaaatacttgaaaatgggttcaatgtagactgccattatgtgtggtcttcccattaaatgtgaacattttaatatgtatgcattcaccttgcctcttgcacaaatgtcaaaaaaaagatggtaatatctcaaagaaatgaacttgtagattaccaagcagtttgctaaaaattcaatctttgacccaagctgtagcatttttttttcatgtgtggcatctttttcatgccaccaacaaacttgttgtgtgtgtgcgtgtgtgtgtgtgtgtgtgtgtgtgtgtgtgtgttctgtacccactaggatttgtttaggtgcccattgcatctttttgtgctatggagttgtttacattaagcatgaccgaacgagagacaatactatttcccacaggagtccattgggttcagctttgaaagaggaatagaatcgaggctcctttgaccatcaaaatgatgaactttacttatgtggtacccaatgccagaatgtaagagttgcaagtgattttgtgctgctattcattaaaacttgtattccagtcttgccagcttaaggagatcaagatattaagaggtatccttgatttattttccagtattcagtagtaaaattttcctgtccactgtgaatcaaagcctgagtcactctatttaaccttggacacactaataaggttttattttgattgtgttcgtttccccccccccaatagtaaaatttctcctcctttaactcctcctaccccccaaggtaagaaacaaaaaacaaacaaacaaacaaaaatagaagacaaaagaaagacatatgaaaggaattgtaattggcttaacagaaacagtctgtaaaaacctaacagtggtgcaatcatgttgtctgtgttgtgttatgtgagaattttctcctaagtcatgcaggtaatgacaatatactgtaaataccacatgtgagtttacctgaatctgtgcattttgtgccttattcatgagaatgatagaagtactaaaatctgtcaagtgttttcagtatagcacattatttactgagtgccagttgtaaatgtttttcaaccagcacctaaaaagactcttttcaaaaaatcacagaaacaacctaggacaattatttgttacataatccgacctcatagcagcattacattctttgccgtgataaacattccactcctgctttcctaaggatgaaacagtgataatgtgaactcaaatgaggtttcctgggtaatgtgacacctgcagaaactatagagcgtcatttatacgtagtttggcagaaaccacttacggctgatgatgcgcaaccctgctgactgtttcagttaatatgctgcacaccacacacttgtttagtgaaccaaatctagaaagtaccaaggcagaggtatgctcctgctgtaatcaggcaaatgagttcaactggatttcttttgacaatactgttggtacctattacttgggggaggacatgttgcagaagaccagatcatttttatacagaatgtgaaatactgatacagttattcttttttttaaagaacattgttttataaagaacgtgatttccagtgatctctggaagcgctaaagctaaaatttctgttcttgaaacacttcagctttgcaactaaaatattacagattaataataaattaaaccaaccaatgataaacactactcagtccaccaacaacaaacgtgtttgaattcaccttaccaatattaatcccagcgtgtgtaaaacagaacagtaactctatgtgaccccagataacattttgtaacattgtgcttccttgtagtttgtaatgtgagttcaatcagtatttatgttgaaatttctaacattaaatctagtctctatcctgttaatttaatttttaaatgctttatccatttgtgcaaaggtaaacgcagattgtatcttttttaatggtacggcataaaaagtaaccctcaagtgaagtgtctctatactgttttatagagtactttaacatgaatagataccttgtaaacttgtattgtggatgtgtaaataatatgtactttgggtttttaacaccgcatgtaaagtcaaaataaaatatacaaatcattata

SEQ ID NO: 315225 - DNA, 660 bp, Artificial Sequence
  derived and/or modified sequence
atgagagtgttcctgctgtgcgcctacatcctgctgctgatggtgagccagctgagagccgtgagcttccccgaggacgacgagcccctgaacaccgtggactaccactacagcagacagtaccccgtgttcagaggcagacccagcggcaacgagagccagcacagactggacttccagctgatgctgaagatcagagacaccctgtacatcgccggcagagaccaggtgtacaccgtgaacctgaacgagatgcccaagaccgaggtgatccccaacaagaagctgacctggagaagcagacagcaggacagagagaactgcgccatgaagggcaagcacaaggacgagtgccacaacttcatcaaggtgttcgtgcccagaaacgacgagatggtgttcgtgtgcggcaccaacgccttcaaccccatgtgcagatactacagactgagcaccctggagtacgacggcgaggagatcagcggcctggccagatgccccttcgacgccagacagaccaacgtggccctgttcgccgacggcaagctgtacagcgccaccgtggccgacttcctggccagcgacgccgtgatctacagaagcatgggcgacggcagcgccctgagaaccatcaagtacgacagcaagtggatcaagtag

SEQ ID NO: 315226 - DNA, 447 bp, Artificial Sequence
  derived and/or modified sequence
atgagagtgttcctgctgtgcgcctacatcctgctgctgatggtgagccagctgagagccgtgagcttccccgaggacgacgagcccctgaacaccgtggactaccactacagcagacagtaccccgtgttcagaggcagacccagcggcaacgagagccagcacagactggacttccagctgatgctgaagatcagagacaccctgtacatcgccggcagagaccaggtgtacaccgtgaacctgaacgagatgcccaagaccgaggtgatccccaacaagaagctgacctggagaagcagacagcaggacagagagaactgcgccatgaagggcaagcacaaggacgagtgccacaacttcatcaaggtgttcgtgcccagaaacgacgagatggtgttcgtgtgcggcaccaacgccttcaaccccatgtgcagatactactag

SEQ ID NO: 315227 - DNA, 660 bp, Artificial Sequence
  derived and/or modified sequence
atgcgagtgttcctgctatgcgcttacatcctgctactgatggtctctcaactccgcgctgtttcattcccagaggacgatgagcctttgaacaccgtagactaccactactcccgccaatatcctgtgttccgtggccgcccatcggggaacgagtctcaacaccggctggactttcagctaatgctgaagataagagacactctttatattgctggccgggaccaggtgtacactgttaatctgaacgagatgccaaaaacggaggtgattccgaacaagaaacttacctggaggtcgagacaacaggacagagaaaactgcgcgatgaaggggaaacataaggacgagtgtcacaactttattaaggtgttcgtccctaggaatgatgagatggtatttgtgtgtgggaccaacgcgttcaatccaatgtgccggtattacagactgagcacgctcgagtatgatggtgaagagattagcggccttgcccgctgcccttttgatgccagacagactaacgtggctctattcgccgacggcaagctgtacagtgccacggtggctgacttcctagcatctgacgcagtaatctacagatccatgggcgacggatcggcactccggacaatcaagtacgattccaagtggatcaaatag

SEQ ID NO: 315228 - DNA, 447 bp, Artificial Sequence
  derived and/or modified sequence
atgcgagtatttctactgtgcgcctatatcctattgctgatggtctcccaactgcgcgccgtgtcttttccagaggacgacgaaccgctcaataccgtggattaccactactctcgacagtaccctgtgtttagaggccggccttcaggcaacgagtctcagcatcgccttgactttcagctcatgcttaagattagggatacactgtacatagctgggcgcgaccaggtgtataccgtcaatctaaatgagatgcccaagactgaggtaataccaaataagaagctgacatggagatcacgccagcaggaccgggagaattgtgcaatgaagggaaagcacaaagacgaatgccacaactttattaaagtgtttgtcccacggaatgatgaaatggttttcgtgtgcgggaccaacgcgttcaaccccatgtgtcgatattactag

SEQ ID NO: 315229 - DNA, 660 bp, Artificial Sequence
  derived and/or modified sequence
atgagggtcttcctgctgtgtgcctacatcctgctgctgatggtgtcccagctgcgggctgtgtccttcccagaagatgatgagcccctgaacacagtggactaccactacagccggcagtaccctgtgttccggggccggcccagcggaaatgaaagccagcaccggctggacttccagctgatgctgaagatccgggacaccctgtacatcgccggccgggaccaggtgtacacagtgaacctgaatgagatgcccaagacagaggtgatccccaacaagaagctgacctggaggagccggcagcaggaccgggagaactgtgccatgaagggcaagcacaaggatgagtgccacaacttcatcaaggtgtttgtgcccagaaatgatgagatggtgtttgtgtgtggcaccaatgccttcaaccccatgtgccgctactaccgcctgagcaccctggagtatgatggagaggagatcagcggcctggcccgctgcccctttgatgcccggcagaccaacgtggccctgtttgctgatggcaagctgtacagcgccaccgtggccgacttcctggccagtgatgctgtgatctaccgctccatgggagatggcagcgccctgcggaccatcaagtatgacagcaagtggatcaagtag

SEQ ID NO: 315230 - DNA, 447 bp, Artificial Sequence
  derived and/or modified sequence
atgagggtcttcctgctgtgtgcctacatcctgctgctgatggtgtcccagctgcgggctgtgtccttcccagaagatgatgagcccctgaacacagtggactaccactacagccggcagtaccctgtgttccggggccggcccagcggaaatgaaagccagcaccggctggacttccagctgatgctgaagatccgggacaccctgtacatcgccggccgggaccaggtgtacacagtgaacctgaatgagatgcccaagacagaggtgatccccaacaagaagctgacctggaggagccggcagcaggaccgggagaactgtgccatgaagggcaagcacaaggatgagtgccacaacttcatcaaggtgtttgtgcccagaaatgatgagatggtgtttgtgtgtggcaccaatgccttcaaccccatgtgccgctactactag

SEQ ID NO: 315231 - DNA, 660 bp, Artificial Sequence
  derived and/or modified sequence
atgcgggtgttcctgctgtgcgcctacatcctgctgctgatggtgtcccagctcagagccgtcagttttcccgaagacgacgagcccctcaacacagtcgactaccactactcccggcagtaccctgtgttccgcggccggccctcagggaatgaaagccaacacaggctcgactttcagctcatgttgaaaatccgtgatactctttacatcgccgggcgggaccaggtgtatacagtgaacctgaacgaaatgcccaagacagaggtgatccctaacaagaagctgacttggcggagcaggcagcaggacagggaaaattgtgcgatgaaaggaaagcataaggacgagtgtcataacttcattaaggttttcgtgccacgaaatgatgagatggtgttcgtgtgcggcacaaacgccttcaaccccatgtgccgctattatcggctcagcacactagagtatgatggggaggaaatttccggcctcgccaggtgcccttttgatgcgcgtcagactaacgtcgccctgtttgccgatggtaaactttactctgcaacagtggcagattttctggcctctgatgcagtaatataccggtccatgggggatggaagcgccctaagaacaataaaatacgactccaagtggataaagtag

SEQ ID NO: 315232 - DNA, 447 bp, Artificial Sequence
  derived and/or modified sequence
atgcgggtgttcctgctgtgcgcctacatcctgctgctgatggtgtcacaattgagagccgtgtccttccccgaggatgatgagcccctgaacaccgtggactaccactatagcaggcagtaccctgtcttcagggggcgcccctccggcaatgagtcccagcacaggctcgattttcagctgatgcttaagattagggataccctctatatcgcaggaagagaccaggtctacacagtgaatctgaacgagatgcctaaaaccgaggtgattcctaataagaaactgacatggaggtcccggcaacaggaccgagaaaactgtgccatgaagggcaagcataaggatgaatgccataatttcattaaggtcttcgtgccacgcaatgacgagatggtctttgtctgtggaaccaacgcctttaatccaatgtgcaggtactactag

SEQ ID NO: 315233 - DNA, 660 bp, Artificial Sequence
  derived and/or modified sequence
atgcgggtgttcttactgtgtgcatacatcttgctgttaatggtgtctcaacttagagcagtttcattccctgaggacgatgagccactgaatacagtggactaccactacagtagacagtacccagtttttcgcggtagacccagcggaaacgagtcacagcaccggctggatttccagcttatgctcaagatccgggataccctgtacattgctggtcgcgaccaggtttacaccgtaaatctgaatgagatgcccaaaacagaggtgatcccgaataagaagctaacctggaggtcaaggcaacaggaccgggaaaattgcgccatgaagggcaaacacaaggatgagtgtcacaattttataaaagtgttcgtccctaggaatgatgagatggtgttcgtgtgtggaacaaacgcatttaacccgatgtgcaggtactatcgcttgtctacccttgaatatgatggcgaagaaatttcaggactcgccagatgtccttttgacgctagacagaccaacgttgccctatttgcagatggtaagctatattccgcaactgtggctgacttccttgcttcggacgccgtcatttataggagtatgggcgacggtagtgcccttcggacaatcaaatatgattctaaatggataaaatag

SEQ ID NO: 315234 - DNA, 447 bp, Artificial Sequence
  derived and/or modified sequence
atgcgcgtattcctgttgtgtgcctacatcctcctcttgatggtgagccaattgcgggctgtttccttccccgaagacgatgaaccactgaacaccgtggactatcactacagtagacagtaccccgtatttcggggaagaccctcgggcaatgaatctcagcacaggcttgacttccagcttatgctgaaaatcagggacacattgtatatcgcaggaagggatcaggtgtacacagtaaacctgaacgagatgcctaaaactgaagtgatacccaacaaaaaactgacctggcgaagtcggcagcaggaccgcgaaaactgcgcaatgaaaggcaaacataaagatgagtgtcacaacttcatcaaagtttttgtgccacggaacgacgagatggtgttcgtgtgtggcaccaatgcctttaatccgatgtgtagatattactag

SEQ ID NO: 315235 - DNA, 545 bp, Artificial Sequence
  derived and/or modified sequence
gcatgctaacattcatggaggcagacatgtgtacccagaatcagagggagccggttatcctcagttggagatcccaaaagacttctgcatacagttcctttcgttggatggagacactgtaagaaccacggagtgttaaacttggggcttgggaatcagagtccatccttgaatttcacaaaagaaacgaccgaaatcaaaagaaggcaagatacagctgttcgcatttgcagacctgtatgatctccaacctgagcatatgccagttgacatgggaacactgaggccagcaatttaaggatttcacatttgcttgcagtgaatgcgtaatcctggatctcttgttcgcaaatcgacagcctgaagccctctggaagcccaagactgctggaggtttttgaccagacaagccaacctttttcaaggtagctcagtggcatttctgagcaggggccaccctgacttcaccttggcccaccatgagggtcttcctgctttgtgcctacatactgctgctgatggtttcccagttgagggcagtcagc

SEQ ID NO: 315236 - DNA, 734 bp, Artificial Sequence
  derived and/or modified sequence
ccaaactgcttctgttttccaggtagctcagtggcatttctgagcaggggccaccctgacttcaccttggcccaccatgagggtcttcctgctttgtgcctacatactgctgctgatggtttcccagttgagggcagtcagctttcctgaagatgatgaaccccttaatactgtcgactatcactattcaaggcaatatccggtttttagaggacgcccttcaggcaatgaatcgcagcacaggctggactttcagctgatgttgaaaattcgagacacactttatattgctggcagggatcaagtttatacagtaaacttaaatgaaatgcccaaaacagaagtaatacccaacaagaaactgacatggcgatcaagacaacaggatcgagaaaactgtgctatgaaaggcaagcataaagatgaatgccacaactttatcaaagtatttgttccaagaaacgatgagatggtttttgtttgtggtaccaatgcattcaatcccatgtgtagatactacaggttgagtaccttagaatatgatggggaagaaattagtggcctggcaagatgcccatttgatgccagacaaaccaatgttgccctctttgctgatgggaagctgtattctgccacagtggctgacttcttggccagcgatgccgttatttatcgaagcatgggtgatggatctgcccttcgcacaataaaatatgattccaaatggataaaag

SEQ ID NO: 315237 - DNA, 588 bp, Artificial Sequence
  derived and/or modified sequence
aaggcagaacttcacggaacaactgcgcccgcagctctcctgggctgcagtgatttgtcctctgggttctggaggaaagctctgaaagaagtagctcagtggcatttctgagcaggggccaccctgacttcaccttggcccaccatgagggtcttcctgctttgtgcctacatactgctgctgatggtttcccagttgagggcagtcagctttcctgaagatgatgaaccccttaatactgtcgactatcactattcaaggcaatatccggtttttagaggacgcccttcaggcaatgaatcgcagcacaggctggactttcagctgatgttgaaaattcgagacacactttatattgctggcagggatcaagtttatacagtaaacttaaatgaaatgcccaaaacagaagtaatacccaacaagaaactgacatggcgatcaagacaacaggatcgagaaaactgtgctatgaaaggcaagcataaagatgaatgccacaactttatcaaagtatttgttccaagaaacgatgagatggtttttgtttgtggtaccaatgcattcaatcccatgtgtagatactac

SEQ ID NO: 315238 - protein, 641 aa, Artificial Sequence
  derived and/or modified sequence
MLSGIEAAAGEYEDSELRCRVAVEELSPGGQPRRRQALRTAELSLGRNERRELMLRLQAPGPAGRPRCFPLRAARLFTRFAEAGRSTLRLPAHDTPGAGAVQLLLSDCPPDRLRRFLRTLRLKLAAAPGPGPASARAQLLGPRPRDFVTISPVQPEERRLRAATRVPDTTLVKRPVEPQAGAEPSTEAPRWPLPVKRLSLPSTKPQLSEEQAAVLRAVLKGQSIFFTGSAGTGKSYLLKRILGSLPPTGTVATASTGVAACHIGGTTLHAFAGIGSGQAPLAQCVALAQRPGVRQGWLNCQRLVIDEISMVEADLFDKLEAVARAVRQQNKPFGGIQLIICGDFLQLPPVTKGSQPPRFCFQSKSWKRCVPVTLELTKVWRQADQTFISLLQAVRLGRCSDEVTRQLQATASHKVGRDGIVATRLCTHQDDVALTNERRLQELPGKVHRFEAMDSNPELASTLDAQCPVSQLLQLKLGAQVMLVKNLSVSRGLVNGARGVVVGFEAEGRGLPQVRFLCGVTEVIHADRWTVQATGGQLLSRQQLPLQLAWAMSIHKSQGMTLDCVEISLGRVFASGQAYVALSRARSLQGLRVLDFDPMAVRCDPRVLHFYATLRRGRSLSLESPDDDEAASDQENMDPIL

SEQ ID NO: 315239 - DNA, 1926 bp, Artificial Sequence
  derived and/or modified sequence
atgctgagcggcatcgaggccgccgccggcgagtacgaggacagcgagctgagatgcagagtggccgtggaggagctgagccccggcggccagcccagaagaagacaggccctgagaaccgccgagctgagcctgggcagaaacgagagaagagagctgatgctgagactgcaggcccccggccccgccggcagacccagatgcttccccctgagagccgccagactgttcaccagattcgccgaggccggcagaagcaccctgagactgcccgcccacgacacccccggcgccggcgccgtgcagctgctgctgagcgactgcccccccgacagactgagaagattcctgagaaccctgagactgaagctggccgccgcccccggccccggccccgccagcgccagagcccagctgctgggccccagacccagagacttcgtgaccatcagccccgtgcagcccgaggagagaagactgagagccgccaccagagtgcccgacaccaccctggtgaagagacccgtggagccccaggccggcgccgagcccagcaccgaggcccccagatggcccctgcccgtgaagagactgagcctgcccagcaccaagccccagctgagcgaggagcaggccgccgtgctgagagccgtgctgaagggccagagcatcttcttcaccggcagcgccggcaccggcaagagctacctgctgaagagaatcctgggcagcctgccccccaccggcaccgtggccaccgccagcaccggcgtggccgcctgccacatcggcggcaccaccctgcacgccttcgccggcatcggcagcggccaggcccccctggcccagtgcgtggccctggcccagagacccggcgtgagacagggctggctgaactgccagagactggtgatcgacgagatcagcatggtggaggccgacctgttcgacaagctggaggccgtggccagagccgtgagacagcagaacaagcccttcggcggcatccagctgatcatctgcggcgacttcctgcagctgccccccgtgaccaagggcagccagccccccagattctgcttccagagcaagagctggaagagatgcgtgcccgtgaccctggagctgaccaaggtgtggagacaggccgaccagaccttcatcagcctgctgcaggccgtgagactgggcagatgcagcgacgaggtgaccagacagctgcaggccaccgccagccacaaggtgggcagagacggcatcgtggccaccagactgtgcacccaccaggacgacgtggccctgaccaacgagagaagactgcaggagctgcccggcaaggtgcacagattcgaggccatggacagcaaccccgagctggccagcaccctggacgcccagtgccccgtgagccagctgctgcagctgaagctgggcgcccaggtgatgctggtgaagaacctgagcgtgagcagaggcctggtgaacggcgccagaggcgtggtggtgggcttcgaggccgagggcagaggcctgccccaggtgagattcctgtgcggcgtgaccgaggtgatccacgccgacagatggaccgtgcaggccaccggcggccagctgctgagcagacagcagctgcccctgcagctggcctgggccatgagcatccacaagagccagggcatgaccctggactgcgtggagatcagcctgggcagagtgttcgccagcggccaggcctacgtggccctgagcagagccagaagcctgcagggcctgagagtgctggacttcgaccccatggccgtgagatgcgaccccagagtgctgcacttctacgccaccctgagaagaggcagaagcctgagcctggagagccccgacgacgacgaggccgccagcgaccaggagaacatggaccccatcctgtag

SEQ ID NO: 315240 - DNA, 801 bp, Artificial Sequence
  derived and/or modified sequence
atgctgagcggcatcgaggccgccgccggcgagtacgaggacagcgagctgagatgcagagtggccgtggaggagctgagccccggcggccagcccagaagaagacaggccctgagaaccgccgagctgagcctgggcagaaacgagagaagagagctgatgctgagactgcaggcccccggccccgccggcagacccagatgcttccccctgagagccgccagactgttcaccagattcgccgaggccggcagaagcaccctgagactgcccgcccacgacacccccggcgccggcgccgtgcagctgctgctgagcgactgcccccccgacagactgagaagattcctgagaaccctgagactgaagctggccgccgcccccggccccggccccgccagcgccagagcccagctgctgggccccagacccagagacttcgtgaccatcagccccgtgcagcccgaggagagaagactgagagccgccaccagagtgcccgacaccaccctggtgaagagacccgtggagccccaggccggcgccgagcccagcaccgaggcccccagatggcccctgcccgtgaagagactgagcctgcccagcaccaagccccagctgagcgaggagcaggccgccgtgctgagagccgtgctgaagggccagagcatcttcttcaccggcagcgccggcagcggcggcagagaggaggtgggcggccagtggtggggcggcatcgaggagcagggcgacctgagcaacttcgcccccgtgcaggagcagggcagccacatctgctag

SEQ ID NO: 315241 - DNA, 1926 bp, Artificial Sequence
  derived and/or modified sequence
atgctgtccggaatcgaagccgctgccggcgaatatgaggattctgagttgagatgtagagtcgcagtcgaagaactgtcaccaggagggcagcctcgcagacggcaggccctcaggaccgcggaactgtctctgggcaggaacgagcggagggaactgatgctcagattacaagcacctggacccgcagggaggccccggtgttttcctctccgcgccgcccgattgttcactcggttcgcagaggctggaaggtcaaccctacggttgcccgctcatgacacacctggggctggagcagtccaacttctgctgagcgactgtccacccgatcgactgcgccgctttctgaggaccctgcgacttaagctcgccgccgcccccgggcctggccctgcatccgcccgtgctcaacttctggggccaaggccacgagatttcgtcactatctcaccggtgcagcctgaagagcggcgtctgagagccgcgacccgagtgccggatacaacgttagtgaaaaggccagtcgagccacaggccggagcagaacccagtaccgaggctccccgctggccactgcccgtgaagcgcctgtccttacctagtacgaagccacagctgtctgaggagcaggccgctgtgctgcgcgcagtacttaaaggccagagcatcttttttacaggctccgcaggaacaggaaagagctatctgttaaagaggattctaggcagcctccctcctactggaaccgtcgcaaccgcgagtacaggggtcgccgcctgccacatcggggggactaccttgcacgccttcgcaggaatcggctcagggcaggcgccgctagcacaatgtgtagctttggctcaacggcccggggtgaggcagggttggctgaactgtcagcggcttgtcatcgatgaaatcagcatggtcgaagcggatctcttcgacaagttggaagctgtagctagggctgtccgccagcagaataaacccttcgggggtatccagcttattatatgcggcgatttcctgcaactcccacccgttaccaaggggtcccaaccacctcgattttgttttcagagcaagtcctggaagcgctgtgtgccagtgactctagaattaacaaaggtctggagacaagcagaccaaaccttcatctccctgctccaggcagtgaggttgggcagatgcagcgacgaggtgacccgtcagcttcaagccaccgcatctcacaaagtaggacgggacgggatcgtcgcgactcggctgtgcacccatcaggacgacgtagcccttacaaatgaaagacggctccaggaactgccgggtaaggtgcatagattcgaagcaatggattctaatcctgagctcgccagtactctggacgcccaatgtcccgtcagccagctactccagttgaaactaggagctcaggtgatgctggttaagaacctttccgtgtctcggggcctggttaacggagcccgaggagtggtagttgggttcgaggctgagggccgcgggctcccgcaggtgaggttcctctgcggagtaactgaggtcatacacgcagatcgttggacagtgcaggcgactggaggtcagctgcttagtcggcagcaattgcctttgcaactagcttgggccatgtcgattcacaagtcccagggtatgacactggattgtgtggagattagcctcggcagagtatttgcctccggtcaagcctatgttgccttatctcgggccaggtcgttgcagggtcttcgcgtattggacttcgaccccatggccgtgcgttgtgatccgcgggttctgcatttttatgcaacgttgcggcggggacgcagcctgagtctggagtctcctgacgacgatgaggcagctagcgaccaggaaaatatggatccaattttatag

SEQ ID NO: 315242 - DNA, 1926 bp, Artificial Sequence
  derived and/or modified sequence
atgctctccggcattgaagcagcagctggggaatatgaggattccgagttgcgctgcagggtggccgtggaagagctctcccctggtggacaacccagacggcgccaggctctgcgaactgcagaactttccttaggacgtaacgaaaggcgcgagttaatgttgcgcctgcaggctcctgggccagccggcaggcctcgctgctttccattgcgcgccgcccgactgttcacgaggttcgctgaggcaggaaggtcaaccttgagactcccagcccatgacacacctggcgctggcgctgtgcaactgctcctgtctgactgtcctccagacaggctccgaaggtttttgcggaccctccgcctcaaactagccgcagcgccaggccccggcccggcgtccgcacgggcacaactcctggggccccggccacgggacttcgtcacaatatccccagtgcaacccgaagaacggcggctccgggcagcgacccgtgtccctgatacaacgctggtgaagcggcctgtagaaccccaggcgggcgcagaacctagcaccgaggctccacggtggccactgccggtgaaaaggctgtctttaccaagcacaaaaccgcaactgtccgaagaacaggctgcggttctcagggctgtgttgaaggggcagtccatcttcttcacgggctccgccggcacgggcaagtcttacctgttgaagcgcatcttaggcagcctccctcctaccggaacagtggcgacagcgtccacaggcgtcgcagcttgccacataggaggaacaacactgcacgcctttgctggcatcgggtccggacaggcccccctggcccagtgtgtcgcacttgcgcagcgccctggagtgcgccagggatggctgaattgccaaagactcgtaatagacgaaattagcatggttgaagcagatcttttcgataaattggaagccgtggccagagcagttagacaacagaataaaccattcggcgggatccaactcatcatctgcggagactttttacagctaccccccgtaacaaagggcagtcagcctccacggttttgttttcagtcgaaaagctggaagcgatgtgtccccgtcactctggaactcactaaagtctggaggcaggcggaccagacattcataagcttgctgcaggcagtacggttgggacgctgctcagatgaggtgaccaggcagctacaggcaactgcctcccataaggtcgggagagacgggatcgttgcaacacgcctgtgcacacatcaggacgacgtcgccttgacaaacgaacgccgccttcaggaattaccagggaaggttcaccgattcgaggccatggattctaaccccgagctcgcatcgacactcgatgctcagtgccctgttagtcagttgttacaacttaaattgggggctcaggtcatgcttgtcaagaatctgagtgtatcccggggtttggttaatggtgctcgcggcgtcgtcgttggctttgaggctgagggcagggggctaccacaggtgcgcttcttgtgcggggtaacggaagtaatccacgcggacagatggactgttcaagcaactggtggccagctgctgtcgagacagcaactgcctctgcagttggcttgggcaatgtcgatccataagtcacagggcatgacactggattgtgttgaaatatctctgggtcgagtcttcgcaagtgggcaagcttacgttgccctttcccgggctcgaagcctgcaaggcctcagagtgctggatttcgaccccatggctgtccgttgtgatcctcgtgttctgcacttctatgccactctccgtaggggtcgctccttaagtctggagtccccagatgacgacgaggcagcttcagaccaggagaatatggatcccattctgtag

SEQ ID NO: 315243 - DNA, 801 bp, Artificial Sequence
  derived and/or modified sequence
atgctgtccggcattgaagctgccgccggggagtacgaagatagtgaactgcgttgccgtgtcgccgtggaagaactgtcccctggcggacagccaaggcgcaggcaagctcttcgtactgccgaattgagtctgggtaggaatgagaggcgggaactgatgctgaggctccaggctcccgggcccgcggggagacctaggtgctttccgcttagagctgcacgcttgttcacaagatttgcggaagccggtcgcagtacccttcgattgcccgcccacgacacacccggggctggcgcagttcaactcttgttatccgattgccccccagatagacttagaaggtttttacgcactttacgcttgaagcttgctgccgcacctggaccgggcccagcctctgcgcgtgcccagttgctcggtccgcggcccagggatttcgttacaatcagtccagttcagcctgaggaaagacggttgcgcgcggccacaagagtcccggatactacactggttaaacgtccggtggaaccccaggccggtgccgagccctccacagaggctcccagatggcctttacctgtgaagcggctttccttaccctccacaaagccacagctttctgaagaacaggctgccgtactccgggctgtgctgaaggggcaaagcattttctttactggatcagctggctctggaggtagagaagaagtgggaggacagtggtgggggggtatcgaagagcaaggtgacctgtccaatttcgccccagtgcaggagcaaggcagccatatctgctag

SEQ ID NO: 315244 - DNA, 1926 bp, Artificial Sequence
  derived and/or modified sequence
atgctgtctggaattgaagctgctgctggggagtatgaagattctgagctgcgctgccgggtggccgtggaggagctgagccctgggggccagccccggcggcggcaggccctgaggacagctgagctgagcctgggcagaaatgaaagaagagagctgatgctgcggctgcaggcccctggccctgctggccggccccgctgcttccccctgcgggccgcccggctcttcaccaggtttgctgaggccggccgcagcaccctgcggctgcctgcccatgacacccctggggccggggctgtgcagctgctgctgagtgactgccccccagaccggctgcggcgcttcctgcggaccctgcggctgaagctggccgccgcccctggccctggccctgccagcgcccgggcccagctgctgggcccccggccccgggactttgtgaccatcagccctgtgcagcctgaggagcggcggctgcgggccgccaccagggtgcctgacaccaccctggtgaagaggcctgtggagccccaggccggggctgagcccagcacagaggccccccgctggcccctgcctgtgaagaggctgagcctgcccagcaccaagccccagctgtctgaggagcaggccgctgtgctgcgggctgtgctgaagggccagagcatcttcttcaccggcagcgctggcaccgggaagagctacctgctgaagaggatcctgggcagcctgccccccaccggcaccgtggccacagccagcactggagtggccgcctgccacatcggcggcaccaccctgcacgcctttgctggcatcggcagcggccaggcccccctggcccagtgtgtggccctggcccagaggcctggggtgcggcagggctggctgaactgccagaggctggtgattgatgagatctccatggtggaggccgacctgtttgacaagctggaggccgtggcccgggctgtgcggcagcagaacaagccctttggaggcatccagctgatcatctgtggggacttcctgcagctgccccctgtgaccaagggcagccagcccccacgcttctgcttccagagcaagtcctggaagagatgtgtgcctgtgaccctggagctgaccaaggtgtggaggcaggccgaccagaccttcatcagcctgctgcaggccgtgcggctgggccgctgcagtgatgaggtgacccggcagctgcaggccacagccagccacaaggtgggcagagatggcatcgtggccacccggctgtgcacccaccaggatgatgtggccctgaccaatgaaagaaggctgcaggagctgcccgggaaggtgcacagatttgaggccatggacagcaaccctgagctggccagcaccctggatgcccagtgccctgtgtcccagctgctgcagctgaagctgggcgcccaggtgatgctggtgaagaacctgtctgtgtcccggggcctggtgaatggagcccggggcgtggtggtgggctttgaggccgagggccggggcctgccccaggtgcgcttcctgtgtggggtgacagaggtgattcatgctgaccgctggacagtgcaggccaccggcggccagctgctgagccggcagcagctgcccctgcagctggcctgggccatgagcatccacaagagccagggcatgaccctggactgtgtggagatcagcctgggccgggtgtttgccagcggccaggcctacgtggccctgagccgggcccggagcctgcagggcctgcgggtgctggactttgaccccatggctgtgcgctgtgacccccgggtgctgcacttctacgccaccctgcggcggggccgcagcctgagcctggagagcccagatgatgatgaggccgccagtgaccaggagaacatggaccccatcctgtag

SEQ ID NO: 315245 - DNA, 801 bp, Artificial Sequence
  derived and/or modified sequence
atgctgtctggaattgaagctgctgctggggagtatgaagattctgagctgcgctgccgggtggccgtggaggagctgagccctgggggccagccccggcggcggcaggccctgaggacagctgagctgagcctgggcagaaatgaaagaagagagctgatgctgcggctgcaggcccctggccctgctggccggccccgctgcttccccctgcgggccgcccggctcttcaccaggtttgctgaggccggccgcagcaccctgcggctgcctgcccatgacacccctggggccggggctgtgcagctgctgctgagtgactgccccccagaccggctgcggcgcttcctgcggaccctgcggctgaagctggccgccgcccctggccctggccctgccagcgcccgggcccagctgctgggcccccggccccgggactttgtgaccatcagccctgtgcagcctgaggagcggcggctgcgggccgccaccagggtgcctgacaccaccctggtgaagaggcctgtggagccccaggccggggctgagcccagcacagaggccccccgctggcccctgcctgtgaagaggctgagcctgcccagcaccaagccccagctgtctgaggagcaggccgctgtgctgcgggctgtgctgaagggccagagcatcttcttcaccggcagcgctggcagcggcggccgggaggaggtgggcggccagtggtggggcggcatcgaggagcagggcgacctgagcaactttgcccctgtgcaggagcagggcagccacatctgctag

SEQ ID NO: 315246 - DNA, 1926 bp, Artificial Sequence
  derived and/or modified sequence
atgctgagcggcatcgaggccgccgccggcgagtacgaggacagcgaactgcgctgcagggttgctgtggaagagctaagccccggaggccagccaaggcgacggcaggccttgcggacagccgagctgtcattgggccgcaatgaaaggagagaactgatgttgcgactgcaagcgcccgggcccgctggcagacccaggtgcttccccctcagagccgcccgattgttcactaggttcgccgaagccggacggtcaacattgaggctccccgcgcacgacacacccggcgctggcgccgtgcagctgctcctgagcgactgtccacccgatcgacttcgacggtttctccggactctccgcctgaagttggccgccgcaccggggccgggaccagcaagtgcccgcgctcaactgctcgggccccgtcctagagactttgttaccataagtccagtgcagcctgaggagcgcaggttacgggcagctacaagagtgccggacaccacactcgtaaagaggccagtggagccacaagctggggcggagcctagcaccgaagccccccgttggccgttgcccgttaagcgtctcagccttccgtcaacaaagccccagctgtcagaagaacaggccgcagtactcagggcggtcttaaagggtcagagcattttttttaccggctctgccgggactggaaaatcatacctattgaagagaattcttggctctttgcctcccacgggcaccgttgcaaccgcatctacgggagtggccgcctgccacattgggggtacgacactacacgcttttgcaggcatcggatctggacaggctccactcgcccagtgtgttgctctagctcagagacccggagtgaggcagggatggctgaactgccagcgattggtgatagacgagatatccatggtagaggccgacctattcgacaagctggaggccgtggcccgagccgttagacagcaaaacaaaccctttggaggaatccagttgatcatttgtggggatttcctgcagctccctccagtgacaaagggatcgcaaccgccacggttctgcttccagtccaaaagttggaaacgttgcgtcccagtgaccctggagcttaccaaggtgtggcgccaagcggaccaaacttttatttccttactgcaggcagtaagactaggcagatgtagcgatgaggtgaccagacagctgcaggcaaccgcctcccacaaggtgggtcgcgatgggattgtcgctactagattgtgcacgcatcaggatgatgtggctctgacgaatgagaggcgcctacaggaactgcctggcaaggtgcacagattcgaagctatggactcgaaccctgagctcgcaagcaccctcgatgctcagtgccctgtaagccagcttcttcaactcaagctcggggcacaagtgatgctagttaagaatctgtcagtctcccgcggactagtgaacggtgccagaggcgttgtggtgggcttcgaggccgaaggtagaggcctacctcaggtaaggtttctctgtggggtgacggaggtgattcacgccgaccgttggactgtacaagctactggcgggcagctgctgtcccgtcagcaactgcccctccagctggcttgggcaatgtcaattcacaagtcccagggtatgaccctcgattgtgttgagattagcttaggtagggtctttgcctctgggcaggcttatgtggccctaagtagagcccgcagcttgcaaggcctgagagtgttggactttgaccctatggctgtacgctgcgaccctagggtgcttcatttttacgccactctgcgtaggggaaggtctctgagtctcgagagtccggatgacgacgaggccgcaagcgatcaggagaatatggatcccatattgtag

SEQ ID NO: 315247 - DNA, 1926 bp, Artificial Sequence
  derived and/or modified sequence
atgctgagcggcatcgaggccgccgccggcgagtacgaggacagcgagctccgatgtagggtggctgtggaggagctgtcaccaggtgggcaacctcgtaggaggcaggccctgagaaccgcggaattgtctcttgggagaaatgaaaggcgcgaactgatgctaagattacaggcccccggcccagctggccggcctaggtgtttccctctgcgggcggctaggctgtttacccgttttgccgaggcaggccggtctaccctgcggttacctgcccacgacacacctggtgcaggggctgtacagctccttctgtcagattgcccaccggacaggctccgccgatttcttcgtacccttaggctcaaactagccgccgctcccgggccaggcccggcctcagctcgcgcacagctgctcgggcctagaccccgtgatttcgtgacgatctcccccgtgcagccggaggaacgaagactgcgggctgccacaagggtgcctgacaccaccctggttaagagacctgttgaaccccaggcaggcgccgagccatcaactgaggcacctcgatggcccttgcctgtcaagcgtctgtcactgccaagcactaaacctcaacttagcgaagagcaagctgctgtactgcgggccgtgttgaaggggcagagcatcttcttcactggttccgctggcacgggcaagagctacctcttaaaacgcatcctgggctcacttccccctactggcaccgtggccacggcaagcactggagtagccgcctgtcacataggcggcacgacactccatgcattcgccggtataggttctggccaggctcccctcgctcagtgtgtggcacttgcacagcgtccaggtgtaaggcagggctggctcaactgccaacgattggttatcgatgaaatctccatggtagaagcggatctgttcgataaacttgaagctgtggcccgtgccgtccgccagcaaaacaagccatttggggggatccagctgatcatttgcggcgactttcttcagttaccaccagtcacgaaagggtcccaaccacccaggttttgctttcagtctaaatcatggaagcgctgcgtgccagtcacactggagctgaccaaggtgtggcggcaggcagatcagactttcatatctttgttacaggcagttaggctggggaggtgcagcgacgaggtcaccaggcaacttcaggccactgcgagccataaggttggaagagatggtatcgtcgccacaaggctatgcacacatcaggatgatgtagcactaacaaatgaaaggagactgcaggagctgcccggaaaggtgcaccggtttgaagctatggacagcaatcctgaactagccagcaccctggatgctcagtgcccagtgagtcagctgttacagctgaaattgggtgctcaagtcatgctggttaagaatctctccgtctcacggggactggtgaacggcgctaggggcgttgtagtcgggttcgaggctgagggtagaggactgccccaggtgagattcctgtgtggggtgaccgaagtgatccacgccgataggtggaccgttcaagctacaggagggcagctgctgagcagacagcagttgccgttgcagctggcttgggccatgagcattcataagagtcagggtatgacactcgactgcgtggaaatttcactaggaagagtctttgcctccggacaagcctatgttgcactcagccgcgccaggtctttgcaagggctgcgtgtcctggactttgatcctatggcggtacggtgtgatccaagggtgttacacttctacgctactctccggagaggaagatccctttccctggaaagtcctgatgacgacgaggcagctagcgaccaggagaatatggaccctatactctag

SEQ ID NO: 315248 - DNA, 801 bp, Artificial Sequence
  derived and/or modified sequence
atgctgagcggcatcgaggccgccgccggcgagtacgaggacagcgaactgaggtgccgagtggccgtggaggagctgtcacccgggggccagcctagaaggcggcaggccctccgcaccgccgagctgtctctaggaaggaatgagcggagagagctgatgctcaggcttcaggctccaggacctgctggacgcccaagatgctttcccttgagggctgccaggctgttcacgaggttcgctgaagccggtcggagcacccttaggctgcccgcgcatgatacccctggagccggggctgttcagctgcttttgtcagactgcccgcctgataggctccggcgtttcttgaggacccttaggctgaaattggctgccgctcctggccctggccccgcttccgccagagctcagctgctcggaccccggccaagggatttcgttacaatcagtccagttcaaccggaagagagaagactgagagctgccacacgcgtgcccgatacgacactcgttaagcgccctgtggagcctcaggctggagctgagccatctactgaagcaccaaggtggccgctgcccgtgaaacgactgtccctgccaagcacaaagcctcagctctccgaagagcaggcagctgtgttgcgagccgttcttaagggccagtctatattcttcactgggagcgctggctccgggggaagagaagaggtaggcggccagtggtggggaggtatagaggagcagggtgatctgtctaattttgcacccgtgcaggagcagggcagtcacatctgctag

SEQ ID NO: 315249 - DNA, 1926 bp, Artificial Sequence
  derived and/or modified sequence
atgttgagtgggatcgaggccgcagccggagagtacgaggactccgaactgaggtgtagagttgctgtggaagagctgtctccaggtggccaaccaaggcgcagacaggcactgaggacggcagaactgtccctggggaggaacgaacggcgagaactaatgcttcgcttacaagcccctggacccgctgggaggccaagatgcttcccgctgagggccgcacgactatttacaagatttgcggaagccggaagatcgacactgcggctccctgctcatgacacccccggtgctggcgcagtgcagctgctgctgtctgattgccccccagatcgtctgcgcagattcctgagaactttgcgactgaaactggccgcagctcccggtcctggacctgcttccgctcgagctcaattgctcgggcctagaccccgtgactttgtcaccatctctccggtgcagccagaggagcgacggttgcgggctgccacaagggtgcccgacaccacgctggtgaagcgcccagtcgagccacaggcaggagctgaaccatcaaccgaggccccaagatggcccctccctgtaaaaagattgtctctcccatctaccaagccccaattatccgaggaacaggccgctgttctcagagcagtgctgaagggccaaagtatctttttcacgggaagtgcaggtactggcaagtcctatctcctcaagcgaatccttggatcattaccccctacaggtactgttgcgactgcctccacaggtgtcgccgcttgccatataggaggaactaccctgcacgcttttgcaggcattgggtccgggcaggctccactcgcccagtgtgtcgcgctggcccagcggcctggcgtgaggcaaggttggctgaactgtcagcgtctcgttatagatgagatcagtatggtggaggccgacctatttgataaactggaagcagtcgccagggcagttagacagcaaaataagcctttcgggggaatccaattgatcatatgcggcgacttcctgcagctgccacctgtgacaaaaggctcccagccccctaggttctgtttccagagcaaatcttggaagcggtgcgttcccgtcaccttagagctgacaaaagtgtggcgccaggccgatcagacatttatctctctgctgcaggcagtgcgccttggcagatgttctgacgaggtgacacggcagcttcaggcaacagcctcacataaagtaggtagagatggtatcgtcgcaacccggttgtgcacacaccaagatgacgtggcgctgacaaacgaacgcagactgcaggagctgcccggtaaagtgcaccggtttgaggctatggattccaacccagagttggcctctacccttgacgctcagtgtcctgtgtcacagcttttgcaattgaagctgggtgcccaagtgatgctggtcaaaaacctctcggtttcacgcggtctggtcaatggggcaagaggagttgtagtagggttcgaggcagaaggcagaggcttgccccaggtgagatttctgtgcggcgtcactgaggtgatccacgccgatcgatggacggttcaagcaacaggtggacagctcctgtcacggcaacaactgccgctgcagctcgcttgggccatgtccatccacaagtcccagggtatgaccctcgactgtgtcgaaatttctctgggccgagtattcgcatctggtcaggcctatgtggcactctctcgcgctcgctccctccagggcctgcgggtcctggatttcgacccaatggctgtgcggtgcgatcccagagtgcttcacttttatgctaccctgcggagagggagatcgttaagcctggaaagtcctgatgacgacgaggctgcatccgaccaagagaatatggaccccattctgtag

SEQ ID NO: 315250 - DNA, 1926 bp, Artificial Sequence
  derived and/or modified sequence
atgctcagcggcatcgaggcagcagccggagagtatgaggattctgaactgagatgtcgcgtggcagtagaagaactgtcgccagggggtcaacctcgtcgaagacaggccctgcgtacagcagagctgtccctcgggcgaaatgagagaagggagcttatgctccggctccaagccccaggccctgccggtcggccaagatgcttcccactgagggccgcacgactcttcacgagattcgcagaagctggccgatccacgctgaggctgccagcacacgacacgcccggtgccggagccgtgcagttgctgctctcggactgcccgccagataggcttcgtagattcctccgcactttacgcctaaaattggctgcagccccaggtcccggacccgcttccgctagggctcagcttttggggccacgccctcgcgactttgtcaccatttcccccgtgcagcctgaagagagacgactgagggcagctactcgcgtacccgacaccacactcgtcaaacgccctgttgaaccgcaggccggagccgaaccctccactgaggctccacgctggcccctgcccgttaaaaggctgtccctaccgtcgacaaagccccagctctcggaggagcaagcagccgtcctgcgagccgtcctaaaaggacagtctatcttcttcacggggtcagccggtacagggaaatcctatctgctgaaaaggattctgggcagccttcctcccacaggtaccgttgccacagcctcaacgggagtagccgcttgccacatcggaggcactaccctacacgcttttgcaggcataggcagcgggcaagccccactggctcagtgcgtcgccctggcccagcgacctggggttcggcagggatggttaaattgtcagcggctggtcattgacgaaatctccatggtggaagcagacctattcgacaagttagaggccgtggcccgtgccgtccgccagcaaaacaaaccttttggaggcatccagttgataatttgcggagactttttacagctccccccagtcacaaagggatcccagccgcctaggttctgcttccagtcaaaaagttggaagcggtgtgtgccagtgacgctcgagcttaccaaggtctggcgccaggcagatcaaaccttcatcagcttgttgcaggcggtgcgcctgggccgttgcagcgacgaagtcacacggcagcttcaggccaccgcatctcacaaagttggccgagatggtatagtggcaacccggctttgcacacaccaggacgatgtggcccttacaaatgaacgcagactgcaggaattgcccggtaaggtacataggttcgaggcaatggatagcaatccggagttggcatctaccttggatgctcagtgcccagtgagccaactgttgcagctcaagctgggagctcaggtgatgctggttaagaatctgagcgtgtccaggggtttagtaaacggggctcgcggagtggtcgtgggctttgaggccgaaggaagaggcttgccccaggttcgatttctatgcggcgtcacagaagtcatccacgccgatcgatggacggtgcaggctaccggcggacagctcctgagtaggcagcagctgcccttgcagctggcttgggcaatgagcatacataagtctcagggaatgacacttgactgtgtagagatttccttgggtcgcgtatttgcaagcggacaggcctatgtcgctctatcccgcgctagatcgctacagggcctgagggtactcgatttcgaccccatggccgttcgctgtgatcctagagtactgcatttctatgcgacgctgcgacgcggtcgaagcctttctcttgagtctcccgatgacgacgaggccgcaagcgaccaagagaacatggatcccatcttatag

SEQ ID NO: 315251 - DNA, 801 bp, Artificial Sequence
  derived and/or modified sequence
atgctgtccggaattgaggctgctgctggggaatatgaagattccgagctaaggtgtagggtggccgtagaggagctgagccctggcggacaaccacggaggcggcaggctctgcgcaccgcggagctctccctcgggaggaacgagcggagagaactcatgctcagactgcaggcgcctggcccagctggtcgccctagatgcttcccactgcgagccgcaagactgtttacaagatttgcggaggcaggcagatctaccctgaggctacctgcccacgataccccaggagcaggagcggttcagctgttgctgagcgactgcccccctgacagactacggagattcctgcgcaccttgaggctgaaattggcagccgcaccaggaccaggaccagccagtgcgagagcccaactgttgggtcccagaccaagggattttgtcacgatttcccccgtacagccagaagaacgcagactgcgggcagctacccgggtgccagacaccacactggtgaaacggcctgtagaaccccaggctggagcagagccatctacagaagcaccccgttggccccttcctgttaagcggttgagcctgcctagcacgaagcctcagctgagtgaggagcaggccgcagtgcttcgggctgtcctgaagggccagagcatcttttttactggcagcgccggttccgggggacgggaggaggtcggaggccagtggtggggagggattgaagagcaaggcgatctttctaacttcgccccagtacaggaacagggatcccacatatgttag

SEQ ID NO: 315252 - DNA, 2687 bp, Artificial Sequence
  derived and/or modified sequence
atttgaaaaatttctagtttcggagcttagccacaggccggctacgatctgcttgttcatctgagtgtcggcacaaaccagcagaggcggtgacgatgctctcgggcatagaggcggcggcaggggaatatgaggactcggagctgcggtgccgcgtggctgtggaggagctgagcccgggcgggcagccgcgaaggcgccaggccctgcgcaccgcggagctgagcctgggtcgcaacgagcgccgcgagttgatgctgcggctgcaagcgccagggcccgcggggcggccgcgctgctttcctctgcgcgccgcgcgcctcttcacgcgtttcgccgaggccgggcgcagcaccctgcggctccccgcccacgacacccccggggccggcgcagtgcagctgctgctctcggactgccccccagaccgcctgcgccgcttcctgcgcacattgcgcctcaagctggctgcggccccgggtcccgggccggcctccgcccgagcgcagctgctgggcccgcggccccgcgacttcgtcaccatcagccctgtgcagcccgaggagcggcggctcagggcggccacccgggttccggacactacgctggtgaagcggcctgtggagccccaggctggggccgagcctagcacagaagccccaaggtggcccctgcctgtgaagaggctgagcttgccctccaccaagccacagctttctgaggaacaggctgctgtgctgagggccgtcctgaaaggccagagcatcttcttcactgggagtgcaggaacagggaagtcatatctgctaaagcgaatcctgggctcactgccccccacaggcactgtggccactgccagcactggggtggcagcctgccacatcgggggcaccaccctccatgcctttgcaggcatcggctcaggccaggctcctctagcccagtgtgtggccctggcccaaaggccaggcgtgcggcagggctggctgaactgccagcggttggtcattgacgagatctcaatggtggaggcagacctgtttgacaaactggaggccgtggccagagctgtccggcagcagaacaagccattcggagggatccagctcatcatctgtggggactttctgcagctgccacctgtgaccaagggctcccagcccccacggttctgcttccagtccaagagctggaagaggtgtgtgccagtgaccctggagctgaccaaggtgtggaggcaggcagaccagaccttcatctctctactgcaggccgtgaggctaggcaggtgttcagatgaggtgacccgccagctccaggccacagcttcccacaaggtggggcgagatgggattgtggccacgaggctctgcacccaccaggatgatgtggccctcaccaacgagaggcggcttcaggagctgccaggtaaggtacacagatttgaggctatggacagcaaccctgagctggccagtaccctggatgcccagtgtcctgttagccagctccttcaactaaagctgggggcccaggtgatgctggtgaaaaacttatcggtgtctcggggcctggtgaatggtgcccgaggggtggtagttgggttcgaggcagaagggagagggctaccccaggtgcggttcctgtgtggagtcactgaggtcatccacgctgaccgctggacggtgcaggccaccgggggccagctcctcagtcggcagcagctgcccctccagctggcctgggcgatgtccatccacaagagccaaggcatgaccctggattgtgtggagatttctctgggccgtgtgtttgccagtggccaggcctatgtggccctttctcgggcccgcagcctgcagggcctacgtgtgctggactttgaccccatggcggttcgctgtgacccccgtgtgctgcacttctatgccaccctgcggcggggcaggagcctcagtctggagtccccagatgatgatgaggcagcctcagaccaggagaacatggacccaatcctctgagcctcacccacaaagagaagacaaagggtggcctgtggcctccccgtcctcctgctccctagtggcccagggccccagggaataactggagtaggcaggcagtgtccccttctgtattttttagggactctcagcctcctggcagggttaaagggagagtactttaaacccatataccagctgtgcttcagtttctctcactttgccctgggtaagctgctgtagggtcagaagtaaccctttctgtgccagttgagaatgagcctgtgtggtagctgatgtcagaggacaaagctctctgcaagggctggacacagagctgcagagtcctgaacatccctcctttcaggctgcagaagggagaggcaatgaagacaggtgctccggaagcagcatcagggctcttggaggggactggtggggactcaggctgggtgcagcctccaaacagagaacggaacttaggtgtgtctctacagctaggcccagcctagcccagcccagaacaaacacccttcagagcctaaccaaagaacataagctgcaaaatgtgcacccatattttaagctgctttttcaggggataaatagtgtttggggacattgaaatggatgttctcaggttgtatttatttcggacaaataaactagagaattgtgtaaaaa

SEQ ID NO: 315253 - DNA, 2677 bp, Artificial Sequence
  derived and/or modified sequence
gccacaggccggctacgatctgcttgttcatctgagtgtcggcacaagtgagtgtctgcccgaacccagagaccagcagaggcggtgacgatgctctcgggcatagaggcggcggcaggggaatatgaggactcggagctgcggtgccgcgtggctgtggaggagctgagcccgggcgggcagccgcgaaggcgccaggccctgcgcaccgcggagctgagcctgggtcgcaacgagcgccgcgagttgatgctgcggctgcaagcgccagggcccgcggggcggccgcgctgctttcctctgcgcgccgcgcgcctcttcacgcgtttcgccgaggccgggcgcagcaccctgcggctccccgcccacgacacccccggggccggcgcagtgcagctgctgctctcggactgccccccagaccgcctgcgccgcttcctgcgcacattgcgcctcaagctggctgcggccccgggtcccgggccggcctccgcccgagcgcagctgctgggcccgcggccccgcgacttcgtcaccatcagccctgtgcagcccgaggagcggcggctcagggcggccacccgggttccggacactacgctggtgaagcggcctgtggagccccaggctggggccgagcctagcacagaagccccaaggtggcccctgcctgtgaagaggctgagcttgccctccaccaagccacagctttctgaggaacaggctgctgtgctgagggccgtcctgaaaggccagagcatcttcttcactgggagtgcaggaacagggaagtcatatctgctaaagcgaatcctgggctcactgccccccacaggcactgtggccactgccagcactggggtggcagcctgccacatcgggggcaccaccctccatgcctttgcaggcatcggctcaggccaggctcctctagcccagtgtgtggccctggcccaaaggccaggcgtgcggcagggctggctgaactgccagcggttggtcattgacgagatctcaatggtggaggcagacctgtttgacaaactggaggccgtggccagagctgtccggcagcagaacaagccattcggagggatccagctcatcatctgtggggactttctgcagctgccacctgtgaccaagggctcccagcccccacggttctgcttccagtccaagagctggaagaggtgtgtgccagtgaccctggagctgaccaaggtgtggaggcaggcagaccagaccttcatctctctactgcaggccgtgaggctaggcaggtgttcagatgaggtgacccgccagctccaggccacagcttcccacaaggtggggcgagatgggattgtggccacgaggctctgcacccaccaggatgatgtggccctcaccaacgagaggcggcttcaggagctgccaggtaaggtacacagatttgaggctatggacagcaaccctgagctggccagtaccctggatgcccagtgtcctgttagccagctccttcaactaaagctgggggcccaggtgatgctggtgaaaaacttatcggtgtctcggggcctggtgaatggtgcccgaggggtggtagttgggttcgaggcagaagggagagggctaccccaggtgcggttcctgtgtggagtcactgaggtcatccacgctgaccgctggacggtgcaggccaccgggggccagctcctcagtcggcagcagctgcccctccagctggcctgggcgatgtccatccacaagagccaaggcatgaccctggattgtgtggagatttctctgggccgtgtgtttgccagtggccaggcctatgtggccctttctcgggcccgcagcctgcagggcctacgtgtgctggactttgaccccatggcggttcgctgtgacccccgtgtgctgcacttctatgccaccctgcggcggggcaggagcctcagtctggagtccccagatgatgatgaggcagcctcagaccaggagaacatggacccaatcctctgagcctcacccacaaagagaagacaaagggtggcctgtggcctccccgtcctcctgctccctagtggcccagggccccagggaataactggagtaggcaggcagtgtccccttctgtattttttagggactctcagcctcctggcagggttaaagggagagtactttaaacccatataccagctgtgcttcagtttctctcactttgccctgggtaagctgctgtagggtcagaagtaaccctttctgtgccagttgagaatgagcctgtgtggtagctgatgtcagaggacaaagctctctgcaagggctggacacagagctgcagagtcctgaacatccctcctttcaggctgcagaagggagaggcaatgaagacaggtgctccggaagcagcatcagggctcttggaggggactggtggggactcaggctgggtgcagcctccaaacagagaacggaacttaggtgtgtctctacagctaggcccagcctagcccagcccagaacaaacacccttcagagcctaaccaaagaacataagctgcaaaatgtgcacccatattttaagctgctttttcaggggataaatagtgtttggggacattgaaatggatgttctcaggttgtatttatttcggacaaataaactagagaattgtgt

SEQ ID NO: 315254 - DNA, 1631 bp, Artificial Sequence
  derived and/or modified sequence
acgatctgcttgttcatctgagtgtcggcacaaaccagcagaggcggtgacgatgctctcgggcatagaggcggcggcaggggaatatgaggactcggagctgcggtgccgcgtggctgtggaggagctgagcccgggcgggcagccgcgaaggcgccaggccctgcgcaccgcggagctgagcctgggtcgcaacgagcgccgcgagttgatgctgcggctgcaagcgccagggcccgcggggcggccgcgctgctttcctctgcgcgccgcgcgcctcttcacgcgtttcgccgaggccgggcgcagcaccctgcggctccccgcccacgacacccccggggccggcgcagtgcagctgctgctctcggactgccccccagaccgcctgcgccgcttcctgcgcacattgcgcctcaagctggctgcggccccgggtcccgggccggcctccgcccgagcgcagctgctgggcccgcggccccgcgacttcgtcaccatcagccctgtgcagcccgaggagcggcggctcagggcggccacccgggttccggacactacgctggtgaagcggcctgtggagccccaggctggggccgagcctagcacagaagccccaaggtggcccctgcctgtgaagaggctgagcttgccctccaccaagccacagctttctgaggaacaggctgctgtgctgagggccgtcctgaaaggccagagcatcttcttcactgggagtgcaggtagtgggggcagagaggaggtagggggacagtggtggggtgggatagaggaacagggagacctgtctaactttgcccctgtccaggaacagggaagtcatatctgctaaagcgaatcctgggctcactgccccccacaggcactgtggccactgccagcactggggtggcagcctgccacatcgggggcaccaccctccatgcctttgcaggtaagtaggaacccctagggcttgagctaagagcaagcccagcttctgggaagggagagaggggaggtctgcataaagagggagttttgggggctgggcgccgtggctcactcttgtaatcccaaaactttaggaggccaaggtgggaggatcgcttgagcccaggagtttgagaccagcctggccaacacagtaaaccctgtctccacaaaatttaaaaattagcggccgggcgcagtggctcacgcctgtaatcccagcactttgggaggccgaggcaggcggatcacaaggtcaggagatcaagactatcctggctaacacggtaaaaccctgtctctactaaaaatacaaaaaaattagccaggcatggtggcaagcgcctgtagtcccagctactctggaggctgaggcaggagaatggcgtgaacccaggaggcagagcttgcagtgagccgagatcacgccactgcacttgagcctgggcgacacagcgagactccatctcaaaacaaaacaaaacaaaattagctgagcatggtggtgtgtgcctgtagtcccagctactatggaggttgaggtgggaggatcgcttgagcccatgaggcccaggttacagtgagccaagatcgtgccactgcacttcagcctgggtgacagaaagagaccttctctc

SEQ ID NO: 315255 - protein, 534 aa, Artificial Sequence
  derived and/or modified sequence
MLRRRGSPGMGVHVGAALGALWFCLTGALEVQVPEDPVVALVGTDATLCCSFSPEPGFSLAQLNLIWQLTDTKQLVHSFAEGQDQGSAYANRTALFPDLLAQGNASLRLQRVRVADEGSFTCFVSIRDFGSAAVSLQVAAPYSKPSMTLEPNKDLRPGDTVTITCSSYQGYPEAEVFWQDGQGVPLTGNVTTSQMANEQGLFDVHSILRVVLGANGTYSCLVRNPVLQQDAHSSVTITPQRSPTGAVEVQVPEDPVVALVGTDATLRCSFSPEPGFSLAQLNLIWQLTDTKQLVHSFTEGRDQGSAYANRTALFPDLLAQGNASLRLQRVRVADEGSFTCFVSIRDFGSAAVSLQVAAPYSKPSMTLEPNKDLRPGDTVTITCSSYRGYPEAEVFWQDGQGVPLTGNVTTSQMANEQGLFDVHSVLRVVLGANGTYSCLVRNPVLQQDAHGSVTITGQPMTFPPEALWVTVGLSVCLIALLVALAFVCWRKIKQSCEEENAGAEDQDGEGEGSKTALQPLKHSDSKEDDGQEIA

SEQ ID NO: 315256 - protein, 493 aa, Artificial Sequence
  derived and/or modified sequence
MLRRRGSPGMGVHVGAALGALWFCLTGALEVQVPEDPVVALVGTDATLCCSFSPEPGFSLAQLNLIWQLTDTKQLVHSFAEGQDQGSAYANRTALFPDLLAQGNASLRLQRVRVADEGSFTCFVSIRDFGSAAVSLQVAAPYSKPSMTLEPNKDLRPGDTVTITCSSYQGYPEAEVFWQDGQGVPLTGNVTTSQMANEQGLFDVHSILRVVLGANGTYSCLVRNPVLQQDAHSSVTITPQRSPTGAVEVQVPEDPVVALVGTDATLRCSFSPEPGFSLAQLNLIWQLTDTKQLVHSFTEGRDQGSAYANRTALFPDLLAQGNASLRLQRVRVADEGSFTCFVSIRDFGSAAVSLQVAAPYSKPSMTLEPNKDLRPGDTVTITCSSYRGYPEAEVFWQDGQGVPLTGNVTTSQMANEQGLFDVHSVLRVVLGANGTYSCLVRNPVLQQDAHGSVTITGQPMTFPPGPASSAVPLSPAHPPHGSMCWSHWFSRGL

SEQ ID NO: 315257 - protein, 140 aa, Artificial Sequence
  derived and/or modified sequence
MLRRRGSPGMGVHVGAALGALWFCLTGALEVQVPEDPVVALVGTDATLCCSFSPEPGFSLAQLNLIWQLTDTKQLVHSFAEGQDQGSAYANRTALFPDLHRAAYDIPPRGPVGDRGAVCLSHCTAGGPGFRVLEKDQTEL

SEQ ID NO: 315258 - protein, 136 aa, Artificial Sequence
  derived and/or modified sequence
MLRRRGSPGMGVHVGAALGALWFCLTGALEVQVPEDPVVALVGTDATLCCSFSPEPGFSLAQLNLIWQLTDTKQLVHSFAEGQDQGSAYANRTALFPDLLAQGNASLRLQRVRVADEGSFTCFVSIRDFGSAAVSL

SEQ ID NO: 315259 - protein, 133 aa, Artificial Sequence
  derived and/or modified sequence
MLRRRGSPGMGVHVGAALGALWFCLTGALEVQVPEDPVVALVGTDATLCCSFSPEPGFSLAQLNLIWQLTDTKQLVHSFAEGQDQGSAYANRTALFPDLLAQGNASLRLQRVRVADEGSFTCFVSIRDFGSAA

SEQ ID NO: 315260 - protein, 533 aa, Artificial Sequence
  derived and/or modified sequence
MLRRRGSPGMGVHVGAALGALWFCLTGALEVQVPEDPVVALVGTDATLCCSFSPEPGFSLAQLNLIWQLTDTKQLVHSFAEGQDQGSAYANRTALFPDLLAQGNASLRLQRVRVADEGSFTCFVSIRDFGSAAVSLQVAAPYSKPSMTLEPNKDLRPGDTVTITCSSYQGYPEAEVFWQDGQGVPLTGNVTTSQMANEQGLFDVHSILRVVLGANGTYSCLVRNPVLQQDAHSSVTITPQRSPTGAVEVQVPEDPVVALVGTDATLRCSFSPEPGFSLAQLNLIWQLTDTKQLVHSFTEGRDQGSAYANRTALFPDLLAQGNASLRLQRVRVADEGSFTCFVSIRDFGSAAVSLQVAAPYSKPSMTLEPNKDLRPGDTVTITCSSYRGYPEAEVFWQDGQGVPLTGNVTTSQMANEQGLFDVHSVLRVVLGANGTYSCLVRNPVLQQDAHGSVTITGQPMTFPPEALWVTVGLSVCLIALLVALAFVCWRKIKQSCEEENAGAEDQDGEGEGSKTALQPLKHSDSKEGKDTWA

SEQ ID NO: 315261 - protein, 165 aa, Artificial Sequence
  derived and/or modified sequence
MLRRRGSPGMGVHVGAALGALWFCLTGALEVQVPEDPVVALVGTDATLCCSFSPEPGFSLAQLNLIWQLTDTKQLVHSFAEGQDQGSAYANRTALFPDLLAQGNASLRLQRVRVADEGSFTCFVSIRDFGSAAVSLQVAAPYSKPSMTLEPNKDLRPGDTVTITC

SEQ ID NO: 315262 - protein, 51 aa, Artificial Sequence
  derived and/or modified sequence
MLRRRGSPGMGVHVGAALGALWFCLTGALEVQVPEDPVVALVGTDATLCCS

SEQ ID NO: 315263 - DNA, 1605 bp, Artificial Sequence
  derived and/or modified sequence
atgctcagacgccgagggtcacctggaatgggcgtgcacgttggcgccgccctcggcgccctctggttttgtctgaccggggccctggaggttcaggtccctgaagatccagttgtggcactagtcggcaccgatgctaccctatgttgctccttcagtccagaaccaggtttctctctggcccagcttaacctcatttggcagctgactgataccaaacagctggtgcactctttcgcagaggggcaggatcagggctcagcttatgccaacagaaccgccttattcccggatctgctggcacaggggaacgcatcccttaggctgcaaagagtgcgagtggctgacgaagggagtttcacttgtttcgtgagcatccgcgacttcgggtctgccgctgtaagtctgcaagtggcagccccctatagcaaacccagtatgaccttggaacctaacaaggatctgagacccggtgataccgttacaataacgtgtagctcttaccaagggtacccagaggccgaagtcttttggcaggatgggcagggagtccctctgacagggaatgtcactacctcccagatggccaacgaacagggcctctttgatgttcacagtatcttacgcgtggtattgggagccaacggtacctattcctgtttggtgcgcaacccggtcctccagcaggacgcacactccagcgtgaccataactccgcagaggtctcccactggcgctgtggaggtgcaggtgccagaggatccagtcgtggccctggttgggaccgacgcaacactacggtgcagcttctcccccgaacctggtttcagcctcgcacagctgaatctcatctggcagctgacagacaccaaacagctggtgcattcatttacagagggacgggatcagggttcagcatatgcaaataggaccgcgctgtttcccgacttactggcacagggcaatgcctcgctgaggttgcaaagagtcagggttgccgatgagggctcttttacctgcttcgtctcaattcgtgattttgggagcgcggccgtcagcttacaggtggctgccccttattccaaaccgtctatgacactggagcccaataaggaccttcgcccgggcgacactgtgactatcacatgcagttcatacagggggtaccccgaggccgaagtgttctggcaggatggccagggggtaccattgacaggcaatgtgaccacttcccagatggccaacgagcagggtttgtttgacgtgcattctgttctgcgtgtggtgcttggggccaacgggacctactcatgcctggtccggaatcccgttctccagcaggatgcccacggcagcgttactatcactggtcagcccatgacctttccccccgaagcactgtgggtaactgttggcctgtcggtctgcctgatcgctcttttggttgcacttgccttcgtttgctggagaaaaatcaagcagagctgtgaagaggagaatgccggggccgaggaccaggacggagagggggagggttcaaagaccgctttgcagcccctgaaacacagcgatagcaaagaagacgatggacaggaaattgcctag

SEQ ID NO: 315264 - DNA, 1482 bp, Artificial Sequence
  derived and/or modified sequence
atgttgaggaggcgggggtccccaggcatgggagtccacgtcggcgctgcgttgggagccctatggttctgcctgacaggggcgctcgaggtccaggtgccagaagacccagtagtggccttggtcggaaccgatgccactctctgctgtagctttagcccagaacctggcttttccctggcccagttaaacctcatctggcagctgactgacactaagcagctcgtgcacagcttcgcagaggggcaagaccagggatccgcctatgcaaaccggacggctctgttccctgatttgttggctcagggaaacgcctccctgcgccttcaaagagtgcgcgtagctgatgaaggaagttttacttgcttcgtcagcatccgagacttcggaagcgcagcggtgtccctgcaggtggctgcgccttactcaaaacctagcatgactctagaaccaaataaggatctgaggccaggagacacagtcacaataacctgctccagctatcagggttatccagaggctgaagtgttttggcaggatgggcagggagtacccctgacaggtaacgtgaccacatcacaaatggcaaacgaacagggactgtttgatgtgcactctatcctccgcgtggtcctaggggctaacggtacatacagctgccttgtcaggaatcccgtgctgcagcaggatgcgcactctagcgttaccattaccccgcagaggtctcctaccggcgcggtggaggtgcaggtgcccgaggatcccgtcgtggccttagtcggcactgacgctacccttcgctgcagtttctcacccgagcccgggtttagtctcgcacagttgaacctgatttggcagctcacggatacaaaacagctggttcactctttcacagaaggacgggatcagggaagcgcttacgcaaatagaacagccctctttcccgatctgttggcccaggggaatgcctctctgcggctgcaaagggttcgcgttgccgatgagggcagcttcacttgcttcgtttctattagggactttggatccgcagccgtgagcctccaagtcgcagcaccatattccaagccatcgatgaccctggaaccaaacaaggatttgcgtcctggggatacggtgaccatcacgtgctcatcttatcgggggtatcccgaagcagaggttttctggcaggacggccagggcgttcccttgacggggaacgtgacgactagccagatggctaatgagcagggccttttcgatgtacatagtgtgctccgggtcgtgttaggagcgaatggtacttactcctgcttggtgcgtaaccctgtcctacaacaggatgcgcatgggagcgtgaccatcacaggacaacccatgaccttcccacctggccctgcctccagcgcagtccctcttagtcctgcccaccccccacacggcagtatgtgttggtcccactggttctcccggggactttag

SEQ ID NO: 315265 - DNA, 1602 bp, Artificial Sequence
  derived and/or modified sequence
atgctgcgccggcggggtagccctggaatgggcgtgcacgtaggcgctgctctcggcgctctgtggttttgtttaacgggggccctcgaggtacaggtcccagaagacccagttgtcgctctggttggcactgacgcaacactttgctgtagcttttctcccgagcctggattcagcttggcacagctcaaccttatctggcagctaactgataccaagcagttagttcactcctttgctgaaggacaggatcaaggctccgcgtatgccaatcgcaccgccttgtttcccgacttactggcccaagggaatgccagcctgcgcctgcagcgtgtccgcgttgctgacgaggggtccttcacctgcttcgtatctatacgagacttcgggtccgctgccgtctctctgcaagtggccgctccatacagcaagccttccatgaccctggagcccaacaaagatctgagacccggcgacaccgtgacaattacctgctcttcatatcaggggtacccggaagcggaagtgttttggcaggacggacaaggagtgcccttgacagggaacgttacaacctctcaaatggcaaacgaacagggccttttcgacgtgcattcgatcctgagagtagtgctgggggccaacgggacatactcgtgcttggtgcgtaaccccgtgctccagcaggacgcccatagcagcgtcactatcacgcctcaacgctcacctacaggtgccgtggaggtccaggtccccgaggatccggtcgtagcgttagttggtacagacgccacgctgagatgctctttttcaccagagcccgggttctcgctcgctcaattaaatctgatctggcaactgacagacacgaaacagctcgttcactccttcactgagggccgggatcaggggtcagcatatgctaaccggactgcgctctttccagacctgctggcccagggaaacgcatcgctgcgcttgcagcgtgttagggtggctgatgagggttccttcacttgttttgtgtccatcagagactttggcagtgcagcagtaagtctccaggttgcagctccatactctaagccaagcatgacgcttgagccaaataaggaccttcgacccggcgatactgtcaccatcacatgctcatcctaccggggatacccagaggcagaagtgttttggcaggatgggcagggtgttccccttactggtaacgttactacctcacagatggcaaatgaacaaggtttatttgatgtgcacagcgtgctgagggtggtgcttggtgcaaatgggacttactcatgtctagtgagaaatccggtgcttcagcaggacgcacacggcagtgttacgatcactggacagcccatgacctttccacccgaagcattgtgggttaccgtagggctatccgtgtgtctgatagcactactagtagccctggcttttgtctgctggcgcaaaataaaacaatcatgcgaggaggaaaacgccggtgctgaagaccaggatggggaaggggagggttccaaaactgcacttcaacctctcaagcattctgactctaaagaggggaaagatacctgggcctag

SEQ ID NO: 315266 - DNA, 1605 bp, Artificial Sequence
  derived and/or modified sequence
atgctgcggcggcggggcagccctggcatgggcgtgcacgtgggcgccgccctgggcgccctgtggttctgcctgaccggggccctggaggtgcaggtgcctgaagatcctgtggtggccctggtgggcacagatgccaccctgtgctgcagcttcagccctgagcccggcttcagcctggcccagctgaacctgatctggcagctgacagacaccaagcagctggtgcacagctttgctgagggccaggaccagggcagcgcctatgccaacagaacagccctcttcccagacctgctggcccagggcaatgccagcctgcggctgcagagggtgcgggtggctgatgagggcagcttcacctgctttgtgtccatccgggactttggatctgctgctgtgtccctgcaggtggccgccccctacagcaagcccagcatgaccctggagcccaacaaggacctgcggcctggggacacagtgaccatcacctgcagcagctaccagggctacccagaggccgaggtgttctggcaggacggccagggcgtgcccctgactggaaatgtgaccaccagccagatggccaatgagcagggcctgtttgatgtgcacagcatcctgcgggtggtgctgggcgccaacggcacctacagctgcctggtgagaaatcctgtgctgcagcaggatgcccacagctctgtgaccatcaccccccagaggagccccaccggggctgtggaggtgcaggtgcctgaagatcctgtggtggccctggtgggcacagatgccaccctgcgctgcagcttcagccctgagcccggcttcagcctggcccagctgaacctgatctggcagctgacagacaccaagcagctggtgcacagcttcacagagggccgggaccagggcagcgcctatgccaacagaacagccctcttcccagacctgctggcccagggcaatgccagcctgcggctgcagagggtgcgggtggctgatgagggcagcttcacctgctttgtgtccatccgggactttggatctgctgctgtgtccctgcaggtggccgccccctacagcaagcccagcatgaccctggagcccaacaaggacctgcggcctggggacacagtgaccatcacctgcagcagctaccggggctacccagaggccgaggtgttctggcaggacggccagggcgtgcccctgactggaaatgtgaccaccagccagatggccaatgagcagggcctgtttgatgtgcacagcgtgctgcgggtggtgctgggcgccaacggcacctacagctgcctggtgagaaatcctgtgctgcagcaggatgcccacggctctgtgaccatcaccggccagcccatgaccttccccccagaggccctgtgggtgacagtgggcctgtctgtgtgcctgattgccctgctggtggccctggcctttgtgtgctggaggaagatcaagcagagctgtgaggaggagaatgctggagctgaggaccaggatggagagggggagggcagcaagacagccctgcagcccctgaagcacagcgacagcaaagaagatgatggccaggagatcgcctag

SEQ ID NO: 315267 - DNA, 1482 bp, Artificial Sequence
  derived and/or modified sequence
atgctgcggcggcggggcagccctggcatgggcgtgcacgtgggcgccgccctgggcgccctgtggttctgcctgaccggggccctggaggtgcaggtgcctgaagatcctgtggtggccctggtgggcacagatgccaccctgtgctgcagcttcagccctgagcccggcttcagcctggcccagctgaacctgatctggcagctgacagacaccaagcagctggtgcacagctttgctgagggccaggaccagggcagcgcctatgccaacagaacagccctcttcccagacctgctggcccagggcaatgccagcctgcggctgcagagggtgcgggtggctgatgagggcagcttcacctgctttgtgtccatccgggactttggatctgctgctgtgtccctgcaggtggccgccccctacagcaagcccagcatgaccctggagcccaacaaggacctgcggcctggggacacagtgaccatcacctgcagcagctaccagggctacccagaggccgaggtgttctggcaggacggccagggcgtgcccctgactggaaatgtgaccaccagccagatggccaatgagcagggcctgtttgatgtgcacagcatcctgcgggtggtgctgggcgccaacggcacctacagctgcctggtgagaaatcctgtgctgcagcaggatgcccacagctctgtgaccatcaccccccagaggagccccaccggggctgtggaggtgcaggtgcctgaagatcctgtggtggccctggtgggcacagatgccaccctgcgctgcagcttcagccctgagcccggcttcagcctggcccagctgaacctgatctggcagctgacagacaccaagcagctggtgcacagcttcacagagggccgggaccagggcagcgcctatgccaacagaacagccctcttcccagacctgctggcccagggcaatgccagcctgcggctgcagagggtgcgggtggctgatgagggcagcttcacctgctttgtgtccatccgggactttggatctgctgctgtgtccctgcaggtggccgccccctacagcaagcccagcatgaccctggagcccaacaaggacctgcggcctggggacacagtgaccatcacctgcagcagctaccggggctacccagaggccgaggtgttctggcaggacggccagggcgtgcccctgactggaaatgtgaccaccagccagatggccaatgagcagggcctgtttgatgtgcacagcgtgctgcgggtggtgctgggcgccaacggcacctacagctgcctggtgagaaatcctgtgctgcagcaggatgcccacggctctgtgaccatcaccggccagcccatgaccttccccccaggccctgccagcagcgctgtgcccctgagccctgcccaccccccccacggctccatgtgctggagccactggttcagccggggcctgtag

SEQ ID NO: 315268 - DNA, 1602 bp, Artificial Sequence
  derived and/or modified sequence
atgctgcggcggcggggcagccctggcatgggcgtgcacgtgggcgccgccctgggcgccctgtggttctgcctgaccggggccctggaggtgcaggtgcctgaagatcctgtggtggccctggtgggcacagatgccaccctgtgctgcagcttcagccctgagcccggcttcagcctggcccagctgaacctgatctggcagctgacagacaccaagcagctggtgcacagctttgctgagggccaggaccagggcagcgcctatgccaacagaacagccctcttcccagacctgctggcccagggcaatgccagcctgcggctgcagagggtgcgggtggctgatgagggcagcttcacctgctttgtgtccatccgggactttggatctgctgctgtgtccctgcaggtggccgccccctacagcaagcccagcatgaccctggagcccaacaaggacctgcggcctggggacacagtgaccatcacctgcagcagctaccagggctacccagaggccgaggtgttctggcaggacggccagggcgtgcccctgactggaaatgtgaccaccagccagatggccaatgagcagggcctgtttgatgtgcacagcatcctgcgggtggtgctgggcgccaacggcacctacagctgcctggtgagaaatcctgtgctgcagcaggatgcccacagctctgtgaccatcaccccccagaggagccccaccggggctgtggaggtgcaggtgcctgaagatcctgtggtggccctggtgggcacagatgccaccctgcgctgcagcttcagccctgagcccggcttcagcctggcccagctgaacctgatctggcagctgacagacaccaagcagctggtgcacagcttcacagagggccgggaccagggcagcgcctatgccaacagaacagccctcttcccagacctgctggcccagggcaatgccagcctgcggctgcagagggtgcgggtggctgatgagggcagcttcacctgctttgtgtccatccgggactttggatctgctgctgtgtccctgcaggtggccgccccctacagcaagcccagcatgaccctggagcccaacaaggacctgcggcctggggacacagtgaccatcacctgcagcagctaccggggctacccagaggccgaggtgttctggcaggacggccagggcgtgcccctgactggaaatgtgaccaccagccagatggccaatgagcagggcctgtttgatgtgcacagcgtgctgcgggtggtgctgggcgccaacggcacctacagctgcctggtgagaaatcctgtgctgcagcaggatgcccacggctctgtgaccatcaccggccagcccatgaccttccccccagaggccctgtgggtgacagtgggcctgtctgtgtgcctgattgccctgctggtggccctggcctttgtgtgctggaggaagatcaagcagagctgtgaggaggagaatgctggagctgaggaccaggatggagagggggagggcagcaagacagccctgcagcccctgaagcacagcgacagcaaggagggcaaggacacctgggcctag

SEQ ID NO: 315269 - DNA, 1605 bp, Artificial Sequence
  derived and/or modified sequence
atgctgcggcggcggggcagccccggcatgggcgtgcacgtgggcgcagcactgggcgcgttatggttttgtctgacaggcgcccttgaggttcaggttcctgaagaccctgtcgtggctcttgtggggacagatgccaccctctgctgcagtttttcccctgagcccgggttctcgctggcccagcttaacctgatctggcagttgacagacaccaaacagctcgtgcactcattcgcggagggacaggaccaaggatccgcctacgctaatcggactgctctgttccctgatctcctggcccagggtaacgccagtctcaggcttcagcgagtgcgagtggccgacgagggctctttcacctgcttcgtttctattcgcgattttggtagtgctgcagtaagtctgcaagtggccgctccgtactccaaacccagcatgacactcgaaccaaacaaagatctccggcccggcgacacggtgactattacttgctcttcttatcagggctaccccgaggcagaagtcttctggcaggatggtcaaggcgtgccactcacggggaacgtcactacaagccaaatggccaatgagcagggcctgttcgacgtccactcgatcctacgagtcgttctgggggccaacggtacttattcctgtttggtccgtaatcccgtcctgcagcaggacgcacacagctcggtgactatcacgcctcagaggtctcctactggggctgtggaagtgcaagtccccgaggatcctgtggtagctttggtcggaacggacgctaccttgcgttgctctttctcaccagagccaggcttttctctcgctcaactcaatctgatctggcagctcacagataccaaacagctcgtccacagcttcacagagggaagagatcagggaagtgcttatgctaaccggaccgccttgtttccggacttgcttgcccaggggaatgctagcctgcgcctccagcgagtgcgtgttgccgatgaagggtcttttacatgctttgttagtattcgcgactttggctctgccgcggtaagcctgcaggtcgcggccccttactcgaagccatcgatgactcttgagcctaacaaggatctgagacctggcgacacggttacaatcacctgcagttcctatcgagggtatcctgaggcagaggttttttggcaggacggacagggcgtgcctctgaccggcaacgttaccacctcccaaatggctaacgaacagggcctcttcgacgttcactccgtactgagagtcgttctgggggccaacggaacatattcctgcctggtcaggaatcccgtgttacagcaggatgcccatgggtcagtcacgattaccgggcagcccatgacttttcccccagaggccctttgggttaccgtgggtctttctgtgtgcctcattgccctcctcgttgcgctggctttcgtgtgctggcgcaagataaagcagtcatgcgaggaggaaaacgccggcgccgaggaccaggatggcgaaggtgagggatcaaaaaccgccctgcagccgctaaagcactccgactcgaaggaggatgacgggcaggaaatagcctag

SEQ ID NO: 315270 - DNA, 1482 bp, Artificial Sequence
  derived and/or modified sequence
atgctgcggcggcggggcagccccggcatgggcgtgcacgtgggcgccgccctgggcgcgctgtggttctgtttgaccggcgctctggaggtgcaggtgccggaggatcccgtcgttgcactggtgggaactgacgccaccttatgttgttctttcagccctgagcccggtttttccctggctcagttaaatttgatttggcagctgacagatacgaagcagctggtgcatagcttcgctgaggggcaggatcaggggagtgcttacgcaaatcggacagccctctttccagacctcctcgcccaaggaaacgcttctttgcgccttcagcgcgtgcgagtcgctgatgaggggtccttcacttgcttcgtcagtattcgcgacttcgggtcagccgccgtctcactccaggtcgcagccccctatagcaagccgtccatgactttggagcctaataaagatcttcgtccaggtgataccgtgacaatcacttgctctagctaccaggggtatcctgaagcggaagtgttttggcaagatggacagggggtgccgctcactggaaacgtgaccacctcgcagatggccaacgaacaaggactgtttgatgtccattccatcttgcgcgtcgttcttggggctaacggaacctattcatgcctcgtgagaaaccctgtgctgcaacaagacgcacatagctccgtgacaatcacccctcaaaggtcccctactggcgctgtcgaggtgcaagtacccgaggaccccgtcgtcgccctggttggaacagatgccaccctcagatgttctttctcaccagagcccggattctccctggcccagcttaacctgatctggcagctaaccgacactaagcagctggtccatagtttcaccgaaggcagggaccaagggagcgcctacgctaacagaactgccttgttccccgacctgttggctcaagggaatgcgtccctgcgcttgcagcgggttagggtagctgacgaaggtagcttcacctgtttcgtttctatacgggacttcggatctgcagccgtttcgctccaggttgctgccccatattcgaaaccgtctatgaccttggagcccaataaagatttacgtccaggggatacagtcacaatcacctgttcctcttatagagggtaccccgaggcggaggtcttttggcaagacggccaaggggtccccctgaccgggaatgtgactacatcacagatggcaaatgagcaggggctgttcgatgtccactctgttttaagagtggtcctgggagccaacggcacatactcatgtctggtgaggaaccccgtgctgcagcaggatgcacacggatcagtcacgattacaggacagcccatgaccttcccccccggtcctgcatcttccgcagtcccgctgtccccagcacatcctcctcatggctcaatgtgttggtcccattggttttcaagaggactgtag

SEQ ID NO: 315271 - DNA, 1602 bp, Artificial Sequence
  derived and/or modified sequence
atgctgcggcggcggggcagccccggcatgggcgtgcacgtgggcgccgcactgggggccttgtggttttgtctaaccggtgcccttgaggtgcaggtccctgaggatcctgtcgttgctctggtgggcacagacgctaccctttgttgttctttctcccccgagcccggtttctctctcgcccagctcaatcttatttggcagctcaccgacacaaagcagttagtacatagcttcgccgagggacaggatcagggctccgcgtacgccaaccgcacggccctgttccccgacctgctcgcacaagggaatgcttcgcttaggctgcagcgagtaagggtcgctgacgaaggatctttcacatgctttgtgtcgatcagagacttcggatctgccgcagtgagtctgcaggtggcggccccctacagtaaaccctcgatgacgctggagcccaacaaagacctccggcccggagatacagtgaccatcacgtgcagctcatatcaggggtatccagaggcggaggtgttctggcaagacggccagggcgtcccattaacagggaatgtgactacttctcagatggccaacgaacaggggctgttcgatgtccattctattttgcgcgttgtgttgggagcaaacggaacgtacagttgccttgtgcgcaaccccgttctgcaacaggatgcccattcaagcgtcaccatcaccccccagaggagccccaccggcgcagttgaggtccaggtcccagaagacccagtggtcgctcttgtgggtactgacgcgaccctgcgttgttcattctcccccgaacccggattctcactcgcccagctgaacctgatttggcagctgactgacacaaagcagttggtccactcttttacagagggacgagatcagggctccgcctatgcgaacaggacagcgctgtttccagatcttttagcccagggtaacgcatcgctgcggttacaaagggttcgtgtagcagacgaggggagctttacatgcttcgtatcaattcgagactttgggagcgcagcagtgtctctgcaagtcgccgcgccatattctaagccctctatgacactggagcccaataaagacctgagacccggcgacacagtgactataacatgtagcagctaccgcggataccctgaagcggaagtattttggcaggacgggcagggagtgcctctgaccggcaatgtgactacaagccagatggccaatgaacagggattgtttgacgttcactccgtcctccgcgtggtgctcggtgccaacggtacctacagctgcttggtgcggaaccctgtgctacagcaggatgctcatggttcagttaccatcaccggtcagcccatgacattccctcccgaagccctatgggtgacagttggcttgtcagtctgcctcattgcccttctcgttgctttggctttcgtatgctggagaaagatcaagcagtcttgtgaggaggaaaatgccggggctgaagaccaggacggcgagggcgaaggcagcaagacggcactgcagcccttgaagcattccgattctaaagaaggcaaggacacctgggcctag

SEQ ID NO: 315272 - DNA, 1605 bp, Artificial Sequence
  derived and/or modified sequence
atgctgcggagacgcggtagccccggtatgggcgtccacgtgggtgcggcactcggagccctttggttttgtcttaccggcgcattggaagtgcaagtgccagaggatcccgtggtagctctggtcggcacggatgctaccctttgttgttccttcagcccagagcccggattttcattagcacagttgaatctgatctggcaactcacagacaccaaacaactggtgcactcgttcgcagaaggccaagaccagggatctgcatacgcaaatcgcaccgctctgtttcctgatctcctggcacaggggaacgccagcctgaggttacagcgagtccgagtggcagacgagggttcatttacttgcttcgtgagcatcagagacttcgggtccgccgctgtgtccctccaagtggccgctccatactccaaacccagcatgacattggaacctaacaaagatctgcgacccggagacactgtgaccattacctgctcatcctaccaaggctaccctgaggccgaggtcttctggcaggatgggcaaggagtccctctgactggaaacgtaacaaccagccagatggcaaacgaacagggcctctttgacgttcacagtatcctccgggtggtgctcggggctaatgggacctattcatgcctggtgcggaaccccgttcttcagcaagatgctcatagttcagtaaccatcacaccacaaagatcaccaaccggcgcagttgaggtgcaggtaccagaggaccctgttgttgctctcgtgggtaccgacgccacgttaagatgttcattctctcccgagccagggttttctctcgctcaacttaacttaatctggcaactgactgatacaaaacagctcgtccatagttttacggaaggtagggaccagggaagcgcttatgcaaaccggacagccctatttcccgatctcttggcgcagggaaacgcttctctccgcctgcagagagtgagggtggcagacgaaggatcattcacttgttttgtctccatccgggattttgggagcgctgcggtgtcattgcaggtggctgccccatatagcaagccaagcatgactctagaacctaataaagacttgagaccgggtgacaccgtgacaataacttgctcttcataccggggatatcccgaggccgaagtgttctggcaggatggacagggtgtgccgctgaccggtaatgtgactacatcccagatggccaatgaacagggcttattcgatgtccacagcgtcctgagagttgtgctcggagcaaacggcacctacagctgcctagtccgcaatcctgtgctgcagcaggacgcccacgggagtgtgaccatcaccggacagccaatgacattcccacccgaagccctgtgggtgaccgtgggcttgtccgtgtgcctgatcgccctccttgtggcactcgcatttgtctgctggcgcaaaatcaagcaatcttgcgaggaagaaaacgctggtgcagaggatcaagacggcgaaggcgagggaagcaagaccgccctccaacccctaaaacattctgacagcaaggaagatgatggacaggaaatcgcctag

SEQ ID NO: 315273 - DNA, 1482 bp, Artificial Sequence
  derived and/or modified sequence
atgctgagaaggcgaggatctccaggcatgggcgtccacgtcggggctgctttaggcgcactctggttttgtctgaccggggcattagaggttcaggttccggaagaccccgttgttgctctcgtgggtaccgacgctactctctgttgcagcttctctcctgaacccggtttctccctggctcaactaaatctgatctggcagctgacagataccaagcagctcgttcatagtttcgctgaagggcaggatcaaggaagtgcctacgccaaccgaacagccctgtttccagatctgttggcccaaggaaacgcatcccttagactccagcgagtacgggttgcagacgagggctcttttacatgttttgtcagtatccgcgattttggaagtgcggctgtgagtctacaggtggcggcaccatattctaagccaagcatgacactggagcctaataaggaccttcgtccaggcgataccgttacaatcacatgttcctcgtaccagggatatcctgaagcagaggtcttttggcaggacggccagggcgttcctttgacagggaatgtcacaacttcacaaatggcaaacgaacagggcttatttgatgtccattccatattgcgggtggtccttggtgccaacgggacatattcttgcttagttaggaaccctgtcctgcaacaggacgctcattcatccgtgacaattacaccccagagatctccgacaggggcagtggaggtccaggtgcccgaagacccagtcgtcgctttagtggggacagacgcaacattgaggtgctccttcagccctgaacccggtttcagcctcgcccaattgaatctcatatggcagcttactgatactaaacagctggtacactcattcaccgagggacgggatcagggctctgcctatgcaaataggacagccctatttcccgacctgctggcccaagggaacgcttccctccggttacaacgagtaagggtggccgatgaggggtcatttacatgcttcgtgtccatccgggatttcggcagtgcagcggtaagtcttcaggtggctgctccctactctaagcccagtatgactttggagcccaacaaagatttgcgccctggagataccgtgactatcacctgtagctcttacagaggatacccagaagccgaggtcttttggcaggatggtcagggtgtccctctgaccggcaacgttacaacaagtcagatggcaaatgagcaggggctattcgacgtgcattcagtgcttcgcgtagtgctgggcgctaatgggacctatagctgcctagtccgcaaccccgtgttacaacaggacgcacacggatcagtcaccatcacggggcagccgatgacatttccccctgggcctgcttcatccgctgtcccactgtctcccgctcatcctccacatgggagtatgtgctggtcccactggttcagcagaggactgtag

SEQ ID NO: 315274 - DNA, 1602 bp, Artificial Sequence
  derived and/or modified sequence
atgctgaggcggagggggtctccgggtatgggcgttcacgtgggagccgctcttggagccttgtggttttgcctgaccggggctctggaggttcaggtacccgaggaccctgtcgttgcactcgtcggcacggatgccactttatgttgctccttctctccagaacccggattttctctggcacagctgaatctcatttggcagcttaccgacaccaaacagcttgtgcacagctttgccgagggccaggatcaggggagcgcttatgcaaatcgcacggccctgtttcctgacctgctcgcccagggcaacgccagcctccggctgcaacgagtccgggttgcagacgaaggatccttcacctgtttcgtgtccatccgggactttggaagtgcggcagtctccctgcaggttgcggcaccatatagcaagccatcgatgacgctcgaaccaaataaggacctgcgtccaggggacacggtgactatcacatgcagttcctatcaagggtaccctgaggcagaggtattttggcaagatggtcagggggtgccccttaccgggaacgtgacaacctctcagatggccaatgaacaaggactgttcgatgttcatagtatcctaagagttgtgttgggtgccaatggcacctactcctgtttggtgaggaaccctgttttacaacaggatgctcactctagcgtgacgattacccctcaacggtcccccaccggcgcagtggaagtccaggttcctgaggacccagtagtggctctcgtgggaactgacgctacacttcgatgtagcttttcccccgaacctggattctctctcgcccagttaaatctcatctggcaactgacggacacgaaacagttggtccactcatttacagaggggagggatcagggctcagcctacgcaaataggactgcccttttccctgatctgctggcccaaggaaacgcaagtctgcgtttacagagagtgcgcgtggcggacgaaggaagtttcacctgctttgtgtctattcgcgatttcggttccgccgctgtgagcctgcaagttgcagcaccatattccaagccttctatgacactcgaacccaacaaggatctccgccctggcgatacagtaaccattacctgctcgagttatcggggataccctgaggccgaggtcttctggcaggacggccagggggtccccctgaccgggaatgtgacaacctcccagatggccaatgagcaaggtttattcgacgtccatagtgtcctccgcgtggtcttgggagccaatgggacttacagctgccttgtccgaaaccctgtgctgcagcaggacgctcacggctccgtgactattacgggtcagccaatgacattccctcccgaggccctttgggtgactgttggtctctctgtctgtctgattgctttgctcgtggccttagccttcgtctgctggcgcaaaataaagcaatcctgtgaggaagagaatgccggagccgaggatcaggacggtgagggcgagggatccaaaacggcactgcagcccttaaaacattccgattcaaaggagggtaaagacacatgggcttag

SEQ ID NO: 315275 - DNA, 3469 bp, Artificial Sequence
  derived and/or modified sequence
ccaggccgtgtgctctgcccagcgggctggctcaggcctcggtcagcagccgccaccgcggggccaatccggcctcagggacgcaccggagccgcctttccgggcctcaggcggattctccggcgcggcccgccccgcccctcggactccccgggccgcccccggcccccattcgggccgggcctcgctgcggcggcgactgagccaggctgggccgcgtccctgagtcccagagtcggcgcggcgcggcaggggcagccttccaccacggggagcccagctgtcagccgcctcacaggaagatgctgcgtcggcggggcagccctggcatgggtgtgcatgtgggtgcagccctgggagcactgtggttctgcctcacaggagccctggaggtccaggtccctgaagacccagtggtggcactggtgggcaccgatgccaccctgtgctgctccttctcccctgagcctggcttcagcctggcacagctcaacctcatctggcagctgacagataccaaacagctggtgcacagctttgctgagggccaggaccagggcagcgcctatgccaaccgcacggccctcttcccggacctgctggcacagggcaacgcatccctgaggctgcagcgcgtgcgtgtggcggacgagggcagcttcacctgcttcgtgagcatccgggatttcggcagcgctgccgtcagcctgcaggtggccgctccctactcgaagcccagcatgaccctggagcccaacaaggacctgcggccaggggacacggtgaccatcacgtgctccagctaccagggctaccctgaggctgaggtgttctggcaggatgggcagggtgtgcccctgactggcaacgtgaccacgtcgcagatggccaacgagcagggcttgtttgatgtgcacagcatcctgcgggtggtgctgggtgcaaatggcacctacagctgcctggtgcgcaaccccgtgctgcagcaggatgcgcacagctctgtcaccatcacaccccagagaagccccacaggagccgtggaggtccaggtccctgaggacccggtggtggccctagtgggcaccgatgccaccctgcgctgctccttctcccccgagcctggcttcagcctggcacagctcaacctcatctggcagctgacagacaccaaacagctggtgcacagtttcaccgaaggccgggaccagggcagcgcctatgccaaccgcacggccctcttcccggacctgctggcacaaggcaatgcatccctgaggctgcagcgcgtgcgtgtggcggacgagggcagcttcacctgcttcgtgagcatccgggatttcggcagcgctgccgtcagcctgcaggtggccgctccctactcgaagcccagcatgaccctggagcccaacaaggacctgcggccaggggacacggtgaccatcacgtgctccagctaccggggctaccctgaggctgaggtgttctggcaggatgggcagggtgtgcccctgactggcaacgtgaccacgtcgcagatggccaacgagcagggcttgtttgatgtgcacagcgtcctgcgggtggtgctgggtgcgaatggcacctacagctgcctggtgcgcaaccccgtgctgcagcaggatgcgcacggctctgtcaccatcacagggcagcctatgacattccccccagaggccctgtgggtgaccgtggggctgtctgtctgtctcattgcactgctggtggccctggctttcgtgtgctggagaaagatcaaacagagctgtgaggaggagaatgcaggagctgaggaccaggatggggagggagaaggctccaagacagccctgcagcctctgaaacactctgacagcaaagaagatgatggacaagaaatagcctgaccatgaggaccagggagctgctacccctccctacagctcctaccctctggctgcaatggggctgcactgtgagccctgcccccaacagatgcatcctgctctgacaggtgggctccttctccaaaggatgcgatacacagaccactgtgcagccttatttctccaatggacatgattcccaagtcatcctgctgccttttttcttatagacacaatgaacagaccacccacaaccttagttctctaagtcatcctgcctgctgccttatttcacagtacatacatttcttagggacacagtacactgaccacatcaccaccctcttcttccagtgctgcgtggaccatctggctgccttttttctccaaaagatgcaatattcagactgactgaccccctgccttatttcaccaaagacacgatgcatagtcaccccggccttgtttctccaatggccgtgatacactagtgatcatgttcagccctgcttccacctgcatagaatcttttcttctcagacagggacagtgcggcctcaacatctcctggagtctagaagctgtttcctttcccctccttcctcctcttgctctagccttaatactggccttttccctccctgccccaagtgaagacagggcactctgcgcccaccacatgcacagctgtgcatggagacctgcaggtgcacgtgctggaacacgtgtggttcccccctggcccagcctcctctgcagtgcccctctcccctgcccatcctccccacggaagcatgtgctggtcacactggttctccaggggtctgtgatggggcccctgggggtcagcttctgtccctctgccttctcacctctttgttcctttcttttcatgtatccattcagttgatgtttattgagcaactacagatgtcagcactgtgttaggtgctgggggccctgcgtgggaagataaagttcctccctcaaggactccccatccagctgggagacagacaactaactacactgcaccctgcggtttgcagggggctcctgcctggctccctgctccacacctcctctgtggctcaaggcttcctggatacctcacccccatcccacccataattcttacccagagcatggggttggggcggaaacctggagagagggacatagcccctcgccacggctagagaatctggtggtgtccaaaatgtctgtccaggtgtgggcaggtgggcaggcaccaaggccctctggacctttcatagcagcagaaaaggcagagcctggggcagggcagggccaggaatgctttggggacaccgaggggactgccccccacccccaccatggtgctattctggggctggggcagtcttttcctggcttgcctctggccagctcctggcctctggtagagtgagacttcagacgttctgatgccttccggatgtcatctctccctgccccaggaatggaagatgtgaggacttctaatttaaatgtgggactcggagggattttgtaaactgggggtatattttggggaaaataaatgtctttgtaaaaagctt

SEQ ID NO: 315276 - DNA, 1614 bp, Artificial Sequence
  derived and/or modified sequence
attcgggccgggcctcgctgcggcggcgactgagccaggctgggccgcgtccctgagtcccagagtcggcgcggcgcggcaggggcagccttccaccacggggagcccagctgtcagccgcctcacaggaagatgctgcgtcggcggggcagccctggcatgggtgtgcatgtgggtgcagccctgggagcactgtggttctgcctcacaggagccctggaggtccaggtccctgaagacccagtggtggcactggtgggcaccgatgccaccctgtgctgctccttctcccctgagcctggcttcagcctggcacagctcaacctcatctggcagctgacagataccaaacagctggtgcacagctttgctgagggccaggaccagggcagcgcctatgccaaccgcacggccctcttcccggacctgctggcacagggcaacgcatccctgaggctgcagcgcgtgcgtgtggcggacgagggcagcttcacctgcttcgtgagcatccgggatttcggcagcgctgccgtcagcctgcaggtggccgctccctactcgaagcccagcatgaccctggagcccaacaaggacctgcggccaggggacacggtgaccatcacgtgctccagctaccagggctaccctgaggctgaggtgttctggcaggatgggcagggtgtgcccctgactggcaacgtgaccacgtcgcagatggccaacgagcagggcttgtttgatgtgcacagcatcctgcgggtggtgctgggtgcaaatggcacctacagctgcctggtgcgcaaccccgtgctgcagcaggatgcgcacagctctgtcaccatcacaccccagagaagccccacaggagccgtggaggtccaggtccctgaggacccggtggtggccctagtgggcaccgatgccaccctgcgctgctccttctcccccgagcctggcttcagcctggcacagctcaacctcatctggcagctgacagacaccaaacagctggtgcacagtttcaccgaaggccgggaccagggcagcgcctatgccaaccgcacggccctcttcccggacctgctggcacaaggcaatgcatccctgaggctgcagcgcgtgcgtgtggcggacgagggcagcttcacctgcttcgtgagcatccgggatttcggcagcgctgccgtcagcctgcaggtggccgctccctactcgaagcccagcatgaccctggagcccaacaaggacctgcggccaggggacacggtgaccatcacgtgctccagctaccggggctaccctgaggctgaggtgttctggcaggatgggcagggtgtgcccctgactggcaacgtgaccacgtcgcagatggccaacgagcagggcttgtttgatgtgcacagcgtcctgcgggtggtgctgggtgcgaatggcacctacagctgcctggtgcgcaaccccgtgctgcagcaggatgcgcacggctctgtcaccatcacagggcagcctatgacattccccccaggcccagcctcctctgcagtgcccctctcccctgcccatcctccccacggaagcatgtgctggtcacactggttctccaggggtctgtga

SEQ ID NO: 315277 - DNA, 2690 bp, Artificial Sequence
  derived and/or modified sequence
cgggcctcgctgcggcggcgactgagccaggctgggccgcgtccctgagtcccagagtcggcgcggcgcggcaggggcagccttccaccacggggagcccagctgtcagccgcctcacaggaagatgctgcgtcggcggggcagccctggcatgggtgtgcatgtgggtgcagccctgggagcactgtggttctgcctcacaggagccctggaggtccaggtccctgaagacccagtggtggcactggtgggcaccgatgccaccctgtgctgctccttctcccctgagcctggcttcagcctggcacagctcaacctcatctggcagctgacagataccaaacagctggtgcacagctttgctgagggccaggaccagggcagcgcctatgccaaccgcacggccctcttcccggacctgctggcacagggcaacgcatccctgaggctgcagcgcgtgcgtgtggcggacgagggcagcttcacctgcttcgtgagcatccgggatttcggcagcgctgccgtcagcctgcaggtggccgctccctactcgaagcccagcatgaccctggagcccaacaaggacctgcggccaggggacacggtgaccatcacgtgctccagctaccagggctaccctgaggctgaggtgttctggcaggatgggcagggtgtgcccctgactggcaacgtgaccacgtcgcagatggccaacgagcagggcttgtttgatgtgcacagcatcctgcgggtggtgctgggtgcaaatggcacctacagctgcctggtgcgcaaccccgtgctgcagcaggatgcgcacagctctgtcaccatcacaccccagagaagccccacaggagccgtggaggtccaggtccctgaggacccggtggtggccctagtgggcaccgatgccaccctgcgctgctccttctcccccgagcctggcttcagcctggcacagctcaacctcatctggcagctgacagacaccaaacagctggtgcacagtttcaccgaaggccgggaccagggcagcgcctatgccaaccgcacggccctcttcccggacctgctggcacaaggcaatgcatccctgaggctgcagcgcgtgcgtgtggcggacgagggcagcttcacctgcttcgtgagcatccgggatttcggcagcgctgccgtcagcctgcaggtggccgctccctactcgaagcccagcatgaccctggagcccaacaaggacctgcggccaggggacacggtgaccatcacgtgctccagctaccggggctaccctgaggctgaggtgttctggcaggatgggcagggtgtgcccctgactggcaacgtgaccacgtcgcagatggccaacgagcagggcttgtttgatgtgcacagcgtcctgcgggtggtgctgggtgcgaatggcacctacagctgcctggtgcgcaaccccgtgctgcagcaggatgcgcacggctctgtcaccatcacagggcagcctatgacattccccccagaggccctgtgggtgaccgtggggctgtctgtctgtctcattgcactgctggtggccctggctttcgtgtgctggagaaagatcaaacagagctgtgaggaggagaatgcaggagctgaggaccaggatggggagggagaaggctccaagacagccctgcagcctctgaaacactctgacagcaaagaaggtaaagacacctgggcttgaggttgtgtctgtgtatgcacacatctgtgtgtgagaggctgagagggtgggtaggcatcatcctttcactagtgacctgaggccccctctgcagaagagcagcctcaacttccccctggtgagatggcagagggctgagtaaccaaggtcccagctgctctgatgggacccaaatacgacagaggcttaagcaggacaggagtttattcctccttcctgtgatagtgtgagcataggtaatcgtaaaaccactgatgacctggagccaggttccacttacctggattctgccctcttcaacttcaagctttcactcctaggtctaagaggctgtttgtgctcccacgccccctccagagccaagagggagagaaaggaaggatatgtttccttctagagcttgagtggaagtagcctgcatcacttccgcttacattccattggtcagaacccaggcatatgagccctaactcaggggaggctagaaaagtgttcagctgggtagccatgtccctggcgcacagtgggtggttagtaaatgtccatagtcattattgggcctattgttataatgtcagtgatgacatttggaaatacaggagataggtcatttccttcctgtttttcagaatcaaataaccatagaagagctgggcagatggagataaaaagtgtcagcttaggccaggcatggtacttcacacctgtaatctcagcactttgggaggccgaggtgggtggatcacttgaggtcaggagtttgagaccagcctggccaacatggtgaaaccctgtctctactaaaaatacaaaacttagccgggcgtggtggtgcatgcctgtaatcccagctacttgggaagctgaggcgggagaatcacttgaacctgggaggcagaggttgcagtgaactgagattgcacctgtgcactccagcctgggcaacagagcaagattccatctc

SEQ ID NO: 315278 - DNA, 1605 bp, Artificial Sequence
  derived and/or modified sequence
atgctgagaagaagaggcagccccggcatgggcgtgcacgtgggcgccgccctgggcgccctgtggttctgcctgaccggcgccctggaggtgcaggtgcccgaggaccccgtggtggccctggtgggcaccgacgccaccctgtgctgcagcttcagccccgagcccggcttcagcctggcccagctgaacctgatctggcagctgaccgacaccaagcagctggtgcacagcttcgccgagggccaggaccagggcagcgcctacgccaacagaaccgccctgttccccgacctgctggcccagggcaacgccagcctgagactgcagagagtgagagtggccgacgagggcagcttcacctgcttcgtgagcatcagagacttcggcagcgccgccgtgagcctgcaggtggccgccccctacagcaagcccagcatgaccctggagcccaacaaggacctgagacccggcgacaccgtgaccatcacctgcagcagctaccagggctaccccgaggccgaggtgttctggcaggacggccagggcgtgcccctgaccggcaacgtgaccaccagccagatggccaacgagcagggcctgttcgacgtgcacagcatcctgagagtggtgctgggcgccaacggcacctacagctgcctggtgagaaaccccgtgctgcagcaggacgcccacagcagcgtgaccatcaccccccagagaagccccaccggcgccgtggaggtgcaggtgcccgaggaccccgtggtggccctggtgggcaccgacgccaccctgagatgcagcttcagccccgagcccggcttcagcctggcccagctgaacctgatctggcagctgaccgacaccaagcagctggtgcacagcttcaccgagggcagagaccagggcagcgcctacgccaacagaaccgccctgttccccgacctgctggcccagggcaacgccagcctgagactgcagagagtgagagtggccgacgagggcagcttcacctgcttcgtgagcatcagagacttcggcagcgccgccgtgagcctgcaggtggccgccccctacagcaagcccagcatgaccctggagcccaacaaggacctgagacccggcgacaccgtgaccatcacctgcagcagctacagaggctaccccgaggccgaggtgttctggcaggacggccagggcgtgcccctgaccggcaacgtgaccaccagccagatggccaacgagcagggcctgttcgacgtgcacagcgtgctgagagtggtgctgggcgccaacggcacctacagctgcctggtgagaaaccccgtgctgcagcaggacgcccacggcagcgtgaccatcaccggccagcccatgaccttcccccccgaggccctgtgggtgaccgtgggcctgagcgtgtgcctgatcgccctgctggtggccctggccttcgtgtgctggagaaagatcaagcagagctgcgaggaggagaacgccggcgccgaggaccaggacggcgagggcgagggcagcaagaccgccctgcagcccctgaagcacagcgacagcaaggaggacgacggccaggagatcgcctag

SEQ ID NO: 315279 - DNA, 1482 bp, Artificial Sequence
  derived and/or modified sequence
atgctgagaagaagaggcagccccggcatgggcgtgcacgtgggcgccgccctgggcgccctgtggttctgcctgaccggcgccctggaggtgcaggtgcccgaggaccccgtggtggccctggtgggcaccgacgccaccctgtgctgcagcttcagccccgagcccggcttcagcctggcccagctgaacctgatctggcagctgaccgacaccaagcagctggtgcacagcttcgccgagggccaggaccagggcagcgcctacgccaacagaaccgccctgttccccgacctgctggcccagggcaacgccagcctgagactgcagagagtgagagtggccgacgagggcagcttcacctgcttcgtgagcatcagagacttcggcagcgccgccgtgagcctgcaggtggccgccccctacagcaagcccagcatgaccctggagcccaacaaggacctgagacccggcgacaccgtgaccatcacctgcagcagctaccagggctaccccgaggccgaggtgttctggcaggacggccagggcgtgcccctgaccggcaacgtgaccaccagccagatggccaacgagcagggcctgttcgacgtgcacagcatcctgagagtggtgctgggcgccaacggcacctacagctgcctggtgagaaaccccgtgctgcagcaggacgcccacagcagcgtgaccatcaccccccagagaagccccaccggcgccgtggaggtgcaggtgcccgaggaccccgtggtggccctggtgggcaccgacgccaccctgagatgcagcttcagccccgagcccggcttcagcctggcccagctgaacctgatctggcagctgaccgacaccaagcagctggtgcacagcttcaccgagggcagagaccagggcagcgcctacgccaacagaaccgccctgttccccgacctgctggcccagggcaacgccagcctgagactgcagagagtgagagtggccgacgagggcagcttcacctgcttcgtgagcatcagagacttcggcagcgccgccgtgagcctgcaggtggccgccccctacagcaagcccagcatgaccctggagcccaacaaggacctgagacccggcgacaccgtgaccatcacctgcagcagctacagaggctaccccgaggccgaggtgttctggcaggacggccagggcgtgcccctgaccggcaacgtgaccaccagccagatggccaacgagcagggcctgttcgacgtgcacagcgtgctgagagtggtgctgggcgccaacggcacctacagctgcctggtgagaaaccccgtgctgcagcaggacgcccacggcagcgtgaccatcaccggccagcccatgaccttcccccccggccccgccagcagcgccgtgcccctgagccccgcccaccccccccacggcagcatgtgctggagccactggttcagcagaggcctgtag

SEQ ID NO: 315280 - DNA, 1602 bp, Artificial Sequence
  derived and/or modified sequence
atgctgagaagaagaggcagccccggcatgggcgtgcacgtgggcgccgccctgggcgccctgtggttctgcctgaccggcgccctggaggtgcaggtgcccgaggaccccgtggtggccctggtgggcaccgacgccaccctgtgctgcagcttcagccccgagcccggcttcagcctggcccagctgaacctgatctggcagctgaccgacaccaagcagctggtgcacagcttcgccgagggccaggaccagggcagcgcctacgccaacagaaccgccctgttccccgacctgctggcccagggcaacgccagcctgagactgcagagagtgagagtggccgacgagggcagcttcacctgcttcgtgagcatcagagacttcggcagcgccgccgtgagcctgcaggtggccgccccctacagcaagcccagcatgaccctggagcccaacaaggacctgagacccggcgacaccgtgaccatcacctgcagcagctaccagggctaccccgaggccgaggtgttctggcaggacggccagggcgtgcccctgaccggcaacgtgaccaccagccagatggccaacgagcagggcctgttcgacgtgcacagcatcctgagagtggtgctgggcgccaacggcacctacagctgcctggtgagaaaccccgtgctgcagcaggacgcccacagcagcgtgaccatcaccccccagagaagccccaccggcgccgtggaggtgcaggtgcccgaggaccccgtggtggccctggtgggcaccgacgccaccctgagatgcagcttcagccccgagcccggcttcagcctggcccagctgaacctgatctggcagctgaccgacaccaagcagctggtgcacagcttcaccgagggcagagaccagggcagcgcctacgccaacagaaccgccctgttccccgacctgctggcccagggcaacgccagcctgagactgcagagagtgagagtggccgacgagggcagcttcacctgcttcgtgagcatcagagacttcggcagcgccgccgtgagcctgcaggtggccgccccctacagcaagcccagcatgaccctggagcccaacaaggacctgagacccggcgacaccgtgaccatcacctgcagcagctacagaggctaccccgaggccgaggtgttctggcaggacggccagggcgtgcccctgaccggcaacgtgaccaccagccagatggccaacgagcagggcctgttcgacgtgcacagcgtgctgagagtggtgctgggcgccaacggcacctacagctgcctggtgagaaaccccgtgctgcagcaggacgcccacggcagcgtgaccatcaccggccagcccatgaccttcccccccgaggccctgtgggtgaccgtgggcctgagcgtgtgcctgatcgccctgctggtggccctggccttcgtgtgctggagaaagatcaagcagagctgcgaggaggagaacgccggcgccgaggaccaggacggcgagggcgagggcagcaagaccgccctgcagcccctgaagcacagcgacagcaaggagggcaaggacacctgggcctag

SEQ ID NO: 315281 - protein, 2542 aa, Artificial Sequence
  derived and/or modified sequence
MVALSLKICVRHCNVVKTMQFEPSTAVYDACRVIRERVPEAQTGQASDYGLFLSDEDPRKGIWLEAGRTLDYYMLRNGDILEYKKKQRPQKIRMLDGSVKTVMVDDSKTVGELLVTICSRIGITNYEEYSLIQETIEEKKEEGTGTLKKDRTLLRDERKMEKLKAKLHTDDDLNWLDHSRTFREQGVDENETLLLRRKFFYSDQNVDSRDPVQLNLLYVQARDDILNGSHPVSFEKACEFGGFQAQIQFGPHVEHKHKPGFLDLKEFLPKEYIKQRGAEKRIFQEHKNCGEMSEIEAKVKYVKLARSLRTYGVSFFLVKEKMKGKNKLVPRLLGITKDSVMRVDEKTKEVLQEWPLTTVKRWAASPKSFTLDFGEYQESYYSVQTTEGEQISQLIAGYIDIILKKKQSKDRFGLEGDEESTMLEESVSPKKSTILQQQFNRTGKAEHGSVALPAVMRSGSSGPETFNVGSMPSPQQQVMVGQMHRGHMPPLTSAQQALMGTINTSMHAVQQAQDDLSELDSLPPLGQDMASRVWVQNKVDESKHEIHSQVDAITAGTASVVNLTAGDPADTDYTAVGCAITTISSNLTEMSKGVKLLAALMDDEVGSGEDLLRAARTLAGAVSDLLKAVQPTSGEPRQTVLTAAGSIGQASGDLLRQIGENETDERFQDVLMSLAKAVANAAAMLVLKAKNVAQVAEDTVLQNRVIAAATQCALSTSQLVACAKVVSPTISSPVCQEQLIEAGKLVDRSVENCVRACQAATTDSELLKQVSAAASVVSQALHDLLQHVRQFASRGEPIGRYDQATDTIMCVTESIFSSMGDAGEMVRQARVLAQATSDLVNAMRSDAEAEIDMENSKKLLAAAKLLADSTARMVEAAKGAAANPENEDQQQRLREAAEGLRVATNAAAQNAIKKKIVNRLEVAAKQAAAAATQTIAASQNAAVSNKNPAAQQQLVQSCKAVADHIPQLVQGVRGSQAQAEDLSAQLALIISSQNFLQPGSKMVSSAKAAVPTVSDQAAAMQLSQCAKNLATSLAELRTASQKAHEACGPMEIDSALNTVQTLKNELQDAKMAAVESQLKPLPGETLEKCAQDLGSTSKAVGSSMAQLLTCAAQGNEHYTGVAARETAQALKTLAQAARGVAASTTDPAAAHAMLDSARDVMEGSAMLIQEAKQALIAPGDAERQQRLAQVAKAVSHSLNNCVNCLPGQKDVDVALKSIGESSKKLLVDSLPPSTKPFQEAQSELNQAAADLNQSAGEVVHATRGQSGELAAASGKFSDDFDEFLDAGIEMAGQAQTKEDQIQVIGNLKNISMASSKLLLAAKSLSVDPGAPNAKNLLAAAARAVTESINQLITLCTQQAPGQKECDNALRELETVKGMLDNPNEPVSDLSYFDCIESVMENSKVLGESMAGISQNAKTGDLPAFGECVGIASKALCGLTEAAAQAAYLVGISDPNSQAGHQGLVDPIQFARANQAIQMACQNLVDPGSSPSQVLSAATIVAKHTSALCNACRIASSKTANPVAKRHFVQSAKEVANSTANLVKTIKALDGDFSEDNRNKCRIATAPLIEAVENLTAFASNPEFVSIPAQISSEGSQAQEPILVSAKTMLESSSYLIRTARSLAINPKDPPTWSVLAGHSHTVSDSIKSLITSIRDKAPGQRECDYSIDGINRCIRDIEQASLAAVSQSLATRDDISVEALQEQLTSVVQEIGHLIDPIATAARGEAAQLGHKVTQLASYFEPLILAAVGVASKILDHQQQMTVLDQTKTLAESALQMLYAAKEGGGNPKAQHTHDAITEAAQLMKEAVDDIMVTLNEAASEVGLVGGMVDAIAEAMSKLDEGTPPEPKGTFVDYQTTVVKYSKAIAVTAQEMMTKSVTNPEELGGLASQMTSDYGHLAFQGQMAAATAEPEEIGFQIRTRVQDLGHGCIFLVQKAGALQVCPTDSYTKRELIECARAVTEKVSLVLSALQAGNKGTQACITAATAVSGIIADLDTTIMFATAGTLNAENSETFADHRENILKTAKALVEDTKLLVSGAASTPDKLAQAAQSSAATITQLAEVVKLGAASLGSDDPETQVVLINAIKDVAKALSDLISATKGAASKPVDDPSMYQLKGAAKVMVTNVTSLLKTVKAVEDEATRGTRALEATIECIKQELTVFQSKDVPEKTSSPEESIRMTKGITMATAKAVAAGNSCRQEDVIATANLSRKAVSDMLTACKQASFHPDVSDEVRTRALRFGTECTLGYLDLLEHVLVILQKPTPEFKQQLAAFSKRVAGAVTELIQAAEAMKGTEWVDPEDPTVIAETELLGAAASIEAAAKKLEQLKPRAKPKQADETLDFEEQILEAAKSIAAATSALVKSASAAQRELVAQGKVGSIPANAADDGQWSQGLISAARMVAAATSSLCEAANASVQGHASEEKLISSAKQVAASTAQLLVACKVKADQDSEAMRRLQAAGNAVKRASDNLVRAAQKAAFGKADDDDVVVKTKFVGGIAQIIAAQEEMLKKERELEEARKKLAQIRQQQYKFLPTELREDEG

SEQ ID NO: 315282 - DNA, 7629 bp, Artificial Sequence
  derived and/or modified sequence
atggtggccctgagcctgaagatctgcgtgagacactgcaacgtggtgaagaccatgcagttcgagcccagcaccgccgtgtacgacgcctgcagagtgatcagagagagagtgcccgaggcccagaccggccaggccagcgactacggcctgttcctgagcgacgaggaccccagaaagggcatctggctggaggccggcagaaccctggactactacatgctgagaaacggcgacatcctggagtacaagaagaagcagagaccccagaagatcagaatgctggacggcagcgtgaagaccgtgatggtggacgacagcaagaccgtgggcgagctgctggtgaccatctgcagcagaatcggcatcaccaactacgaggagtacagcctgatccaggagaccatcgaggagaagaaggaggagggcaccggcaccctgaagaaggacagaaccctgctgagagacgagagaaagatggagaagctgaaggccaagctgcacaccgacgacgacctgaactggctggaccacagcagaaccttcagagagcagggcgtggacgagaacgagaccctgctgctgagaagaaagttcttctacagcgaccagaacgtggacagcagagaccccgtgcagctgaacctgctgtacgtgcaggccagagacgacatcctgaacggcagccaccccgtgagcttcgagaaggcctgcgagttcggcggcttccaggcccagatccagttcggcccccacgtggagcacaagcacaagcccggcttcctggacctgaaggagttcctgcccaaggagtacatcaagcagagaggcgccgagaagagaatcttccaggagcacaagaactgcggcgagatgagcgagatcgaggccaaggtgaagtacgtgaagctggccagaagcctgagaacctacggcgtgagcttcttcctggtgaaggagaagatgaagggcaagaacaagctggtgcccagactgctgggcatcaccaaggacagcgtgatgagagtggacgagaagaccaaggaggtgctgcaggagtggcccctgaccaccgtgaagagatgggccgccagccccaagagcttcaccctggacttcggcgagtaccaggagagctactacagcgtgcagaccaccgagggcgagcagatcagccagctgatcgccggctacatcgacatcatcctgaagaagaagcagagcaaggacagattcggcctggagggcgacgaggagagcaccatgctggaggagagcgtgagccccaagaagagcaccatcctgcagcagcagttcaacagaaccggcaaggccgagcacggcagcgtggccctgcccgccgtgatgagaagcggcagcagcggccccgagaccttcaacgtgggcagcatgcccagcccccagcagcaggtgatggtgggccagatgcacagaggccacatgccccccctgaccagcgcccagcaggccctgatgggcaccatcaacaccagcatgcacgccgtgcagcaggcccaggacgacctgagcgagctggacagcctgccccccctgggccaggacatggccagcagagtgtgggtgcagaacaaggtggacgagagcaagcacgagatccacagccaggtggacgccatcaccgccggcaccgccagcgtggtgaacctgaccgccggcgaccccgccgacaccgactacaccgccgtgggctgcgccatcaccaccatcagcagcaacctgaccgagatgagcaagggcgtgaagctgctggccgccctgatggacgacgaggtgggcagcggcgaggacctgctgagagccgccagaaccctggccggcgccgtgagcgacctgctgaaggccgtgcagcccaccagcggcgagcccagacagaccgtgctgaccgccgccggcagcatcggccaggccagcggcgacctgctgagacagatcggcgagaacgagaccgacgagagattccaggacgtgctgatgagcctggccaaggccgtggccaacgccgccgccatgctggtgctgaaggccaagaacgtggcccaggtggccgaggacaccgtgctgcagaacagagtgatcgccgccgccacccagtgcgccctgagcaccagccagctggtggcctgcgccaaggtggtgagccccaccatcagcagccccgtgtgccaggagcagctgatcgaggccggcaagctggtggacagaagcgtggagaactgcgtgagagcctgccaggccgccaccaccgacagcgagctgctgaagcaggtgagcgccgccgccagcgtggtgagccaggccctgcacgacctgctgcagcacgtgagacagttcgccagcagaggcgagcccatcggcagatacgaccaggccaccgacaccatcatgtgcgtgaccgagagcatcttcagcagcatgggcgacgccggcgagatggtgagacaggccagagtgctggcccaggccaccagcgacctggtgaacgccatgagaagcgacgccgaggccgagatcgacatggagaacagcaagaagctgctggccgccgccaagctgctggccgacagcaccgccagaatggtggaggccgccaagggcgccgccgccaaccccgagaacgaggaccagcagcagagactgagagaggccgccgagggcctgagagtggccaccaacgccgccgcccagaacgccatcaagaagaagatcgtgaacagactggaggtggccgccaagcaggccgccgccgccgccacccagaccatcgccgccagccagaacgccgccgtgagcaacaagaaccccgccgcccagcagcagctggtgcagagctgcaaggccgtggccgaccacatcccccagctggtgcagggcgtgagaggcagccaggcccaggccgaggacctgagcgcccagctggccctgatcatcagcagccagaacttcctgcagcccggcagcaagatggtgagcagcgccaaggccgccgtgcccaccgtgagcgaccaggccgccgccatgcagctgagccagtgcgccaagaacctggccaccagcctggccgagctgagaaccgccagccagaaggcccacgaggcctgcggccccatggagatcgacagcgccctgaacaccgtgcagaccctgaagaacgagctgcaggacgccaagatggccgccgtggagagccagctgaagcccctgcccggcgagaccctggagaagtgcgcccaggacctgggcagcaccagcaaggccgtgggcagcagcatggcccagctgctgacctgcgccgcccagggcaacgagcactacaccggcgtggccgccagagagaccgcccaggccctgaagaccctggcccaggccgccagaggcgtggccgccagcaccaccgaccccgccgccgcccacgccatgctggacagcgccagagacgtgatggagggcagcgccatgctgatccaggaggccaagcaggccctgatcgcccccggcgacgccgagagacagcagagactggcccaggtggccaaggccgtgagccacagcctgaacaactgcgtgaactgcctgcccggccagaaggacgtggacgtggccctgaagagcatcggcgagagcagcaagaagctgctggtggacagcctgccccccagcaccaagcccttccaggaggcccagagcgagctgaaccaggccgccgccgacctgaaccagagcgccggcgaggtggtgcacgccaccagaggccagagcggcgagctggccgccgccagcggcaagttcagcgacgacttcgacgagttcctggacgccggcatcgagatggccggccaggcccagaccaaggaggaccagatccaggtgatcggcaacctgaagaacatcagcatggccagcagcaagctgctgctggccgccaagagcctgagcgtggaccccggcgcccccaacgccaagaacctgctggccgccgccgccagagccgtgaccgagagcatcaaccagctgatcaccctgtgcacccagcaggcccccggccagaaggagtgcgacaacgccctgagagagctggagaccgtgaagggcatgctggacaaccccaacgagcccgtgagcgacctgagctacttcgactgcatcgagagcgtgatggagaacagcaaggtgctgggcgagagcatggccggcatcagccagaacgccaagaccggcgacctgcccgccttcggcgagtgcgtgggcatcgccagcaaggccctgtgcggcctgaccgaggccgccgcccaggccgcctacctggtgggcatcagcgaccccaacagccaggccggccaccagggcctggtggaccccatccagttcgccagagccaaccaggccatccagatggcctgccagaacctggtggaccccggcagcagccccagccaggtgctgagcgccgccaccatcgtggccaagcacaccagcgccctgtgcaacgcctgcagaatcgccagcagcaagaccgccaaccccgtggccaagagacacttcgtgcagagcgccaaggaggtggccaacagcaccgccaacctggtgaagaccatcaaggccctggacggcgacttcagcgaggacaacagaaacaagtgcagaatcgccaccgcccccctgatcgaggccgtggagaacctgaccgccttcgccagcaaccccgagttcgtgagcatccccgcccagatcagcagcgagggcagccaggcccaggagcccatcctggtgagcgccaagaccatgctggagagcagcagctacctgatcagaaccgccagaagcctggccatcaaccccaaggacccccccacctggagcgtgctggccggccacagccacaccgtgagcgacagcatcaagagcctgatcaccagcatcagagacaaggcccccggccagagagagtgcgactacagcatcgacggcatcaacagatgcatcagagacatcgagcaggccagcctggccgccgtgagccagagcctggccaccagagacgacatcagcgtggaggccctgcaggagcagctgaccagcgtggtgcaggagatcggccacctgatcgaccccatcgccaccgccgccagaggcgaggccgcccagctgggccacaaggtgacccagctggccagctacttcgagcccctgatcctggccgccgtgggcgtggccagcaagatcctggaccaccagcagcagatgaccgtgctggaccagaccaagaccctggccgagagcgccctgcagatgctgtacgccgccaaggagggcggcggcaaccccaaggcccagcacacccacgacgccatcaccgaggccgcccagctgatgaaggaggccgtggacgacatcatggtgaccctgaacgaggccgccagcgaggtgggcctggtgggcggcatggtggacgccatcgccgaggccatgagcaagctggacgagggcaccccccccgagcccaagggcaccttcgtggactaccagaccaccgtggtgaagtacagcaaggccatcgccgtgaccgcccaggagatgatgaccaagagcgtgaccaaccccgaggagctgggcggcctggccagccagatgaccagcgactacggccacctggccttccagggccagatggccgccgccaccgccgagcccgaggagatcggcttccagatcagaaccagagtgcaggacctgggccacggctgcatcttcctggtgcagaaggccggcgccctgcaggtgtgccccaccgacagctacaccaagagagagctgatcgagtgcgccagagccgtgaccgagaaggtgagcctggtgctgagcgccctgcaggccggcaacaagggcacccaggcctgcatcaccgccgccaccgccgtgagcggcatcatcgccgacctggacaccaccatcatgttcgccaccgccggcaccctgaacgccgagaacagcgagaccttcgccgaccacagagagaacatcctgaagaccgccaaggccctggtggaggacaccaagctgctggtgagcggcgccgccagcacccccgacaagctggcccaggccgcccagagcagcgccgccaccatcacccagctggccgaggtggtgaagctgggcgccgccagcctgggcagcgacgaccccgagacccaggtggtgctgatcaacgccatcaaggacgtggccaaggccctgagcgacctgatcagcgccaccaagggcgccgccagcaagcccgtggacgaccccagcatgtaccagctgaagggcgccgccaaggtgatggtgaccaacgtgaccagcctgctgaagaccgtgaaggccgtggaggacgaggccaccagaggcaccagagccctggaggccaccatcgagtgcatcaagcaggagctgaccgtgttccagagcaaggacgtgcccgagaagaccagcagccccgaggagagcatcagaatgaccaagggcatcaccatggccaccgccaaggccgtggccgccggcaacagctgcagacaggaggacgtgatcgccaccgccaacctgagcagaaaggccgtgagcgacatgctgaccgcctgcaagcaggccagcttccaccccgacgtgagcgacgaggtgagaaccagagccctgagattcggcaccgagtgcaccctgggctacctggacctgctggagcacgtgctggtgatcctgcagaagcccacccccgagttcaagcagcagctggccgccttcagcaagagagtggccggcgccgtgaccgagctgatccaggccgccgaggccatgaagggcaccgagtgggtggaccccgaggaccccaccgtgatcgccgagaccgagctgctgggcgccgccgccagcatcgaggccgccgccaagaagctggagcagctgaagcccagagccaagcccaagcaggccgacgagaccctggacttcgaggagcagatcctggaggccgccaagagcatcgccgccgccaccagcgccctggtgaagagcgccagcgccgcccagagagagctggtggcccagggcaaggtgggcagcatccccgccaacgccgccgacgacggccagtggagccagggcctgatcagcgccgccagaatggtggccgccgccaccagcagcctgtgcgaggccgccaacgccagcgtgcagggccacgccagcgaggagaagctgatcagcagcgccaagcaggtggccgccagcaccgcccagctgctggtggcctgcaaggtgaaggccgaccaggacagcgaggccatgagaagactgcaggccgccggcaacgccgtgaagagagccagcgacaacctggtgagagccgcccagaaggccgccttcggcaaggccgacgacgacgacgtggtggtgaagaccaagttcgtgggcggcatcgcccagatcatcgccgcccaggaggagatgctgaagaaggagagagagctggaggaggccagaaagaagctggcccagatcagacagcagcagtacaagttcctgcccaccgagctgagagaggacgagggctag

SEQ ID NO: 315283 - DNA, 7629 bp, Artificial Sequence
  derived and/or modified sequence
atggtggccctgagcctgaagatctgtgtgagacactgcaacgtcgtgaaaacaatgcagtttgagccaagtaccgctgtttacgacgcttgcagggtgattcgggaacgcgtacctgaggcacagaccggccaggctagtgattacggactgtttctgagcgacgaagaccctcgaaaaggcatctggctggaagccggacgtacccttgactactacatgctcagaaacggggacattctcgaatacaaaaagaagcaacgcccccagaagattaggatgttggacggctcagtgaagaccgtcatggtggacgattcaaagactgtgggcgaactccttgtcacgatttgtagtagaatcgggattacgaattacgaggagtacagcttaattcaggagaccattgaggaaaaaaaagaagaaggcacgggtactctgaaaaaggacaggaccctgctcagggatgaaagaaagatggaaaaattaaaggctaagctccacactgacgatgatcttaactggcttgatcattccaggactttcagagagcagggagtggatgaaaacgagaccttgctgctacggcgcaaattcttttacagtgaccaaaacgtggatagcagagatcctgtacaactgaatctgctgtatgttcaggcccgcgacgatatcctgaatgggtcccaccctgtcagtttcgaaaaagcttgtgagttcggcgggttccaggcccagatccaattcggaccccacgtggagcacaaacataagcccggcttcctggacctaaaagagtttctgcccaaggaatacattaaacagaggggagcagagaagcggatctttcaggaacacaagaattgtggagaaatgagtgaaatagaggcaaaagtgaagtatgtcaagctggcaaggtctctcagaacctacggcgtgagcttttttctagtgaaagagaagatgaaaggcaagaataaactcgtgccccgtctgctgggtattacaaaagattctgtcatgagggtggacgagaagacgaaggaggtcttacaagagtggcctcttacaactgtcaaaaggtgggcagcctcccctaagtctttcacattggatttcggtgagtaccaggagtcttattactcagtgcagaccacagagggcgaacagatctcacagctgatagcaggctacatcgatattattctgaagaaaaaacagagcaaagaccggttcggactggagggggatgaagaaagtaccatgctggaagaaagcgtttccccaaaaaaaagcacaatcctgcagcaacagtttaaccgaaccggaaaggccgagcacggcagcgtagcactgcctgcggtcatgaggtccggaagctcaggacctgagacctttaacgtcgggtcaatgccttccccacagcagcaggtcatggtcggtcagatgcacaggggccacatgccccccctcacttcagctcagcaggctttaatgggaacaattaacacatctatgcatgcagtgcagcaggcccaggacgacctatctgaactggattctttaccaccactcggccaggatatggcctctagagtatgggtccagaacaaagttgacgagtcaaagcacgaaattcacagccaagtggacgctattacagccgggacagccagtgtggtgaatcttacagccggggatccagcggacaccgactacacagcagtcggatgtgcaatcactaccatttcatccaatttgacagagatgtccaagggggtcaagctgcttgcagcgctgatggacgacgaggtggggagtggagaagacctccttagggccgcccgcactctcgccggagccgtatctgacctgctgaaggccgtgcagccgacctctggggagccacgacaaaccgtgctgaccgccgctggaagcattggccaggccagcggcgaccttctcaggcagataggagagaatgaaaccgatgaaaggttccaggatgtactgatgtctctggctaaggctgtcgcgaatgcggcagccatgttagtgcttaaagcaaagaacgttgcgcaagtcgccgaggacaccgttctgcagaaccgtgtgattgcagcggctacccagtgtgccctgtccacatctcagttagtggcgtgcgcaaaagtggtgagtcccacaatttcatcacctgtatgccaggagcagcttatcgaggctgggaagttagtggatagatctgtggaaaactgcgtgcgggcgtgccaagccgcaaccacagacagcgaattactcaagcaggttagtgcagcagctagcgtggtttctcaggccctccatgaccttctgcagcacgtgcgccagtttgcatccaggggagaaccaattgggcgttatgaccaggctaccgacacgatcatgtgtgtgaccgaaagtatcttctcttccatgggcgacgcaggcgaaatggtccggcaggcaagggtcctggcccaggcaacctccgatctggtgaacgcaatgcgatctgatgctgaggcagagattgacatggaaaattccaagaaacttctggcagccgcaaagcttctggccgattctactgctcgaatggtagaagctgcaaaaggtgctgccgctaaccccgaaaacgaagatcagcagcagcgtctcagagaggccgctgagggcttgcgagtggcgacaaacgccgcggctcagaatgcaatcaagaaaaaaattgtgaatcgcttagaagtcgcagccaagcaggccgctgctgcagccactcagaccattgctgcaagtcaaaatgccgcggtaagcaacaaaaaccccgccgcccagcaacaactggttcaaagttgcaaagctgtggccgaccacatacctcaactggtccagggcgtccgaggtagtcaggcgcaggccgaggacctgtctgcccagctcgctctgatcattagctcacagaacttcctgcagccaggctccaagatggttagcagcgcaaaggccgctgtcccaacagtgtctgaccaggcagccgcgatgcagctaagccagtgcgccaaaaacctcgctaccagcctcgccgaactaaggaccgcctcccagaaggcccatgaggcttgtgggcccatggaaatcgattctgctcttaacaccgtgcagactttaaagaatgaactccaagacgccaagatggccgctgtcgagagccaactgaaaccactccccggcgaaaccctcgagaaatgcgcccaggacctgggatctaccagtaaggccgtgggatccagcatggctcaactgctgacctgcgctgcccaaggaaacgagcactataccggggtcgctgcccgggagactgcgcaggccctgaaaacactcgcccaggctgcgcgaggcgtagctgcatccactaccgatccagctgccgcacacgccatgctggattctgccagggatgtcatggaggggtccgccatgctgatccaggaagctaagcaggccttgatcgctccaggcgatgctgagaggcagcagcgactggcacaggtggctaaagccgtaagccactccctaaacaactgcgtcaactgtctgcccggacaaaaggacgttgatgtcgcccttaagtccatcggtgaatctagcaaaaagttactggtggattctcttcctccctccacaaaaccttttcaggaggcccaatcagagcttaatcaagccgccgcagatctgaaccagagcgcgggcgaggtggtacacgcaacgcgcggacagagtggtgagttggccgcggcctccggcaagttctcagacgatttcgatgagttcctggacgcagggatcgaaatggcaggtcaggctcaaaccaaagaggatcagattcaggtaatcggaaatttaaagaacatcagtatggctagcagcaaactgctgttggccgctaagtctttatctgtggatcccggagcacccaacgctaaaaacctcctggcggccgccgcgcgggcagttacagaatccatcaaccagctgatcacactgtgcactcagcaggcccctggtcaaaaggaatgcgataatgctctgagggaacttgaaactgtcaagggcatgctagacaatccaaatgagcccgtgtctgacctgtcctacttcgattgcattgaatccgtgatggaaaattccaaggtgctgggagagtctatggccggtatatcccagaatgccaaaacaggggatttacccgcatttggagagtgcgtggggattgcatctaaagcactgtgcggtttgacagaggcagctgcccaggccgcatacctggtgggaatcagtgatcccaatagccaggcgggccaccagggcctggtcgaccctatccaatttgctcgagcaaatcaggccattcagatggcctgccagaacttggtggaccctggctctagcccaagccaagtactgtctgccgccaccattgtggctaagcatacttccgcactgtgtaatgcctgtcgcatcgcttcatctaagacagccaacccagtggccaagcgtcactttgttcagagcgctaaggaggtggcaaactctaccgccaacttggtcaagacaatcaaagctctcgacggcgacttctcagaggataacaggaataaatgccggatcgctacagcaccgctgatcgaagccgtggagaacctgacagccttcgcttcgaacccggagttcgtcagtatacctgcacagatcagttccgaggggtcccaggcccaggagcctatcctggtctctgctaaaaccatgctagagagctcctcttacctgatacggactgccaggagcctcgctattaatcccaaggacccccccacgtggtccgtcctggcggggcactctcacaccgtctcagattcgataaagtctctcatcaccagcattagagataaggcccccgggcagagagaatgtgattattcgattgacggaatcaacagatgtatccgcgatatcgaacaggcttctcttgcagcagtttcccaaagtttagccacacgcgacgatatctcagttgaggccctccaggaacagttgaccagtgtggttcaagaaatcggtcacctcattgatccaatcgccactgcagcccgaggcgaagctgcgcagctggggcacaaagtgacccagctagcaagctactttgagcccctaatcttggccgccgttggggtcgcttctaaaatcctcgatcatcaacagcaaatgaccgtgttggatcaaactaaaacactcgctgaatccgccctccaaatgctatatgctgccaaagagggaggaggcaaccccaaggcccaacacacccacgatgcgataacggaggcagctcagttaatgaaagaggctgttgatgatataatggtgaccttgaatgaggctgccagcgaagtcgggctggtgggaggcatggtcgatgcaatcgctgaggcgatgtccaaactcgacgagggaacccccccggagcctaagggaactttcgtggattatcaaactaccgtggtcaagtattcaaaagccatcgccgttaccgctcaggagatgatgactaagtcagtgaccaacccagaggagctgggcggcctggcaagccagatgacaagcgactacggccacctagctttccagggacagatggctgccgcaacagcagagcctgaggaaataggctttcaaatcagaactagggtgcaggacctgggccatggttgtatatttctagtccagaaggctggggctctccaggtgtgcccgactgattcttatacaaagagggagctcattgagtgcgcacgcgcggtgactgagaaagtgtcactggtgttgagcgccctgcaggcgggcaataaggggactcaggcatgcattacggcggccaccgcagtttctggaatcatcgcagatcttgacaccactattatgtttgccacagcgggcacattaaatgcagaaaatagcgagacgttcgccgatcatcgagagaatatactcaaaaccgccaaagccctggtcgaagacactaaactcctggtgagcggggccgcttccactccagataagcttgcccaggccgcccagagctctgccgcaaccatcacacaattggctgaggtcgtgaaattaggcgctgctagcttggggagtgacgaccctgaaacccaggtcgtacttatcaatgccattaaagacgtggcgaaagctctgtcagacctgatctcggccactaagggggcggcatcgaagcccgttgatgatcctagcatgtatcaattgaaaggcgcagcaaaggtaatggtcaccaacgtgacaagtcttctgaaaactgtgaaggccgtggaagatgaagccaccagaggaacacgggcactggaggcaaccatagaatgcattaagcaggagctgactgtgttccagagcaaggacgtgccagagaagacaagcagcccagaggagtcaattcgcatgacgaagggaataactatggctaccgccaaggcagttgcagccggcaacagctgtcgtcaggaagacgttattgcaacagcgaacctgagcagaaaagcagttagcgacatgctcacggcgtgcaagcaagcgtcattccatcccgacgtatcagacgaagtgaggacccgtgccctaagatttgggaccgaatgcacattaggatacttggatttattagaacacgttctggtcatcttgcagaagcccacaccagaattcaagcaacaactcgccgccttctcaaagagagtcgcaggcgctgtaacggaactcatccaagcagctgaggccatgaagggtaccgaatgggtggatccggaagatcctaccgttattgctgagacagagctgctgggcgccgccgccagcattgaggccgcagccaaaaagctagagcagttgaagcctcgggcaaagcccaagcaagccgacgagactctagattttgaggagcagatattagaggctgcgaaatcgattgccgcagccacttcggcactggtaaagtctgccagtgcagcacagagagagcttgtagcgcagggaaaagttggatccattcctgcaaacgcagccgatgatgggcagtggtcccaggggctgatctcagctgctcggatggtggctgcagcaacgtccagcctttgcgaagccgcaaacgcttccgtgcagggccacgcatcagaggagaagctgattagcagcgcaaaacaagtggccgcctcgaccgctcagttgctggtggcatgtaaagtgaaggctgatcaggacagtgaagccatgaggagacttcaggccgctggaaatgctgttaaacgcgcaagtgacaatctggtgcgggccgcacagaaggccgccttcggcaaagctgacgatgacgacgttgtagtgaaaacaaaatttgtgggaggcattgctcagatcattgcagcacaagaagagatgctgaagaaggaacgcgagctcgaggaggcaagaaagaaattagcccaaatcagacagcaacagtacaagttcctgcccactgagctgcgggaagacgaagggtag

SEQ ID NO: 315284 - DNA, 7629 bp, Artificial Sequence
  derived and/or modified sequence
atggtcgccctttcattaaagatttgcgtgcgccactgcaacgtggtgaaaacaatgcagttcgaaccatcaactgcagtttacgacgcgtgtcgagtcataagggagagagtcccagaggcacagacagggcaggcctcggattatggattattcctttctgacgaggacccccgcaagggtatttggttggaagcggggcggaccttagattactatatgctccgtaacggcgacatcttggagtataaaaaaaagcagcggccccagaaaatcagaatgcttgatggttctgtgaagacagtgatggtcgacgacagtaagactgtgggcgaactgcttgtcaccatttgtagccgtattgggatcactaactacgaggaatacagtctgattcaagagacgatcgaggagaagaaagaggagggcaccggcactttaaagaaagacagaacactactgcgcgacgaacgaaagatggaaaaactgaaagccaaacttcatactgatgacgacttgaattggctcgatcacagtaggacgtttagggaacaaggtgtggatgagaacgagacactgcttctgcgcaggaagttcttttattctgaccaaaacgtggactcgcgcgaccccgtgcagctgaatctcctctatgtacaggctcgtgatgatatcttgaacggaagtcaccctgtatccttcgagaaggcctgcgaattcggcgggtttcaggcgcagatacagttcgggcctcacgtcgaacacaaacacaagcctggtttcctcgacctgaaagagttcctgcctaaagaatatatcaagcaacggggagccgagaaacggattttccaggaacacaagaattgtggggaaatgtctgagatagaggctaaggtgaaatatgtgaaactggcacgctccctccgcacctatggcgtgtcgttttttctggtgaaggaaaagatgaaggggaagaacaagcttgttccgcgactgctgggcatcaccaaagatagtgtcatgcgcgttgatgaaaaaacaaaggaagtcctgcaggagtggccacttacaacggtcaaacgctgggccgcgtcaccaaagtcctttaccctggacttcggcgagtaccaggagtcctactacagcgttcagactacagagggagaacaaatttctcagctaatcgccggctacatcgacattatccttaaaaagaaacaatctaaagaccgcttcggactggagggcgatgaagaatcaacgatgctggaagagtctgttagccccaagaaatcgactattctccagcagcagttcaaccgcaccgggaaagcggaacatggaagcgtggccttgccggccgttatgaggtccgggtcctccggccctgagacattcaatgtcgggtctatgccctcgccacaacagcaggtgatggtgggacagatgcaccggggccacatgccccccctgacctccgcccagcaagccctgatggggactataaatacgtcgatgcacgcagtgcagcaggctcaggacgacctgtctgaattggattcgctgcctccactgggacaggacatggcatcaagagtgtgggtgcagaataaggtggacgagagtaagcatgagattcacagccaggttgacgccataaccgccgggactgcctcggtggtaaacttgacagccggcgacccagctgatacggattatactgctgtaggttgtgccatcacgactatctcctcaaacctgacagagatgtcaaaaggggtgaagctcctggctgctctgatggacgacgaggtggggtctggcgaagacctccttcgcgctgccagaaccctggccggcgccgttagcgatctgctcaaggccgtgcaaccaacgtccggggagccgcgacaaacagtgctgaccgcggccgggtcgatcggccaggcttcgggtgaccttctgcgccaaattggcgagaacgaaacagacgagagatttcaagatgtgttgatgtcccttgccaaagcagtggccaacgccgccgctatgctggttctcaaagccaagaatgtggctcaagtggcagaggacaccgtgcttcagaacagagttatcgcggccgctacccagtgcgccctgagcacatcgcagcttgtagcctgtgcgaaagtggtctcccccacgatttccagccctgtttgtcaggaacagctgatcgaagcaggtaaactcgtcgatcgaagcgtcgaaaactgtgtgcgcgcatgtcaggccgcgaccacagacagtgagctcttaaagcaagtaagcgccgctgcatctgtagttagtcaggcacttcacgacctactgcagcatgtgcgacagttcgctagccgcggtgaacccatcggacggtatgaccaagccacagacactatcatgtgcgtgaccgagagcatcttttcctccatgggagacgccggtgagatggtgaggcaggccagagtattagcgcaagctacatcagatctggtgaatgccatgcgctcagacgccgaagctgaaatcgacatggagaactccaaaaaactgttggctgcagcaaagttgctcgcagattccaccgcccggatggtggaagcagctaagggcgcagccgccaatcctgagaacgaagaccagcaacagcggctccgcgaggccgcagagggccttcgcgttgcaactaacgccgctgcacagaacgcaatcaagaaaaagatcgtgaatcgcctggaggttgccgcaaagcaagccgcagctgcagccacgcagaccattgccgccagtcagaatgctgcagtgtccaacaaaaatccagcggcccaacagcagcttgtgcagagctgtaaagcggtagcggaccacatcccacagctggtccagggggtgcgggggagccaggcccaggccgaggacctgtcagctcaactggcactcattattagcagtcaaaatttcctgcaaccagggagtaaaatggttagctccgccaaagctgccgtccccactgtgtctgatcaagccgccgcgatgcagctgagccagtgtgcaaagaacctggcaactagcctggctgagctgcgaaccgcttctcagaaggctcacgaggcttgtgggccaatggaaattgattccgctctcaatacagtccagacattaaaaaacgaactgcaggacgccaagatggccgcagtcgaaagccaattaaagcccctgccaggcgagacactcgagaagtgcgcccaggacctggggagcaccagcaaggccgtgggatcgtccatggcacagctgctgacttgcgctgcccagggcaatgagcattatactggggtagctgcccgagaaaccgcccaggctctgaaaaccctggcccaagcagcccgtggcgttgccgcttcaacaacagatccagccgctgcccatgctatgctggacagcgcaagagacgtaatggaagggagcgccatgctaatccaggaagctaagcaggctctcatcgcacctggtgacgccgagaggcagcaaaggctggctcaggttgccaaggccgtgtcccattccctgaacaattgcgtgaattgtctgccggggcagaaagacgtggacgtggccctgaagagcatcggggaaagtagtaagaaactgttggtggattcccttcccccttcaacaaaaccctttcaggaggcccagagcgaactgaatcaagccgccgccgatttaaatcagtcagcgggagaagtggtgcacgccacaagaggacagtccggagaacttgcagcggcatcagggaagttctcagatgatttcgacgaatttctcgacgcaggaatcgagatggcagggcaagcacagacaaaagaagatcagatacaggtgattggaaacctgaaaaatatctccatggcatcttcgaagttactgctggcagctaagagtttgtcggtggacccaggtgcgcctaatgcaaagaatttacttgctgccgcagcgcgggccgtcactgagtccatcaaccaactgatcactctgtgtactcagcaggctcctggccaaaaagagtgtgacaatgcactgcgagagctcgagactgtgaagggtatgttggataacccaaacgaacctgtgtctgacctttcttactttgattgtattgaaagtgtgatggaaaatagtaaagtgctgggagagtctatggcaggaatttcacagaacgcaaagactggagatctgcctgcttttggagagtgtgtgggtatcgcatctaaagccttgtgcgggcttacagaggctgcggcgcaggcggcttatctcgtaggcatttctgatcccaatagccaagcgggtcaccagggactggtggatccaattcagttcgctcgagcgaaccaggctatacagatggcttgtcaaaatctggtcgatcccggctctagcccaagccaggtgctgtccgcagctactatcgtggctaagcacacttccgccctgtgcaatgcctgtcggatagctagctcaaagacagccaatcccgtagccaaaaggcatttcgttcagtcggccaaagaggtagctaactccaccgctaacctcgtcaaaaccatcaaggctctcgatggcgacttttccgaggacaatagaaacaaatgcagaatcgcaaccgctcccctgattgaagccgtagaaaacctcactgcttttgcatcaaatcctgaattcgtaagcatcccagcccaaattagttccgaaggctcacaggctcaggagccaatactggtcagcgccaagacaatgctggagagtagttcatatttaatcagaaccgcacggagcttggccatcaatccaaaggatcctcctacgtggtcggtgttggctggccacagtcatactgtatccgattccatcaaatcattaattacatcaatccgagacaaagccccaggccagagggagtgcgactacagtatcgacggaattaatcgctgtatccgggatatagaacaggcctctttggccgcagtgtcccagtcgttagccacaagagatgacatctcagtggaggctcttcaggaacagcttacttcagtcgttcaagaaatcggacatctgattgaccccatcgccacagctgcccggggagaagccgcgcagctcggacataaagtgactcagttggcatcctatttcgagcccttgatcctcgccgctgtcggggtagcgtccaaaattctggatcaccaacaacagatgacagtacttgaccagactaaaacgttggcggagtcagccctacagatgctttacgcggccaaggaaggaggcggaaatcccaaggctcagcacacacacgacgcaataaccgaggctgcgcagctcatgaaggaagccgttgacgacatcatggtgactcttaatgaagcagcaagcgaggtcggcctggtgggaggaatggtcgacgccattgcagaagcaatgtctaaactggacgagggaactccccctgagccaaaaggcacattcgtggactaccagaccacggtcgtgaagtattctaaagccattgcagttacagcccaggagatgatgaccaagtccgtcacgaacccagaggagctggggggactagccagccaaatgactagtgattatggacatctggccttccaaggccaaatggccgctgctaccgcagagcctgaagagatcggttttcaaattagaacccgggtacaggacctgggacatggatgcattttcctggtgcaaaaggccggtgcattgcaggtgtgtccaaccgactcctatactaaacgtgaacttattgagtgcgcaagggcagttaccgaaaaggttagcctggtcctgtctgccttacaagctgggaataaggggacgcaggcctgtattacagccgccacggcggtctctgggatcattgctgacctggataccacaattatgtttgctacagccgggaccctgaatgccgagaattcagagacatttgcagatcacagagaaaacatactcaaaactgctaaagcgttggtggaggatacaaagctgctggtcagtggcgccgcttccacacccgataagttggcccaagcggctcagtctagcgctgcaactatcacacagctggctgaggtagtcaagcttggggccgcctctctgggatcagacgatccagagacccaggtagtattgattaatgccattaaggatgtggcaaaggctctgagcgatttgattagtgcaaccaaaggagcagcctccaagcccgtcgatgacccttctatgtatcagctcaagggggcggcgaaggtcatggtaacaaatgtgacgtccctcctgaagaccgtgaaagcagttgaggacgaagcaacacgcggcaccagggccctagaggctaccattgaatgcatcaagcaagagttaacggttttccagtcgaaagacgtgcccgagaaaaccagttcgcccgaggagagcatccggatgactaagggcattaccatggccactgccaaggctgtggcagctggcaattcttgcaggcaggaggatgtaattgccacagcaaatttaagcaggaaggctgtatccgatatgttaacagcctgtaagcaggctagcttccatcccgacgtcagcgacgaagtcaggacgcgagccctgcgttttgggaccgaatgcactctggggtacctcgatctcctggagcacgtgctcgtgatcctgcagaagcccacacctgagttcaaacagcagctggccgccttcagtaagagggtagctggagcggtgacggaactgattcaggcggccgaggccatgaaggggaccgagtgggtggaccccgaggacccgaccgtcatcgccgaaacggagctgctgggcgccgccgcatctatcgaggctgcagctaagaaactggaacagctgaagccgagagctaaacccaaacaagctgacgaaaccctggattttgaggagcagatcctcgaggccgccaaatccatagctgcagccacctcagcactcgtcaagtctgccagcgctgcccagcgagagctagtcgcccaaggaaaggtcgggagtatacccgccaacgctgcagatgacggccagtggtcgcagggtttgatctccgctgctcgtatggtggccgccgctacctctagcctctgtgaagccgctaatgctagtgttcaagggcacgcatccgaggagaagttgatcagcagcgccaagcaggtggccgcgtcaacagcacagctgctggtagcgtgtaaggtcaaggccgaccaggattccgaggccatgagaaggctccaagcagcaggaaatgccgtgaagcgcgcaagtgataatttagtgcgtgcagcccaaaaggctgcctttggaaaagcggacgacgatgacgtcgtggttaagactaaattcgtgggagggatagcccagattattgccgctcaagaggaaatgctcaaaaaagaacgagagctggaggaggcccgtaaaaaattggcccagataaggcagcagcagtacaagttcctgcccactgagttgcgggaagacgaggggtag

SEQ ID NO: 315285 - DNA, 7629 bp, Artificial Sequence
  derived and/or modified sequence
atggtggccctgagcctgaagatctgtgtgcgccactgcaatgtggtgaagaccatgcagtttgagcccagcacagctgtgtatgatgcctgcagggtcatccgggagcgggtgcctgaggcccagacaggccaggccagtgactatggcctcttcctgagtgatgaggaccccaggaagggcatctggctggaggccggccgcaccctggactactacatgctgagaaatggagacatcctggagtacaagaagaagcagaggccccagaagatccgcatgctggatggctctgtgaagacagtgatggtggatgacagcaagacagtgggggagctgctggtgaccatctgcagcagaattggcatcaccaactatgaggagtacagcctcatccaggagaccatcgaggagaagaaggaggagggcaccggcaccctgaagaaggacaggaccctgctgagagatgagaggaagatggagaagctgaaggccaagctgcacacagatgatgacctgaactggctggaccacagcaggaccttccgggagcagggcgtggatgaaaatgagaccctgctgctgcggaggaagttcttctacagcgaccagaatgtggacagccgggaccctgtgcagctgaacctgctgtatgtgcaggccagagatgacatcctgaatggcagccaccctgtgtcctttgagaaggcctgtgaatttggaggcttccaggcccagatccagtttggcccccacgtggagcacaagcacaagccaggcttcctggacctgaaggagttcctgcccaaggagtacatcaagcagagaggagctgagaagaggatcttccaggagcacaagaactgtggggagatgtctgaaattgaggccaaggtgaagtatgtgaagctggcccggagcctgcggacctatggagtgtccttcttcctggtgaaggagaagatgaagggcaagaacaagctggtgccccggctgctgggcatcaccaaggacagcgtgatgagggtggatgagaagaccaaggaggtgctgcaggagtggcccctgaccaccgtgaagcgctgggccgccagccccaagagcttcaccctggactttggagagtaccaggagagctactacagcgtgcagaccacagaaggagagcagatcagccagctgattgctggctacatcgacatcatcctgaagaagaagcagagcaaggaccgcttcggcctggagggagatgaggagagcaccatgctggaggagagcgtgagccccaagaagagcaccatcctgcagcagcagttcaacagaacaggcaaggccgagcacggctctgtggccctgcctgctgtgatgaggagcggcagcagcggccctgagaccttcaacgtgggctccatgcccagcccccagcagcaggtgatggtgggccagatgcaccggggccacatgccacccctgaccagcgcccagcaggccctgatgggcaccatcaacacctccatgcatgctgtgcagcaggcccaggatgacctgtctgagctggacagcctgccccccctgggccaggacatggccagccgggtgtgggtgcagaacaaggtggatgagagcaagcatgagatccacagccaggtggatgccatcacagctggaacagcctctgtggtgaacctgacagctggggaccctgctgacacagactacacagctgtgggctgtgccatcaccaccatcagcagcaacctgacagagatgagcaagggcgtgaagctgctggccgccctgatggatgatgaggtgggcagcggggaggacctgctgcgggccgcccggaccctggccggggctgtgtctgacctgctgaaggctgtgcagcccaccagcggggagccccggcagacagtgctgacagctgctggcagcatcggccaggccagcggggacctgctgcggcagatcggggagaatgaaacagatgagcgcttccaggatgtgctgatgagcctggccaaggctgtggccaatgctgctgccatgctggtgctgaaggccaagaatgtggcccaggtggctgaagatactgtgctgcagaacagagtgattgctgctgccacccagtgtgccctgagcaccagccagctggtggcctgtgccaaggtggtgagccccaccatcagcagccctgtgtgccaggagcagctgattgaggccggcaagctggtggacagatctgtggagaactgtgtgcgggcctgccaggccgccaccacagacagcgagctgctgaagcaggtgtctgctgctgcctctgtggtgtcccaggccctgcatgacctgctgcagcacgtgcggcagtttgccagcagaggagagcccatcggccgctatgaccaggccacagacaccatcatgtgtgtgacagagagcatcttcagctccatgggagatgctggggagatggtgcggcaggcccgggtgctggcccaggccaccagtgacctggtgaatgccatgagaagtgatgctgaggccgagattgacatggagaacagcaagaagctgctggccgccgccaagctgctggccgacagcacagccaggatggtggaggccgccaagggagctgctgccaacccagaaaatgaagaccagcagcagaggctgcgggaggccgctgagggcctgcgggtggccaccaatgctgctgcccagaatgccatcaagaagaagatcgtgaaccggctggaggtggccgccaagcaggccgctgctgctgccacccagaccatcgccgccagccagaatgctgctgtgagcaacaagaacccagctgcccagcagcagctggtgcagagctgcaaggctgtggccgaccacatcccccagctggtgcagggcgtgcggggcagccaggcccaggccgaggacctgagcgcccagctggccctgatcatcagcagccagaacttcctgcagcccggcagcaagatggtgtcctctgccaaggctgctgtgcccaccgtgtctgaccaggccgccgccatgcagctgagccagtgtgccaagaacctggccaccagcctggccgagctgaggacagccagccagaaggcccacgaggcctgtggccccatggagattgacagcgccctgaacacagtgcagaccctgaagaatgagctgcaggatgccaagatggctgctgtggagagccagctgaagcccctgcccggggagaccctggagaagtgtgcccaggacctgggcagcaccagcaaggctgtgggcagctccatggcccagctgctgacctgtgccgcccagggcaatgagcactacacaggagtggccgcccgggagacagcccaggccctgaagaccctggcccaggccgcccggggcgtggccgccagcaccacagatcctgctgctgcccacgccatgctggacagcgccagagatgtgatggagggcagcgccatgctgatccaggaggccaagcaggccctgattgcccctggagatgctgagcggcagcagaggctggcccaggtggccaaggctgtgagccacagcctgaacaactgtgtgaactgcctgcccggccagaaggatgtggatgtggccctgaagagcatcggggagagcagcaagaagctgctggtggacagcctgccccccagcaccaagcccttccaggaggcccagagcgagctgaaccaggccgctgctgacctgaaccagagcgctggggaggtggtgcacgccacccggggccagagcggggagctggccgccgccagcggcaagttcagtgatgactttgatgagttcctggatgctggcatcgagatggccggccaggcccagaccaaggaggaccagatccaggtgattggcaacctgaagaacatctccatggccagcagcaagctgctgctggccgccaagagcctgtctgtggaccccggggccccaaatgccaagaacctgctggccgccgccgcccgggctgtgacagagagcatcaaccagctgatcaccctgtgcacccagcaggcccctggccagaaggaatgtgacaatgccctgcgggagctggagaccgtgaagggcatgctggacaaccccaatgaacctgtgtctgacctgagctactttgactgcattgaatctgtgatggagaacagcaaggtgctgggggagagcatggccggcatcagccagaatgccaagacaggagacctgcctgccttcggggagtgtgtgggcatcgccagcaaggccctgtgtggcctgacagaagctgctgcccaggccgcctacctggtgggcatcagtgaccccaacagccaggccggccaccagggcctggtggaccccatccagtttgcccgggccaaccaggccatccagatggcctgccagaacctggtggaccccggcagcagccccagccaggtgctgtctgctgccaccatcgtggccaagcacaccagcgccctgtgcaatgcctgcagaattgccagcagcaagacagccaaccctgtggccaagaggcactttgtgcagagcgccaaggaggtggccaacagcacagccaacctggtgaagaccatcaaggccctggatggagacttcagcgaggacaacagaaataaatgtcgcatcgccacagcccccctcatcgaggccgtggagaacctgacagcctttgccagcaaccctgagtttgtgtccatcccagcccagatcagcagcgagggcagccaggcccaggagcccatcctggtgtctgccaagaccatgctggagagcagcagctacctgatcagaacagcccggagcctggccatcaaccccaaggacccccccacctggagcgtgctggccggccacagccacacagtgtctgacagcatcaagagcctcatcaccagcatccgggacaaggcccctggccagcgggagtgtgactacagcattgatggcatcaaccgctgcatccgggacatcgagcaggccagcctggccgctgtgtcccagagcctggccaccagagatgacatctctgtggaggccctgcaggagcagctgacctctgtggtgcaggagatcggccacctgattgaccccatcgccacagctgcccggggggaggccgcccagctgggccacaaggtgacccagctggccagctactttgagcccctcatcctggccgctgtgggcgtggccagcaagatcctggaccaccagcagcagatgacagtgctggaccagaccaagaccctggccgagagcgccctgcagatgctgtatgctgccaaggagggcggcggcaaccccaaggcccagcacacccatgatgccatcacagaggccgcccagctgatgaaggaggccgtggatgacatcatggtgaccctgaatgaggccgccagcgaggtgggcctggtgggcggcatggtggatgccatcgccgaggccatgagcaagctggatgagggcaccccacctgagcccaagggcacctttgtggactaccagaccaccgtggtgaagtacagcaaggccatcgctgtgacagcccaggagatgatgaccaagtctgtgaccaaccctgaggagctgggcggcctggccagccagatgaccagtgactatggccacctggccttccagggccagatggctgctgccacagctgagcctgaggagatcggcttccagatccgcaccagggtgcaggacctgggccacggctgcatcttcctggtgcagaaggccggggccctgcaggtgtgccccacagacagctacaccaagcgggagctgattgaatgtgcccgggctgtgacagagaaggtgtccctggtgctgagcgccctgcaggccggcaacaagggcacccaggcctgcatcacagctgccacagctgtgtctggcatcatcgctgacctggacaccaccatcatgtttgccacagctggcaccctgaatgctgagaacagcgagacctttgctgaccaccgggagaacatcctgaagacagccaaggccctggtggaggacaccaagctgctggtgtctggggccgccagcaccccagacaagctggcccaggccgcccagagcagcgctgccaccatcacccagctggccgaggtggtgaagctgggcgccgccagcctgggcagtgatgatcctgagacccaggtggtgctgatcaatgccatcaaggatgtggccaaggccctgagtgacctgatcagcgccaccaagggggccgccagcaagcctgtggatgaccccagcatgtaccagctgaagggggccgccaaggtgatggtgaccaacgtgaccagcctgctgaagacagtgaaggctgtggaggatgaggccacccggggcacccgggccctggaggccaccatcgagtgcatcaagcaggagctgactgtgttccagagcaaggatgtgcctgagaagaccagcagccctgaggagagcatccgcatgaccaagggcatcaccatggccacagccaaggctgtggccgccggcaacagctgccggcaggaggatgtgattgccacagccaacctgagcaggaaggctgtgtctgacatgctgacagcctgcaagcaggccagcttccacccagatgtgtctgatgaggtgaggacccgggccctgcgcttcggcacagaatgtaccctgggctacctggacctgctggagcacgtgctggtgatcctgcagaagcccaccccagagttcaagcagcagctggccgccttcagcaagagggtggccggggctgtgacagagctgatccaggccgctgaggccatgaagggcacagagtgggtggaccctgaggaccccaccgtgattgctgagacagagctgctgggcgccgccgccagcattgaagctgctgccaagaagctggagcagctgaagccccgggccaagcccaagcaggctgatgagaccctggactttgaggagcagatcctggaggccgccaagagcattgctgctgccaccagcgccctggtgaagagcgccagcgctgcccagcgggagctggtggcccagggcaaggtgggcagcatcccagccaatgctgctgatgatggccagtggagccagggcctcatctctgctgccaggatggtggccgccgccaccagcagcctgtgtgaggccgccaatgcctctgtgcagggccacgccagcgaggagaagctgatcagcagcgccaagcaggtggccgccagcacagcccagctgctggtggcctgcaaggtgaaggctgaccaggacagcgaggccatgaggcggctgcaggccgctggaaatgctgtgaagagggccagtgacaacctggtgcgggccgcccagaaggccgccttcggcaaggcagatgatgatgatgtggtggtgaagaccaagtttgtgggcggcatcgcccagatcatcgccgcccaggaggagatgctgaagaaggagcgggagctggaggaggccaggaagaagctggcccagatccggcagcagcagtacaagttcctgcccacagagctgagagaagatgagggctag

SEQ ID NO: 315286 - DNA, 7629 bp, Artificial Sequence
  derived and/or modified sequence
atggtggccctgagcctgaagatctgcgtgcggcactgcaacgtggtgaagaccatgcagttcgaacccagtaccgccgtgtatgatgcctgcagggtcatccgcgaacgagtacccgaggcacaaactggccaggcatctgattatggactgtttttgagcgatgaagatccacggaaagggatctggctggaggctggccgaacccttgactactatatgctgagaaacggcgatattctagaatacaaaaagaagcagcggccacagaaaatccggatgttggatggatctgtgaagactgtgatggtcgacgacagcaagactgtgggtgagctgctggtgactatttgcagtcgaataggaataactaattacgaagaatattcactgattcaggagactatagaggaaaagaaggaagagggaaccggaacccttaaaaaggaccgtacgttgctcagggatgagagaaagatggaaaaattgaaagctaaactccataccgacgacgatttgaattggcttgatcactcgcgaaccttccgtgaacagggggtcgacgaaaacgaaacactgctgttaagaagaaagtttttctattcagatcagaatgtggattcaagggacccagtccagctaaacctcctttacgttcaggcccgcgatgatatcttaaacggaagccaccctgtttcttttgagaaagcttgcgaatttggaggcttccaagctcagattcagtttggacctcatgtcgagcataaacacaaacccggcttcctggacctgaaggagtttttacccaaagaatatataaagcagcggggagccgagaagagaattttccaagaacacaaaaactgcggggaaatgagcgagatagaggctaaggtcaagtatgtgaaactggcccgttcattgaggacttatggggtgagcttttttctggttaaggagaaaatgaaaggaaaaaataaactcgtcccacgcttgctcggaatcactaaagactctgtcatgcgtgtggacgagaagacaaaagaggtgctgcaagaatggcccctgacaaccgtgaaaaggtgggccgccagccccaagtcgttcaccctagattttggagaatatcaggagtcatattacagcgtacagaccacagagggagagcagatttcccagctgattgctgggtacatcgacattatactcaagaagaaacagtcaaaggaccgttttgggcttgaaggcgacgaggagtccacaatgttagaggagagcgtgtcaccaaagaagagcacaattctgcaacagcaatttaaccgcacagggaaggccgagcatggatctgtggcacttcctgccgtgatgaggtccgggtctagcggtcccgagactttcaacgtgggctcaatgccaagcccacagcagcaggtgatggtcgggcagatgcaccgtggacatatgcccccgctgaccagtgctcaacaagcacttatgggtaccatcaatacaagtatgcatgccgtccaacaggcgcaggacgatctgagcgagctggactccctgccacctctcggccaagacatggcatcaagggtctgggtccaaaacaaggtggacgagtccaagcacgaaattcatagccaggttgatgcaattaccgccgggactgcttctgtggtgaacttaacagctggagaccccgccgataccgattatacagccgttgggtgtgccattaccacaatttcctcaaacttaacagagatgtccaagggtgtaaagctcctggcagcccttatggacgatgaagtcggaagcggcgaagatctcctgagagcagcacgcaccctggccggcgccgtgtctgacttgctgaaagcagttcagcctacctccggagaaccgaggcagaccgtgctgactgcagccggctccattggtcaggcctccggtgatctgctgcgccagattggcgaaaacgaaaccgacgagcggtttcaggacgtgctgatgagtttggcaaaggctgtggccaatgctgccgcaatgctcgtcttgaaggccaagaacgtcgcccaggtggccgaagatacagtccttcagaaccgcgtaatcgcggccgccacccaatgtgctcttagtacttcccagctcgtggcttgcgcaaaagttgttagtccgaccattagttcacccgtatgccaagaacagctgattgaagccggtaagctcgtggataggagcgtggagaactgtgtccgcgcttgtcaagcggccacaactgattcggaacttctgaagcaggtgtctgccgctgcctccgtagtttcccaggccctacatgatctgcttcaacatgtaagacagttcgcctctcgtggcgaacccataggacgatacgaccaggccactgataccattatgtgcgttaccgaatctatcttttcttcaatgggggacgccggcgagatggtgcgccaggctagggtcctggcgcaggcaacctctgacttggtgaacgccatgcggagtgatgccgaagctgagattgacatggagaactcaaagaaactgctcgcagccgccaagcttctcgcagattccaccgcccgaatggtggaggcggctaagggggctgccgcgaacccagagaatgaagaccagcaacagcggctccgcgaggctgcagaaggtctacgggtcgccacgaacgcggccgcccaaaacgctatcaagaagaaaattgtcaatcgacttgaggtggccgcaaagcaggcggcagcagcagctactcagactattgcggcatcccaaaacgccgccgtgtccaacaagaatcccgcagcacagcagcagctggtccagtcctgcaaagccgtggctgatcatatccctcaacttgtgcagggagttagagggagccaggctcaagcagaagatttatcggcacaactcgcccttattatatcttcccagaattttctacaaccgggaagcaaaatggtgtcgagcgcaaaagcagccgtacctaccgtaagtgatcaggcagccgccatgcagttgtcccagtgtgctaagaacttagctacctctctggctgagctgcggacggcaagccaaaaggcgcacgaagcgtgcggtcccatggagattgatagcgcgcttaacaccgtccaaaccctgaagaatgagctccaggatgccaaaatggctgccgtggagagccagttgaagccacttccgggggagacacttgaaaagtgcgcgcaggacttgggttcaacctctaaggccgtgggctccagtatggcgcagttactcacctgcgcagcacagggcaacgaacactatactggagttgcggctagggagacagcccaggctttgaaaacccttgcgcaggccgcccgtggagtggcagcttctaccactgacccagccgccgcacacgctatgttggattcggcccgcgatgtgatggagggctccgccatgctgattcaggaagccaagcaagctttaatcgctcccggggatgccgagcgacagcagcggctcgcgcaagtggccaaagctgtcagccattcacttaataattgcgtgaattgtctgcctggtcagaaggacgtggacgttgcactgaagtccattggagagtcatctaaaaagctgctcgttgatagtttgcctccaagtaccaagcctttccaggaggcacagtcagagttaaaccaggccgccgctgacctaaatcagagcgccggggaagtggtacacgccactcgagggcagagcggagagttggcggccgcctccgggaagttctccgatgatttcgacgaattcttggacgcaggcatagagatggccggtcaggcacagactaaggaagaccagatccaggtgattggtaacctgaagaacatatctatggcctcctctaagttgctcctggcagctaagtcgctgagcgttgatcccggcgctcccaatgctaagaatttgctggccgctgctgcacgcgcagtcaccgaaagtatcaatcaattgattacgttgtgcactcaacaggcaccaggtcagaaggaatgcgacaacgcactgagggagcttgagacagtgaaaggtatgcttgataatcccaacgagcctgtgtccgacttatcatattttgattgtatcgaatccgtgatggagaattcaaaagtgctgggcgagtctatggccggtatttcccaaaacgctaaaactggagatctaccagctttcggagagtgcgtcggaattgcatccaaagcgctgtgcggcttaactgaggccgccgcacaagccgcttacctcgttggaatctcagacccgaattcccaagccggtcaccagggcttagtggatcccatccaattcgctcgtgccaaccaggccatccagatggcatgtcagaatctggtcgatcctggatctagtccctcccaggtgctgagcgctgccacgatcgtggccaagcatacatccgcgctgtgcaacgcttgtcggatcgcttcctctaagaccgcgaacccagtggccaaacgccatttcgtccaaagtgctaaagaagtagctaactcaaccgcaaacctggtcaaaactataaaagctcttgacggcgatttttccgaagataaccggaacaagtgtcggatcgccaccgctccactcatcgaagccgtggagaaccttacagcttttgcctccaaccctgaattcgtgtccataccggctcagatcagttccgaaggaagtcaggctcaggaacccatcctcgtgagcgcaaaaaccatgttggaatcttcctcatacctgattcgaacagcccgatccttggcgatcaacccaaaggatccccctacgtggagtgtgctggctggacacagtcatacggtcagtgactccattaaatcattgataacaagcatccgggacaaagcacccggccagagagagtgcgattatagcatcgacgggattaatcgctgcattcgcgacatagaacaggccagcttagctgctgtgtctcaatctttagcgacacgggacgacatctctgttgaagcactgcaggaacagctgacctccgttgtccaggagattggtcacctcatcgatcccattgctaccgcagccagaggcgaggcagcacaattgggccacaaagtgacacagcttgcttcttactttgaacctctcattctcgcggcagttggtgtcgcaagcaagattctcgaccatcagcaacagatgactgtactggatcagaccaagacccttgcagagtccgctctgcaaatgttgtatgcagcaaaagagggaggaggaaatccgaaggcccaacacacacacgacgctattactgaggccgcacagctgatgaaggaagctgtggatgacatcatggtgacactaaacgaagccgcctctgaagtggggctggtcggagggatggtggatgcaatcgccgaggctatgtctaaattggacgagggaacaccccctgagcccaagggcacgttcgtagattaccagacaaccgtggtcaagtattctaaagcgattgcggtcaccgcccaagagatgatgactaagagcgtgacgaaccctgaagagctgggaggtctggcttcccaaatgacaagcgattacggtcacctggcttttcagggtcagatggctgccgctacagccgaacccgaggagattggttttcaaatccgcacaagagtgcaggatctcggccatggctgtattttcctggtgcaaaaagctggagccctacaggtgtgtcccaccgatagctataccaaacgcgagctaattgagtgtgcacgcgctgtgactgagaaggtgtccctggttctcagcgcactccaggctgggaataaagggacgcaggcctgcattaccgccgccacagcggtgtccgggatcatcgccgacctagatacaacaattatgtttgccacagccggtacactgaatgccgagaatagcgagacctttgcagaccatcgagagaacatcctgaagacggcgaaggctctcgtcgaggacacgaaactcttggtgagtggtgcagcttcaacccctgacaagctcgcccaggcagcccaatcatccgctgctactatcacacagctggctgaggttgttaaattgggagccgccagcctggggtctgatgatcctgaaacccaggttgtgctgatcaacgcaataaaagatgtcgctaaggctctgtccgatcttatctctgctaccaaaggcgccgcgagtaaaccagtcgatgatccctctatgtaccagttgaagggggcggctaaggtgatggtcacaaatgtgacgagtctacttaagacagtgaaggccgtggaggacgaggcaactagggggacccgggcactcgaggcaacgatcgagtgcataaagcaggagttaacagtctttcagagcaaagacgtgcctgagaagacctcgtcaccagaagagtctatcaggatgacgaaggggattaccatggccactgcgaaagctgttgcagccgggaattcatgtcgtcaagaggacgtgatcgcaaccgctaacctctctaggaaggcagtatctgatatgctgacagcttgtaagcaagcctcttttcaccccgatgtttctgatgaggtgcgcaccagggcactcagatttggcaccgagtgcacactgggctatcttgacctgttggagcatgtccttgtgattctgcagaagccaacacccgagttcaagcagcagctggccgccttctccaagagggtcgccggcgcggtgactgagctcattcaagccgccgaggccatgaagggaactgagtgggtcgatccagaggatcctactgtgatcgcagagacagagctactcggagccgctgcctccattgaagctgcagcgaaaaagttggaacagctgaaaccgagggctaagcctaagcaagcggatgagaccttggatttcgaagaacagatcctggaagctgcgaagagcatcgccgccgccactagtgcacttgttaagagtgcgtcagctgcccagcgggagttggtagcgcagggtaaggtgggcagtatccctgccaatgctgccgacgatggacagtggtctcagggtctcatcagcgctgctaggatggtggctgccgcgacttcctccctctgtgaagcagccaacgccagtgtgcaaggtcacgcaagtgaagagaaacttatatccagcgcaaaacaggtggccgcttcaacagcacagttgctggtggcttgcaaggtcaaggccgaccaagacagcgaggccatgcggaggctgcaggccgcaggtaacgccgtgaagcgtgcaagcgacaatcttgtgcgggccgcacagaaagcggctttcggaaaggccgacgacgatgatgtggtagttaagacgaagttcgtgggcggaatagcacagatcatcgctgcccaggaagaaatgttgaagaaagaaagggagctggaggaggcaaggaagaagttggctcagatcaggcaacagcagtataaattcctgcccaccgaactgagagaagacgagggatag

SEQ ID NO: 315287 - DNA, 7629 bp, Artificial Sequence
  derived and/or modified sequence
atggtggccctgagcctgaagatctgcgtgcggcactgcaacgtggtaaagacaatgcagtttgaacccagtaccgcagtttatgacgcgtgccgtgtgattcgcgagcgcgtccctgaggcccagaccggccaggcatccgactacggactcttcctctcagatgaggatcctaggaaaggcatctggcttgaggccggtcgcaccctggattattatatgcttcgcaatggtgacatattggagtacaaaaaaaaacagcgtccacaaaagattcgtatgctggatggctcggtcaaaacagtgatggtcgatgattccaagactgtgggcgagctacttgtgaccatctgtagtcgcatcgggatcacaaactatgaggagtactcgttgatccaggaaacaattgaggaaaaaaaggaggagggcacaggtacactcaagaaagaccgaaccctcttgcgggacgaaaggaaaatggagaagctaaaggctaagctccatactgacgatgatttaaactggctggaccacagtagaacatttagggagcagggtgtggatgaaaatgagactctcctgctgcggcggaaatttttctatagtgaccagaatgttgattccagggacccggtgcagcttaacttgctgtatgtccaggcccgggacgatatcctgaacgggtctcaccctgtaagcttcgagaaggcatgcgagtttggaggcttccaggcgcaaatccagttcggtccacacgtggagcacaaacacaagcccggatttctggatctgaaagaattcctccccaaagagtatattaaacagcgcggggctgagaaacgaatttttcaggaacacaaaaactgcggggaaatgagcgagattgaagcgaaggttaaatatgtgaagctggctaggtccctcagaacatatggcgtgagctttttcctggtgaaagagaaaatgaagggcaaaaataaactggtgccaagactgctgggcatcaccaaggattccgtgatgcgcgtggatgaaaaaacaaaagaggtacttcaggagtggcctctcacaaccgtgaagagatgggcggcctctccgaaaagctttaccttggattttggggagtatcaagagtcttattactccgttcagaccacggagggtgaacagatttctcaactcatagccggttatatagacattattctgaagaagaagcagagtaaggatagatttggcctggaaggagatgaagagtcaaccatgctcgaggagagtgtcagtcctaaaaagtcgactatcctgcaacagcagttcaatagaacggggaaggccgagcacgggagcgtggcgctccctgcagtgatgagatctggcagctccggccctgaaacttttaacgttgggtcaatgccttccccacagcaacaggttatggttggtcagatgcacagaggacacatgccccctctcacgagcgcccaacaggctctgatgggcaccattaacacgtccatgcacgcagtgcagcaggcccaagacgatttgtcggaactcgatagtctcccacctcttgggcaggacatggcgagtcgcgtctgggttcagaataaagttgatgagtctaagcatgaaatccatagccaagtggacgcaatcactgccgggaccgcctcagtagttaatctcaccgctggcgacccagccgacactgactataccgcagtgggatgtgcaattactacaatcagcagtaacctgaccgaaatgtccaaaggagttaagttgctcgctgctctgatggatgacgaagtgggcagtggggaggatctgctgagggccgcacggaccttggccggggccgtgtccgacctgctcaaggccgtgcagcccacttccggagagcccaggcaaacagttctgactgctgccggatcaattgggcaggcatccggtgacttactccgccagattggcgagaacgagaccgatgagcggttccaggacgtactaatgagcctggctaaggctgtggctaacgcagcggcaatgctcgtgttgaaggcaaagaacgtggcacaagtggccgaagatacagtattgcaaaacagagtgattgccgcagccacacagtgcgcactatccacctcccagctcgtggcctgcgcaaaagttgtgtctcccaccatatcgtcgcccgtgtgccaggaacaactgatagaggctgggaaactggtcgaccggtctgtcgagaactgcgttagagcatgtcaggctgctaccacagacagcgagctgcttaaacaagtctcagcagccgcttccgtggtttctcaggcattgcacgatctgttgcaacatgtcaggcaattcgctagccgcggcgagccaatcgggcgctacgatcaagcaaccgataccattatgtgcgtgaccgagagcatcttcagtagcatgggtgacgcgggagagatggtgcgccaagcaagggttctcgctcaggctactagcgaccttgtgaacgcgatgcgctctgacgccgaagctgaaattgacatggagaacagcaaaaagttgctagccgcagcaaagcttttagcagactcaaccgcaagaatggtcgaagccgccaagggagccgccgcaaatccggagaatgaggaccagcaacagcgcctgagagaagctgcagagggacttagggtcgcaacaaatgctgctgcccagaatgctatcaagaagaagattgtgaatagactcgaagttgcagccaagcaggccgccgctgcagccactcagaccattgctgcttctcagaatgcggctgtgagcaacaagaaccccgcagctcagcaacagctggtgcaatcctgtaaggctgtcgcggaccacattccccagctggttcagggagtccgcggatctcaggcccaggctgaagacttgagcgcccagctggcactgatcataagctcccaaaacttccttcagccagggagtaagatggtgtcctcggcaaaagcagcggtccccaccgtctctgatcaggccgctgctatgcagctttcacagtgtgcaaagaaccttgccactagcttggcagaactacggaccgccagtcagaaggcccatgaggcgtgcggccctatggagatagactcagcactcaacacagtccagaccctgaaaaatgagttacaggacgccaaaatggccgcggtcgaatcacaacttaaacctctacctggggaaaccctggaaaaatgtgcccaggatctcggtagcacaagtaaagcagtgggtagctccatggcccagcttttgacatgtgcggcacagggcaacgaacattacactggagtggctgctagggagacagctcaggctctgaaaacactggcacaagcggccaggggggtcgcagcctccactacagatccggccgcagctcacgccatgctggactcggcaagggacgtgatggagggatccgctatgttaattcaggaggctaagcaagccctcatagctccaggagacgccgagcggcagcagcgactcgcccaagttgctaaggctgtgtcacactcacttaacaattgcgtgaattgccttcccggccagaaggacgttgacgtggccctcaagtcgatcggagaaagcagtaagaaattacttgtcgattcacttccccccagtaccaagccctttcaggaggcccagtctgagttgaatcaggctgcagctgacctaaaccaaagcgcaggggaagttgtgcatgccacccgcggtcagtcaggagaactcgcagctgcaagcggtaaattctcagacgatttcgacgaattcctggatgccggaatcgaaatggccgggcaagctcagactaaagaggaccagattcaggtgattggtaacctgaaaaatatctccatggcaagtagcaagcttctccttgcggcaaaatctctgagtgtggatcctggagcccccaacgccaagaacttgttagctgcagctgcccgcgcagtgaccgagagcatcaaccaactgattactctgtgcactcagcaggccccaggtcaaaaggagtgcgataacgctcttagggagcttgagacagttaaggggatgctagacaatcccaatgagcctgtgtcagatttgagctatttcgattgcatcgagtcagtgatggaaaattctaaggtgctgggggaatctatggcagggattagccaaaacgcaaaaaccggagacctcccagcattcggggaatgtgtggggatcgcctcaaaagcgttgtgcggcctgactgaggccgccgctcaggccgcctacctcgtgggcataagcgaccccaacagtcaggctgggcaccaggggctagtggacccaatacagtttgcacgcgcgaaccaggcaatacagatggcttgccaaaaccttgtggatccaggttcctctccaagccaggtactgagcgcagcaaccatcgtcgccaaacacacatctgccctgtgtaacgcgtgtcgtatcgcgtcctctaagacagcgaaccccgtggctaagcgacacttcgtgcagagcgccaaggaagtagctaacagcaccgctaatctggtgaagactatcaaggctctcgacggcgattttagtgaagataatagaaataagtgcaggatcgccacggctccactgattgaagctgtagaaaacctgactgcctttgccagtaaccccgaattcgtgagtatacccgcacagatctctagtgaaggctctcaggcccaggaaccaattctcgtgagtgctaaaaccatgctcgaatcctcttcataccttattcggaccgctcgatcattggcaattaacccaaaagaccctccaacttggtccgtattagccggtcatagtcatacagtgtccgactctatcaagagccttatcaccagcattcgcgacaaagcgccaggccagcgcgagtgcgactattctatcgatggcattaaccgatgtatccgggatattgaacaggcgagtctggccgccgtgagtcagtctctcgcaaccagagatgatatcagtgtggaggctctgcaagagcagctcacaagcgtggtccaagagattggacacctcatcgaccctatagctaccgcggcacgcggcgaggccgcccagttaggtcacaaagtaactcagctcgcctcatacttcgagcctctgattctggctgccgtcggagttgccagcaaaatcctggatcaccaacagcagatgacagtgctggaccaaacgaaaacactggcagaatcagctctccagatgttatatgctgccaaggagggcggcggaaaccctaaggcccagcatacccatgacgctatcacggaggctgcccagctcatgaaagaggctgttgacgacatcatggttaccctcaatgaggccgcaagtgaggtcggcttggtgggtggaatggtcgacgccattgcagaggcgatgagcaagctggacgaagggacaccacctgagcccaagggtacttttgtggattatcagacgacagtggtcaagtacagcaaggcaatcgctgtgacagcacaggagatgatgacaaaatccgttacaaacccagaggagctcggaggcctggcgtcccaaatgactagtgattacgggcacttggcattccagggacagatggctgctgctactgctgagccggaggaaattggctttcagataaggacacgagtacaagatctagggcacggatgcatcttccttgtgcagaaggccggagccttgcaagtgtgcccaaccgacagttacaccaaaagagagcttatcgagtgtgccagagctgtgaccgagaaagtgagtctggtactaagcgcgctccaggccgggaataaggggactcaagcctgtatcaccgcagcgaccgctgtttctggaattattgccgatctggataccaccatcatgttcgccactgccgggaccctgaacgccgagaatagtgaaacctttgcggatcacagagagaatatactgaagaccgccaaggctctagtggaggacactaagttgctggtctccggggctgcttcgacacctgacaaactggcgcaggccgcccagtctagcgctgccacaattacccagctcgcagaggtggtcaaactgggcgccgcttccctgggctcagatgatccagagacccaggttgtcctgattaatgctattaaagatgtagccaaagccctgtctgatctgatctccgccacgaagggagccgcctcaaaacctgtcgacgaccccagcatgtatcagctgaagggggccgccaaagtcatggttacgaacgtcacatcgcttctgaagactgtaaaggcggtcgaagatgaggccacccgggggacacgagccctcgaagctaccatcgaatgcatcaagcaggagctaaccgtgtttcaatccaaagatgtccccgaaaagactagctctccagaagaatctattcgaatgacaaaggggatcacaatggctactgccaaagctgtggcagctggcaacagctgtagacaagaagatgttattgcaacagccaacctgtcaaggaaggctgtctccgatatgctcacggcgtgtaagcaggcctcattccacccggatgtcagcgatgaggtgaggactagagccctgagattcggaacagaatgtaccttgggttatcttgacctgttggaacatgttctcgtgatcctgcagaaacccacacctgaattcaagcagcagctggctgctttcagcaaacgcgtggcgggcgctgtaaccgaactgattcaggccgccgaggctatgaaagggacggagtgggttgaccccgaggatcccacagtcattgcagaaactgaactcctgggagccgcagccagcattgaggcggccgctaagaagctggagcagctgaaaccaagagcgaagccaaaacaagctgatgaaactctggacttcgaagaacaaatcctggaggccgccaagagcatcgctgctgccacaagcgccctggttaagtccgctagcgctgcccaaagggagctggtagcccaaggtaaggtgggatctattccagcaaatgccgctgacgacgggcagtggtcccagggtctaatttccgctgctcggatggtggcagccgcaacctcctccctttgcgaagcagccaacgcctccgtccagggccacgcctcagaagagaagctaatatcttctgccaagcaggtggctgcaagcactgcccaactgttggtggcatgcaaggtgaaggcagaccaggactccgaagccatgcgccgtttgcaggccgccggcaacgcagtgaaacgcgcatcagacaatttagttagagccgcccagaaggccgctttcggtaaagccgacgacgatgatgtggtggtgaagacgaaattcgtgggcggcatcgcacagatcatagctgcgcaagaggagatgctgaagaaggagcgggaactggaagaggcccggaagaaattagcccagattaggcagcagcaatataagtttctgcctactgagctgcgcgaggatgagggttag

SEQ ID NO: 315288 - DNA, 7629 bp, Artificial Sequence
  derived and/or modified sequence
atggtggctctcagtcttaaaatctgtgtgaggcactgcaatgtggtgaagacaatgcagtttgaaccatctactgccgtgtacgacgcatgccgcgttataagggaacgcgtacctgaagctcagaccgggcaagcatcagactatggcctgttcctgagcgacgaagaccccaggaagggaatctggctggaggctggccgtacattagactactatatgctccggaacggagatattttggaatataagaagaaacagcggcctcagaaaattcgaatgctcgacggctccgtgaagaccgttatggtcgacgacagcaagactgtgggcgagttgttggtgaccatctgtagccggattgggataaccaattacgaagagtatagtctcatccaggagacaatagaggaaaaaaaagaggagggcaccggtaccctgaagaaggatcggacccttctgagggatgaacgcaaaatggagaagttaaaagctaagcttcatacagatgatgacttaaattggcttgaccacagccgaaccttccgcgagcagggagtggatgaaaacgaaacattattactgagacggaaattcttttattctgaccaaaatgtagatagcagggatcccgtgcagttaaatcttctgtacgtccaggcacgggacgatatcctgaatgggtctcaccccgtgtctttcgagaaggcctgcgagttcggcggatttcaagcacagattcagttcggtccacatgttgaacacaagcacaagccaggattcctggacctgaaagaatttctgcctaaggagtatatcaaacagcgtggggctgaaaagagaattttccaggagcataaaaattgtggagaaatgtctgaaatcgaagcaaaggtcaagtacgttaaactggctaggtcccttagaacatatggcgtctcgtttttcctggtgaaagaaaaaatgaagggtaagaataagctggttcctcgcctcctgggaatcaccaaggatagcgtcatgagagtcgacgagaagactaaagaagtcctgcaggagtggccgctcactaccgtgaagcgttgggcggctagtccaaagtcgtttactcttgatttcggcgaatatcaagagtcttactactcagttcagactacagagggggagcagatatcgcaactcatcgctggctacatagacattattttaaagaagaagcagtcaaaagatagattcggactggagggcgacgaggagagcacaatgctcgaagaaagtgtctcgcctaaaaagtccaccatacttcagcagcagttcaacagaacagggaaggccgaacacggttccgtggccctacctgccgtgatgaggtccggctcctccggacccgaaacatttaatgtgggtagtatgccttctccacagcagcaggtcatggtgggccaaatgcatcgcggtcatatgccgcctctcactagcgcccagcaggccctcatgggtaccattaacacctccatgcacgctgttcagcaagcccaagacgacctgtccgaacttgatagtctcccaccccttggccaggatatggcttccagggtctgggtccagaataaggtggatgagagcaaacatgaaattcattcacaggttgatgctatcaccgccggaacagcatcggtcgtgaatctgaccgctggcgacccagctgatacggattacaccgcagttgggtgtgccatcacaacgatttccagtaatctgacagagatgagcaaaggtgttaagctactggctgccctaatggatgatgaagtcggttcaggggaagatttacttcgcgcagcgaggacccttgctggtgccgtaagcgacttgctgaaagccgttcaacccacctcaggagagcctcgccagaccgtgctgactgccgctgggagcataggccaggcctctggcgatctgctccgacagattggcgaaaatgagactgacgaacggttccaggacgttctgatgtcgctcgccaaggctgtcgctaacgccgctgcaatgctcgtgctgaaggcaaagaatgtcgcccaggtagccgaagacactgtgctgcagaaccgggtgatagcggctgcaacgcagtgtgccctgtcgacctcacagctggtcgcgtgtgcaaaggtagtgagcccaaccataagcagccccgtttgtcaggagcagctcatcgaggctggaaagctcgtggatcgcagtgtggagaactgcgtgagggcttgccaggccgcaaccacagatagcgaactactcaagcaagtgtccgccgctgcgtccgttgtgagccaggccctacacgacctcctccaacatgttcgacagtttgccagtcggggagaacccattggacgatacgaccaggctaccgataccatcatgtgcgtcaccgaaagtatcttcagctccatgggagatgccggtgaaatggttcgccaagctcgagtgctggcacaggccactagtgatctggtgaatgccatgaggtctgacgccgaagcagagatcgatatggagaactccaaaaaattgctcgccgcagccaagctgctggccgattcgacagcgcgtatggtggaggctgccaagggcgcagcagccaacccagagaatgaggatcagcagcaacgtctgagagaggccgcagaaggtcttagagtggccacgaacgcagcagcccagaatgccataaagaaaaagatcgtaaatcgtcttgaagttgcagcgaagcaggctgcggcagccgcaacccagacgattgctgcttcccagaacgcagctgtctccaataaaaaccctgcggcacagcagcagttggtccagagttgtaaggctgttgctgatcacattccccagctcgttcagggcgttcggggttctcaagcacaggcagaggacctcagtgcccagctggccctaatcatttccagccagaatttcctgcaaccgggttcaaaaatggtgagttctgccaaagccgctgtgcctacagtttccgaccaggctgccgcaatgcaactctcacagtgcgccaagaacctggctacatctttggccgagttacgcactgcatcccagaaggcacacgaggcttgtggacctatggaaattgatagtgcactcaacacggtgcagaccctaaaaaatgagctccaggacgccaaaatggccgcagtggagagccaattgaagcccctgcctggagagacattagaaaagtgtgcccaggacctcggcagtacaagtaaggccgtcggttcaagcatggcccagctactgacttgtgccgctcaaggcaacgagcactacactggcgtggcggcacgtgaaacagcgcaggccctcaagactcttgcgcaggccgcacgcggagttgctgctagtaccaccgatccagctgctgcccatgccatgctcgacagcgcccgtgacgtgatggaagggtcggcaatgctaatccaggaagccaagcaggctctgatcgcacctggagatgccgaacggcagcagcgcctggcccaggtggccaaggccgtgtctcactcactgaataattgtgtgaattgcctgcccggacaaaaggatgtagatgttgctctgaaaagcattggtgagtcttcaaagaagttgctagtcgactctctccccccttcaaccaagccatttcaggaggctcaatccgagttaaatcaggccgctgccgacctgaatcagagcgcaggcgaggtggtgcacgccaccagagggcagagcggagagctggcagccgcatccggcaagttctctgatgactttgacgagtttcttgatgcgggaatagagatggcaggccaggctcaaacaaaagaagaccaaatccaggtcatcggaaatctgaaaaatatatccatggcatccagcaaactgctccttgccgcaaagtccctctcagtggacccaggggcacccaacgcaaaaaacttgttggctgctgccgcacgtgctgtaacggagtctattaatcaactaatcacactctgcacccaacaggcaccagggcagaaagagtgcgacaatgctttgagggaattggagacggtcaaaggaatgttggacaaccccaatgaaccagtgtccgacctttcatacttcgactgtattgagagcgtgatggagaactcaaaggtacttggcgagagtatggccggaataagccagaatgccaagactggagatcttcccgcattcggcgaatgcgtcggcattgcttcaaaggcgctgtgcgggctgactgaggcggctgcacaggctgcatacttagttggcattagcgatccaaattcccaggccggtcaccagggcctggttgacccaatccagtttgctcgggctaatcaggcaatacaaatggcctgtcagaatctggtcgatcccggtagctcaccgagtcaggtcttgtctgccgctaccatcgtggctaaacatacatccgccttgtgcaatgcttgcagaattgcttccagtaagaccgccaatcctgtggctaagcgacacttcgtccaatcagccaaagaggtagccaattcaactgccaacctggtaaaaaccattaaagcgctggatggcgacttttccgaagacaatcggaacaagtgtcggatcgccaccgccccactcatagaggctgtagagaacctcacagccttcgcatcaaaccccgagtttgtgtctatcccagctcagatctcctccgaagggagtcaggcacaggagcccatcctggtttccgctaaaactatgctggagtcaagttcctacttgatccggaccgcgcgatcacttgcaattaacccaaaggatcctcctacctggtccgtgctggcgggacatagtcataccgtatcagatagtatcaaatctcttataacctccattcgagacaaagctccaggccagagagagtgtgactacagcatcgacggtatcaatagatgcattagggacatcgagcaggccagcttagctgcagtgagtcagtccctggccacaagagacgacatcagcgtggaggccctccaggagcagctgacatctgttgtgcaggaaattgggcacttaattgacccaattgcaaccgctgcacggggagaagcagcccaactgggccacaaggtgactcagttggcaagctactttgaacctctgattctggccgcagtcggtgtagcgtctaaaatactcgaccaccagcagcagatgacagtgctggaccagactaaaacgcttgctgaatcagcacttcagatgctgtatgccgctaaggagggcggtgggaaccccaaggctcagcacactcatgatgctatcactgaggccgcacaacttatgaaagaggcagtggacgacatcatggttacgctgaacgaagcagcctccgaagtcggacttgtcggcggaatggtggatgccatcgcagaagcaatgtcaaagttagatgagggtactcctcccgaacctaagggaacattcgtggattatcaaaccacagtcgttaagtattccaaggccattgctgtgacagctcaagagatgatgaccaagtctgtgactaatccggaggaactgggaggcttggccagccagatgacctccgactatggacacctcgcatttcaaggccagatggctgccgcaactgccgagccggaggaaattggattccagattcgaacccgggtacaagacttaggccacggctgtatctttctggttcaaaaagcaggagccctacaggtctgtccgaccgacagctatactaagagggaattgatcgagtgtgccagggctgtgaccgagaaagtctcactagtgttgtctgcgctgcaagccggtaataagggcacccaagcgtgcataactgccgcaactgcggtttccggcattattgcggacctggatactacaatcatgtttgccaccgcaggaactctcaacgcagaaaactctgagacttttgccgaccatcgggaaaatatcctgaaaaccgccaaggccctggtcgaggatactaaactgctggtctctggtgccgcttccacccccgataaactggcccaggcagcccagtcaagtgccgcaacaataacgcagctcgcggaggtggtgaaactgggagccgctagccttggcagcgacgatcctgaaacgcaagtggttttaatcaatgccatcaaagatgttgccaaagcattgagcgacctaataagtgctacgaaaggcgcagcgagtaagcctgttgacgacccttctatgtaccagctcaagggggctgctaaggtgatggtcaccaatgtgacttccctgctgaagacggtgaaagcggttgaggatgaggccaccaggggtacccgagccctggaagccaccattgagtgtattaaacaggagttaacagttttccaaagcaaggacgttcccgagaagaccagtagccctgaggagtcaatcaggatgacaaagggaataacaatggcgaccgctaaagcggtcgcagctggcaacagctgtcggcaagaagatgtcattgccacggccaatctgtcccggaaagctgtgtctgatatgctgactgcgtgtaagcaggcctcgttccaccctgacgtgtccgacgaggtgagaacccgagccctacgatttggcacggagtgcactctggggtacctcgacctccttgagcacgtgcttgttatcctgcagaagcctacccccgaattcaagcagcagcttgccgctttctccaagagagtagccggtgctgtgaccgagctgatccaggcagcagaggccatgaaaggaactgagtgggtagacccagaagatccaaccgtgatcgccgagactgagctcctgggagccgctgcgtccattgaggccgcagcaaagaagctcgagcagctgaagcctagggcaaaaccaaagcaggcggatgaaactttggacttcgaggagcagatactggaggcagccaagagtatagccgcagccacgtcggctctcgttaagagtgcctccgcagctcaacgggaattggtggctcagggaaaggtaggcagtatcccagctaatgccgctgacgatggacaatggtctcagggtctgatatcagccgcaaggatggtagccgcagctacctctagtctctgtgaagccgctaacgcatccgtccagggccacgcttcagaagagaaattaataagttctgctaagcaggtggcagccagcaccgcccagctcctggtggcatgtaaagtgaaggccgatcaggattcggaggcaatgaggaggctgcaggccgctggaaatgccgttaagcgagctagcgacaatcttgttcgcgctgcacagaaggcagccttcggcaaggcagatgatgacgatgttgtggtgaaaaccaagttcgttgggggaatcgcccaaattatcgcagcacaggaggagatgttgaagaaggaacgcgagttggaagaagcaagaaaaaaacttgcccagatcagacaacagcagtataagtttctccccaccgaactccgtgaggatgaaggctac

SEQ ID NO: 315289 - DNA, 7628 bp, Artificial Sequence
  derived and/or modified sequence
atggtcgccctgagtctaaagatttgcgtacggcactgcaatgtggtgaagactatgcaattcgagccgtcaaccgcagtgtatgatgcctgcagggtcattcgtgaaagagtccctgaagctcaaaccggtcaggcatccgactacggactctttttatccgacgaagaccccagaaagggcatctggcttgaggcaggacgtactctggactactacatgttgaggaacggcgatattctcgagtacaagaagaagcaacggccacagaagatacggatgctggacggcagtgttaagacagtgatggtagatgatagtaagacggtgggcgaactgttggtgacgatctgctccagaattggtattaccaactatgaggagtatagcctcattcaggagacaatagaggagaaaaaggaagagggaacgggaacccttaaaaaagaccggaccttgctgcgggacgagaggaagatggagaaacttaaggccaagctccacactgacgacgatctgaattggcttgatcattccagaactttccgcgaacagggcgtggacgaaaacgagacactgttgctgaggcggaaatttttctactcagaccagaatgtagacagccgagatccggtccagctgaacctcctctatgtgcaagccagggacgacatccttaatggttcccaccccgtgagctttgagaaagcatgtgaatttggtggtttccaagcgcagatacagtttgggccacatgtggagcataagcataaacctggattcctcgatctgaaagagttcctccccaaggaatacatcaaacaacgaggggcagagaagaggattttccaggagcataagaactgtggcgagatgtcggagatcgaagctaaagtaaagtatgttaaactggcacgatctctgcgtacatatggcgtatcatttttcctagtaaaagaaaaaatgaaaggaaaaaacaagctcgtgcccaggctgttgggcataacgaaggacagcgtgatgagggtggacgagaaaaccaaggaggtattgcaggagtggcctttaactaccgtgaaaaggtgggccgcaagcccaaaatctttcactctggattttggggagtatcaggagtcttattacagtgtccaaactacagaaggagaacagatttcccagttgattgccggatatatcgacattatactgaagaaaaaacagtccaaagataggttcggcttggaaggtgatgaagagagcacaatgctcgaagaatctgtttccccaaagaagtcaacgatcctgcaacagcaattcaatcgaacagggaaagccgaacacgggtccgtggccctgccagcggtgatgaggtctggatctagcggcccagagacgtttaatgtgggatctatgccttcaccacaacagcaagtgatggttggccaaatgcatcgagggcacatgcccccactgacatccgcccagcaagcgctgatgggaacaattaacacttctatgcacgccgttcagcaagcccaggatgatctgagtgaattagactccttgccacccctggggcaggacatggcctcgagggtgtgggtgcagaataaagttgatgaatccaagcacgaaatccattctcaggtggatgccattaccgcaggcaccgcatcagtggtgaacctgactgctggggatcccgctgacacagactacacagccgtgggttgcgccatcaccacgattagctctaacctgactgagatgagtaagggggtgaagttgctggccgctcttatggatgatgaggttgggtccggcgaggacctgcttcgagcggctcgtaccctggccggtgccgtgtccgacctgttgaaggccgtccagcccactagcggcgagcccaggcagaccgtgttgacagcagcaggaagcattggccaggcctctggagatctgctgaggcagattggcgagaatgagacagacgagagatttcaggacgtccttatgagcttggcaaaagccgtcgctaatgctgccgcaatgcttgtgctcaaggctaaaaatgtggcacaggttgccgaggacacggtccttcaaaatcgcgttattgcagccgcaactcagtgtgcgttatccaccagccagctggtcgcctgtgccaaggtcgtcagtccgaccatttcaagccctgtatgtcaggagcagctgatagaggcaggtaaacttgtcgacagatccgttgagaactgcgtccgggcatgccaggcagcaaccaccgacagcgagctcctcaagcaggtatccgcagcggcatcggtggtcagtcaagccctgcacgatttgttgcagcatgtgcgccaattcgccagtagaggagaacccattggtcgctacgaccaggctaccgataccattatgtgtgtaaccgaatcaatcttcagctctatgggtgatgctggcgagatggtccgtcaggccagggtgctggcccaagctacatctgacttggtaaacgctatgcggtccgacgctgaagcagagatcgacatggagaattctaagaagctgctggcagcagctaagctgctcgctgattcaaccgctaggatggttgaggctgccaaaggcgctgccgctaatccagagaatgaggatcagcaacagcgcctccgggaggctgcagaaggactgagggtggccactaatgcagccgcacagaatgccattaagaaaaagatcgtcaaccgactggaggttgcggctaaacaggcagctgccgcagcgactcaaaccatcgccgcatcacagaatgcggctgttagtaacaagaaccccgcagcccaacagcagctcgtacaaagttgtaaagccgtcgctgaccatattccgcagctcgtccaaggagtcagaggctcccaggcccaagccgaggacctgagtgctcaactcgcgctgattatctcctctcagaactttcttcagccaggcagcaagatggtctcaagcgcaaaggccgctgtccccacagtctccgatcaggctgccgctatgcaattgagccagtgcgcgaaaaatctcgccacgtccctcgccgaactgcgcactgcctcacagaaagcccatgaggcctgtgggcctatggagattgactctgccctaaatactgtacaaacacttaagaatgaactacaggatgcaaagatggccgctgtggaatctcagctgaaacccctgcctggagaaactctcgaaaagtgcgcccaagatctcgggtccacctctaaagcagtgggatctagcatggctcagctgttaacctgcgccgcacagggaaatgagcactatacaggtgtggccgcaagagaaacagcacaagctctgaagactctggcccaagccgctcgaggggtcgctgccagtaccacagaccctgcggcagcccacgctatgttagacagtgctagggatgtgatggaaggatctgccatgctgatccaggaggcaaagcaggcgctgattgctcctggagacgcagaacggcaacagcgcctggctcaggtggccaaggccgtttcccattccctcaataactgcgtgaattgtctgcctggccaaaaagacgtggacgtggcattgaagagcatcggcgaaagctcaaagaagttgcttgtcgattctcttccacccagcaccaagccatttcaggaagcccagtccgagctcaatcaggccgctgccgatcttaatcagtctgccggagaggttgtgcatgcaacccgtgggcagagtggtgagctggccgcagcttcaggtaaattttccgatgacttcgatgagttcttagacgccggtatcgagatggcgggtcaggcccagacaaaggaagaccagatccaggtgattggcaacctcaaaaacattagtatggcttcaagtaaattactgctggctgcaaaatccctgagcgtagaccctggagcccctaacgcaaaaaacctgctggccgcagcggctcgcgcagtcacggagagcatcaatcagctcattacactctgcacacaacaggcgccaggccaaaaagagtgcgataatgcgttgcgagaactggagaccgtgaaaggcatgctggacaacccgaacgagcctgtgagcgatctcagctatttcgactgtattgaaagcgtgatggagaactccaaagtactgggcgaatcaatggccggtatttcccagaatgccaaaacaggcgatttgcctgcctttggtgagtgtgtgggcatcgccagcaaagcactatgcggccttaccgaggcagcggcacaggccgcttacctggtcggtatttcagaccctaactcacaggctggccatcagggactcgtggatccaatccagtttgcaagagctaaccaggcaattcagatggcgtgtcagaatttggttgaccctggttctagcccttcacaggtattaagcgctgccacaatcgtagctaaacatacctctgccttatgcaatgcctgcagaatagcctccagtaaaaccgcaaatccggtggccaaacgacatttcgtacagtcagctaaggaggttgcaaattcaactgctaacctcgtgaaaacgatcaaggcgcttgatggggatttttcagaggacaaccgcaacaaatgcagaattgcgaccgcgccactcattgaagccgttgaaaacctaacagcttttgcctcaaatcctgagtttgtaagtatacctgcccagatcagctccgaaggctcccaagctcaggagccaattttagtctcggccaagaccatgttagaaagttcctcatacctgatcagaaccgcaagaagcctggccattaatcccaaagatccaccaacctggtccgtgctcgccggacattcacacaccgtctccgacagtatcaagtccctcatcacttcgattcgcgataaggctcccggtcagagggaatgcgactattcaatcgacggtattaataggtgcatcagagatattgagcaagcgagcctcgctgcagtttcccagagcttggccacccgcgacgacattagcgtcgaggccttgcaggaacaattgacaagtgttgttcaggaaattggtcatctgattgatcccattgctacagccgctaggggagaggccgctcagctgggccacaaagtgacccagctggcttcatatttcgaaccgttgatcctggccgctgttggcgtagcaagcaagattctcgatcaccagcaacaaatgactgtgcttgatcagaccaagaccctggcagaaagtgctcttcagatgttgtacgctgctaaggaaggcggagggaatcctaaggctcagcatacccacgatgctattacagaggccgctcagcttatgaaggaggccgtcgacgacatcatggtgacacttaacgaggccgcatccgaagtcggcctggtaggtggcatggttgatgccatcgctgaggctatgtctaaactcgatgaaggcaccccccctgagcctaagggcacattcgttgattaccagacgacagtcgtcaagtactctaaggctattgccgtgacagctcaagaaatgatgaccaagtctgtgacaaaccccgaggagctcggtggtctggctagtcagatgacaagtgactacggacatctggcattccagggtcagatggccgctgccacggctgaacctgaagaaatcggcttccagattcgaactagagtacaggaccttggacatgggtgtatattcctggtccagaaagccggtgctttgcaagtgtgcccaaccgactcctacaccaaacgtgagctgatagaatgcgcgagagctgtcacagagaaagttagtctcgtgctctccgctctgcaggcagggaacaagggcactcaggcctgtattaccgctgctactgccgtgagcggcattattgcagatctggacaccactatcatgtttgccactgcagggactctcaatgccgaaaattccgaaacatttgcagaccatcgcgagaacatcctgaagaccgccaaggctctcgttgaggacacaaaactcctagtgagcggcgcagcgtctactcctgataagctcgctcaggctgcacaatctagcgcggctactattactcagctggctgaagttgtcaagctcggagcggctagcctggggtctgacgaccctgagacacaggtggttttgattaatgcaatcaaggacgtagctaaggcattgtcagatctcatcagtgcgacaaagggagccgcttcgaagcccgtggacgatccatcaatgtaccagctcaagggagccgctaaggtgatggtcacgaatgtaacctccctgttgaaaacagttaaggcagttgaggatgaggcaacccgtgggacccgggctctggaagccactatcgaatgcattaagcaggagttgaccgtgtttcagtctaaggacgtcccggagaagacatccagcccggaggagtccatcaggatgaccaaaggcattactatggctaccgcaaaagctgttgccgcagggaattcctgtagacaggaagatgttatcgcgaccgccaatctttctcgcaaggccgtgtctgatatgctgaccgcctgtaaacaggctagcttccaccccgacgtgtcagatgaggtccgcacaagagccctgcgctttggcaccgaatgtacacttgggtatctcgatctgctggagcatgttctggttattctgcagaaacctacgccggagttcaaacagcagttagctgctttcagcaagagggtggctggggctgtcaccgagctgatccaggcagcagaggcgatgaaaggtacggaatgggtcgatccggaagaccctactgtgatcgctgaaactgaactcctgggcgctgctgcaagcatcgaagccgcagccaagaaattagagcagctcaaaccacgggctaaaccgaagcaggcagacgaaacactagatttcgaggagcagatactggaggcagcgaagtctatcgccgcagcgacctccgctctggttaagtctgcatccgcagctcaacgtgaactggtggcccaaggaaaagtgggatccatccccgcaaatgccgctgacgatggccaatggtctcagggcttgatctctgccgctcgcatggtcgccgctgccacatcttctttgtgcgaggcagctaacgcttccgtgcaaggccacgcgtccgaggaaaagctgattagcagtgcgaaacaggtggctgcaagtactgcccagctcttagtcgcttgcaaagtgaaggctgaccaagattcagaggctatgaggaggctgcaagccgcagggaacgccgttaaacgggcttccgacaacctcgttagggcagcccaaaaagcggctttcgggaaagccgacgacgatgacgttgtcgtgaagacaaaatttgtcgggggaatcgcacaaattatcgccgctcaggaagaaatgctcaagaaggaacgcgagctggaagaagccaggaaaaaactcgcacagattcggcaacagcagtacaagtttttgcccacagagctccgggaggacgaaggtta

SEQ ID NO: 315290 - DNA, 11650 bp, Artificial Sequence
  derived and/or modified sequence
atggtggccctgtccttaaagatttgtgtgcgccactgcaacgtggtgaagaccatgcagtttgaaccatctacagctgtgtacgatgcgtgtcgagtcattcgggaacgggtgcctgaggcacaaactgggcaagcttctgactatggactctttctttcggatgaagacccgaggaaagggatttggctggaagcgggcagaacactggattactacatgttgcggaatggggatattttggaatataaaaagaaacagagacctcagaaaatccggatgctggatggatctgtgaagacagtgatggtggatgattccaagactgtgggggagctcctggtcactatttgtagcagaataggaataacaaattatgaagaatactccttaatccaagaaactattgaagaaaagaaagaggaaggaacgggcacactcaaaaaagacaggacactgttacgagatgagaggaaaatggagaagttgaaggccaagctgcacacagatgatgacctaaattggctggatcacagccgaacattcagagaacaaggagtagatgaaaacgaaacgttgctgcttagacggaagttcttttactctgatcagaatgtagattcgagagaccccgtgcagctgaacttgctttatgttcaggcacgggatgacatcctgaatggctctcaccctgtctccttcgagaaagcttgtgagtttggtggatttcaagcccagatacaatttggacctcatgtggaacataaacacaaacctggatttttagatctgaaggaattcctgcccaaagaatatatcaagcagagaggagctgaaaagaggatctttcaggagcataagaactgcggagagatgagtgagatagaagccaaggtcaagtacgtcaaactcgcacggtccctccgcacatatggcgtgtccttcttcctggtgaaggagaagatgaaaggcaagaacaagctggtgcctcgcctgctggggatcaccaaagactcggtgatgcgcgtggatgagaagaccaaggaagtgctgcaggagtggcccctcaccaccgtcaagcgctgggcagcctcacccaagagcttcacactggattttggggagtatcaggaaagctactattcagtacaaaccaccgagggagagcagatatcccagctgattgcaggctacattgacatcatcctgaaaaagaaacaaagtaaagatcgatttggactagaaggtgatgaggagtcaaccatgttagaagagtccgtttccccaaaaaagtccaccatcttgcagcagcagttcaaccggaccgggaaggcagagcacggctcagtggcgctgccggccgtgatgcgctcgggctccagcgggcctgagaccttcaacgttggcagcatgccctcgccacagcagcaggtcatggttgggcagatgcaccgaggccacatgccgccactgacctcagcccagcaggccctgatggggaccatcaacacaagcatgcacgccgtccagcaggcccaggatgatctcagtgagctcgactcgctgccacctctcggccaggatatggcatctagggtatgggttcagaacaaagtcgacgaatccaaacacgaaatccattctcaagttgatgctatcacggccggaacggcttcagttgttaacctcacagctggtgaccctgcagacactgactacacagctgtgggatgtgcgatcaccactatttcttccaacctgacggagatgtccaagggtgtgaagctattggccgccctcatggatgatgaggtgggcagcggggaggacttgctcagagctgccaggaccctcgctggggcggtgtcagacttgctgaaagctgtgcagcctacttctggagagcctcgacagacagttttgactgctgctggcagcatcggacaagccagtggggatcttctgagacagattggagagaatgagactgatgagcgattccaggatgttttaatgagtttggccaaagctgttgccaatgcagctgccatgttggtactaaaggcaaagaatgttgcccaagtggccgaagacactgtcctacagaacagggtaattgctgctgccacccagtgtgccctctccacctcccagcttgtggcatgtgccaaggttgtgagccccactattagctcccctgtgtgccaggagcagctgattgaagcagggaagctggtggaccgctcggtggagaactgtgtccgtgcctgccaggcggccactaccgatagtgagctcctgaagcaggtcagcgcagcggccagcgtggtcagccaggccctccatgatctcctgcagcatgtgcggcagtttgccagccgaggcgagcccatcggccgctacgaccaggctactgacaccatcatgtgtgtcaccgagagcatcttcagctccatgggtgacgctggtgaaatggtgcgccaggcgcgggttctggcccaagccacatcagacctcgtcaatgccatgaggtcagatgcagaagccgaaatcgacatggagaattcaaagaagctcctggcagcagcaaaactcttagctgactccactgctcgcatggtggaagctgcaaagggggctgcagccaacccagagaatgaggaccagcagcaaaggctgagagaagctgcagaaggcctccgggtagcaaccaacgcagctgcccagaatgctattaagaaaaaaattgtcaaccgactggaggttgcagccaagcaggccgcagcggcagccacacagaccatcgccgcctcccagaatgcagctgtttccaacaagaaccctgcggcccagcagcagctggtccagagttgcaaggcagtggctgatcacatccctcagctggtccagggagtgagggggagccaagctcaagctgaagacctgagtgcccagctggctctcatcatctccagccagaacttcctccagcctggaagcaagatggtgtcctctgccaaagccgcagtgcccaccgtgagtgaccaggccgcagccatgcagctgagccagtgtgccaagaacctggccaccagcttggcggagctgcgtaccgcctcgcagaaggcccatgaagcttgtggtccgatggaaatcgattcagctctgaatacggtgcagacgcttaagaatgaactgcaggatgccaagatggcagccgtggagagccagctgaagccacttccaggggaaacgctggaaaaatgtgctcaggacctgggaagcacatccaaggcggtgggctcctccatggcacagctgctgacctgtgctgctcaaggcaacgaacactacacaggggtggctgctagagagacggcccaagctctgaaaacactggcccaggccgcccgtggagtggctgcatcgacaaccgaccccgcggccgcccatgccatgttagattctgctcgagacgtgatggagggctccgccatgctcattcaagaggccaagcaggccctgattgcacctggagatgcagagcgtcaacaaagactggctcaggtggctaaagccgtctcacactccttgaataactgcgtaaattgcctccctgggcagaaggatgtggacgtggccttgaagagcatcggggagtccagcaagaagctgcttgtggattcgctacctccaagcacgaagcctttccaggaagcccagagtgaactgaaccaggcagcagctgatctgaaccagtctgctggggaagtggtccatgccacccggggccagagtggagagttggctgcagcctctggaaagttcagtgatgattttgatgaattcctcgatgctggcattgagatggctggccaagctcagacaaaagaagaccagatccaagtgatagggaacctcaagaatatctcgatggcatccagcaagctgctgttagctgccaagtctctctctgtagatccaggagctcccaatgcgaaaaatctcctggctgcagctgcaagagctgtgacagagagcatcaatcaactcatcactctgtgtacccaacaagctccgggccagaaagagtgcgataatgccctgcgggagctcgagactgtgaaggggatgttggacaatcctaatgaacctgttagtgacctctcttactttgactgcattgagagtgtgatggaaaactccaaggttctgggtgaatcgatggcagggatttcacagaatgccaagaccggagacctccctgcctttggggaatgtgtggggattgcatccaaggctctctgtgggctgacagaggctgcagcccaggctgcatacttggttggcatctctgatccaaacagccaggcaggccaccagggcctggtggaccccatccagtttgccagggctaaccaggccatccagatggcatgccagaacttggtggaccctggcagcagcccatcacaggtcctgtcagccgccacaattgttgccaagcacacgtcagccttgtgcaatgcctgccgcatcgcctcatccaagacggccaacccagtagccaagaggcacttcgtccagtcagccaaggaagtcgccaacagcactgccaacctggtgaagaccatcaaggccctggatggggatttctctgaagacaaccgcaataagtgtcgcatcgccaccgcacccttgattgaagctgtggagaacctgacagcgttcgcctcaaaccctgagtttgtcagcattcctgcccagatcagctccgagggttcccaggcacaggaaccaatcctggtctcagccaagaccatgctggagagttcatcgtacctcattcgcactgcacgctctctggccatcaaccccaaagacccacccacctggtctgtactggctggacattcccatacagtgtccgactccatcaagagtctcatcacttctatcagggacaaggcccctggacagagggagtgtgattactccatcgatggcatcaaccggtgcatccgggacatcgagcaggcctcgctggccgccgtcagccagagcctggccacgagggacgacatctctgtggaggccctgcaggagcagctgacttcggtggtccaggaaatcggacaccttatcgatcccatcgccacagcggctcggggagaagcagctcagctgggacataaggtgacacaactggcaagctattttgagcccttgatcttagccgcagttggtgtggcctccaagattcttgatcatcagcagcagatgacggtgctggaccagaccaagactctcgcagagtctgccttgcagatgttgtatgcagccaaagaaggtggcggaaaccccaaggcacaacacacccatgacgccatcacagaggccgcccagttgatgaaggaagccgtggatgacatcatggtgacgctgaacgaagctgccagtgaagtggggctggttgggggcatggtggacgccattgcagaagccatgagcaagctggatgaaggcactcctccagaaccaaagggaacatttgtcgactatcagacgactgtggttaaatactccaaagccattgcggtgacagctcaggaaatgatgactaagtcggttactaacccggaggagttgggaggactggcttcacaaatgaccagtgactatgggcacctggctttccagggccagatggcagcagccacggcggaaccagaggagatcggattccagattcgcactcgtgtgcaggacctgggccacggctgtatcttcctggtgcagaaggcaggggccctccaggtctgccccacagacagctacaccaagagggagctgatcgaatgcgcccgtgccgtcacggaaaaggtctccttggtgctctcggctctccaggccgggaacaaaggaacccaggcatgcattacagccgccaccgctgtgtctgggatcattgccgacctggacaccaccattatgtttgcaacagcggggacgctgaatgcagagaacagtgagaccttcgcagaccacagggagaacattctcaagacggccaaggccttggtagaagacacgaaactacttgtgtcaggagctgcgtccactcctgacaagctggcccaggcggcccagtcctcagcagccaccatcacccagctcgcagaagtggtcaagctgggggcagccagcctgggctccgacgaccccgagacccaggtggttttgatcaatgccatcaaagatgtggccaaggccctttctgatctcatcagtgctaccaagggagctgccagcaagccagtggacgacccttccatgtaccagctcaagggggctgccaaggtgatggtgaccaatgtcacctcgctcctcaagactgtaaaggcagtggaggatgaggccacccggggcaccagggcgcttgaggccacaattgaatgcataaagcaggagcttacggtgttccagtcaaaagacgtacctgaaaagacatcatcacctgaagaatccataaggatgacgaaaggcatcaccatggcaacagccaaagccgtggcagctgggaactcatgtagacaggaggacgtgattgctactgccaacctgagccggaaagccgtgtcagatatgttgacggcttgcaagcaagcatccttccaccccgatgtcagtgacgaggtgagaaccagagccttgcgtttcgggacggagtgcacccttggctacttggacctcctggagcacgtcttggtgattcttcagaaaccaaccccagaattcaagcagcagctggccgctttctccaagcgagtcgccggcgctgtgacagagctcatccaggcggcggaagccatgaaaggaacagagtgggtggatccagaagacccaactgtcattgcagaaacagagttactgggggctgcagcatccatcgaagctgctgctaagaagttagagcaactgaagccaagagcaaaaccaaaacaagcggatgagaccctggactttgaggaacagatcttggaagctgctaaatccattgctgctgccacaagcgccctggtcaaatcggcctcagcagcccagagggagctggtggcccaaggaaaggtgggctccatccctgccaatgctgcagacgacggacagtggtcacaggggctgatttctgctgcccggatggtggcggctgcgaccagcagtctctgtgaggcggccaatgcctccgttcagggacacgccagcgaggagaagctcatctcatctgccaagcaggtcgccgcttccacggctcagctgctggtggcctgcaaggtgaaggccgaccaggattcagaggccatgaggcggctacaggcggcaggaaatgctgtgaaaagagcctcagacaatcttgtccgtgcagcccagaaggcagcttttggcaaagctgatgacgacgatgttgtagtgaaaaccaagtttgtggggggcattgctcagatcatcgccgcccaggaagaaatgctaaagaaagagcgagaactggaagaagcaaggaaaaaactggcccaaatccgccagcagcagtataagtttttacccaccgagctgagggaagatgagggctaaaggtgcgagcccagatggcgagccccaggggatggccctggctgaactggacagacagtgttcctgagaggctgggcacttagctggaaaccgcccacctccctcccgggtgagcctggagccctgcgtgcttgttctcacatctctgtcccgtcggcactggctgcatgatcgtgatgtcacacggtacaatgtcctacccacaactcctctgccgcctcccctcatgcctcaccgtgtctcaggagagaggggtgcacgtttcatggactgttaccaacaaagaaaagtcagtattatgttgttctcagacactttggcttttgttggtccttctcttaggcctgctcctggacctctttatgatattgtgatagggaaaaaaatcattgacgtcatagaatattcttcttcctctcaggagaagacggaagctggagttggacatggttcataaaagccagaaacacaaacccgtgtggactccgggagggtgactcaggtcctccttccatgtcttgagcactggctcacccagggggtgaaaaattcccgcccctgtttgcacgctttcttgcctccgtgtgtaagctccttgtacaacccagacccatcttgtattttgtggcccagaaaactgaacgattattttgttcctccgtagtccaaagggcagagttgcggaaggccgtcggggcttggtgagcaggggctgtaatacagtctgtgggctccttaccctgcagaggctgtttcagctcacacagagtcatccacacaaacccacggctcccagttgacagtcagtggaatgctcgtctccttagcgtccagggtggggattctgctggaataaagagcttcctcagtgactcatctttaggtcccacgctggtttctgtgccttcagaatggtcacaagcccggattggaaaggatctgcttacaaacctgtcccctgtcctccaacccaaaacgcctttttttctgtcttaatatccagaaaatctaaatgcatcctaaaatcaatgtgaacctttaacaagatagttttacttattatcacataagacataagatgttttcattttctggatgtcacacttccagaatttcatatttttcccctcttttctttccccttttcagagccctcccataggaagggaagggcttgaatttacccttaatctgcacctttagccaaggcagtgcatggaagatgaatggctcgtgggacagaatctaatgccagggagcaggagtgtttgaaagaattcatagtggggaaggtaaaagttaatggaagtacatgattttcaaaactggtaacagttaaaggcactcaccctccgcctctctctctctctctctctctggtgtgctatcatgtcttggactccatccacactatagtttcaaagttccactgacgggggaaagttggtgctttggtcctccgaagatgtcacctttcgaccttgcccgatcttgtttcaccagactctagcccatgtcatggttttaaaatacataaacttctgacagcttcccatatttataagttacttataagtgctgcacgtattagaatttttttttttcagaccagtaaagttagagaaaagacgctgtaaaggaaaagcaagtgagagtatgtgtaggacactgacagtgtgtgggcaccagttctgaagaggaggggagctgctggagccctagcctgttggggaaaagctggcacactcttggctcgccctctttgagtggagctgatccaacacctcatgcctgccttggccggacactgagaggaggggcacacgtgcttccagagacactcaggagtcagaccccaatgctcagagtcacaatgtgttcatggcctcctgtaacaggactctggggatcccctctgtggcccagcccaccccaccctctgctcttctatgctgtgcccagggcagctgccctcttctgcctgtgccccatcccatcctgaaaacccaggaccaaggcaggggcaggcagccagttcttccaccttgcctcagagtcatttaaaacctttactgcatttgataccagaaaagcctccagagacaaaccaaatgcaaaggcctttcctttataactctaaagaacaggcatcgaaagtttatttttgtaggagctatataaatactcacctttctggagtcgtccagtgctgggagctttggggagtttggttctcagttatcacctggtatggtcccagtttctcatctgtcctttcctcatccaccctgcacatgtgtatgtgaacggcttcgtggccggtgtggtggtttctcatttcataagatagttgaagggccatgccttgtctggatgttatttaataggcactactgcggtgtcctcagatggtactgagggggccttctggtccttcaaaggaaaataacacaggcatgagttcatttgggagtgtgaactttcagaacacctaataagagagtggtgtcagagtaaaaacggccccaggtctggagcatagaagtgtatctctgtgaagagagagccggtgtgttgacatgtggttcttctcacacccctctactcctcgagggctttgaatccttgggctgatttttgtgccagaaattgctgttcccgatggccaaaaggggaacctgaactggatttcagaactgcccagtgatttgaaaatttagattttacttgggcctttcaggagtctttagatagggatgctgaggtcatatttagttcaatgaacagcccttgtttaagttttgccagtgtccagccagctgtggccctggccatctgtgcaggcaggttcctcaattcctggttggccctgcagtcggtcaacacagtccctccaggtcggctgcagaggcagctgcccagcctgcagtctatgcacgggccttaagaaatgagctgcctgtagcctcacggcatatgcttttatcagggaaaacccttcgagcttcttctgattctcacctgcttgctttctggctgtcttagtcagtgtgtttacaggcaactaaagcctgttcctaatttatcaaaaaattataaccaaaattcaccatagcctaagagagtaaaccccacctccaaagtgatgccaaggccaaaacctcatcaaggaaccagacacaggtcaaaagtggtgagcaagccatggtctctgctcctggggaactcacacgctgacccccgaggagccttggtttcctccctggcagatagtccccagaatcttctctcccagctttgaggttctgggctctggaaaggcctctgggatgctggccttaagatctcagcacagactatcagcatgttccattctcagattcctggaggaaaggtaccctctgttgaccaaggggctggctgcttctgagacttaccaacccaagaaatttggagacattcccctcaggctaaaaggcagcggtccccagagttcagaaagcaaaagatcttgacaactgtgccagtagtggctctggtcctatctctccacagtgctggcctctgctggggaaggcatctttcccaaaggtatccccaagtaccatgttgaaaatgtcctcagtctgttgctccatctttctgagcctctgcttggtatgtcatgtttatggtcactacggatgagtgtgtgcagagtttgggttgattcttttaaatgctacaaacaagagctatttcttttcaataaaaaaggtttggattcggcctcttcctctgagcccacctcccagccctccagggagcatcagtgtacctgagtcactttgtctgcatctcttcatcccacaaaacacgaggctgggtctcattcagcggcctctcaccaaccttcaagatccagaagaaaacaggaacgttcagctctgccctgtgtcgtatctaatcacatacattaatttatctaaccacataagttatttttttttatttgccagaaataaacctttaaaggaacaaa

SEQ ID NO: 315291 - DNA, 11880 bp, Artificial Sequence
  derived and/or modified sequence
cttcatttcctcaagctccctccttaacagctaacgccttcgcgagaggagctgagggccctatgcggaataattaagatgccttctttagggtctctgccttggggccattttacaggtgctgcaggaggcttctcacatgctttgggatatcttcagggaaatacgctcttaatagaaactgagaatttaagacattctaagtgagactgtccacatcatctaggaaaatggtggccctgtccttaaagatttgtgtgcgccactgcaacgtggtgaagaccatgcagtttgaaccatctacagctgtgtacgatgcgtgtcgagtcattcgggaacgggtgcctgaggcacaaactgggcaagcttctgactatggactctttctttcggatgaagacccgaggaaagggatttggctggaagcgggcagaacactggattactacatgttgcggaatggggatattttggaatataaaaagaaacagagacctcagaaaatccggatgctggatggatctgtgaagacagtgatggtggatgattccaagactgtgggggagctcctggtcactatttgtagcagaataggaataacaaattatgaagaatactccttaatccaagaaactattgaagaaaagaaagaggaaggaacgggcacactcaaaaaagacaggacactgttacgagatgagaggaaaatggagaagttgaaggccaagctgcacacagatgatgacctaaattggctggatcacagccgaacattcagagaacaaggagtagatgaaaacgaaacgttgctgcttagacggaagttcttttactctgatcagaatgtagattcgagagaccccgtgcagctgaacttgctttatgttcaggcacgggatgacatcctgaatggctctcaccctgtctccttcgagaaagcttgtgagtttggtggatttcaagcccagatacaatttggacctcatgtggaacataaacacaaacctggatttttagatctgaaggaattcctgcccaaagaatatatcaagcagagaggagctgaaaagaggatctttcaggagcataagaactgcggagagatgagtgagatagaagccaaggtcaagtacgtcaaactcgcacggtccctccgcacatatggcgtgtccttcttcctggtgaaggagaagatgaaaggcaagaacaagctggtgcctcgcctgctggggatcaccaaagactcggtgatgcgcgtggatgagaagaccaaggaagtgctgcaggagtggcccctcaccaccgtcaagcgctgggcagcctcacccaagagcttcacactggattttggggagtatcaggaaagctactattcagtacaaaccaccgagggagagcagatatcccagctgattgcaggctacattgacatcatcctgaaaaagaaacaaagtaaagatcgatttggactagaaggtgatgaggagtcaaccatgttagaagagtccgtttccccaaaaaagtccaccatcttgcagcagcagttcaaccggaccgggaaggcagagcacggctcagtggcgctgccggccgtgatgcgctcgggctccagcgggcctgagaccttcaacgttggcagcatgccctcgccacagcagcaggtcatggttgggcagatgcaccgaggccacatgccgccactgacctcagcccagcaggccctgatggggaccatcaacacaagcatgcacgccgtccagcaggcccaggatgatctcagtgagctcgactcgctgccacctctcggccaggatatggcatctagggtatgggttcagaacaaagtcgacgaatccaaacacgaaatccattctcaagttgatgctatcacggccggaacggcttcagttgttaacctcacagctggtgaccctgcagacactgactacacagctgtgggatgtgcgatcaccactatttcttccaacctgacggagatgtccaagggtgtgaagctattggccgccctcatggatgatgaggtgggcagcggggaggacttgctcagagctgccaggaccctcgctggggcggtgtcagacttgctgaaagctgtgcagcctacttctggagagcctcgacagacagttttgactgctgctggcagcatcggacaagccagtggggatcttctgagacagattggagagaatgagactgatgagcgattccaggatgttttaatgagtttggccaaagctgttgccaatgcagctgccatgttggtactaaaggcaaagaatgttgcccaagtggccgaagacactgtcctacagaacagggtaattgctgctgccacccagtgtgccctctccacctcccagcttgtggcatgtgccaaggttgtgagccccactattagctcccctgtgtgccaggagcagctgattgaagcagggaagctggtggaccgctcggtggagaactgtgtccgtgcctgccaggcggccactaccgatagtgagctcctgaagcaggtcagcgcagcggccagcgtggtcagccaggccctccatgatctcctgcagcatgtgcggcagtttgccagccgaggcgagcccatcggccgctacgaccaggctactgacaccatcatgtgtgtcaccgagagcatcttcagctccatgggtgacgctggtgaaatggtgcgccaggcgcgggttctggcccaagccacatcagacctcgtcaatgccatgaggtcagatgcagaagccgaaatcgacatggagaattcaaagaagctcctggcagcagcaaaactcttagctgactccactgctcgcatggtggaagctgcaaagggggctgcagccaacccagagaatgaggaccagcagcaaaggctgagagaagctgcagaaggcctccgggtagcaaccaacgcagctgcccagaatgctattaagaaaaaaattgtcaaccgactggaggttgcagccaagcaggccgcagcggcagccacacagaccatcgccgcctcccagaatgcagctgtttccaacaagaaccctgcggcccagcagcagctggtccagagttgcaaggcagtggctgatcacatccctcagctggtccagggagtgagggggagccaagctcaagctgaagacctgagtgcccagctggctctcatcatctccagccagaacttcctccagcctggaagcaagatggtgtcctctgccaaagccgcagtgcccaccgtgagtgaccaggccgcagccatgcagctgagccagtgtgccaagaacctggccaccagcttggcggagctgcgtaccgcctcgcagaaggcccatgaagcttgtggtccgatggaaatcgattcagctctgaatacggtgcagacgcttaagaatgaactgcaggatgccaagatggcagccgtggagagccagctgaagccacttccaggggaaacgctggaaaaatgtgctcaggacctgggaagcacatccaaggcggtgggctcctccatggcacagctgctgacctgtgctgctcaaggcaacgaacactacacaggggtggctgctagagagacggcccaagctctgaaaacactggcccaggccgcccgtggagtggctgcatcgacaaccgaccccgcggccgcccatgccatgttagattctgctcgagacgtgatggagggctccgccatgctcattcaagaggccaagcaggccctgattgcacctggagatgcagagcgtcaacaaagactggctcaggtggctaaagccgtctcacactccttgaataactgcgtaaattgcctccctgggcagaaggatgtggacgtggccttgaagagcatcggggagtccagcaagaagctgcttgtggattcgctacctccaagcacgaagcctttccaggaagcccagagtgaactgaaccaggcagcagctgatctgaaccagtctgctggggaagtggtccatgccacccggggccagagtggagagttggctgcagcctctggaaagttcagtgatgattttgatgaattcctcgatgctggcattgagatggctggccaagctcagacaaaagaagaccagatccaagtgatagggaacctcaagaatatctcgatggcatccagcaagctgctgttagctgccaagtctctctctgtagatccaggagctcccaatgcgaaaaatctcctggctgcagctgcaagagctgtgacagagagcatcaatcaactcatcactctgtgtacccaacaagctccgggccagaaagagtgcgataatgccctgcgggagctcgagactgtgaaggggatgttggacaatcctaatgaacctgttagtgacctctcttactttgactgcattgagagtgtgatggaaaactccaaggttctgggtgaatcgatggcagggatttcacagaatgccaagaccggagacctccctgcctttggggaatgtgtggggattgcatccaaggctctctgtgggctgacagaggctgcagcccaggctgcatacttggttggcatctctgatccaaacagccaggcaggccaccagggcctggtggaccccatccagtttgccagggctaaccaggccatccagatggcatgccagaacttggtggaccctggcagcagcccatcacaggtcctgtcagccgccacaattgttgccaagcacacgtcagccttgtgcaatgcctgccgcatcgcctcatccaagacggccaacccagtagccaagaggcacttcgtccagtcagccaaggaagtcgccaacagcactgccaacctggtgaagaccatcaaggccctggatggggatttctctgaagacaaccgcaataagtgtcgcatcgccaccgcacccttgattgaagctgtggagaacctgacagcgttcgcctcaaaccctgagtttgtcagcattcctgcccagatcagctccgagggttcccaggcacaggaaccaatcctggtctcagccaagaccatgctggagagttcatcgtacctcattcgcactgcacgctctctggccatcaaccccaaagacccacccacctggtctgtactggctggacattcccatacagtgtccgactccatcaagagtctcatcacttctatcagggacaaggcccctggacagagggagtgtgattactccatcgatggcatcaaccggtgcatccgggacatcgagcaggcctcgctggccgccgtcagccagagcctggccacgagggacgacatctctgtggaggccctgcaggagcagctgacttcggtggtccaggaaatcggacaccttatcgatcccatcgccacagcggctcggggagaagcagctcagctgggacataaggtgacacaactggcaagctattttgagcccttgatcttagccgcagttggtgtggcctccaagattcttgatcatcagcagcagatgacggtgctggaccagaccaagactctcgcagagtctgccttgcagatgttgtatgcagccaaagaaggtggcggaaaccccaaggcacaacacacccatgacgccatcacagaggccgcccagttgatgaaggaagccgtggatgacatcatggtgacgctgaacgaagctgccagtgaagtggggctggttgggggcatggtggacgccattgcagaagccatgagcaagctggatgaaggcactcctccagaaccaaagggaacatttgtcgactatcagacgactgtggttaaatactccaaagccattgcggtgacagctcaggaaatgatgactaagtcggttactaacccggaggagttgggaggactggcttcacaaatgaccagtgactatgggcacctggctttccagggccagatggcagcagccacggcggaaccagaggagatcggattccagattcgcactcgtgtgcaggacctgggccacggctgtatcttcctggtgcagaaggcaggggccctccaggtctgccccacagacagctacaccaagagggagctgatcgaatgcgcccgtgccgtcacggaaaaggtctccttggtgctctcggctctccaggccgggaacaaaggaacccaggcatgcattacagccgccaccgctgtgtctgggatcattgccgacctggacaccaccattatgtttgcaacagcggggacgctgaatgcagagaacagtgagaccttcgcagaccacagggagaacattctcaagacggccaaggccttggtagaagacacgaaactacttgtgtcaggagctgcgtccactcctgacaagctggcccaggcggcccagtcctcagcagccaccatcacccagctcgcagaagtggtcaagctgggggcagccagcctgggctccgacgaccccgagacccaggtggttttgatcaatgccatcaaagatgtggccaaggccctttctgatctcatcagtgctaccaagggagctgccagcaagccagtggacgacccttccatgtaccagctcaagggggctgccaaggtgatggtgaccaatgtcacctcgctcctcaagactgtaaaggcagtggaggatgaggccacccggggcaccagggcgcttgaggccacaattgaatgcataaagcaggagcttacggtgttccagtcaaaagacgtacctgaaaagacatcatcacctgaagaatccataaggatgacgaaaggcatcaccatggcaacagccaaagccgtggcagctgggaactcatgtagacaggaggacgtgattgctactgccaacctgagccggaaagccgtgtcagatatgttgacggcttgcaagcaagcatccttccaccccgatgtcagtgacgaggtgagaaccagagccttgcgtttcgggacggagtgcacccttggctacttggacctcctggagcacgtcttggtgattcttcagaaaccaaccccagaattcaagcagcagctggccgctttctccaagcgagtcgccggcgctgtgacagagctcatccaggcggcggaagccatgaaaggaacagagtgggtggatccagaagacccaactgtcattgcagaaacagagttactgggggctgcagcatccatcgaagctgctgctaagaagttagagcaactgaagccaagagcaaaaccaaaacaagcggatgagaccctggactttgaggaacagatcttggaagctgctaaatccattgctgctgccacaagcgccctggtcaaatcggcctcagcagcccagagggagctggtggcccaaggaaaggtgggctccatccctgccaatgctgcagacgacggacagtggtcacaggggctgatttctgctgcccggatggtggcggctgcgaccagcagtctctgtgaggcggccaatgcctccgttcagggacacgccagcgaggagaagctcatctcatctgccaagcaggtcgccgcttccacggctcagctgctggtggcctgcaaggtgaaggccgaccaggattcagaggccatgaggcggctacaggcggcaggaaatgctgtgaaaagagcctcagacaatcttgtccgtgcagcccagaaggcagcttttggcaaagctgatgacgacgatgttgtagtgaaaaccaagtttgtggggggcattgctcagatcatcgccgcccaggaagaaatgctaaagaaagagcgagaactggaagaagcaaggaaaaaactggcccaaatccgccagcagcagtataagtttttacccaccgagctgagggaagatgagggctaaaggtgcgagcccagatggcgagccccaggggatggccctggctgaactggacagacagtgttcctgagaggctgggcacttagctggaaaccgcccacctccctcccgggtgagcctggagccctgcgtgcttgttctcacatctctgtcccgtcggcactggctgcatgatcgtgatgtcacacggtacaatgtcctacccacaactcctctgccgcctcccctcatgcctcaccgtgtctcaggagagaggggtgcacgtttcatggactgttaccaacaaagaaaagtcagtattatgttgttctcagacactttggcttttgttggtccttctcttaggcctgctcctggacctctttatgatattgtgatagggaaaaaaatcattgacgtcatagaatattcttcttcctctcaggagaagacggaagctggagttggacatggttcataaaagccagaaacacaaacccgtgtggactccgggagggtgactcaggtcctccttccatgtcttgagcactggctcacccagggggtgaaaaattcccgcccctgtttgcacgctttcttgcctccgtgtgtaagctccttgtacaacccagacccatcttgtattttgtggcccagaaaactgaacgattattttgttcctccgtagtccaaagggcagagttgcggaaggccgtcggggcttggtgagcaggggctgtaatacagtctgtgggctccttaccctgcagaggctgtttcagctcacacagagtcatccacacaaacccacggctcccagttgacagtcagtggaatgctcgtctccttagcgtccagggtggggattctgctggaataaagagcttcctcagtgactcatctttaggtcccacgctggtttctgtgccttcagaatggtcacaagcccggattggaaaggatctgcttacaaacctgtcccctgtcctccaacccaaaacgcctttttttctgtcttaatatccagaaaatctaaatgcatcctaaaatcaatgtgaacctttaacaagatagttttacttattatcacataagacataagatgttttcattttctggatgtcacacttccagaatttcatatttttcccctcttttctttccccttttcagagccctcccataggaagggaagggcttgaatttacccttaatctgcacctttagccaaggcagtgcatggaagatgaatggctcgtgggacagaatctaatgccagggagcaggagtgtttgaaagaattcatagtggggaaggtaaaagttaatggaagtacatgattttcaaaactggtaacagttaaaggcactcaccctccgcctctctctctctctctctctctggtgtgctatcatgtcttggactccatccacactatagtttcaaagttccactgacgggggaaagttggtgctttggtcctccgaagatgtcacctttcgaccttgcccgatcttgtttcaccagactctagcccatgtcatggttttaaaatacataaacttctgacagcttcccatatttataagttacttataagtgctgcacgtattagaatttttttttttcagaccagtaaagttagagaaaagacgctgtaaaggaaaagcaagtgagagtatgtgtaggacactgacagtgtgtgggcaccagttctgaagaggaggggagctgctggagccctagcctgttggggaaaagctggcacactcttggctcgccctctttgagtggagctgatccaacacctcatgcctgccttggccggacactgagaggaggggcacacgtgcttccagagacactcaggagtcagaccccaatgctcagagtcacaatgtgttcatggcctcctgtaacaggactctggggatcccctctgtggcccagcccaccccaccctctgctcttctatgctgtgcccagggcagctgccctcttctgcctgtgccccatcccatcctgaaaacccaggaccaaggcaggggcaggcagccagttcttccaccttgcctcagagtcatttaaaacctttactgcatttgataccagaaaagcctccagagacaaaccaaatgcaaaggcctttcctttataactctaaagaacaggcatcgaaagtttatttttgtaggagctatataaatactcacctttctggagtcgtccagtgctgggagctttggggagtttggttctcagttatcacctggtatggtcccagtttctcatctgtcctttcctcatccaccctgcacatgtgtatgtgaacggcttcgtggccggtgtggtggtttctcatttcataagatagttgaagggccatgccttgtctggatgttatttaataggcactactgcggtgtcctcagatggtactgagggggccttctggtccttcaaaggaaaataacacaggcatgagttcatttgggagtgtgaactttcagaacacctaataagagagtggtgtcagagtaaaaacggccccaggtctggagcatagaagtgtatctctgtgaagagagagccggtgtgttgacatgtggttcttctcacacccctctactcctcgagggctttgaatccttgggctgatttttgtgccagaaattgctgttcccgatggccaaaaggggaacctgaactggatttcagaactgcccagtgatttgaaaatttagattttacttgggcctttcaggagtctttagatagggatgctgaggtcatatttagttcaatgaacagcccttgtttaagttttgccagtgtccagccagctgtggccctggccatctgtgcaggcaggttcctcaattcctggttggccctgcagtcggtcaacacagtccctccaggtcggctgcagaggcagctgcccagcctgcagtctatgcacgggccttaagaaatgagctgcctgtagcctcacggcatatgcttttatcagggaaaacccttcgagcttcttctgattctcacctgcttgctttctggctgtcttagtcagtgtgtttacaggcaactaaagcctgttcctaatttatcaaaaaattataaccaaaattcaccatagcctaagagagtaaaccccacctccaaagtgatgccaaggccaaaacctcatcaaggaaccagacacaggtcaaaagtggtgagcaagccatggtctctgctcctggggaactcacacgctgacccccgaggagccttggtttcctccctggcagatagtccccagaatcttctctcccagctttgaggttctgggctctggaaaggcctctgggatgctggccttaagatctcagcacagactatcagcatgttccattctcagattcctggaggaaaggtaccctctgttgaccaaggggctggctgcttctgagacttaccaacccaagaaatttggagacattcccctcaggctaaaaggcagcggtccccagagttcagaaagcaaaagatcttgacaactgtgccagtagtggctctggtcctatctctccacagtgctggcctctgctggggaaggcatctttcccaaaggtatccccaagtaccatgttgaaaatgtcctcagtctgttgctccatctttctgagcctctgcttggtatgtcatgtttatggtcactacggatgagtgtgtgcagagtttgggttgattcttttaaatgctacaaacaagagctatttcttttcaataaaaaaggtttggattcggcctcttcctctgagcccacctcccagccctccagggagcatcagtgtacctgagtcactttgtctgcatctcttcatcccacaaaacacgaggctgggtctcattcagcggcctctcaccaaccttcaagatccagaagaaaacaggaacgttcagctctgccctgtgtcgtatctaatcacatacattaatttatctaaccacataagttatttttttttatttgccagaaataaacctttaaaggaacaaa

SEQ ID NO: 315292 - protein, 137 aa, Artificial Sequence
  derived and/or modified sequence
MMEELNPYTKISPALGAERHSVGAVTGIMLLLFLIVVLLGLFAWHRRRQKEKGRDLAPRVSYTPAMRMTSTDYSLSASTTPWWPVMEHLARPFSQRPRTQLSNKSLDRDTAGWTPYSYVNVLDQCPGGQVPARGLLH

SEQ ID NO: 315293 - DNA, 414 bp, Artificial Sequence
  derived and/or modified sequence
atgatggaagagctaaacccgtacaccaagatcagcccagcgctgggggcagaaaggcatagcgtgggcgcagtcaccggcattatgctgctgctcttcctgatagtggtgctgctcggcctgtttgcctggcacaggcgtcgtcagaaggagaagggacgcgatctggctccacgtgtttcctacacccctgccatgcgaatgacttctactgattacagcttaagtgcaagtacaaccccttggtggcccgttatggagcatctagctagaccatttagccaacgtccaagaacacagctttctaacaagtcgctggacagagacacggctgggtggaccccttattcgtatgtaaatgtgttggatcagtgtcccggagggcaagtccccgctagaggtctgctccattag

SEQ ID NO: 315294 - DNA, 414 bp, Artificial Sequence
  derived and/or modified sequence
atgatggaggagctgaacccctacaccaagatcagccctgccctgggcgctgagcggcacagcgtgggcgctgtgacaggcatcatgctgctgctcttcctgattgtggtgctgctgggcctgtttgcctggcacagaagacggcagaaggagaagggccgggacctggccccccgggtgtcctacaccccagccatgaggatgaccagcacagactacagcctgagcgccagcaccaccccctggtggcctgtgatggagcacctggcccggcccttcagccagaggcccaggacccagctgagcaacaagagcctggaccgggacacagctggctggaccccctacagctatgtgaatgtgctggaccagtgccctgggggccaggtgcctgcccggggcctgctgcactag

SEQ ID NO: 315295 - DNA, 414 bp, Artificial Sequence
  derived and/or modified sequence
atgatggaggagctgaacccctacaccaagatcagccccgccctgggtgcagagaggcactcagtgggggctgtaaccggaataatgcttttgctgttcctaatcgttgtattgctcggtttgttcgcctggcaccgtcggcgtcagaaggagaaaggcagagatctggcccccagagtatcttatactcccgccatgcgcatgacatctactgactacagccttagcgctagcactaccccatggtggccggtcatggagcacctcgctcggcccttctcccagagaccccgcacacagctctccaacaagtcactggaccgagacactgccggatggaccccgtactcatacgtgaacgtcctcgatcaatgtccggggggtcaggtgccggcacgtggccttctgcactag

SEQ ID NO: 315296 - DNA, 414 bp, Artificial Sequence
  derived and/or modified sequence
atgatggaggagctcaatccatatacgaagatctcccccgctctgggagcagagcgccattccgtcggagctgtgacaggcattatgctgctgctgttcctgatcgtggtgctgcttggtctgtttgcgtggcacagacgtcgccagaaggagaaaggcagagacctggctccgcgagtgtcctacacacctgccatgaggatgacctccaccgattattccctttccgcctccaccactccgtggtggccggttatggaacatttggccaggccattttctcaacgtcctcgaacccaattaagtaataaaagtctcgacagagataccgcagggtggacaccatacagctacgtgaatgtgttagaccagtgtcccggaggccaagttcctgctagaggcctcctgcactag

SEQ ID NO: 315297 - DNA, 414 bp, Artificial Sequence
  derived and/or modified sequence
atgatggaggagctgaacccctacaccaagatcagccccgccctgggcgccgagagacacagcgtgggcgccgtgaccggcatcatgctgctgctgttcctgatcgtggtgctgctgggcctgttcgcctggcacagaagaagacagaaggagaagggcagagacctggcccccagagtgagctacacccccgccatgagaatgaccagcaccgactacagcctgagcgccagcaccaccccctggtggcccgtgatggagcacctggccagacccttcagccagagacccagaacccagctgagcaacaagagcctggacagagacaccgccggctggaccccctacagctacgtgaacgtgctggaccagtgccccggcggccaggtgcccgccagaggcctgctgcactag

SEQ ID NO: 315298 - protein, 183 aa, Artificial Sequence
  derived and/or modified sequence
MARLILERFLQEHEETPPSKSIINSMLRDPSQIPDGVLANQVYQCIVNDCCYGPLVDCIKHAIGHEHEVLLRDLLLEKNLSFLDEDQLRAKGYDKTPDFILQVPVAVEGHIIHWIESKASFGDECSHHAYLHDQFWSYWNRFGPGLVIYWYGFIQELDCNRERGILLKACFPTNIVTLCHSIA

SEQ ID NO: 315299 - protein, 281 aa, Artificial Sequence
  derived and/or modified sequence
MILTKAQYDEIAQCLVSVPPTRQSLRKLKQRFPSQSQATLLSIFSQEYQKHIKRTHAKHHTSEAIESYYQRYLNGVVKNGAAPVLLDLANEVDYAPSLMARLILERFLQEHEETPPSKSIINSMLRDPSQIPDGVLANQVYQCIVNDCCYGPLVDCIKHAIGHEHEVLLRDLLLEKNLSFLDEDQLRAKGYDKTPDFILQVPVAVEGHIIHWIESKASFGDECSHHAYLHDQFWSYWNRFGPGLVIYWYGFIQELDCNRERGILLKACFPTNIVTLCHSIA

SEQ ID NO: 315300 - DNA, 2578 bp, Artificial Sequence
  derived and/or modified sequence
agattgcatactcaagaagaggaggaacataaaatacgtgatgtcttctcttaagtcaatcgcaggccactctgctgagcatcttctcccaggagtaccagaaacacattaaaagaacacatgccaaacatcatacttcggaagcaattgaaagttattaccagaggtacctgaatggagtggtgaaaaatggagctgccccagtgctcctggacctggccaatgaggtggactatgcgccctcattaatggctcggcttatactggagaggtttctacaggaacacgaggaaactccaccctccaagtctattataaatagtatgctacgggacccttctcagattccagatggagttctagcaaatcaggtctatcagtgcattgtgaacgactgctgttacggaccactagtggactgcatcaagcatgccattggtcatgagcatgaggtcctgctgagagacttgcttctagagaaaaacctgtccttcctagatgaagatcagcttcgtgcaaagggttatgacaaaacaccagacttcattttacaagtaccagttgctgtagaagggcacataattcactggattgaaagcaaagcctcatttggtgatgaatgtagccaccacgcctacctgcatgaccagttctggagctactggaatagatttgggccaggcttagtcatctattggtatggatttatccaggagctggactgcaaccgggaaaggggcatcctgctcaaagcctgtttccccacgaacattgtcaccttatgccacagcatagcttgaccctgaagatcctggaagagaagctgggaggaaaaggtgaatccggaagcaattttactttcctgcactgtaagatcctggcaacatctgccctgaacttcagctgaactcttgctgcccgtagtcacaccactacctctttagacaaacatatcaagagtttctgttttccttcatcccttgctgatgtgaacagccaagaactacagacacaacccactcattatcagcatttctgtctctgtcaaacaattagtttatagatagtcataatctttctttcttccggatggtttatccttgtatgctgaacaaaagaaaaaatgtgaagactgaaaggtgtgatttttcaattctcctcccagttaccgaatcaccctcttatttttttttccctaagcctccgttcactgtctctccctctccctttctcttcatgtgcactcacagagacccagcattgcattaccatcgtggaataatctagcgcaaacctaggaaagctgaagccacaaagtccaaagccacctttgtactcacctgcagagctccagaagaccttgatggcagcctgcctatgctgtgtgtttgctatattcaatctttacggcttcctgacttctgtgacagtaagccaagtgcaaaaatacacttgatgagaatttcctcttttaataatgttatttgaacaccacatattttagatttatcttatttgaaagtattagttccattgtgcctggaaaccacactcctttagattgggggccgagaggcgacaacccaacattgaggagagtttatttttaaacatggctagttgtcagtatgtacgtgagctagtatttttatgagtcgagttttttaaaggcacattctgtatactgcttagtatatgcattttataccatgtaattataaaacactcgagtaagttcagcattagaaatgtttagctttgtatgaactgagtgtgccagaaataaacctggagcaatttttaaataagcaaaataaaggagatttttctatttgttcactttaatttattcacttttgtgtacttttatgtactgcaaatcagatttcagtctaaagcgaaacatcagtaagttaataataaacctatcttttgggaagttgaatattaatctgtacccaaaacgtatttagtaaaatatttgcccccgccaccctgccatgctgacataacaacttttataatgttgaatagatgatatgggaaatactaataacaacaatgtaatttttgcagacagctttaacttatatacattgcttgatttttttcaaaagactaaatatgtcatttatactttgtttattttctaccaaagaaggtttgtaaaaatatgcctgctgcttttccttttgaaggacacaaacctggtcccaacatgtgtggattttaactctgagtggggtgcattaaatcaaaagagagaggcagaagatgaaatgctaaagaagggtcaggcaaacttctgtttcagtataaaattcatcatgcaggcttctgagtgaaatagaatgatttgaaaccactactgtattgcctggatacacacacacacacacacacacactttatacaaaaatgttaaaagcaggtttcctggcatgttctaaactgttttttctttaggaataaattacatttatctgcacagatgttgaaaatcctgttaaacccttgtcaaggatttgtttattttacattaaacaaatttattatgatgaacgtgaacaaataaatt

SEQ ID NO: 315301 - DNA, 2460 bp, Artificial Sequence
  derived and/or modified sequence
aagccaagctagggcactctggtgtacagccagtccccgccgcggaggtgccggtggagcctgggaccgggcgagtctccgccccgcttttgcagctaggggtgtgtttcaggggggattggggcaagccaagcaggcgaggacccgggcctgtgccgctttgcctacccctcatccctcggcaccaaggctacttgagccccagggtgttttttccttgttcccgccacctcctggtccctggcccaacatgatactgaccaaagctcagtacgacgagatagcccagtgcctagtgtctgtgccgcctaccaggcagagcctgaggaagctgaagcagaggtttcccagtcaatcgcaggccactctgctgagcatcttctcccaggagtaccagaaacacattaaaagaacacatgccaaacatcatacttcggaagcaattgaaagttattaccagaggtacctgaatggagtggtgaaaaatggagctgccccagtgctcctggacctggccaatgaggtggactatgcgccctcattaatggctcggcttatactggagaggtttctacaggaacacgaggaaactccaccctccaagtctattataaatagtatgctacgggacccttctcagattccagatggagttctagcaaatcaggtctatcagtgcattgtgaacgactgctgttacggaccactagtggactgcatcaagcatgccattggtcatgagcatgaggtcctgctgagagacttgcttctagagaaaaacctgtccttcctagatgaagatcagcttcgtgcaaagggttatgacaaaacaccagacttcattttacaagtaccagttgctgtagaagggcacataattcactggattgaaagcaaagcctcatttggtgatgaatgtagccaccacgcctacctgcatgaccagttctggagctactggaatagatttgggccaggcttagtcatctattggtatggatttatccaggagctggactgcaaccgggaaaggggcatcctgctcaaagcctgtttccccacgaacattgtcaccttatgccacagcatagcttgaccctgaagatcctggaagagaagctgggaggaaaagagacccagcattgcattaccatcgtggaataatctagcgcaaacctaggaaagctgaagccacaaagtccaaagccacctttgtactcacctgcagagctccagaagaccttgatggcagcctgcctatgctgtgtgtttgctatattcaatctttacggcttcctgacttctgtgacagtaagccaagtgcaaaaatacacttgatgagaatttcctcttttaataatgttatttgaacaccacatattttagatttatcttatttgaaagtattagttccattgtgcctggaaaccacactcctttagattgggggccgagaggcgacaacccaacattgaggagagtttatttttaaacatggctagttgtcagtatgtacgtgagctagtatttttatgagtcgagttttttaaaggcacattctgtatactgcttagtatatgcattttataccatgtaattataaaacactcgagtaagttcagcattagaaatgtttagctttgtatgaactgagtgtgccagaaataaacctggagcaatttttaaataagcaaaataaaggagatttttctatttgttcactttaatttattcacttttgtgtacttttatgtactgcaaatcagatttcagtctaaagcgaaacatcagtaagttaataataaacctatcttttgggaagttgaatattaatctgtacccaaaacgtatttagtaaaatatttgcccccgccaccctgccatgctgacataacaacttttataatgttgaatagatgatatgggaaatactaataacaacaatgtaatttttgcagacagctttaacttatatacattgcttgatttttttcaaaagactaaatatgtcatttatactttgtttattttctaccaaagaaggtttgtaaaaatatgcctgctgcttttccttttgaaggacacaaacctggtcccaacatgtgtggattttaactctgagtggggtgcattaaatcaaaagagagaggcagaagatgaaatgctaaagaagggtcaggcaaacttctgtttcagtataaaattcatcatgcaggcttctgagtgaaatagaatgatttgaaaccactactgtattgcctggatacacacacacacacacacacacactttatacaaaaatgttaaaagcaggtttcctggcatgttctaaactgttttttctttaggaataaattacatttatctgcacagatgttgaaaatcctgttaaacccttgtcaaggatttgtttattttacattaaacaaatttattatgatgaacgtgaacaaataaatt

SEQ ID NO: 315302 - DNA, 2618 bp, Artificial Sequence
  derived and/or modified sequence
aagctcagctttctgtttagttgtgagattgcatactcaagaagaggaggaacataaaatacgtgatgtcttctcttaagtcaatcgcaggccactctgctgagcatcttctcccaggagtaccagaaacacattaaaagaacacatgccaaacatcatacttcggaagcaattgaaagttattaccagaggtacctgaatggagtggtgaaaaatggagctgccccagtgctcctggacctggccaatgaggtggactatgcgccctcattaatggctcggcttatactggagaggtttctacaggaacacgaggaaactccaccctccaagtctattataaatagtatgctacgggacccttctcagattccagatggagttctagcaaatcaggtctatcagtgcattgtgaacgactgctgttacggaccactagtggactgcatcaagcatgccattggtcatgagcatgaggtcctgctgagagacttgcttctagagaaaaacctgtccttcctagatgaagatcagcttcgtgcaaagggttatgacaaaacaccagacttcattttacaagtaccagttgctgtagaagggcacataattcactggattgaaagcaaagcctcatttggtgatgaatgtagccaccacgcctacctgcatgaccagttctggagctactggaatagatttgggccaggcttagtcatctattggtatggatttatccaggagctggactgcaaccgggaaaggggcatcctgctcaaagcctgtttccccacgaacattgtcaccttatgccacagcatagcttgaccctgaagatcctggaagagaagctgggaggaaaaggtgaatccggaagcaattttactttcctgcactgtaagatcctggcaacatctgccctgaacttcagctgaactcttgctgcccgtagtcacaccactacctctttagacaaacatatcaagagtttctgttttccttcatcccttgctgatgtgaacagccaagaactacagacacaacccactcattatcagcatttctgtctctgtcaaacaattagtttatagatagtcataatctttctttcttccggatggtttatccttgtatgctgaacaaaagaaaaaatgtgaagactgaaaggtgtgatttttcaattctcctcccagttaccgaatcaccctcttatttttttttccctaagcctccgttcactgtctctccctctccctttctcttcatgtgcactcacagagacccagcattgcattaccatcgtggaataatctagcgcaaacctaggaaagctgaagccacaaagtccaaagccacctttgtactcacctgcagagctccagaagaccttgatggcagcctgcctatgctgtgtgtttgctatattcaatctttacggcttcctgacttctgtgacagtaagccaagtgcaaaaatacacttgatgagaatttcctcttttaataatgttatttgaacaccacatattttagatttatcttatttgaaagtattagttccattgtgcctggaaaccacactcctttagattgggggccgagaggcgacaacccaacattgaggagagtttatttttaaacatggctagttgtcagtatgtacgtgagctagtatttttatgagtcgagttttttaaaggcacattctgtatactgcttagtatatgcattttataccatgtaattataaaacactcgagtaagttcagcattagaaatgtttagctttgtatgaactgagtgtgccagaaataaacctggagcaatttttaaataagcaaaataaaggagatttttctatttgttcactttaatttattcacttttgtgtacttttatgtactgcaaatcagatttcagtctaaagcgaaacatcagtaagttaataataaacctatcttttgggaagttgaatattaatctgtacccaaaacgtatttagtaaaatatttgcccccgccaccctgccatgctgacataacaacttttataatgttgaatagatgatatgggaaatactaataacaacaatgtaatttttgcagacagctttaacttatatacattgcttgatttttttcaaaagactaaatatgtcatttatactttgtttattttctaccaaagaaggtttgtaaaaatatgcctgctgcttttccttttgaaggacacaaacctggtcccaacatgtgtggattttaactctgagtggggtgcattaaatcaaaagagagaggcagaagatgaaatgctaaagaagggtcaggcaaacttctgtttcagtataaaattcatcatgcaggcttctgagtgaaatagaatgatttgaaaccactactgtattgcctggatacacacacacacacacacacacactttatacaaaaatgttaaaagcaggtttcctggcatgttctaaactgttttttctttaggaataaattacatttatctgcacagatgttgaaaatcctgttaaacccttgtcaaggatttgtttattttacattaaacaaatttattatgatgaacgtgaacaaataaattaaaaaataaaaaagg

SEQ ID NO: 315303 - DNA, 846 bp, Artificial Sequence
  derived and/or modified sequence
atgatcctgaccaaggcccagtacgacgagatcgcccagtgcctggtgagcgtgccccccaccagacagagcctgagaaagctgaagcagagattccccagccagagccaggccaccctgctgagcatcttcagccaggagtaccagaagcacatcaagagaacccacgccaagcaccacaccagcgaggccatcgagagctactaccagagatacctgaacggcgtggtgaagaacggcgccgcccccgtgctgctggacctggccaacgaggtggactacgcccccagcctgatggccagactgatcctggagagattcctgcaggagcacgaggagaccccccccagcaagagcatcatcaacagcatgctgagagaccccagccagatccccgacggcgtgctggccaaccaggtgtaccagtgcatcgtgaacgactgctgctacggccccctggtggactgcatcaagcacgccatcggccacgagcacgaggtgctgctgagagacctgctgctggagaagaacctgagcttcctggacgaggaccagctgagagccaagggctacgacaagacccccgacttcatcctgcaggtgcccgtggccgtggagggccacatcatccactggatcgagagcaaggccagcttcggcgacgagtgcagccaccacgcctacctgcacgaccagttctggagctactggaacagattcggccccggcctggtgatctactggtacggcttcatccaggagctggactgcaacagagagagaggcatcctgctgaaggcctgcttccccaccaacatcgtgaccctgtgccacagcatcgcctag

SEQ ID NO: 315304 - DNA, 846 bp, Artificial Sequence
  derived and/or modified sequence
atgattctgaccaaagctcaatatgacgagatcgcacagtgtctggtcagcgtaccacccacgagacagagcctacgcaaactcaaacagcgtttcccatcgcagagtcaagccaccctgctttctatcttcagtcaggaataccagaagcacattaaacggactcatgccaagcaccatacctctgaagcgatcgaatcttactaccaaaggtacctcaacggcgtggtaaagaacggcgcagcgccagtgctgctggaccttgcgaatgaagtcgattacgccccttccctcatggcccgcctaattttggaacgtttcctgcaagagcatgaagaaactccccccagcaaaagcatcatcaactcaatgttacgggatccttcccagatccccgacggtgtgctcgctaatcaggtatatcagtgcatcgtcaatgactgttgctacggaccactggtggattgcatcaagcacgctatcgggcacgaacacgaggttctactgcgggacttgctgcttgagaagaacctgagctttctggacgaagaccaactcagagctaaaggttatgacaaaactcctgattttatattgcaagtgcccgtagccgtggagggccatattattcactggatagagtccaaagcctcctttggggatgaatgcagtcatcacgcatacctgcatgaccagttttggtcgtactggaacaggttcggccctggcctcgttatttactggtacggcttcattcaggagctggattgtaacagggagcgtggcatactgctgaaagcttgctttcccactaatattgttactttatgccattcaattgcgtag

SEQ ID NO: 315305 - DNA, 846 bp, Artificial Sequence
  derived and/or modified sequence
atgatcctgaccaaggcccagtatgatgaaattgcccagtgcctggtgtctgtgccccccacccggcagagcctgaggaagctgaagcagcgcttccccagccagagccaggccaccctgctgagcatcttcagccaggagtaccagaagcacatcaagaggacccacgccaagcaccacaccagcgaggccatcgagagctactaccagcgctacctgaatggagtggtgaagaatggagctgcccctgtgctgctggacctggccaatgaggtggactatgcccccagcctgatggcccggctcatcctggagcgcttcctgcaggagcacgaggagaccccacccagcaagagcatcatcaacagcatgctgcgggaccccagccagatcccagatggagtgctggccaaccaggtgtaccagtgcatcgtgaatgactgctgctacggccccctggtggactgcatcaagcacgccatcggccatgaacatgaggtgctgctgcgggacctgctgctggagaagaacctgtccttcctggatgaggaccagctgcgggccaagggctatgacaagaccccagacttcatcctgcaggtgcctgtggccgtggagggccacatcatccactggattgagagcaaggccagctttggagatgagtgcagccaccacgcctacctgcatgaccagttctggagctactggaaccgcttcggccctggcctggtgatctactggtacggcttcatccaggagctggactgcaaccgggagcggggcatcctgctgaaggcctgcttccccaccaacatcgtgaccctgtgccacagcatcgcctag

SEQ ID NO: 315306 - DNA, 846 bp, Artificial Sequence
  derived and/or modified sequence
atgatcctgaccaaggcccagtacgacgagatcgcccagtgcctggtcagtgtgcctcccacacgccaatcgctcagaaaactgaagcaacgctttcccagccaaagccaggctactctgctgtcgattttctctcaggagtatcagaagcacatcaaacggacacacgcaaaacaccacacaagcgaggctatcgagagctattatcagcgttatttgaacggggtggtcaagaatggggccgcccctgttttgttggatctggcaaatgaagtagactacgccccaagcctgatggctcgactcatattagagcggtttctccaagaacatgaggagactccacctagcaagagcattattaactccatgctccgggatcctagtcagattcccgacggcgtgctcgctaaccaggtctatcaatgtattgtaaatgattgttgttacggtccgcttgtggactgcattaaacacgcaattgggcacgaacacgaggtcctgctgagagacctgctgcttgagaagaatctttcgtttctcgatgaggatcagctgcgcgcaaagggctatgacaagactcccgactttattctgcaagtccctgtggcagtcgaaggtcatataattcactggattgaaagcaaggcgtcattcggggatgaatgttctcaccatgcatacctccacgatcaattctggtcatactggaatcgattcgggcctggtttggtcatttactggtatgggtttatccaagagctggactgtaatcgagaacgcggcatcctccttaaggcctgcttccccaccaacatcgtgacgctatgtcattcaattgcatag

SEQ ID NO: 315307 - DNA, 846 bp, Artificial Sequence
  derived and/or modified sequence
atgatactcacaaaagcccaatatgacgaaatcgctcagtgcctggtctctgtgcctcccacccgtcagagtctgcggaaactgaaacaacgcttcccttcgcagtcacaggcgacacttctgagcatattttctcaagagtaccaaaagcacatcaagaggacacacgcaaaacatcatacttctgaggctatagaatcatactaccagcgctacttaaatggggtggtgaagaacggtgccgcacccgtgctcctcgacttggcaaacgaggtcgattacgccccttctctgatggcaaggctgatcctggaacggttcttgcaggaacatgaagagacacccccttcgaaatcaattattaatagtatgctccgggacccctcacagatccctgacggggtattagcaaatcaggtttaccaatgcattgttaacgattgctgctacggccctctggttgattgcatcaagcatgcaatcggacatgagcatgaagtgctcctgcgagatctccttctagaaaaaaatctgtctttccttgacgaggatcagctccgagctaaaggttatgataagacgccagacttcatcctgcaggtcccagttgcggttgaaggccatatcatccactggatagagagcaaagcctcttttggtgacgagtgttcacaccatgcctaccttcatgaccagttttggtcctactggaacaggtttggtcctggtttggtgatctactggtacggctttatccaggagctggattgtaatagagaacggggtatcctacttaaagcgtgttttcccaccaacatcgtgacgctgtgtcactctattgcctag

SEQ ID NO: 315308 - DNA, 552 bp, Artificial Sequence
  derived and/or modified sequence
atggccagactgatcctggagagattcctgcaggagcacgaggagaccccccccagcaagagcatcatcaacagcatgctgagagaccccagccagatccccgacggcgtgctggccaaccaggtgtaccagtgcatcgtgaacgactgctgctacggccccctggtggactgcatcaagcacgccatcggccacgagcacgaggtgctgctgagagacctgctgctggagaagaacctgagcttcctggacgaggaccagctgagagccaagggctacgacaagacccccgacttcatcctgcaggtgcccgtggccgtggagggccacatcatccactggatcgagagcaaggccagcttcggcgacgagtgcagccaccacgcctacctgcacgaccagttctggagctactggaacagattcggccccggcctggtgatctactggtacggcttcatccaggagctggactgcaacagagagagaggcatcctgctgaaggcctgcttccccaccaacatcgtgaccctgtgccacagcatcgcctag

SEQ ID NO: 315309 - DNA, 552 bp, Artificial Sequence
  derived and/or modified sequence
atggccaggctcatactggaaaggttcttgcaagagcatgaagaaacacccccttctaagagcattataaattccatgctgagggacccaagccagatccctgacggagtgctcgcaaatcaggtgtaccaatgcatcgtcaatgactgttgctatggccccctagtggattgcattaagcatgcgatagggcacgagcatgaggtgctcctgcgagatctgctgctcgaaaaaaatcttagctttctcgacgaggatcagttgcgggccaagggatatgacaaaaccccagacttcatcttgcaggtgccggtggctgtggagggacacatcatccactggatcgaaagcaaagcctcttttggtgacgagtgctctcatcacgcctacctgcacgatcagttctggagctattggaataggttcgggccaggcctcgtaatttactggtacgggttcatccaagagctagattgtaacagggagagaggaatcctgctgaaggcatgtttccctaccaacatcgtcaccctgtgccactctattgcatag

SEQ ID NO: 315310 - DNA, 552 bp, Artificial Sequence
  derived and/or modified sequence
atggcccgactgatcttagagcggtttctgcaggaacacgaggaaactccaccaagcaagtctatcattaactctatgctcagagacccatcccagatccctgatggagtactggccaatcaggtgtaccagtgcattgtcaacgactgctgttatggacctttagtggattgcattaaacatgccatcgggcatgagcatgaggtacttctgcgtgaccttctgctggaaaagaacctgtcgttcttagacgaggatcaactgcgcgccaagggctacgataagacccctgatttcatcctgcaggtccccgtggcggtcgagggacacattatacattggattgagtccaaggcgtcgtttggggatgagtgcagtcatcacgcctatctccatgaccaattttggtcttactggaacagattcggccctggcctggttatctattggtatggattcatccaggagctcgactgtaatcgcgaaagaggcatactgttaaaggcgtgttttccaactaatattgtgactctgtgtcacagtatagcgtag

SEQ ID NO: 315311 - DNA, 552 bp, Artificial Sequence
  derived and/or modified sequence
atggcccggctcatcctggagcgcttcctgcaggagcacgaggagaccccacccagcaagagcatcatcaacagcatgctgcgggaccccagccagatcccagatggagtgctggccaaccaggtgtaccagtgcatcgtgaatgactgctgctacggccccctggtggactgcatcaagcacgccatcggccatgaacatgaggtgctgctgcgggacctgctgctggagaagaacctgtccttcctggatgaggaccagctgcgggccaagggctatgacaagaccccagacttcatcctgcaggtgcctgtggccgtggagggccacatcatccactggattgagagcaaggccagctttggagatgagtgcagccaccacgcctacctgcatgaccagttctggagctactggaaccgcttcggccctggcctggtgatctactggtacggcttcatccaggagctggactgcaaccgggagcggggcatcctgctgaaggcctgcttccccaccaacatcgtgaccctgtgccacagcatcgcctag

SEQ ID NO: 315312 - DNA, 552 bp, Artificial Sequence
  derived and/or modified sequence
atggcccggctgatcctggagcggttcctgcaggagcacgaggagacccccccttcgaaatccatcattaacagtatgctgcgcgacccctctcagatccctgacggcgtgctggccaatcaggtctaccagtgtattgtgaatgattgctgctacgggccactagtcgactgtatcaaacacgctattggccacgagcatgaggtcttgcttcgggacctgcttcttgagaagaatctttcattccttgatgaagaccagctgagagctaaggggtatgacaagacaccagatttcattctgcaggtacccgtcgctgtagaggggcacattattcactggatcgagtctaaggcctcctttggggacgagtgtagccatcacgcttatcttcacgatcagttttggagctattggaataggtttggtccgggtctggtcatctactggtacggattcattcaggagcttgactgcaatcgcgagcggggcatactgctaaaggcttgcttcccgactaacattgtaactctatgtcattccatcgcctag

SEQ ID NO: 315313 - DNA, 552 bp, Artificial Sequence
  derived and/or modified sequence
atggcccggctgatcctggagcggttcctgcaggagcacgaggagacgcctccaagcaagtcaatcataaattcaatgcttagagatccttcacagattcctgatggagtgcttgctaaccaggtgtaccaatgtattgtgaacgactgttgctacggcccacttgtcgactgtattaaacacgcaattggccacgagcatgaggtgctgcttagagacctgctgctggaaaagaacctctcttttctcgacgaagatcaacttcgtgctaagggatacgacaagacacccgatttcatcctgcaagtgccagtagcagtggagggacatataattcattggatcgagtccaaagcgtctttcggcgatgagtgttctcaccacgcctacctgcatgatcagttctggagttattggaatcgctttggacctgggctcgtgatctactggtatgggttcatacaggaactcgactgtaacagggaaagagggattctgcttaaggcatgctttcccactaatatagtcaccctctgccactcaattgcatag

SEQ ID NO: 315314 - DNA, 552 bp, Artificial Sequence
  derived and/or modified sequence
atggccagactaatccttgagcgtttccttcaggaacatgaggaaaccccaccctcaaagtccataatcaattcgatgctccgggacccaagccagatcccggatggggtgctggccaaccaggtgtaccagtgtatcgtgaacgactgctgttacggacccctcgtagactgtatcaaacacgcaatcggccacgagcacgaggtcctgctgagggacctcctattggagaaaaacctcagcttcctggatgaagatcagctgagggccaaagggtatgataaaacccccgacttcattctgcaagtgcctgtcgccgttgagggccacattatccattggatcgagtctaaagcctcattcggcgatgaatgcagccatcacgcttacctgcacgaccagttctggagttactggaatagattcggaccaggccttgttatatattggtacggcttcattcaggagttggattgcaatagggagcgaggcattctgctcaaagcttgcttcccaaccaacattgtcactttatgccactccatcgcctag

SEQ ID NO: 315315 - DNA, 552 bp, Artificial Sequence
  derived and/or modified sequence
atggccagactgatcctcgagaggttcctgcaggaacacgaggaaacccccccttctaagagcattataaattctatgttgagagatccctcccaaattccagacggggtgcttgcgaaccaagtgtaccagtgtatcgtcaatgactgctgctacggacccctcgtcgattgtatcaagcacgccattggccacgagcacgaagtgctgctgagagatctgctgctggaaaaaaatttaagcttcctggacgaagaccagctgagagccaagggctatgacaaaacgcccgacttcattctgcaggtccctgtcgccgtagagggtcatatcattcactggatcgaatctaaagcatcattcggcgatgaatgctcccatcacgcttacctccacgatcagttctggtcttactggaatcgtttcggtccaggtcttgtgatctattggtatggctttattcaggagctggactgtaaccgagagcggggaattctgctgaaggcatgttttccgactaacatcgtgacattgtgtcactcgatcgcttag

SEQ ID NO: 315316 - DNA, 2319 bp, Artificial Sequence
  derived and/or modified sequence
agaactgaacgcgcagcccatgcggagtggcctattgaaggaagcccagtcctctgggttttagagatttaggccccctcccgccttttgatccccaaattttattgtgttgggcggttctaggggacgtgaggtaaagatttagcaacaagtcccagcgatttggggcttggaagtggccaggaagaatcggcgacttaggaaaaacgccaacaatacggagtttcagaatcatctgtaagaggcctggaatccagaggcacccaagggaattagcaacaagaaatacataagagatgccaaaggccagtacctgtttgaccttctttgccaccatctgaacctacttgagaaagactattttggtatccgctttgtagacccagataagcagcggcattggctggaatttacaaagtctgtggtgaaacaattgagatcccagcctccattcaccatgtgcttccgtgtgaagttttatcctgcagaccctgctgctctgaaagaagaaataaccaggtatttagtcttcctgcagatcaaaagggatctctaccatggccgactcctctgtaaaacatcggatgctgccttgttagcagcttacatccttcaagcggagattggggattatgactcagggaaacaccctgaaggctacagctccaagttccagtttttccctaaacattcagagaagctggaaaggaaaattgctgagattcacaagacggaactgagtggtcaaacaccagcaacatcagagctgaacttcttaagaaaagcacagacattggaaacatatggagtggatcctcacccatgtaaggacgtgtcaggaaatgctgcatttctggccttcactccttttgggtttgttgttcttcaaggaaacaagagggtccacttcattaaatggaatgaggtgaccaagctgaaatttgaaggaaagactttctatttatacgaaaagaaaattattcttacatattttgctccaactcctgaagcgtgtaagcacctctggaaatgtggaatcgagaaccaagccttctacaagctggagaagtcaagccaagtccgcacagtgtccagcagcaatttattctttaaagggagccggttccgatacagtggccgagttgcaaaggaagtcatggaatcaagtgctaagatcaaacgggagccaccggaaatacacagagcagggatggttcccagccggagctgtccctccataacccatggcccaaggctgagcagcgtccccaggacccgcagaagagctgttcacatctccatcatggaaggcctagagtccttacgggacagtgcccattccacaccagtgcgttccacttcccatggggacaccttcctgcctcacgtgagaagcagccggacagatagcaatgagcgagtagctgtgattgcagacgaggcctacagccctgcagacagcgtgctgcccacccctgtggctgagcacagcctggagctgatgttgctttcccggcagatcaatggagccacctgcagcattgaggaggagaaggaatctgaagccagcaccccaactgctacagaggtggaggcccttgggggagagctgagggccctgtgtcaggggcacagcgggcccgaggaggaacaggcgatggtttgcctgcaaaatccgctcagtggtgagcctgctcattgacacctgagaaggcatgactcctcccaaaaactagccaggtggaccaaggaacccggctacccattcccagcaatgggacccatcgcggaaccatcggcacatataccaagtcctcctctcatgactcaaagtccactgcagcctaggagggtgtttcccagaagaagaaagggataggctcatgccctgtctaaacaaactgggaaaactcattttcttcagaagttatttcaagaaaggctcagcgactctgtttctcatctttccaatttgcaggataatttttggttttgaattttgatttttcatagatgtatattattttgaagtatcaaataaaaataatttattttactattactgattattgcagtagtatcacctagcagaggggacactagttgaaaactagagagctgctgtcctctgtattctgcaggagcttttcctgctggtgccactgggttccagtagactcatcactgcagcctcagcagggcaggccagggatctggacaatggggactgtttagttttttgtttgttttttttgccagccagaacttttaaaaaagtaaacatccatgtagaatgattaaatggaaagttgcttctta

SEQ ID NO: 315317 - protein, 138 aa, Artificial Sequence
  derived and/or modified sequence
MGVSNQGCSRNARHQKARSMPLQDQHLALAILLELAVQRGTLSQMLSAILLLLQLWDSRAQETDNERSAQGTSTLLLSLLQTFQSIICGKDTPPSEGNMHLLSGPLSPSESFLRYLTLHKTTSLPLICNKRQLLSWPI

SEQ ID NO: 315318 - DNA, 417 bp, Artificial Sequence
  derived and/or modified sequence
atgggcgtgagcaaccagggctgcagcagaaacgccagacaccagaaggccagaagcatgcccctgcaggaccagcacctggccctggccatcctgctggagctggccgtgcagagaggcaccctgagccagatgctgagcgccatcctgctgctgctgcagctgtgggacagcagagcccaggagaccgacaacgagagaagcgcccagggcaccagcaccctgctgctgagcctgctgcagaccttccagagcatcatctgcggcaaggacaccccccccagcgagggcaacatgcacctgctgagcggccccctgagccccagcgagagcttcctgagatacctgaccctgcacaagaccaccagcctgcccctgatctgcaacaagagacagctgctgagctggcccatctag

SEQ ID NO: 315319 - DNA, 417 bp, Artificial Sequence
  derived and/or modified sequence
atgggtgtgtccaaccaggggtgttcacggaatgcccgccaccagaaagcacgctcaatgccactgcaggaccagcatcttgcactcgccatcctcttagaattagccgtacaacgagggacactcagtcaaatgctcagcgccattctgctgctcttacagctgtgggatagtcgtgcacaggaaacggataatgaacgctctgcccagggaaccagtacactgctgctcagtctcttgcagactttccaaagtataatttgtggaaaggacacaccgcctagcgagggaaacatgcacctattatccgggcctttatcaccaagcgagagcttcttgcggtatctaactctgcacaagaccacgtccttacctttgatttgtaacaagcgccagcttctatcttggccaatctag

SEQ ID NO: 315320 - DNA, 417 bp, Artificial Sequence
  derived and/or modified sequence
atgggcgtgagcaaccagggctgcagcagaaatgcccggcaccagaaggcccgctccatgcccctgcaggaccagcacctggccctggccatcctgctggagctggccgtgcagaggggcaccctgagccagatgctgagcgccatcctgctgctgctgcagctgtgggacagccgggcccaggagacagacaatgaaagaagtgcccagggcaccagcaccctgctgctgagcctgctgcagaccttccagagcatcatctgtgggaaggacaccccaccttctgagggcaacatgcacctgctgagcggccccctgagccccagcgagagcttcctgcgctacctgaccctgcacaagaccaccagcctgcccctcatctgcaacaagaggcagctgctgtcctggcccatctag

SEQ ID NO: 315321 - DNA, 417 bp, Artificial Sequence
  derived and/or modified sequence
atgggcgtgagcaaccagggctgcagccggaacgcccggcaccagaaggcacgaagtatgcccttgcaagaccagcatctggcactagctatcctgctggaattggctgtgcagaggggaacactctcacagatgctcagcgctattctcctgctcctccagctttgggattctcgggcccaggagacagataacgaacggtccgcacagggcacatcaaccctgctcctgagccttctgcagacgttccagagtatcatctgcggaaaagacacccctccttccgagggtaatatgcacttactgtccggccctttgtcacctagcgagtcatttctgcggtacctgactttacataagaccacatccctgcctctgatttgtaacaagcgacagctactttcctggcccatctag

SEQ ID NO: 315322 - DNA, 417 bp, Artificial Sequence
  derived and/or modified sequence
atgggtgtgtccaatcagggctgtagccgcaacgctcgccaccaaaaggcaaggtccatgcctttgcaggatcagcacttggccttggccatcctactcgagttagccgtgcagcgcggtactctctcccagatgctgtcggctatcttgctccttctgcagctgtgggactcaagagcccaggagactgataatgaaagatctgctcaggggactagtacattgcttctttcactcctccagacgttccagtctattatttgtgggaaagatacgcctcctagcgaaggtaacatgcatttactatccggccctttgagcccaagtgaatcgttcctgagatatcttacccttcataagacaacatcactgcccctaatttgcaacaaaagacagctgctttcttggcctatttag

SEQ ID NO: 315323 - DNA, 462 bp, Artificial Sequence
  derived and/or modified sequence
atggccaccatgatcccccccgtgaagctgaagtggctggagcacctgaacagcagctggatcaccgaggacagcgagagcatcgccaccagagagggcgtggccgtgctgtacagcaagctggtgagcaacaaggaggtggtgcccctgccccagcaggtgctgtgcctgaagggcccccagctgcccgacttcgagagagagagcctgagcagcgacgagcaggaccactacctggacgccctgctgagcagccagctggccctggccaagatggtgtgcagcgacagccccttcgccggcgccctgagaaagagactgctggtgctgcagagagtgttctacgccctgagcaacaagtaccacgacaagggcaaggtgaagcagcagcagcacagccccgagagcagcagcggcagcgccgacgtgcacagcgtgagcgagagacccagaagcagctag

SEQ ID NO: 315324 - DNA, 438 bp, Artificial Sequence
  derived and/or modified sequence
atggccaccatgatcccccccgtgaagctgaagtggctggagcacctgaacagcagctggatcaccgaggacagcgagagcatcgccaccagagagggcgtggccgtgctgtacagcaagctggtgagcaacaaggaggtggtgcccctgccccagcaggtgctgtgcctgaagggcccccagctgcccgacttcgagagagagagcctgagcagcgacgagcaggaccactacctggacgccctgctgagcagccagctggccctggccaagatggtgtgcagcgacagccccttcgccggcgccctgagaaagagactgctggtgctgcagagagtgttctacgccctgagcaacaagtaccacgacaagggcaaggtgaagcagcagcagcacagccccgagagcagcagcggcagcgccgacgtgcacagctag

SEQ ID NO: 315325 - DNA, 462 bp, Artificial Sequence
  derived and/or modified sequence
atggctacgatgattccccccgtcaagttgaagtggctcgagcatctgaattcctcctggatcactgaggacagcgaaagtattgctacgcgggagggcgtggcagttctatactccaaactagtaagtaacaaggaggtggtccctttaccccagcaagtcctgtgcttaaagggtcctcagctacctgatttcgagagagagtcactgtcatccgatgaacaagaccattatttagatgcactcctctctagtcagctagctctggctaagatggtgtgctctgacagccccttcgccggggctcttaggaagagactcctggtcttgcagcgggtgttttacgccttgagtaacaagtaccatgataagggtaaagtcaagcagcagcaacattcacctgagtcgtcctccgggtctgctgacgtgcattctgtttctgaacgaccccgctctagttag

SEQ ID NO: 315326 - DNA, 438 bp, Artificial Sequence
  derived and/or modified sequence
atggcaactatgatcccacctgtcaagcttaaatggctcgagcatctcaatagcagttggattaccgaggattccgagtctattgccacgagggagggcgttgctgtgttgtattccaaactcgtgtccaacaaagaagtggtacctctcccacaacaggtcctgtgcctgaaaggcccccaactgcccgacttcgagagagaatctctttcatccgacgaacaagatcactatctggatgcactcttgtcgtcccagctggccctggccaagatggtgtgttccgattccccctttgcaggcgcactgagaaagcggctcctggtcctgcagcgcgtgttctatgctctgtccaataaataccacgacaagggtaaagtgaagcaacagcaacattctccagaatccagctctggttcagctgatgtgcattcttag

SEQ ID NO: 315327 - DNA, 462 bp, Artificial Sequence
  derived and/or modified sequence
atggccaccatgatcccccctgtgaagctgaagtggctggagcacctgaacagctcctggatcacagaagattctgagagcatcgccacccgggagggcgtggccgtgctgtacagcaagctggtgagcaacaaggaggtggtgcccctgccccagcaggtgctgtgcctgaagggcccccagctgcctgactttgagcgggagagcctgagcagtgatgagcaggaccactacctggatgccctgctgagcagccagctggccctggccaagatggtgtgcagcgacagcccctttgctggggccctgaggaagaggctgctggtgctgcagagggtcttctacgccctgagcaacaagtaccatgacaagggcaaggtgaagcagcagcagcacagccctgagagcagcagcggcagcgcagatgtgcacagcgtgtctgagcggcccaggagcagctag

SEQ ID NO: 315328 - DNA, 438 bp, Artificial Sequence
  derived and/or modified sequence
atggccaccatgatcccccctgtgaagctgaagtggctggagcacctgaacagctcctggatcacagaagattctgagagcatcgccacccgggagggcgtggccgtgctgtacagcaagctggtgagcaacaaggaggtggtgcccctgccccagcaggtgctgtgcctgaagggcccccagctgcctgactttgagcgggagagcctgagcagtgatgagcaggaccactacctggatgccctgctgagcagccagctggccctggccaagatggtgtgcagcgacagcccctttgctggggccctgaggaagaggctgctggtgctgcagagggtcttctacgccctgagcaacaagtaccatgacaagggcaaggtgaagcagcagcagcacagccctgagagcagcagcggcagcgcagatgtgcacagctag

SEQ ID NO: 315329 - DNA, 462 bp, Artificial Sequence
  derived and/or modified sequence
atggccaccatgatcccccccgtgaagctgaagtggctggagcacctcaattcatcttggattacagaggattctgagagcattgccaccagagagggcgtcgctgtgctttacagcaagttggtgtctaacaaggaggtggtgcctctcccccagcaggtgctttgtctgaaaggccctcagctacctgattttgaacgcgagtctctgtctagcgatgagcaagaccactatttggacgccctgctctctagtcaactagccctcgccaagatggtgtgttcagacagcccctttgctggtgccctgcggaaaagacttctcgttttgcagcgggtgttttacgctctgtccaataaatatcatgacaaggggaaggtgaagcagcagcaacattcccccgagtcttcgtctgggagcgcagacgtgcatagtgttagcgagcgacctaggtcaagctag

SEQ ID NO: 315330 - DNA, 438 bp, Artificial Sequence
  derived and/or modified sequence
atggccaccatgatcccccccgtgaagctgaagtggctggagcacttgaacagttcctggattaccgaggactccgagtcgattgctacaagggagggcgtggccgtgctgtactcaaagttagtgtctaacaaagaagtggttcccctcccccaacaagtactctgcctcaaagggccacaactacctgatttcgaacgagagtccttgtcttctgatgaacaggatcactacctggatgctctgttgtcaagtcagcttgcacttgccaagatggtgtgtagcgatagcccttttgcaggtgccctgagaaaacggctcctcgttctgcaacgtgtattctatgctttgtctaacaaataccatgacaagggaaaggtgaagcaacagcagcattctcccgaaagctctagtggatccgccgatgtgcacagttag

SEQ ID NO: 315331 - DNA, 462 bp, Artificial Sequence
  derived and/or modified sequence
atggcaaccatgattcccccagtcaaactgaagtggctagagcatctcaatagctcgtggattactgaggacagtgagtccattgctaccagagaaggagtggccgtgttgtacagcaagctggtgtccaacaaggaggtagtcccactgccgcagcaggtactgtgtctgaaaggcccacaactgccagatttcgaacgagaatcacttagcagtgatgagcaggatcattacctcgacgccctcctttctagccagctggccttggctaaaatggtctgctctgactccccctttgccggtgctcttcgcaaaagactgctggtgctgcaaagggtcttctacgccctgtctaataaatatcacgataagggaaaggtcaagcagcagcagcactcacctgagtccagcagcggcagtgccgatgtgcactctgtttccgaacggccacgctcttcatag

SEQ ID NO: 315332 - DNA, 438 bp, Artificial Sequence
  derived and/or modified sequence
atggcaactatgatccccccagtgaagctgaagtggctggagcatctgaatagttcttggatcactgaggatagcgagtcaattgcaacgcgtgagggtgtagccgttctctattctaaactggttagtaacaaagaggtcgttcctctcccacagcaggttctatgtttaaaggggccacagctacctgatttcgagcgagaaagcttatcttccgacgagcaggaccattatttggatgctctgctgtcaagtcaactggccttggctaaaatggtgtgctcggattcacccttcgccggtgcgctgcgcaagcgcttgctggtgctgcaacgagtcttctatgcactgtctaacaaatatcatgacaagggtaaagtgaaacaacagcaacacagccccgagagttcctcaggctctgctgatgtgcacagctag

SEQ ID NO: 315333 - DNA, 581 bp, Artificial Sequence
  derived and/or modified sequence
agcaaaaataaaggacgcgaccgccgcagcctctgcggagccgggctcgggtcgccggagccgcgccccaccccgccagctccagagccacgtacggactaatggctgaaggataaatcaacatggcaactatgattccaccagtgaagctgaaatggcttgaacacttgaacagctcctggattacagaggacagtgaatctattgctacaagagagggagttgctgttctgtattctaaactggttagcaataaggaagtagtacctttgccccaacaagttttatgcctcaaaggaccacagttgccagactttgaacgtgagtctctttcaagtgatgagcaggaccactatttggatgcccttcttagcagccagctagcattggcaaagatggtatgttcagattccccatttgccggggcacttagaaaacgactgcttgtactccagcgtgtcttttatgcactttctaataaataccatgacaaaggcaaggtgaagcagcagcagcattctccggagagcagttctggttcagcagatgtccattctgttagtgaacgcccccggtcaagc

SEQ ID NO: 315334 - DNA, 647 bp, Artificial Sequence
  derived and/or modified sequence
caaaaataaaggacgcgaccgccgcagcctctgcggagccgggctcgggtcgccggagccgcgccccaccccgccagctccagagccacgtacgaaatggggtttcaccgtgttagccaggatggtctcaatctcctgacctcgtgatccgcccacctcggcctcccaaagtactgggattacaggactaatggctgaaggataaatcaacatggcaactatgattccaccagtgaagctgaaatggcttgaacacttgaacagctcctggattacagaggacagtgaatctattgctacaagagagggagttgctgttctgtattctaaactggttagcaataaggaagtagtacctttgccccaacaagttttatgcctcaaaggaccacagttgccagactttgaacgtgagtctctttcaagtgatgagcaggaccactatttggatgcccttcttagcagccagctagcattggcaaagatggtatgttcagattccccatttgccggggcacttagaaaacgactgcttgtactccagcgtgtcttttatgcactttctaataaataccatgacaaaggcaaggtgaagcagcagcagcattctccggagagcagttctggttcagcagatgtccattctg

SEQ ID NO: 315335 - DNA, 63 bp, Artificial Sequence
  derived and/or modified sequence
atggccaccatgatcccccccgtgaagctgaagtggctggagcacctgaacagcagctggtag

SEQ ID NO: 315336 - DNA, 63 bp, Artificial Sequence
  derived and/or modified sequence
atggcgacaatgatccctcccgtgaaactgaaatggctcgagcatctgaattccagttggtag

SEQ ID NO: 315337 - DNA, 63 bp, Artificial Sequence
  derived and/or modified sequence
atggccaccatgatcccccctgtgaagctgaagtggctggagcacctgaacagctcctggtag

SEQ ID NO: 315338 - DNA, 63 bp, Artificial Sequence
  derived and/or modified sequence
atggccaccatgatcccccccgtgaagctgaagtggctggagcaccttaattcttcttggtag

SEQ ID NO: 315339 - DNA, 63 bp, Artificial Sequence
  derived and/or modified sequence
atggctacaatgattccaccagtgaaattaaaatggctcgagcacctaaatagttcttggtag

SEQ ID NO: 315340 - DNA, 2103 bp, Artificial Sequence
  derived and/or modified sequence
atggccaccatgatcccccccgtgaagctgaagtggctggagcacctgaacagcagctggatcaccgaggacagcgagagcatcgccaccagagagggcgtggccgtgctgtacagcaagctggtgagcaacaaggaggtggtgcccctgccccagcaggtgctgtgcctgaagggcccccagctgcccgacttcgagagagagagcctgagcagcgacgagcaggaccactacctggacgccctgctgagcagccagctggccctggccaagatggtgtgcagcgacagccccttcgccggcgccctgagaaagagactgctggtgctgcagagagtgttctacgccctgagcaacaagtaccacgacaagggcaaggtgaagcagcagcagcacagccccgagagcagcagcggcagcgccgacgtgcacagcgtgagcgagagacccagaagcagcaccgacgccctgatcgagatgggcgtgagaaccggcctgagcctgctgttcgccctgctgagacagagctggatgatgcccgtgagcggccccggcctgagcctgtgcaacgacgtgatccacaccgccatcgaggtggtgagcagcctgccccccctgagcctggccaacgagagcaagatcccccccatgggcctggactgcctgagccaggtgaccaccttcctgaagggcgtgaccatccccaacagcggcgccgacaccctgggcagaagactggccagcgagctgctgctgggcctggccgcccagagaggcagcctgagatacctgctggagtggatcgagatggccctgggcgccagcgccgtggtgcacaccatggagaagggcaagctgctgagcagccaggagggcatgatcagcttcgactgcttcatgaccatcctgatgcagatgagaagaagcctgatcagcgagaaccaggacagcgccgacgtggacccccaggagcacagcttcaccagaaccatcgacgaggaggccgagatggaggagcaggccgagagagacagagaggagggccaccccgagcccgaggacgaggaggaggagagagagcacgaggtgatgaccgccggcaagatcttccagtgcttcctgagcgccagagaggtggccagaagcagagacagagacagaatgaacagcggcgccggcagcggcgccagagccgacgacccccccccccagagccagcaggagagaagagtgagcaccgacctgcccgagggccaggacgtgtacaccgccgcctgcaacagcgtgatccacagatgcgccctgctgatcctgggcgtgagccccgtgatcgacgagctgcagaagagaagagaggagggccagctgcagcagcccagcaccagcgccagcgagggcggcggcctgatgaccagaagcgagagcctgaccgccgagagcagactggtgcacaccagccccaactacagactgatcaagagcagaagcgagagcgacctgagccagcccgagagcgacgaggagggctacgccctgagcggcagaagaaacgtggacctggacctggccgccagccacagaaagagaggccccatgcacagccagctggagagcctgagcgacagctgggccagactgaagcacagcagagactggctgtgcaacagcagctacagcttcgagagcgacttcgacctgaccaagagcctgggcgtgcacaccctgatcgagaacgtggtgagcttcgtgagcggcgacgtgggcaacgcccccggcttcaaggagcccgaggagagcatgagcaccagcccccaggccagcatcatcgccatggagcagcagcagctgagagccgagctgagactggaggccctgcaccagatcctggtgctgctgagcggcatggaggagaagggcagcatcagcctggccggcagcagactgagcagcggcttccagagcagcaccctgctgaccagcgtgagactgcagttcctggccggctgcttcggcctgggcaccgtgggccacaccggcggcaagggcgagagcggcagactgcaccactaccaggacggcatcagagccgccagaggctactag

SEQ ID NO: 315341 - DNA, 2103 bp, Artificial Sequence
  derived and/or modified sequence
atggcaacaatgataccacccgttaagctgaaatggctggaacatctaaactctagttggatcaccgaagactcggaatcaattgccaccagagagggcgtagctgtgctgtattctaagttggtaagcaataaggaggtcgttccgttgccccagcaggtcctgtgcctgaagggccctcaactgccggacttcgaaagagaatccctgtcctcagatgaacaagatcattaccttgacgctttactttcgtctcagctcgctctggcgaaaatggtgtgttctgattcacctttcgctggggcactccggaagagactattggttctccagcgagtgttctacgctctatctaacaagtatcatgataaaggaaaggtaaagcagcagcagcatagtcccgaatcgtcatctggcagtgcagatgtgcacagtgtctccgagcggccccgatccagtacggacgctctgatcgaaatgggagtaaggactggcctatccctattattcgcgctcctcagacagtcatggatgatgcccgtgtccggacccggactctccttgtgcaacgacgtgattcacacagccatagaggtagtgagttcgctgccacccctgtccctggctaatgaatcgaaaattccgcctatggggctggattgtctgtcacaggtgaccactttcctcaagggagttacaatccctaactcaggggcagataccttaggtcggcggctcgccagcgagctgctactggggttggccgcccaacgcggatcactccgctatcttctggaatggattgagatggccctgggagcctcggccgttgtccacaccatggaaaaaggcaagcttctttcatcacaagagggtatgatttcttttgactgttttatgaccatcctgatgcagatgcggcgatccctgatcagcgaaaatcaggacagcgccgacgtcgatccccaggaacactcattcacacgcactatcgacgaagaggcggaaatggaggagcaggctgagcgtgacagggaggagggacacccagaacccgaagacgaggaagaggagagagagcacgaagtaatgaccgctggcaaaatctttcagtgcttcttgtccgcccgagaagtcgccagatcacgagaccgcgatcggatgaattctggggctggaagtggcgccagggcagatgaccctcccccacagagtcagcaggaaaggagagtctccacagatttgcctgaaggccaggacgtgtacactgcagcctgtaacagtgtgatacatcggtgcgctctgctaattttaggtgtgagccccgtgattgatgaactccagaagaggcgcgaggagggtcagctacagcagccatccaccagtgcctcagaaggcggaggccttatgacccgttcggaatcactaaccgctgagagcagactggtacatacctcaccgaactataggctcattaagagcaggtctgaatcggacctgagccagcccgagagcgacgaagaggggtacgccttgtctggacgccgcaatgtggatttggatttggctgcttcccataggaagagaggccccatgcacagtcagcttgagagcctgagcgattcatgggcgcggctgaagcactcccgtgactggctttgtaatagtagctatagtttcgagagtgacttcgacctgaccaagagtctcggcgtgcatactctaatcgaaaatgtggtgagctttgtgagcggggacgtaggcaatgccccagggtttaaagagcccgaggaatcgatgtccacgtcaccccaagccagtatcatcgcgatggagcagcaacagctgcgcgccgaattgagactagaggctctccatcagattttggtcctcttgagtggaatggaagaaaaaggcagcataagcctagccggcagcaggctaagctctggctttcaaagttcaacactcctgacttcagtcagactacagtttcttgcgggttgtttcggcctgggcacagtgggccacacaggaggaaagggtgagtccggcaggcttcatcattaccaggacgggattcgcgccgcaagagggtattag

SEQ ID NO: 315342 - DNA, 2103 bp, Artificial Sequence
  derived and/or modified sequence
atggccaccatgatcccccctgtgaagctgaagtggctggagcacctgaacagctcctggatcacagaagattctgagagcatcgccacccgggagggcgtggccgtgctgtacagcaagctggtgagcaacaaggaggtggtgcccctgccccagcaggtgctgtgcctgaagggcccccagctgcctgactttgagcgggagagcctgagcagtgatgagcaggaccactacctggatgccctgctgagcagccagctggccctggccaagatggtgtgcagcgacagcccctttgctggggccctgaggaagaggctgctggtgctgcagagggtcttctacgccctgagcaacaagtaccatgacaagggcaaggtgaagcagcagcagcacagccctgagagcagcagcggcagcgcagatgtgcacagcgtgtctgagcggcccaggagcagcacagatgccctgattgagatgggcgtgaggacaggcctgagcctgctgtttgccctgctgcggcagagctggatgatgcctgtgtctggccctggcctgagcctgtgcaatgatgtgatccacacagccatcgaggtggtgagcagcctgccccccctgagcctggccaatgaaagcaagatcccccccatgggcctggactgcctgagccaggtgaccaccttcctgaagggcgtgaccatccccaacagcggggctgacaccctgggccggcggctggccagcgagctgctgctgggcctggccgcccagaggggcagcctgcgctacctgctggagtggattgagatggccctgggcgccagcgctgtggtgcacaccatggagaagggcaagctgctgagcagccaggagggcatgatcagctttgactgcttcatgaccatcctgatgcagatgagaagaagcctcatcagcgagaaccaggacagcgcagatgtggacccccaggagcacagcttcaccaggaccattgatgaggaggccgagatggaggagcaggccgagcgggaccgggaggagggccaccctgagccagaagatgaggaggaggagcgggagcacgaggtgatgacagctgggaagatcttccagtgcttcctgagcgcccgggaggtggcccggagccgggaccgggacaggatgaacagcggggccggcagcggggcccgggcagatgatcctccaccccagagccagcaggagaggagagtgtccacagacctgcctgagggccaggatgtgtacacagctgcctgcaacagcgtcatccaccgctgtgccctgctgatcctgggcgtgtcccctgtgattgatgagctgcagaagaggcgggaggagggccagctgcagcagcccagcaccagcgccagcgagggcggcggcctgatgaccaggtctgagagcctgacagctgagagccggctggtgcacaccagccccaactaccgcctcatcaagagccgctctgagagtgacctgagccagcctgagagtgatgaggagggctacgccctgtctggaagaagaaatgtggacctggacctggccgccagccacaggaagaggggccccatgcacagccagctggagagcctgagtgacagctgggcccggctgaagcacagccgggactggctgtgcaacagcagctacagctttgaaagtgactttgacctgaccaagagcctgggcgtgcacaccctgattgaaaatgtggtgtcctttgtgtctggagatgtgggcaatgcccctggcttcaaggagcctgaggagagcatgagcaccagcccccaggccagcatcatcgccatggagcagcagcagctgcgggcagagctgcggctggaggccctgcaccagatcctggtgctgctgagcggcatggaggagaagggcagcatcagcctggccggcagccggctgagcagcggcttccagagcagcaccctgctgacctctgtgcggctgcagttcctggccggctgcttcggcctgggcaccgtgggccacactggaggaaaaggagagagcggccgcctgcaccactaccaggacggcatccgggccgcccggggctactag

SEQ ID NO: 315343 - DNA, 2103 bp, Artificial Sequence
  derived and/or modified sequence
atggccaccatgatcccccccgtgaagctgaagtggctggagcacctgaacagtagctggatcaccgaggattcggagtctatcgctacaagagaaggggtcgcagtgctctactctaagttagtatcaaacaaagaggttgtgcccctgccccagcaggtgctgtgcctgaagggacctcagttgcccgactttgaaagagaaagcctgtcaagtgacgagcaggaccactatctcgacgcactgttgtctagccagttggccttggccaaaatggtctgctccgatagtccttttgcaggagcgctgaggaaacgactgctcgtgttgcagcgcgtgttctacgccctgagcaacaagtatcacgataagggtaaggtgaaacagcagcagcattcacccgagtcctcctccggttccgcagatgtgcacagcgtgtcggagcggccacggtcatctaccgatgcgctgatagaaatgggcgtgaggaccggtctgtctttactttttgcccttttacggcagtcttggatgatgcctgtatcaggtcccgggttgtcactctgcaatgatgtaattcatactgcgattgaagtggtcagcagtcttccgcctctgtccctagccaacgagtccaaaatcccgccgatggggctggactgccttagtcaagtaaccacttttctgaagggtgtcaccatcccaaacagtggcgcagataccctggggcgcagactggcaagcgagttgctacttgggctggccgcacagcggggatctctccgctacttgctcgagtggatcgaaatggcgctcggggcctctgctgtggtccacaccatggagaaaggcaaattactttcatctcaggaaggcatgattagtttcgactgcttcatgactatcctcatgcaaatgcggagaagtctcattagcgagaaccaggactccgcggatgttgacccccaggaacactcattcacaaggactattgatgaagaagccgagatggaggagcaggcggagagagaccgcgaagaaggccacccagaaccagaggacgaggaagaagaacgggaacatgaagttatgaccgctgggaagattttccagtgtttcctctccgccagagaagtcgcaaggagccgagatagagaccgcatgaactccggagctggcagcggagccagagcggacgatccacccccccagagccagcaagagcgaagggtgtctacagatcttccagagggccaggatgtgtataccgccgcctgtaatagtgtgatacatcgatgcgctctcttaatactcggagtgtcgccagttatcgacgagctgcaaaaacgtcgcgaagaggggcagctccagcagccgtctacgtccgcttcagagggcggaggcctgatgacccggtccgaaagcctgacagcagagagtcggttggtacatactagtcctaattacagactgatcaaatcaaggtccgaatctgacttgagtcagcccgaatccgatgaagaggggtatgccctgagcggaaggcggaatgtggatctcgacctggccgcctcacacaggaagcggggccccatgcacagtcaactagaaagtttatcagacagttgggcgcgccttaagcatagcagggactggctttgtaattcatcatatagcttcgagtccgacttcgatctaacgaagtctttaggcgtccatactcttattgaaaacgtcgtctctttcgtgtctggtgatgtgggtaacgcacctggctttaaggaaccagaggagtcaatgagtacatccccccaggccagcatcatcgctatggaacagcagcagctccgggccgagctcaggctcgaggccctgcaccagatcctggtgctgttaagcgggatggaagaaaaagggtcaatcagtctggccggatccagattatcctcaggcttccagtcctctacacttctgaccagtgtcagactgcagttccttgctgggtgcttcggcctgggcacagttggtcatacaggggggaaaggagagtccgggcggctacaccattatcaagacggcattcgcgccgctagggggtactag

SEQ ID NO: 315344 - DNA, 2248 bp, Artificial Sequence
  derived and/or modified sequence
gtctttccctttgacaagtcgctgctgctgcagcaaaaataaaggacgcgaccgccgcagcctctgcggagccgggctcgggtcgccggagccgcgccccaccccgccagctccagagccacgactaatggctgaaggataaatcaacatggcaactatgattccaccagtgaagctgaaatggcttgaacacttgaacagctcctggattacagaggacagtgaatctattgctacaagagagggagttgctgttctgtattctaaactggttagcaataaggaagtagtacctttgccccaacaagttttatgcctcaaaggaccacagttgccagactttgaacgtgagtctctttcaagtgatgagcaggaccactatttggatgcccttcttagcagccagctagcattggcaaagatggtatgttcagattccccatttgccggggcacttagaaaacgactgcttgtactccagcgtgtcttttatgcactttctaataaataccatgacaaaggcaaggtgaagcagcagcagcattctccggagagcagttctggttcagcagatgtccattctgttagtgaacgcccccggtcaagcactgatgcacttatagaaatgggtgttcgaactggtctaagtttattatttgcgcttctaagacaaagttggatgatgcctgtgtcaggacctggtctcagtctttgcaacgatgtcattcatactgcaattgaagttgtgagctctttgccaccattatcattagcaaatgaaagcaagattcctcctatgggcttggactgcttatcgcaagtaacaacatttcttaaaggagtcactattcctaattctggggcagacactttaggtcgtagattagcttctgagttgctgcttggtttggcagctcaacgaggctcattgcgatatcttcttgaatggatagaaatggctttgggggcttcggcagttgtacacaccatggagaaaggcaaactactctcaagccaggaaggaatgatcagctttgactgctttatgaccatattaatgcagatgaggcgttctttgatatcagaaaaccaggactctgcagatgttgatcctcaggagcattcatttactcgaactattgatgaagaagctgaaatggaagaacaggctgagagagaccgggaagaggggcatccggagccagaggatgaagaggaggaacgggaacatgaagtgatgacagctggcaaaatctttcagtgtttcctctcagcccgtgaagtagctcgtagccgagaccgagatagaatgaacagtggggcagggtctggggctcgagctgatgatccacctcctcagtctcagcaagagcgaagggtcagcacagaccttcctgagggtcaggatgtgtacactgctgcatgcaactccgtgatccatcggtgtgccctgttaatattaggagtaagtcctgtgatagatgagcttcagaagcgaagagaagaaggacagttgcagcaaccttcaacaagtgcctctgaagggggtggacttatgaccaggagtgaaagtcttactgcagagagccggctagtccacacaagcccaaattatagactgatcaaatcgaggagtgaatctgatttgtctcagcctgaatcagatgaagagggttacgcactgagtggcagacgaaatgttgatttggatttggcagcatctcacagaaagagaggtcctatgcacagtcaattggaatccctgagtgactcttgggctcgcctgaaacatagcagagactggttatgcaactcctcctattcctttgagtcagattttgatcttaccaagtctttgggagttcacactttgattgaaaatgttgtaagctttgtgagtggagatgtggggaatgccccaggttttaaagagccagaggaaagtatgtctacaagtccccaggcctccatcattgcaatggaacagcagcagttaagggcagaacttcgtttagaggcacttcatcagatcctcgttctattgtctgggatggaagaaaaaggtagcatctcactggcaggaagcagattgagttcaggcttccagtcctccacactactcacgtctgtgaggctgcagttcctagcagggtgttttggtttaggcactgttggacacacaggaggcaagggagagagtggccgattgcatcactatcaggatgggatcagagcagcccgaggttat

SEQ ID NO: 315345 - DNA, 2103 bp, Artificial Sequence
  derived and/or modified sequence
atggcaaccatgatacccccagtcaagctcaaatggctggagcatctcaactccagctggattaccgaggattccgagtctattgcaaccagggagggcgttgccgtcctgtactctaaactggtttctaacaaggaggtggtgccccttcctcaacaggtgctgtgcttgaaggggcctcagttgcccgattttgagagggagagcctgtcctcggatgaacaggatcactacttggatgcactcttaagcagccagctggcactggcaaaaatggtgtgcagtgactctccgtttgcaggagctttaagaaaacggctgcttgtcctgcagcgggtcttttacgccttgagcaataaatatcacgacaagggtaaggttaagcagcagcaacacagccccgaaagctcctccgggagtgctgacgtgcacagcgtctccgagcgtcctcggtcatctacagatgctctgatagaaatgggagtgcgaacaggactttctctgctttttgccttactcagacagagttggatgatgccagtgagcgggcctggcctttctttgtgcaatgacgtcattcacacggctattgaagttgtgagcagcctgccgcctctcagcctcgccaacgaaagtaaaattccgcctatggggctcgactgcctgagccaggttacaaccttcctgaaaggggtgaccatacccaatagcggcgctgatacgctggggaggaggctagcttctgaactcttgctcggcctggcagcccagagagggtcgctgcgatatctattggaatggatcgagatggccctaggggctagcgccgtagtgcacactatggagaaggggaaattactgtcctctcaggagggaatgatcagctttgactgtttcatgactattctaatgcagatgcggaggtctctcatctccgagaaccaggactccgcagacgtcgaccctcaggagcatagctttaccagaactatcgatgaggaggctgagatggaagagcaggctgagcgcgatagggaagagggccaccccgaaccggaagacgaggaggaagaaagggaacatgaggttatgacagctggcaagatcttccagtgtttcctgtccgctcgcgaagtcgccaggagccgcgatagagacaggatgaactccggcgctgggtcaggcgctcgggctgacgaccccccaccacagtcacaacaggaaaggcgcgtttctaccgatttgcccgagggccaggatgtgtacactgctgcatgcaactctgtcattcaccggtgtgcactgctgatcttgggcgtctctccggtgatcgatgaactccagaagagacgggaagaggggcagctgcagcagccttcgacctccgcctcagagggcggtggcctgatgactaggagtgaatcattaactgccgagtcccgactcgtccataccagccctaattatcggctgatcaagagtaggagtgaatccgacctctcccagccggagtccgacgaggagggatatgctttgagcgggcgaaggaacgtcgatttagacctggcagcaagccatagaaaaagaggaccaatgcatagccagcttgagtcactttctgattcgtgggcaagactcaaacacagccgtgactggctgtgcaacagttcgtatagttttgaatcagactttgatttaacaaagagcctgggagtccacaccctcatcgaaaatgtagtgtcctttgtttccggcgatgtcggaaacgccccaggcttcaaagagcctgaagaaagcatgagcactagcccgcaggctagtataatcgctatggaacagcagcagctccgagctgagctccgccttgaagccttacatcagatcctcgttttgttgagcggtatggaagagaagggtagtattagcctggccggttcgaggctttccagtggtttccagtctagtacattactgacctccgtgaggcttcaattcttggccggttgtttcggattgggaacagtcggccacacaggtggtaaaggagaatccggcagactccatcactatcaggacggaatcagagctgccagggggtactag

SEQ ID NO: 315346 - protein, 20 aa, Artificial Sequence
  derived and/or modified sequence
MATMIPPVKLKWLEHLNSSW

SEQ ID NO: 315347 - protein, 153 aa, Artificial Sequence
  derived and/or modified sequence
MATMIPPVKLKWLEHLNSSWITEDSESIATREGVAVLYSKLVSNKEVVPLPQQVLCLKGPQLPDFERESLSSDEQDHYLDALLSSQLALAKMVCSDSPFAGALRKRLLVLQRVFYALSNKYHDKGKVKQQQHSPESSSGSADVHSVSERPRSS

SEQ ID NO: 315348 - protein, 145 aa, Artificial Sequence
  derived and/or modified sequence
MATMIPPVKLKWLEHLNSSWITEDSESIATREGVAVLYSKLVSNKEVVPLPQQVLCLKGPQLPDFERESLSSDEQDHYLDALLSSQLALAKMVCSDSPFAGALRKRLLVLQRVFYALSNKYHDKGKVKQQQHSPESSSGSADVHS

SEQ ID NO: 315349 - protein, 412 aa, Artificial Sequence
  derived and/or modified sequence
MQKYCIYQHFQFQLLIQHLWIAANCDIADERFDATFHTNVLVNSSGHCQYLPPGIFKSSCYIDVRWFPFDVQHCKLKFGSWSYGGWSLDLQMQEADISGYIPNGEWDLVGIPGKRSERFYECCKEPYPDVTFTVTMRRRTLYYGLNLLIPCVLISALALLVFLLPADSGEKISLGITVLLSLTVFMLLVAEIMPATSDSVPLIAQYFASTMIIVGLSVVVTVIVLQYHHHDPDGGKMPKWTRVILLNWCAWFLRMKRPGEDKVRPACQHKQRRCSLASVEMSAVAPPPASNGNLLYIGFRGLDGVHCVPTPDSGVVCGRMACSPTHDEHLLHGGQPPEGDPDLAKILEEVRYIANRFRCQDESEAVCSEWKFAACVVDRLCLMAFSVFTIICTIGILMSAPNFVEAVSKDFA

SEQ ID NO: 315350 - DNA, 2858 bp, Artificial Sequence
  derived and/or modified sequence
agccctttcccaggcggtagcgggggcagtggtgctgttgcccttttaaactgcggcttgacgggagccgcgcctcctgtcggtggagtcggttataaagggagcagccccgcaggccgccacatagctcccgccaagtcctcggtgccccttgccattttccagccgcgctcccacgagggtcacggcggcggggagaggtggagccgcgagagctcggccgggggccccgcctggtggtcgcggccatgacagcggctcgggacaggctccttttccgcgcccctcccgccggaggtgaggggaagatgtccatgtccgggttcaaggccaaaccgaagttactggcctctatcttccaggagaaccaggagccacagccgcggctcacgccccaccgcaacattaagattacaagtggacacctgagtcagcaggacctggaatcccagatgagagagcttatctacacgactcagatcttgttgtcacccccattattgacaatccaaaggtgcagaaagcactctgacaaataatgaaacaaccaccatcggttaaatttgatgcaaaaatattgcatctaccagcattttcagttccaattgctaatccagcatttgtggatagctgcaaactgcgatattgctgatgagcgctttgacgccacattccacactaacgtgttggtgaattcttctgggcattgccagtacctgcctccaggcatattcaagagttcctgctacatcgatgtacgctggtttccctttgatgtgcagcactgcaaactgaagtttgggtcctggtcttacggaggctggtccttggatctgcagatgcaggaggcagatatcagtggctatatccccaatggagaatgggacctagtgggaatccccggcaagaggagtgaaaggttctatgagtgctgcaaagagccctaccctgatgtcaccttcacagtgaccatgcgccgcaggacgctctactatggcctcaacctgctgatcccctgtgtgctcatctccgccctcgccctgctggtgttcctgcttcctgcagattccggggagaagatttccctggggataacagtcttactctctcttaccgtcttcatgctgctcgtggctgagatcatgcccgcaacatccgattcggtaccattgatagcccagtacttcgccagcaccatgatcatcgtgggcctctcggtggtggtgacggtgatcgtgctgcagtaccaccaccacgaccccgacgggggcaagatgcccaagtggaccagagtcatccttctgaactggtgcgcgtggttcctgcgaatgaagaggcccggggaggacaaggtgcgcccggcctgccagcacaagcagcggcgctgcagcctggccagtgtggagatgagtgccgtggcgccgccgcccgccagcaacgggaacctgctgtacatcggcttccgcggcctggacggcgtgcactgtgtcccgacccccgactctggggtagtgtgtggccgcatggcctgctcccccacgcacgatgagcacctcctgcacggcgggcaaccccccgagggggacccggacttggccaagatcctggaggaggtccgctacattgccaaccgcttccgctgccaggacgaaagcgaggcggtctgcagcgagtggaagttcgccgcctgtgtggtggaccgcctgtgcctcatggccttctcggtcttcaccatcatctgcaccatcggcatcctgatgtcggctcccaacttcgtggaggccgtgtccaaagactttgcgtaaccacgcctggttctgtacatgtggaaaactcacagatgggcaaggcctttggcttggcgagatttgggggtgctaatccaggacagcattacacgccacaactccagtgttcccttctggctgtcagtcgtgttgcttacggtttctttgttactttaggtagtagaatctcagcactttgtttcatattctcagatgggctgatagatatccttggcacatccgtaccatcggtcagcagggccactgagtagtcattttgcccattagcccactgcctggaaagcccttcggagagctccccatggctcctcaccaccgagacagttggttttgcatgtctgcatgaaggtctacctgaaaattcaacatttgctttttgcttgtgtacaaacccagattgaagctaaaataaaccagactcactaaatcctttccaataattgactggtggaaggaaaacaaaaaacaaaaactaaaaacctcttagcttttctgcaattcaactttttatttttatttttatttctatcaaagacggtagagagaaacagcttgatgctgtttctacatcaaaaaaaaaaaaaaaaaagacagactgttggtcttactaaggatgtttttaccagcctgcctgacttctgcaaacctaccctgtcaaggagatcaaagggacgcaggtttctgtttattctgaacaagggccaggccccgcggagtgtctttggtggatcccagataactcctaggtgctgctctcagacactgaggagttgagcaaatctgttctattctgcagaacccataggacaaataagagttctactagaattaacagcccaaaagaatagctacagctaagtgaagccacttacgtgggctttaaaaaaataatgtgttagctgattcacatgcactggagttaattagtcttagaaatgtgtgcatccatacaaatgcacaacataaagtgaacatattcctaggccctttctgcctgtgtcagggccaggaagtagaggctgggaactcttctggtccccagtatggcag

SEQ ID NO: 315351 - DNA, 2794 bp, Artificial Sequence
  derived and/or modified sequence
agccctttcccaggcggtagcgggggcagtggtgctgttgcccttttaaactgcggcttgacgggagccgcgcctcctgtcggtggagtcggttataaagggagcagccccgcaggccgccacatagctcccgccaagtcctcggtgccccttgccattttccagccgcgctcccacgagggtcacggcggcggggagaggtggagccgcgagagctcggccgggggccccgcctggtggtcgcggccatgacagcggctcgggacaggctccttttccgcgcccctcccgccggaggtgaggggaagatgtccatgtccgggttcaaggccaaaccgaagttactggcctctatcttccaggagaaccaggagccacagccgcggctcacgccccaccgcaacattaagattacaagtggacacctgagtcagcaggacctggaatcccagatgagagagcttatctacacgactcagatcttgttgtcacccccattattgacaatccaaaggtgcagaaagcactctgacaattccaattgctaatccagcatttgtggatagctgcaaactgcgatattgctgatgagcgctttgacgccacattccacactaacgtgttggtgaattcttctgggcattgccagtacctgcctccaggcatattcaagagttcctgctacatcgatgtacgctggtttccctttgatgtgcagcactgcaaactgaagtttgggtcctggtcttacggaggctggtccttggatctgcagatgcaggaggcagatatcagtggctatatccccaatggagaatgggacctagtgggaatccccggcaagaggagtgaaaggttctatgagtgctgcaaagagccctaccctgatgtcaccttcacagtgaccatgcgccgcaggacgctctactatggcctcaacctgctgatcccctgtgtgctcatctccgccctcgccctgctggtgttcctgcttcctgcagattccggggagaagatttccctggggataacagtcttactctctcttaccgtcttcatgctgctcgtggctgagatcatgcccgcaacatccgattcggtaccattgatagcccagtacttcgccagcaccatgatcatcgtgggcctctcggtggtggtgacggtgatcgtgctgcagtaccaccaccacgaccccgacgggggcaagatgcccaagtggaccagagtcatccttctgaactggtgcgcgtggttcctgcgaatgaagaggcccggggaggacaaggtgcgcccggcctgccagcacaagcagcggcgctgcagcctggccagtgtggagatgagtgccgtggcgccgccgcccgccagcaacgggaacctgctgtacatcggcttccgcggcctggacggcgtgcactgtgtcccgacccccgactctggggtagtgtgtggccgcatggcctgctcccccacgcacgatgagcacctcctgcacggcgggcaaccccccgagggggacccggacttggccaagatcctggaggaggtccgctacattgccaaccgcttccgctgccaggacgaaagcgaggcggtctgcagcgagtggaagttcgccgcctgtgtggtggaccgcctgtgcctcatggccttctcggtcttcaccatcatctgcaccatcggcatcctgatgtcggctcccaacttcgtggaggccgtgtccaaagactttgcgtaaccacgcctggttctgtacatgtggaaaactcacagatgggcaaggcctttggcttggcgagatttgggggtgctaatccaggacagcattacacgccacaactccagtgttcccttctggctgtcagtcgtgttgcttacggtttctttgttactttaggtagtagaatctcagcactttgtttcatattctcagatgggctgatagatatccttggcacatccgtaccatcggtcagcagggccactgagtagtcattttgcccattagcccactgcctggaaagcccttcggagagctccccatggctcctcaccaccgagacagttggttttgcatgtctgcatgaaggtctacctgaaaattcaacatttgctttttgcttgtgtacaaacccagattgaagctaaaataaaccagactcactaaatcctttccaataattgactggtggaaggaaaacaaaaaacaaaaactaaaaacctcttagcttttctgcaattcaactttttatttttatttttatttctatcaaagacggtagagagaaacagcttgatgctgtttctacatcaaaaaaaaaaaaaaaaaagacagactgttggtcttactaaggatgtttttaccagcctgcctgacttctgcaaacctaccctgtcaaggagatcaaagggacgcaggtttctgtttattctgaacaagggccaggccccgcggagtgtctttggtggatcccagataactcctaggtgctgctctcagacactgaggagttgagcaaatctgttctattctgcagaacccataggacaaataagagttctactagaattaacagcccaaaagaatagctacagctaagtgaagccacttacgtgggctttaaaaaaataatgtgttagctgattcacatgcactggagttaattagtcttagaaatgtgtgcatccatacaaatgcacaacataaagtgaacatattcctaggccctttctgcctgtgtcagggccaggaagtagaggctgggaactcttctggtccccagtatggcag

SEQ ID NO: 315352 - DNA, 1913 bp, Artificial Sequence
  derived and/or modified sequence
ggggaagatgtccatgtccgggttcaaggccaaaccgaagttactggcctctatcttccaggagaaccaggagccacagccgcggctcacgccccaccgcaacattaagattacaagtggacacctgagtcagcaggacctggaatcccagatgagagagcttatctacacgactcagatcttgttgtcacccccattattgacaatccaaaggtgcagaaagcactctgacaaataatgaaacaaccaccatcggttaaatttgatgcaaaaatattgcatctaccagcattttcagttataatttctgaaagaccaagattggaatgactttttgtaacaagtgtgctcgcagatcgactccagtgagaagagctcggggacctcctgagccaagcttaatctcctttgctgtttgtgagtggtggctggtcaccaggaggtggccaccaggctcctcctttccccgctgttccaattgctaatccagcatttgtggatagctgcaaactgcgatattgctgatgagcgctttgacgccacattccacactaacgtgttggtgaattcttctgggcattgccagtacctgcctccaggcatattcaagagttcctgctacatcgatgtacgctggtttccctttgatgtgcagcactgcaaactgaagtttgggtcctggtcttacggaggctggtccttggatctgcagatgcaggaggcagatatcagtggctatatccccaatggagaatgggacctagtgggaatccccggcaagaggagtgaaaggttctatgagtgctgcaaagagccctaccctgatgtcaccttcacagtgaccatgcgccgcaggacgctctactatggcctcaacctgctgatcccctgtgtgctcatctccgccctcgccctgctggtgttcctgcttcctgcagattccggggagaagatttccctggggataacagtcttactctctcttaccgtcttcatgctgctcgtggctgagatcatgcccgcaacatccgattcggtaccattgatagcccagtacttcgccagcaccatgatcatcgtgggcctctcggtggtggtgacggtgatcgtgctgcagtaccaccaccacgaccccgacgggggcaagatgcccaagtggaccagagtcatccttctgaactggtgcgcgtggttcctgcgaatgaagaggcccggggaggacaaggtgcgcccggcctgccagcacaagcagcggcgctgcagcctggccagtgtggagatgagtgccgtggcgccgccgcccgccagcaacgggaacctgctgtacatcggcttccgcggcctggacggcgtgcactgtgtcccgacccccgactctggggtagtgtgtggccgcatggcctgctcccccacgcacgatgagcacctcctgcacggcgggcaaccccccgagggggacccggacttggccaagatcctggaggaggtccgctacattgccaaccgcttccgctgccaggacgaaagcgaggcggtctgcagcgagtggaagttcgccgcctgtgtggtggaccgcctgtgcctcatggccttctcggtcttcaccatcatctgcaccatcggcatcctgatgtcggctcccaacttcgtggaggccgtgtccaaagactttgcgtaaccacgcctggttctgtacatgtggaaaactcacagatgggcaaggcctttggcttggcgagatttgggggtgctaatccaggacagcattacacgccacaactccagtgttcccttctggctgtcagtcgtgttgcttacggtttctttgttactttaggtagtagaatctcagcactttgtttcatattctcagatgggctgatagatatccttggcacatccgtaccatcggt

SEQ ID NO: 315353 - DNA, 1239 bp, Artificial Sequence
  derived and/or modified sequence
atgcagaagtactgcatctaccagcacttccagttccagctgctgatccagcacctgtggatcgccgccaactgcgacatcgccgacgagagattcgacgccaccttccacaccaacgtgctggtgaacagcagcggccactgccagtacctgccccccggcatcttcaagagcagctgctacatcgacgtgagatggttccccttcgacgtgcagcactgcaagctgaagttcggcagctggagctacggcggctggagcctggacctgcagatgcaggaggccgacatcagcggctacatccccaacggcgagtgggacctggtgggcatccccggcaagagaagcgagagattctacgagtgctgcaaggagccctaccccgacgtgaccttcaccgtgaccatgagaagaagaaccctgtactacggcctgaacctgctgatcccctgcgtgctgatcagcgccctggccctgctggtgttcctgctgcccgccgacagcggcgagaagatcagcctgggcatcaccgtgctgctgagcctgaccgtgttcatgctgctggtggccgagatcatgcccgccaccagcgacagcgtgcccctgatcgcccagtacttcgccagcaccatgatcatcgtgggcctgagcgtggtggtgaccgtgatcgtgctgcagtaccaccaccacgaccccgacggcggcaagatgcccaagtggaccagagtgatcctgctgaactggtgcgcctggttcctgagaatgaagagacccggcgaggacaaggtgagacccgcctgccagcacaagcagagaagatgcagcctggccagcgtggagatgagcgccgtggcccccccccccgccagcaacggcaacctgctgtacatcggcttcagaggcctggacggcgtgcactgcgtgcccacccccgacagcggcgtggtgtgcggcagaatggcctgcagccccacccacgacgagcacctgctgcacggcggccagccccccgagggcgaccccgacctggccaagatcctggaggaggtgagatacatcgccaacagattcagatgccaggacgagagcgaggccgtgtgcagcgagtggaagttcgccgcctgcgtggtggacagactgtgcctgatggccttcagcgtgttcaccatcatctgcaccatcggcatcctgatgagcgcccccaacttcgtggaggccgtgagcaaggacttcgcctag

SEQ ID NO: 315354 - DNA, 1239 bp, Artificial Sequence
  derived and/or modified sequence
atgcagaagtattgcatctaccagcattttcagtttcagctccttattcagcacctctggatcgccgcaaattgtgacatcgccgatgagcgcttcgacgccactttccacaccaatgtgctggtcaacagttcgggacactgccagtatctgcctcccggaattttcaagagttcctgttacattgacgtgcgatggtttccctttgatgtacaacactgcaaactaaagttcggctcctggtcctatggtgggtggagcttggatctgcagatgcaggaggccgatataagtggttacattccaaatggagaatgggatctggtagggattccaggcaaacgctctgagcgcttctatgaatgctgcaaagaaccatatcccgacgtaacgtttaccgtgaccatgcgccgccggactctgtattatggcctcaatctcctcattccctgcgtcctgatttcagccctcgcactgttggtgttccttttgccagccgacagcggtgaaaaaatctctctgggcattacggtgctattgagcctgaccgtttttatgctcttggtggcagagatcatgcccgctacctctgattctgtgcccctgatagcacagtacttcgcgtctacaatgataatcgtggggctgtccgtcgtggtaactgtgatagtattgcagtaccaccaccacgacccagacggaggaaagatgcctaaatggacccgggtcatcctgctcaactggtgtgcttggttcttgcgtatgaagcgacccggtgaggacaaagtgagaccggcctgccagcataagcagcggagatgtagcttggcaagcgtcgagatgagcgccgtggcgccccctccggcaagcaacggtaatttgttatacatcggcttcagaggcctagatggggtccattgtgttcccacacctgattctggcgtcgtgtgcgggcggatggcttgcagtccaactcatgacgagcacctgctgcacggcggacaaccgccagagggagatccagatttagcaaagattcttgaggaagtgaggtatatcgcaaataggtttaggtgtcaagacgagagcgaggccgtttgtagtgagtggaagtttgcagcatgtgtggtcgacaggctctgcctcatggcattttctgtgtttactatcatctgcaccattggaattctgatgtccgcgccaaactttgtcgaagcagtgtcaaaggactttgcctag

SEQ ID NO: 315355 - DNA, 1239 bp, Artificial Sequence
  derived and/or modified sequence
atgcagaagtactgcatctaccagcacttccagttccagctgctgatccagcacctgtggattgctgccaactgtgacattgctgatgaaagatttgatgccaccttccacaccaacgtgctggtgaacagcagcggccactgccagtacctgcccccaggcatcttcaagagcagctgctacattgatgtgcgctggttcccctttgatgtgcagcactgcaagctgaagtttggctcctggagctatggaggctggagcctggacctgcagatgcaggaggccgacatcagcggctacatccccaatggagagtgggacctggtgggcatccctgggaagaggtctgagcgcttctatgagtgctgcaaggagccctacccagatgtgaccttcaccgtgaccatgagaagaaggaccctgtactacggcctgaacctgctgatcccctgtgtgctgatcagcgccctggccctgctggtgttcctgctgcctgctgacagcggggagaagatcagcctgggcatcaccgtgctgctgagcctgactgtgttcatgctgctggtggccgagatcatgcctgccaccagtgacagcgtgcccctgattgcccagtactttgccagcaccatgatcatcgtgggcctgtctgtggtggtgacagtgattgtgctgcagtaccaccaccacgaccctgatggcggcaagatgcccaagtggaccagggtcatcctgctgaactggtgtgcctggttcctgaggatgaagaggcctggagaggacaaggtgcggcctgcctgccagcacaagcagaggcgctgcagcctggcctctgtggagatgtctgctgtggcccctcctccagccagcaatggaaacctgctgtacatcggcttccggggcctggatggagtgcactgtgtgcccaccccagattctggagtggtgtgtggccgcatggcctgcagccccacccatgatgagcacctgctgcacggcggccagcccccagagggggaccctgacctggccaagatcctggaggaggtgcgctacatcgccaaccgcttccgctgccaggatgaaagtgaagctgtgtgcagcgagtggaagtttgctgcctgtgtggtggaccggctgtgcctgatggccttcagcgtcttcaccatcatctgcaccatcggcatcctgatgtctgcccccaactttgtggaggccgtgtccaaggactttgcctag

SEQ ID NO: 315356 - DNA, 1239 bp, Artificial Sequence
  derived and/or modified sequence
atgcagaagtactgcatctaccagcacttccagttccagctgctgatccagcacctctggatcgcagctaactgcgacattgccgatgagcggttcgacgcaaccttccacaccaatgtgctggtgaattccagcggacactgtcagtatctgccacctgggatttttaaaagcagctgctatatcgatgtacggtggttcccatttgatgtgcagcattgcaaactgaagttcggaagctggtcctacggcggctggtctctagacctccagatgcaggaggccgacatcagcgggtacatccccaatggggaatgggacctggttggcattccagggaagcgctccgaacgcttctatgagtgttgtaaggagccatacccagatgttactttcaccgtgaccatgcgaagacgtaccctgtactatggactgaacctcctgattccatgtgttctgatctcagctctcgcactcttggtgtttctgctgccagctgatagcggagaaaagatctctctgggcattacagtgcttctctccctcaccgtattcatgctgcttgtggctgagatcatgcctgctacaagtgacagcgtgcccctcattgctcaatatttcgcgagtactatgatcattgtgggtctctccgtcgtggttacggtcatcgtgctacaatatcaccaccacgaccccgatggggggaaaatgcccaaatggactagggtcatcctcctgaactggtgtgcatggtttctccgaatgaaaaggccgggcgaagataaggtgcgtccagcctgccagcacaagcagcgaaggtgctcattggcctccgtggagatgtctgccgtggccccccctcctgcctccaatggcaatctgctctatatcgggtttcggggtcttgatggcgtgcattgtgtgccaaccccagacagcggcgtggtgtgtgggaggatggcgtgttcccccacacatgacgagcatctgcttcatggtggacaacccccagaaggtgacccagatctggctaagattctcgaggaggtgcgctacatcgctaacagattccgctgtcaggacgaaagtgaggccgtgtgctcggagtggaaatttgctgcatgcgtcgtcgacaggctttgtctcatggcttttagcgttttcactattatctgcacaatcggaattcttatgagcgcaccaaatttcgtcgaagctgtcagcaaggattttgcctag

SEQ ID NO: 315357 - DNA, 1239 bp, Artificial Sequence
  derived and/or modified sequence
atgcagaagtactgcatttatcagcattttcaattccagcttctgattcagcacctgtggattgccgcaaactgcgacatagctgatgaacggttcgacgctacatttcatactaatgtgttagtaaacagcagcgggcattgccaatacctcccgccaggaatttttaagtcatcctgctatattgacgtgagatggttccccttcgacgtgcagcactgcaaactgaagtttggctcctggtcgtacggaggctggtctctggatctgcagatgcaggaagcagatatcagtggttacatccccaacggcgagtgggatctggttggcatccccggaaagcgctctgagcgcttttacgaatgctgtaaggaaccatacccagacgtaaccttcactgtcacaatgaggcggaggaccctctactatggtctgaacttgctgatcccttgtgttctgatcagcgcccttgccctgctggtctttctgctccctgccgactccggagagaaaatctctctcggcattaccgtcttattaagcctgaccgtgtttatgctcctggtagcagagatcatgccagcaacgtccgactcagtccctctgattgcccagtattttgcatccaccatgattatagtgggccttagtgtggtggtcacagtcatcgttctgcagtaccaccaccacgatcctgatggcggtaaaatgcccaagtggacaagggtcatcctcctaaactggtgcgcctggttccttagaatgaaacgacctggggaagataaagtcagaccggcatgtcagcacaagcagaggcggtgctccctcgcatccgtcgaaatgagcgccgtagcccctccacctgcgtccaatgggaatctcctgtacattggattcagagggcttgacggtgttcactgcgttcctacgcccgattccggtgtggtgtgcggccgaatggcctgttcccccacccatgacgaacacctcctccatggtgggcagcctcctgaaggcgacccggacctcgctaagattcttgaagaagttcgctacattgccaacaggttccgctgccaagacgaaagtgaggcagtgtgctccgaatggaaattcgcggcatgcgtagtggacagactttgcttaatggctttcagcgtgttcaccatcatttgcactatcggaatcctcatgtccgcccctaattttgtcgaggcagtatctaaggattttgcctag

SEQ ID NO: 315358 - DNA, 1239 bp, Artificial Sequence
  derived and/or modified sequence
atgcaaaaatattgcatatatcaacatttccaatttcagctgctgatacagcacttgtggatcgctgcgaattgcgacatagccgatgagaggttcgatgcgacttttcacaccaacgtgctagtcaacagctctgggcattgccagtatctccctcctggaatatttaagtcctcctgctatatcgacgtgaggtggtttccgttcgatgttcagcactgtaagctcaagttcgggtcctggtcttacgggggatggtctctggatcttcagatgcaggaggccgacatctctggttatatccccaatggcgaatgggacctcgtcggcatcccaggaaaaagatccgaacgcttctacgagtgctgtaaggaaccgtaccctgacgtaacttttactgtgacaatgagacgtcgcactctttattatggattgaatctgttaattccctgcgtgctcattagcgcacttgccctgttagtttttctcctaccagctgacagcggagagaaaatttccctgggcattacagtgctgttatctctgactgtgttcatgctgctggtggctgagatcatgcccgccacaagtgacagcgtgccactgatcgcccaatacttcgcctccactatgataatcgttgggctctcagtggtggttaccgtaattgtgctgcaataccaccaccatgatcctgacggggggaagatgcctaagtggacgcgcgtcatactgctgaactggtgcgcctggttcctgcgaatgaaacgccctggtgaagacaaggtgaggcccgcctgccaacacaagcagagacggtgcagcttggcctccgtggaaatgtccgctgtcgcaccaccccccgcatcaaacggtaatcttttgtacattggcttccggggcttggatggcgttcactgcgttcccacccctgacagtggcgtggtgtgtggaagaatggcttgctcgcctacccacgacgagcatctcctacacggaggccaaccccccgaaggagatcccgacctcgccaaaatcctcgaggaggtgcggtacatagccaacaggttccggtgtcaggacgagtccgaggccgtgtgctccgaatggaagtttgcggcctgtgtggtggaccggctgtgtctgatggcattctccgtgtttacaatcatctgcaccattggcatcctgatgtcagcgcctaacttcgtggaagccgtctcaaaggattttgcatag

SEQ ID NO: 315359 - DNA, 1239 bp, Artificial Sequence
  derived and/or modified sequence
atgcagaagtactgcatctaccagcacttccagttccagctgctgatccaacatttatggatcgcagccaactgtgacatcgctgatgagagatttgatgccacatttcacactaacgtactggtgaacagcagtggccattgccagtatctacctccgggcatctttaaaagtagttgttacattgacgttcggtggttcccttttgatgtgcagcattgtaaattgaaattcggatcctggagctacggcggatggtctctggacttgcagatgcaggaggctgacatatcaggatacattccgaacggcgagtgggaccttgtgggtatccctggaaagcggagcgaaagattctacgagtgctgtaaggagccttatccagacgtaacatttacagtgactatgcggaggagaacgctgtattatggtctgaacttattgatcccttgtgtactgatctcagccctggcattgcttgtttttttgcttcccgccgacagcggcgagaaaatcagtttggggatcaccgtgctgttgagtctgacagtttttatgctattggtcgcggagatcatgcctgccactagtgatagcgtgccgttaattgcacagtattttgcctcaacaatgattatcgttggcctgtctgtcgtagtgacagtgatagtcctacagtatcatcaccacgatcccgatggaggtaaaatgcccaagtggacgagggtcatactcctaaactggtgcgcctggtttctacgcatgaaacgacccggagaggacaaggtcaggcctgcctgtcagcataaacagagaagatgttcactggccagcgtagagatgagtgccgtggcgccacctcccgcatccaatggcaatctactctatatcggctttcgagggttagacggtgtccattgcgtccctactcccgactccggagtcgtgtgcgggcgcatggcatgttctcccacccacgacgaacatctgttacatggcggccagcctcccgaaggagatcccgatttggccaaaattctagaagaggtgcgctacatcgccaacagattccggtgtcaagatgagagtgaggcggtttgttctgagtggaagttcgccgcatgcgtggtggatcggttgtgtcttatggctttcagtgtcttcacaatcatttgtaccatcggaatcttaatgtcagcacctaatttcgtggaggccgttagtaaggatttcgcctag

SEQ ID NO: 315360 - DNA, 1239 bp, Artificial Sequence
  derived and/or modified sequence
atgcaaaaatactgtatctatcaacacttccagtttcagctcttaatccagcatctgtggatcgctgccaattgcgatatcgcagacgaacgctttgatgctacatttcacaccaacgtgctggtcaactcttcagggcactgccagtacctcccacctggtattttcaaaagtagttgctatatcgacgtcaggtggtttccttttgatgttcagcactgtaaattgaagttcggatcttggtcttacggtgggtggtctctcgatctccagatgcaggaggcagacatctcgggttatattcccaatggagagtgggatctcgtggggatccctgggaagcggagtgagaggttctacgaatgctgcaaggagccttatcccgatgtgaccttcactgttactatgcggagacggaccctttattatggactaaacctgctgattccatgcgtgctcatatcggcactggctctcctggtctttcttctaccggcagactctggcgaaaaaatctccctcggaattacagtgctgctttctttaaccgtctttatgctgctcgtcgctgaaattatgcctgccacgtcagactccgtgccgctcatagcgcagtacttcgcctccacgatgataatcgttggccttagcgtcgtagtcaccgtgattgttctgcaataccaccaccacgacccggatggtggcaagatgcctaaatggactagggtgatcttgctgaattggtgcgcgtggtttctcagaatgaaacgaccaggggaagacaaagtgcgaccagcctgtcagcataaacagagacgatgctcactagcctcagtggagatgtcagccgtcgctcccccaccagcaagcaacggaaatcttctgtatatcggatttcggggactagatggtgtgcattgcgtacccacaccagattcgggagtggtctgtggaagaatggcctgtagtcccacccacgacgagcatcttctccacggcggacagccgcctgagggcgacccagacctggcaaagatattggaagaagttagatacatcgccaaccggtttcgatgtcaggatgagtctgaggcagtgtgttctgagtggaaattcgctgcgtgcgtcgttgataggttgtgcctgatggcctttagtgtgtttaccatcatctgcactattgggatactaatgagtgcgcctaacttcgtggaggcagtgagtaaggatttcgcttag

SEQ ID NO: 315361 - DNA, 1239 bp, Artificial Sequence
  derived and/or modified sequence
atgcaaaaatattgcatctaccagcattttcagttccaattgctaatccagcatttgtggatagctgcaaactgtgatattgctgatgagcgctttgacgccacattccacactaacgtgttggtgaattcttctgggcattgccagtacctgcctccaggcatattcaagagttcctgctacatcgatgtacgctggtttccctttgatgtgcagcactgcaaactgaagtttgggtcctggtcttacggaggctggtccttggatctgcagatgcaggaggcagatatcagtggctatatccccaatggagaatgggacctagtgggaatccccggcaagaggagtgaaaggttctatgagtgctgcaaagagccctaccccgatgtcaccttcacagtgaccatgcgccgcaggacgctctactatggcctcaacctgctgatcccctgtgtgctcatctccgccctcgccctgctggtgttcctgcttcctgcagattccggggagaagatttccctggggataacagtcttactctctcttaccgtcttcatgctgctcgtggctgagatcatgcccgcaacatccgattcggtaccattgatagcccagtacttcgccagcaccatgatcatcgtgggcctctcggtggtggtgacagtgatcgtgctgcagtaccaccaccacgaccccgacgggggcaagatgcccaagtggaccagagtcatccttctgaactggtgcgcgtggttcctgcgaatgaagaggcccggggaggacaaggtgcgcccggcctgccagcacaagcagcggcgctgcagcctggccagtgtggagatgagcgccgtggcgccgccgcccgccagcaacgggaacctgctgtacatcggcttccgcggcctggacggcgtgcactgtgtcccgacccccgactctggggtagtgtgtggccgcatggcctgctcccccacgcacgatgagcacctcctgcacggcgggcaaccccccgagggggacccggacttggccaagatcctggaggaggtccgctacattgccaaccgcttccgctgccaggacgaaagcgaggcggtctgcagcgagtggaagttcgccgcctgtgtggtggaccgcctgtgcctcatggccttctcggtcttcaccatcatctgcaccatcggcatcctgatgtcggctcccaacttcgtggaggccgtgtccaaagactttgcgtaa

SEQ ID NO: 315362 - DNA, 966 bp, Artificial Sequence
  derived and/or modified sequence
atgcaggaggccgacatcagcggctacatccccaacggcgagtgggacctggtgggcatccccggcaagagaagcgagagattctacgagtgctgcaaggagccctaccccgacgtgaccttcaccgtgaccatgagaagaagaaccctgtactacggcctgaacctgctgatcccctgcgtgctgatcagcgccctggccctgctggtgttcctgctgcccgccgacagcggcgagaagatcagcctgggcatcaccgtgctgctgagcctgaccgtgttcatgctgctggtggccgagatcatgcccgccaccagcgacagcgtgcccctgatcgcccagtacttcgccagcaccatgatcatcgtgggcctgagcgtggtggtgaccgtgatcgtgctgcagtaccaccaccacgaccccgacggcggcaagatgcccaagtggaccagagtgatcctgctgaactggtgcgcctggttcctgagaatgaagagacccggcgaggacaaggtgagacccgcctgccagcacaagcagagaagatgcagcctggccagcgtggagatgagcgccgtggcccccccccccgccagcaacggcaacctgctgtacatcggcttcagaggcctggacggcgtgcactgcgtgcccacccccgacagcggcgtggtgtgcggcagaatggcctgcagccccacccacgacgagcacctgctgcacggcggccagccccccgagggcgaccccgacctggccaagatcctggaggaggtgagatacatcgccaacagattcagatgccaggacgagagcgaggccgtgtgcagcgagtggaagttcgccgcctgcgtggtggacagactgtgcctgatggccttcagcgtgttcaccatcatctgcaccatcggcatcctgatgagcgcccccaacttcgtggaggccgtgagcaaggacttcgcctag

SEQ ID NO: 315363 - DNA, 966 bp, Artificial Sequence
  derived and/or modified sequence
atgcaggaagcagatatcagcggttatattcctaatggcgaatgggatctcgtcggtataccaggtaaaaggtctgagcgtttttacgagtgttgtaaagagccatatccagacgttacatttacagtgaccatgaggaggcgcacgctgtactatggacttaacctgctcataccctgtgtcttgataagcgccctggccctgctggtctttcttcttcctgcagacagcggtgaaaaaatcagtctaggaattacagtgttgcttagcttaacagtctttatgctgctcgtggcggagataatgcccgccacctctgattcagtgccattaatcgcccaatactttgcgtccaccatgattattgtcggactctctgtggtggtaaccgtgattgtgctgcagtaccatcaccacgatcccgacgggggtaaaatgccaaagtggacacgggttatcctgctgaactggtgtgcttggtttctgaggatgaagcgcccaggcgaggataaggtcaggcctgcgtgccagcacaaacaaagacggtgtagcctggcgagcgttgaaatgtccgcggtggccccacccccagcctctaatggcaacttactctatatcggcttcagaggactcgacggtgtacattgcgtcccaacccccgattccggagtggtctgtgggagaatggcgtgtagcccaacccacgacgaacatcttcttcacggcggccagccaccagaaggcgacccggatctagcgaaaattctggaggaagtgcggtacatcgcaaatcgctttcgttgccaggacgagtccgaggcagtgtgttctgagtggaagtttgcagcatgcgtagtggatcgtctgtgcctgatggcattctcagtgttcacaattatctgcactattggtatactgatgagtgcacctaattttgtcgaagcggtgtctaaggatttcgcgtag

SEQ ID NO: 315364 - DNA, 966 bp, Artificial Sequence
  derived and/or modified sequence
atgcaggaagccgatatctctggttatattcctaacggtgagtgggatctggtgggtatccccggcaaaaggtcagaaagattctatgagtgctgcaaggagccatatcccgacgtgaccttcaccgttacaatgcgcaggcggaccttgtattatggactgaacctcttaattccatgcgttcttattagtgcccttgcacttttggtctttctgcttcctgcggactcaggagaaaagatcagcctcggaatcacggtgcttctcagtctcacagtgtttatgctgctggtcgcagaaatcatgccagcaacgtcagacagcgtgcccttgattgcacaatacttcgcctcaacgatgataatagtgggtttgtccgtcgtcgtcactgttatagtgctccagtatcaccaccacgatcccgacggaggtaaaatgccgaagtggacccgcgtgatcctgctaaactggtgtgcttggttcttgagaatgaagagacctggtgaggacaaagtgcgccccgcctgccaacacaaacagagacgatgttcactggcctctgtagagatgtcagccgtggcccctccccctgcttcgaacggaaacctcctgtatattggatttcgcggtcttgacggagtgcattgcgtccccactcccgacagcggggtcgtctgtggccgcatggcttgctcacctacccacgacgaacatctcctgcacgggggccagccacccgagggcgatcccgacctcgcaaagattctagaagaagttaggtatatcgccaacaggtttagatgtcaggacgagagtgaggctgtatgctccgaatggaaattcgcagcttgcgtcgtggatcgcctgtgcctgatggcatttagcgtgttcacgatcatttgcaccatcggcatcctgatgtccgctcccaattttgtggaggccgtgagcaaggacttcgcctag

SEQ ID NO: 315365 - DNA, 966 bp, Artificial Sequence
  derived and/or modified sequence
atgcaggaggccgacatcagcggctacatccccaacggggagtgggacctggtgggcatccctgggaagaggtctgagcgcttctatgagtgctgcaaggagccctacccagatgtgaccttcaccgtgaccatgagaagaaggaccctgtactacggcctgaacctgctgatcccctgtgtgctgatcagcgccctggccctgctggtgttcctgctgcctgctgacagcggggagaagatcagcctgggcatcaccgtgctgctgagcctgaccgtcttcatgctgctggtggccgagatcatgcctgccaccagtgacagcgtgcccctcatcgcccagtactttgccagcaccatgatcatcgtgggcctgtctgtggtggtgaccgtcatcgtgctgcagtaccaccaccacgaccctgatggcggcaagatgcccaagtggaccagggtcatcctgctgaactggtgtgcctggttcctgaggatgaagaggcctggagaggacaaggtgcggcctgcctgccagcacaagcagaggcgctgcagcctggcctctgtggagatgtctgctgtggcccctcctccagccagcaatggaaacctgctgtacatcggcttccggggcctggatggagtgcactgtgtgcccaccccagacagcggcgtggtgtgtggccgcatggcctgcagccccacccatgatgagcacctgctgcatggaggccagcccccagagggggaccctgacctggccaagatcctggaggaggtgcgctacatcgccaaccgcttccgctgccaggatgagagcgaggccgtgtgcagcgagtggaagtttgctgcctgtgtggtggaccggctgtgcctgatggccttctctgtgttcaccatcatctgcaccatcggcatcctgatgtctgcccccaactttgtggaggccgtgtccaaggactttgcctag

SEQ ID NO: 315366 - DNA, 966 bp, Artificial Sequence
  derived and/or modified sequence
atgcaggaggccgacatcagcggctacatccccaacggcgagtgggatctggttggcatccctggcaaacgctcggaacggttttatgaatgttgcaaggaaccgtatcccgacgtgacattcaccgtgacgatgcgccggcgcaccttatactatggcctgaatttgttaatcccatgcgtactcatctccgccttggccctgctcgttttcttgctgcctgccgacagtggcgagaagatcagcttaggtatcaccgtactccttagcctgaccgtgttcatgctgttggttgcagagattatgcccgctacctcggactcagtgcccttgattgctcaatactttgcttcaactatgatcattgttggtctgtctgtggtagtcactgttatcgtactccagtaccatcatcacgaccccgacgggggcaaaatgcctaagtggaccagagtcatcctgctgaactggtgcgcttggtttctcagaatgaagagaccaggagaggataaggtccggcccgcctgccagcacaagcagagaagatgtagcctggcttcagtggagatgtccgctgtcgcgccgcctccagccagcaatggcaacctgttgtatatagggttcaggggactggatggggtacattgtgtacctaccccagactctggtgtggtctgtgggcgaatggcgtgtagcccaacccatgatgaacatctgctgcacggcggacagcctcccgagggcgatccagatctggcgaagatcctcgaggaggttcggtacatagctaacaggttcaggtgtcaagatgagtccgaagcagtatgctccgagtggaagttcgccgcctgcgtcgtcgatcggctgtgtcttatggccttttccgtctttaccatcatctgtaccatcggaattctgatgagcgcccctaactttgtcgaagccgtttcaaaagattttgcatag

SEQ ID NO: 315367 - DNA, 966 bp, Artificial Sequence
  derived and/or modified sequence
atgcaggaggccgacatcagcggctacatccccaacggcgagtgggaccttgtaggaattcctggcaaacggagtgagaggttttacgagtgttgcaaagaaccctacccagacgtaacatttactgtgactatgcgccgacggaccctctattatggactgaatctcctgatcccttgtgttctcatatccgcactcgcacttttagttttcctgttacctgctgattctggcgaaaaaatcagcctggggatcaccgtgcttctaagcttgacagtgttcatgctgctggttgccgaaatcatgcccgcaacttcagactccgtgcccttaatagcacagtattttgccagcacaatgataatagtgggcctgtctgtcgtcgtcaccgtgatagtcctccagtaccaccaccacgatcctgacggtgggaaaatgcctaagtggacacgggtcattcttttaaactggtgtgcttggtttttgaggatgaaaaggcccggcgaggataaggttagacccgcttgccagcataaacagcggcggtgttccctggccagtgtggagatgtcagccgtggcaccgccccctgcaagcaacgggaatctgctctatatcggcttccgggggttggacggcgtgcactgtgttcccaccccagattccggagtggtgtgtggccggatggcctgttcacctacccacgatgaacacctccttcacgggggccagccaccggaaggggatccagatctggcaaaaatcctggaggaggtccgctatatcgcaaatcgctttcgctgccaggacgagtccgaagccgtttgctccgagtggaagtttgcggcctgcgtcgtggacaggctgtgcctgatggccttctcagtattcacaattatctgcacaatcgggattcttatgtctgcaccaaacttcgtggaagccgtctccaaagactttgcctag

SEQ ID NO: 315368 - DNA, 966 bp, Artificial Sequence
  derived and/or modified sequence
atgcaggaagctgatatcagtggatatattcccaatggcgaatgggatctggttggaatcccgggaaagcggtctgaacgtttttatgagtgttgcaaggaaccctaccctgacgtgacgttcaccgtcacaatgcgccgaagaaccctctactatggtctgaatttgttaataccatgtgtgctcatctctgccctcgcactgctcgtctttctcctcccagcagacagcggggaaaagatcagcttagggattacagtactgctttcacttaccgtcttcatgttactcgtagctgagataatgcccgctacctctgacagcgtcccactaattgcacagtatttcgcttcaaccatgatcattgtggggttatctgtcgtggtgaccgtcatcgtgcttcaataccatcatcacgaccctgacgggggtaaaatgcctaagtggacaagagtgatcttattaaattggtgcgcctggtttttacgaatgaaacgacctggcgaggataaggtgagacctgcttgccagcacaagcagcggagatgctctctcgcttccgtggaaatgtcagctgtcgcaccccctccagccagcaacggcaaccttctctacatcggctttaggggcctggatggagtgcactgtgttcccacgccagattctggagttgtgtgcggcagaatggcttgcagtccaacgcatgacgaacacttgctccatggtggacagccacctgagggcgaccccgatcttgctaagatattagaagaggtgcggtacatcgccaaccggttccggtgtcaggacgagtccgaggctgtgtgtagcgagtggaagttcgccgcttgtgttgtggaccggctgtgcctgatggctttctctgtgttcacgattatatgcacaattgggatcctaatgtcagccccaaattttgtcgaggctgtttcaaaggattttgcgtag

SEQ ID NO: 315369 - DNA, 966 bp, Artificial Sequence
  derived and/or modified sequence
atgcaagaagccgacatttcaggatatatccctaatggggagtgggatctggtggggatcccaggcaagaggagtgagaggttctatgaatgttgtaaggagccctaccccgacgttacatttactgtcacaatgcgcaggagaactctgtactacggtctgaacctcctcattccgtgtgtactaatctcagccttggccctgttagtcttcttactccctgcggatagtggcgaaaagatcagtctggggattaccgtcttactgtcactcaccgtgtttatgctgctggtcgccgagatcatgcccgcaacctccgacagcgttcctcttatcgcccaatacttcgcctctaccatgattatcgtgggattatccgtcgtggtgactgtcatcgtgcttcaatatcatcaccacgaccccgatggaggcaaaatgcccaaatggaccagggtgatcctgcttaactggtgcgcgtggttcctgaggatgaaaaggccaggggaagataaggtgcgtcctgcgtgtcaacacaagcagcggcgatgtagtttagcgtcagtggagatgagtgctgttgcccctccccctgcatctaacggaaaccttctgtacattggctttcggggactcgacggtgtccactgtgttcccaccccagattctggcgtcgtttgtggcaggatggcgtgttcgcctactcatgacgagcaccttctgcacggcggacagccacccgagggagaccccgatctcgcgaagattctagaggaggtgcggtatatcgccaatcgcttccgctgtcaggacgaaagcgaggccgtatgttccgaatggaaattcgcagcctgcgtcgtggataggttatgtttaatggctttctcggtcttcaccataatatgtacaattgggatattgatgtctgcccctaatttcgtggaggcagtcagcaaggactttgcttag

SEQ ID NO: 315370 - DNA, 966 bp, Artificial Sequence
  derived and/or modified sequence
atgcaggaggcagatatatcagggtatatacccaacggcgaatgggacctggtaggtatccctggcaaaaggagcgagcgattctacgaatgctgcaaggagccctacccggacgtgacctttacggtgaccatgcgaagacgtacattgtattatggcctcaacctgctgattccatgcgtgctgatctccgcacttgccctgcttgtctttttgctcccggccgattcaggagagaaaatttccttgggcattaccgttcttctgtctctaaccgtctttatgttgttggtggccgaaatcatgcccgccacttctgatagcgtacctctcattgcccagtattttgcatccactatgattatcgtgggcttgtcagtcgtcgtgacggtgatcgtgttgcagtatcatcaccatgatcccgacggaggcaaaatgcctaaatggactcgggtgatcctccttaattggtgcgcctggttcctgaggatgaaacgacccggagaggataaagtgcgaccggcgtgccaacacaaacagcggcggtgctcattagcaagcgtagaaatgtctgctgtggcaccacctcccgcttctaacggcaacttgctctacatcggctttagaggattggacggtgtgcactgtgtccctacacctgactccggggtagtgtgtgggcgcatggcctgtagtcctactcacgacgagcacttactccacgggggccaaccaccagagggcgaccccgatctcgctaagatccttgaagaagttagatatattgcaaatcgcttccggtgtcaggatgaaagtgaggcagtgtgctccgagtggaaattcgccgcttgtgtcgtggaccggttgtgtttgatggcctttagcgtctttactatcatatgtaccatcggcattttgatgtctgcgccaaactttgttgaagctgtgtccaaggattttgcatag

SEQ ID NO: 315371 - DNA, 966 bp, Artificial Sequence
  derived and/or modified sequence
atgcaggaggccgacatcagcggctacatccccaacggcgagtgggatcttgttggaatcccgggcaaacgctccgagcgcttttatgagtgctgcaaggagccatatccggacgtgacctttaccgtgaccatgcgcagaagaactctatactacgggctgaatttactgattccttgtgtattgattagtgctttggccctcctggtcttcctcctcccagctgactcaggcgagaagatcagcttggggatcacagtgctcctttcattaaccgtatttatgctgctggtggccgagattatgcccgccaccagtgactccgtaccgctgatagcccagtactttgccagcactatgatcatcgtgggcctgagtgttgtggtaactgtgatcgtgttacagtaccaccaccatgatccagatgggggaaagatgcctaaatggacacgcgtaattctgctcaactggtgtgcttggttcctgaggatgaagagaccaggcgaggacaaagtgcgtcctgcctgtcagcataaacagcgaaggtgctccctggcgtcagtggaaatgtccgcggttgccccaccccccgcatccaatggtaatctgctgtatatcggtttcagaggcctggacggggttcactgtgttcctactcctgactccggcgtagtatgtggacggatggcctgctcaccaacccatgatgagcacctcctgcatgggggccaaccaccagaaggtgatcccgacctagcaaagatcctggaagaagtgcggtacatagcaaacaggtttaggtgtcaggatgaaagcgaagctgtctgcagtgaatggaaattcgctgcgtgcgtggttgataggttatgcctgatggccttcagcgtgtttactattatctgtaccatcgggatccttatgagcgcgccaaatttcgttgaggccgtctctaaggactttgcatag

SEQ ID NO: 315372 - DNA, 966 bp, Artificial Sequence
  derived and/or modified sequence
atgcaagaagcggacatttccggctacatcccaaacggtgagtgggaccttgtcggtattcccggtaagcggtcagaaaggttctatgaatgctgtaaggagccttatccagacgtgactttcactgtgactatgcgtcgcaggactctctactacggactgaatttgctaattccgtgcgtgctgatcagtgctctcgctcttcttgtgttcttgcttcccgcagactccggcgaaaaaatctctctgggcatcacagttctgctgtcactcaccgtttttatgctcctagttgccgaaataatgcctgcaactagtgatagcgtgcctctcatcgcccagtatttcgcgtcaaccatgattatcgttgggctcagcgttgtcgtcacggttatcgtgctgcagtatcaccaccacgaccctgacgggggtaagatgccaaagtggacgagggtgatattgttgaattggtgtgcgtggtttcttcggatgaaacggccaggggaggacaaagtacggccagcctgtcagcacaagcaaagaaggtgcagtctcgccagcgtcgagatgtccgctgttgcgccaccccctgctagtaacggaaaccttctgtacattggctttcgtggactagacggggttcattgcgtgccaacccctgattccggtgtagtgtgcggcagaatggcctgcagtccaacccatgatgagcacctacttcacgggggacagcccccagaaggagacccagacctcgcgaaaatcctagaggaggtcagatatatagccaacaggtttaggtgtcaggatgaatcagaagctgtatgcagtgagtggaaattcgcggcatgcgtggtggataggctatgtctcatggccttttccgtgttcactattatttgcaccatcggaatccttatgtccgcccctaactttgtcgaagcggtctcaaaggattttgcatag

SEQ ID NO: 315373 - DNA, 78 bp, Artificial Sequence
  derived and/or modified sequence
atggggatccagacgagccccgtcctgctggcctccctgggggtggggctggtcactctgctcggcctggctgtgggc

SEQ ID NO: 315374 - protein, 72 aa, Artificial Sequence
  derived and/or modified sequence
MATLGHTFPFYAGPKPTFPMDTTLASIIMIFLTALATFIVILPGIRGKTRLFWLLRVVTSLFIGAAILAVNF

SEQ ID NO: 315375 - protein, 13 aa, Artificial Sequence
  derived and/or modified sequence
MATLGHTFPFYAG

SEQ ID NO: 315376 - protein, 16 aa, Artificial Sequence
  derived and/or modified sequence
MATLGHTFPFYAGPKP

SEQ ID NO: 315377 - DNA, 219 bp, Artificial Sequence
  derived and/or modified sequence
atggccacccttggccacacttttcccttctacgctggccccaaaccaacctttcccatggatacaactttggccagcataattatgatttttctgaccgccttggccacctttatcgtaatcttgccgggcataaggggcaagacacggctattctggttattgcgggtcgtaacctccctctttatcggggctgccatcctggctgtaaacttttag

SEQ ID NO: 315378 - DNA, 51 bp, Artificial Sequence
  derived and/or modified sequence
atggccacattgggacacacatttcctttttatgcggggcctaaaccttag

SEQ ID NO: 315379 - DNA, 366 bp, Artificial Sequence
  derived and/or modified sequence
atggctaccctaggtcacacgttccccttctacgcaggccccaagcctacatttcctatggacactactctggccagtataatcatgatctttctaaccgccctggccaccttcatagtcatactccccggcatccgaggcaagacccgactgttttggctactccgtgtcgtgacctccttgttcataggcgctgcgatcttagctgttaacttttcgtccgagtggagcgtgggacaggtcagtacaaacacatcctataaggctttcagcagtgaatggatctctgcggacattggcctccaagtgggtctgggcggggtgaatattacgctgaccggaacacctgttcaacagctgaattag

SEQ ID NO: 315380 - DNA, 219 bp, Artificial Sequence
  derived and/or modified sequence
atggccaccctgggccacaccttccccttctacgccggccccaagcccaccttccccatggacaccaccctggccagcatcatcatgatcttcctgacagccctggccaccttcatcgtcatcctgcccggcatccggggcaagaccaggctcttctggctgctgcgggtggtgaccagcctcttcatcggggccgccatcctggccgtgaacttctag

SEQ ID NO: 315381 - DNA, 366 bp, Artificial Sequence
  derived and/or modified sequence
atggccaccctgggccacaccttccccttctacgccggccccaagcccaccttccccatggacaccaccctggccagcatcatcatgatcttcctgacagccctggccaccttcatcgtcatcctgcccggcatccggggcaagaccaggctcttctggctgctgcgggtggtgaccagcctcttcatcggggccgccatcctggccgtgaacttcagcagcgagtggagcgtgggccaggtgtccaccaacaccagctacaaggccttcagcagcgagtggatctctgctgacatcggcctgcaggtgggcctgggcggcgtgaacatcaccctgaccggcacccctgtgcagcagctgaactag

SEQ ID NO: 315382 - DNA, 219 bp, Artificial Sequence
  derived and/or modified sequence
atggccaccctgggccacaccttccccttctacgccggccccaagcccacttttcctatggataccaccctggcgtccatcatcatgatcttcctgacagctctggctacattcatcgtgatcctgcccggcatccgtgggaaaacccgcctgttttggctcctgagggtggttacgagcctgtttatcggcgctgctatacttgctgtgaacttctag

SEQ ID NO: 315383 - DNA, 51 bp, Artificial Sequence
  derived and/or modified sequence
atggccaccctgggccacaccttccccttctacgccggccccaagccatag

SEQ ID NO: 315384 - DNA, 366 bp, Artificial Sequence
  derived and/or modified sequence
atggccaccctgggccacaccttccccttctacgccggccccaagcccacgtttcctatggacaccactctcgcgtctatcattatgattttccttactgctttagccactttcatcgtgatactgccgggcatccgcgggaaaaccaggctgttctggctccttcgggtggttacaagcctgttcataggtgccgctattctagccgtgaatttctcatctgaatggtcagtgggccaggtgagcaccaatacttcttacaaagctttctcttcggaatggatcagtgctgatattggactccaggtagggttggggggcgtcaatatcactctgacagggactccagtgcagcagctgaattag

SEQ ID NO: 315385 - DNA, 219 bp, Artificial Sequence
  derived and/or modified sequence
atggccaccctcggtcacacgtttccgttctatgcaggcccaaagcctacatttcctatggataccacactcgcatctatcataatgattttcctcacagccctcgccactttcattgtgatcttaccgggaatccgagggaagacaagactattctggctgctgcgcgtggtaaccagcctgttcatcggggctgctatcctggccgttaacttctag

SEQ ID NO: 315386 - DNA, 51 bp, Artificial Sequence
  derived and/or modified sequence
atggcaaccctgggacacacttttcccttctacgccggtcctaagccttag

SEQ ID NO: 315387 - DNA, 366 bp, Artificial Sequence
  derived and/or modified sequence
atggctacactgggtcacaccttcccattttacgcagggccaaagccaacattccccatggacacaacactcgcttcaatcatcatgatcttcctgacagcactggccaccttcatcgttatactgcctgggatcagagggaagacccgattattttggctactccgggttgtgacctctcttttcatcggcgcagccatcctagctgtcaatttcagcagcgaatggagcgtcggacaggtgagtactaacaccagttataaagccttcagctccgaatggatttctgctgatataggtctgcaggttgggcttgggggtgtaaatatcaccctgactggaacaccagtacagcagttaaactag

SEQ ID NO: 315388 - DNA, 219 bp, Artificial Sequence
  derived and/or modified sequence
atggccaccctgggccacaccttccccttctacgccggccccaagcccaccttccccatggacaccaccctggccagcatcatcatgatcttcctgaccgccctggccaccttcatcgtgatcctgcccggcatcagaggcaagaccagactgttctggctgctgagagtggtgaccagcctgttcatcggcgccgccatcctggccgtgaacttctag

SEQ ID NO: 315389 - DNA, 51 bp, Artificial Sequence
  derived and/or modified sequence
atggccaccctgggccacaccttccccttctacgccggccccaagccctag

SEQ ID NO: 315390 - DNA, 366 bp, Artificial Sequence
  derived and/or modified sequence
atggccaccctgggccacaccttccccttctacgccggccccaagcccaccttccccatggacaccaccctggccagcatcatcatgatcttcctgaccgccctggccaccttcatcgtgatcctgcccggcatcagaggcaagaccagactgttctggctgctgagagtggtgaccagcctgttcatcggcgccgccatcctggccgtgaacttcagcagcgagtggagcgtgggccaggtgagcaccaacaccagctacaaggccttcagcagcgagtggatcagcgccgacatcggcctgcaggtgggcctgggcggcgtgaacatcaccctgaccggcacccccgtgcagcagctgaactag

SEQ ID NO: 315391 - DNA, 996 bp, Artificial Sequence
  derived and/or modified sequence
ctgaccggcctgagaaacctgggcaacacctgctacatgaacagcatcctgcagtgcctgtgcaacgccccccacctggccgactacttcctgaccggcaagtacatgagcaacctgctgggccacaagggcgaggtggccgaggagttcggcatcatcatgaaggccctgtggaccggccagtacagatacatcagccccaaggacttcaagatcaccatcggcaagatcaacgaccagttcgccggctacagccagcaggacagccaggagctgctgctgttcctgatggacggcctgcacgaggacctgaacaagttccaggccgacaacagaaagagatacaaggaggagaccgccgagcacgcctggcagaagcacaagcagctgaacgagagcatcatcgtggccctgttccagggccagttcaagagcaccgtgcagtgcctgacctgccacaagaagagcagaaccttcgaggccttcatgtacctgagcctgcccctggccagcaccagcaagtgcaccctgcaggactgcctgagactgttcagcaaggaggagaagctgaccgacaacaacagattctactgcagccactgcagagccagaagagacagcctgaagaagatcgagatctggaagctgccccccgtgctgctggtgcacctgaagagattcagctacgacggcagatggaagcagaagctgcagaccagcgtggacttccccctggagaacctggacctgagccagtacgtgatcggccccaagaacaacctgaagaagtacaacctgttcagcgtgagcaaccactacggcggcctggacggcggccactacaccgcctactgcaagaacgccgccagacagagatggttcaagttcgacgaccacgaggtgagcgacatcagcgtgagcagcgtgaagagcagcgccgcctacatcctgttctacaccagcctgggccccagagtgaccgacgtggccacctag

SEQ ID NO: 315392 - DNA, 408 bp, Artificial Sequence
  derived and/or modified sequence
atgcccgccgtggccagcgtgcccaaggagctgtacctgagcagcagcctgaaggacctgaacaagaagaccgaggtgaagcccgagaagatcagcaccaagagctacgtgcacagcgccctgaagatcttcaagaccgccgaggagtgcagactggacagagacgaggagagagcctacgtgctgtacatgaagtacgtgaccgtgtacaacctgatcaagaagagacccgacttcaagcagcagcaggactacttccacagcatcctgggccccggcaacatcaagaaggccgtggaggaggccgagagactgagcgagagcctgaagctgagatacgaggaggccgaggtgagaaagaagctggaggagaaggacagacaggaggaggcccagagactgcagtag

SEQ ID NO: 315393 - DNA, 291 bp, Artificial Sequence
  derived and/or modified sequence
atgcccgccgtggccagcgtgcccaaggagctgtacctgagcagcagcctgaaggacctgaacaagaagaccgaggtgaagcccgagaagatcagcaccaagagctacgtgcacagcgccctgaagatcttcaagaccgccgaggagtgcagactggacagagacgaggagagagcctacgtgctgtacatgaagtacgtgaccgtgtacaacctgatcaagaagagacccgacttcaagcagcagcaggactacttccacagcatcctgggccccggcaacatcaagtag

SEQ ID NO: 315394 - DNA, 222 bp, Artificial Sequence
  derived and/or modified sequence
atgcccgccgtggccagcgtgcccaaggagctgtacctgagcagcagcctgaaggacctgaacaagaagaccgaggtgaagcccgagaagatcagcaccaagagctacgtgcacagcgccctgaagatcttcaagaccgccgaggagtgcagactggacagagacgaggagagagcctacgtgctgtacatgaagtacgtgaccgtgtacaacctgatctag

SEQ ID NO: 315395 - DNA, 996 bp, Artificial Sequence
  derived and/or modified sequence
ctcacaggcttacgtaatctgggcaacacctgttacatgaattctatccttcagtgcttgtgcaacgcccctcacctggccgattacttcctgactggcaagtacatgagtaatcttctggggcataagggtgaggtcgctgaggagttcgggattatcatgaaggctttgtggaccggacaataccgatatatttcaccaaaggactttaagataactattggtaagatcaatgatcagttcgcggggtatagtcagcaggattctcaggagctgttactgttcctgatggatggactgcatgaagatttgaacaagtttcaggccgacaaccgcaagcgatacaaagaggaaacagccgaacatgcatggcagaaacacaaacaattgaacgaaagcataatagtggctctcttccagggccagttcaaatctacagtgcagtgcttaacatgtcataagaaaagtcgtactttcgaagcttttatgtatctgagcctgcccctcgccagcacgagcaaatgtaccctccaggattgtctgcgcctcttcagcaaggaggaaaagcttacagataataatcgcttctattgcagtcactgtagggcccgcagagattccctgaaaaagattgagatctggaagttgccaccagtgctcttggtgcacttgaagcggttctcctacgatggcaggtggaaacagaagttacagaccagcgtcgatttcccacttgagaacctggacttaagccagtacgtaattggtccaaaaaacaatttgaagaaatacaaccttttctctgtgtcaaatcactatgggggactcgatggagggcactataccgcttactgcaaaaatgccgcccgccagaggtggttcaagtttgacgatcacgaggtgtctgacataagcgtgtctagcgtcaagagttccgccgcttatattctgttctacacttctctcgggccccgggtgaccgacgttgcaacttag

SEQ ID NO: 315396 - DNA, 408 bp, Artificial Sequence
  derived and/or modified sequence
atgccagctgtggcctcagtgcctaaggagttgtacctttccagttcgctgaaggacctcaataagaagaccgaagttaaaccagagaaaattagcacaaagtcttacgtccacagtgcgctgaagatctttaagaccgcagaagaatgccgcctcgatagggatgaggagagagcatacgtgctatatatgaagtacgtgacagtgtataatttaatcaagaagaggccagattttaagcagcagcaggattactttcattccatcctgggacctggcaacatcaagaaagccgtggaggaggctgagcgacttagtgaatccctcaagctccggtatgaagaagccgaggtacggaaaaagctcgaggaaaaagacagacaggaggaggcccaaaggctccagtag

SEQ ID NO: 315397 - DNA, 291 bp, Artificial Sequence
  derived and/or modified sequence
atgccagctgtagcaagcgtgccgaaggaattgtacctgtcttcgtcactgaaggacctgaataaaaagacggaagtgaaacctgagaagattagcacaaagagctacgtgcattctgccctcaaaatttttaagacagccgaagagtgccgactagaccgggatgaggagcgggcatatgtgctgtacatgaaatatgtaaccgtgtataatctgatcaagaagcgaccggactttaaacagcaacaggattattttcacagcatcctgggaccagggaacatcaaatag

SEQ ID NO: 315398 - DNA, 222 bp, Artificial Sequence
  derived and/or modified sequence
atgcccgccgttgcctccgtgccgaaggaactgtatctttctagcagcctaaaggaccttaacaaaaagaccgaagtcaaaccagaaaagatttccacaaagagctatgtgcactccgccctgaaaatatttaaaacagctgaagagtgccggttagatagggacgaggagcgggcatatgtcttgtacatgaaatatgtgacggtgtacaatctgatttag

SEQ ID NO: 315399 - DNA, 996 bp, Artificial Sequence
  derived and/or modified sequence
ctgaccggcctgaggaacctgggcaacacctgctacatgaacagcatcctgcagtgcctgtgcaatgccccccacctggccgactacttcctgaccgggaagtacatgagcaacctgctgggccacaagggggaggtggccgaggagtttggcatcatcatgaaggccctgtggacaggccagtaccgctacatcagccccaaggacttcaagatcaccatcggcaagatcaatgaccagtttgctggctacagccagcaggacagccaggagctgctgctcttcctgatggatggcctgcacgaggacctgaacaagttccaggccgacaacaggaagcgctacaaggaggagacagctgagcacgcctggcagaagcacaagcagctgaatgaaagcatcatcgtggccctcttccagggccagttcaagagcacagtgcagtgcctgacctgccacaagaagagcaggacctttgaggccttcatgtacctgagcctgcccctggccagcaccagcaagtgcaccctgcaggactgcctgcggctcttcagcaaggaggagaagctgacagacaacaaccgcttctactgcagccactgccgggcccggcgggacagcctgaagaagattgagatctggaagctgccccctgtgctgctggtgcacctgaagcgcttctcctatgatggccgctggaagcagaagctgcagacctctgtggacttccccctggagaacctggacctgagccagtatgtgattggccccaagaacaacctgaagaagtacaacctcttctctgtgagcaaccactatggaggcctggatggcggccactacacagcctactgcaagaatgctgcccggcagcgctggttcaagtttgatgaccacgaggtgtctgacatctctgtgtcctctgtgaagagcagcgctgcctacatcctcttctacaccagcctgggcccccgggtgacagatgtggccacctag

SEQ ID NO: 315400 - DNA, 408 bp, Artificial Sequence
  derived and/or modified sequence
atgcctgctgtggcctctgtgcccaaggagctgtacctgagcagcagcctgaaggacctgaacaagaagacagaggtgaagccagagaagatcagcaccaagagctatgtgcacagcgccctgaagatcttcaagacagcagaagaatgtcggctggacagagatgaggagcgggcctacgtgctgtacatgaagtatgtgacagtgtacaacctgatcaagaagaggccagacttcaagcagcagcaggactacttccacagcatcctgggccctggcaacatcaagaaggctgtggaggaggccgagcggctgtctgagagcctgaagctgcgctatgaggaggccgaggtgaggaagaagctggaggagaaggaccggcaggaggaggcccagaggctgcagtag

SEQ ID NO: 315401 - DNA, 291 bp, Artificial Sequence
  derived and/or modified sequence
atgcctgctgtggcctctgtgcccaaggagctgtacctgagcagcagcctgaaggacctgaacaagaagacagaggtgaagccagagaagatcagcaccaagagctatgtgcacagcgccctgaagatcttcaagacagcagaagaatgtcggctggacagagatgaggagcgggcctacgtgctgtacatgaagtatgtgacagtgtacaacctgatcaagaagaggccagacttcaagcagcagcaggactacttccacagcatcctgggccctggcaacatcaagtag

SEQ ID NO: 315402 - DNA, 222 bp, Artificial Sequence
  derived and/or modified sequence
atgcctgctgtggcctctgtgcccaaggagctgtacctgagcagcagcctgaaggacctgaacaagaagacagaggtgaagccagagaagatcagcaccaagagctatgtgcacagcgccctgaagatcttcaagacagcagaagaatgtcggctggacagagatgaggagcgggcctacgtgctgtacatgaagtatgtgacagtgtacaacctgatctag

SEQ ID NO: 315403 - DNA, 996 bp, Artificial Sequence
  derived and/or modified sequence
ctgaccggcctgcggaacctgggcaacacctgctacatgaacagcatcctgcagtgtctctgtaatgcccctcaccttgcagattatttcctgactggaaagtacatgtctaatctgctgggccacaagggcgaggtcgcagaggagtttggtatcataatgaaggccctctggacaggccagtatagatatatctcccccaaagatttcaagatcacaatcggaaaaattaacgatcagtttgccgggtacagccagcaggattcccaggaattgcttctattcctgatggacggacttcacgaagacctgaacaaattccaggctgataatagaaaacggtacaaggaagaaacggccgagcatgcttggcagaaacacaagcagctaaacgagagtatcatcgtcgccttgtttcagggacagtttaagtcgacggtgcagtgccttacctgtcacaagaaatcgcgcaccttcgaagcgtttatgtacctgagccttcccttggcgtccacaagtaaatgtactctgcaagactgccttaggttattttctaaggaagagaagttaaccgacaacaatcggttttactgttcccactgtcgggctaggagagattctttgaaaaagatcgaaatttggaaacttcctccagtacttctggttcatctcaagaggttctcatacgatggccgctggaagcagaaactgcagacctctgtcgactttccattggaaaaccttgacctgtcccagtatgttatcggacctaagaacaatctcaaaaaatacaatttgtttagtgtttccaatcattacgggggtctggatggcgggcattatacagcatattgcaaaaatgctgctcggcagagatggttcaagttcgacgatcatgaagttagcgacatctccgtgtcttcggtcaagagcagtgcggcttatatcctcttttacacttctctgggcccaagggtcaccgatgtggctacctag

SEQ ID NO: 315404 - DNA, 408 bp, Artificial Sequence
  derived and/or modified sequence
atgcccgccgtggccagcgtgcccaaggagctgtacctgagcagcagcctgaaagatctcaacaaaaagaccgaggtgaaaccagagaaaatcagcactaagtcctatgttcatagcgctctgaaaatctttaaaacggccgaggaatgtcgactggatcgggacgaggagcgtgcttatgtactctacatgaagtacgtgactgtgtacaatttaatcaagaagcgacccgacttcaaacaacagcaggattattttcactccatcctgggccccggcaacattaagaaggcagtggaggaagctgagagattaagtgagtctctcaaactgagatatgaagaggcagaggttcggaaaaagctagaagaaaaagatcggcaggaggaggctcagaggctccagtag

SEQ ID NO: 315405 - DNA, 291 bp, Artificial Sequence
  derived and/or modified sequence
atgcccgccgtggccagcgtgcccaaggagctgtacctgagcagcagcctcaaggacctcaataaaaagaccgaagtgaaacctgaaaaaatctctaccaaaagctatgtgcacagcgccttgaaaatctttaaaactgcagaagagtgccggctggacagagacgaggagcgggcctacgtgctgtatatgaaatatgtcacagtatacaaccttatcaaaaagcggcctgatttcaagcaacagcaggattatttccactcaatcctcggtcctggtaacattaagtag

SEQ ID NO: 315406 - DNA, 222 bp, Artificial Sequence
  derived and/or modified sequence
atgcccgccgtggccagcgtgcccaaggagctgtacctgagcagctctcttaaggacctgaataagaagactgaggtgaagcctgagaagatctccaccaagtcgtatgtgcactcagcattgaagatattcaaaaccgccgaagaatgtagattggacagggacgaggagcgggcttatgtcttgtatatgaaatatgtgacagtctataacctcatttag

SEQ ID NO: 315407 - DNA, 996 bp, Artificial Sequence
  derived and/or modified sequence
ctgactgggctgcgaaatttgggcaacacgtgttacatgaattctattctccagtgcctctgcaacgcaccccacttggccgattactttctcaccgggaagtacatgagcaacctcttaggacacaagggcgaagtcgcggaagaattcgggattattatgaaagccctctggaccgggcagtacagatatatctctccaaaggacttcaagatcacgattgggaaaatcaacgaccagtttgctggatacagtcagcaggatagccaagagttgctgctctttctgatggatggactgcacgaagatttgaataaattccaggctgacaataggaaaagatacaaggaagaaactgccgagcatgcttggcaaaaacataagcagctgaacgaatccattattgtggccctgtttcagggacaatttaaatcaacagttcaatgtcttacatgccacaaaaagtcccgtactttcgaggccttcatgtatctgtctctccctttggcctccactagtaagtgtaccctgcaagactgcctgaggctgttctctaaagaggagaagctgactgataacaatcgtttttattgcagccattgtcgtgcacggcgagattccctgaaaaagatcgagatttggaagctcccacctgtcctgctggtgcacctgaaaaggttctcttacgacggtcgttggaaacaaaaactgcagacaagcgtggattttcctctggaaaatctcgacctgtcacaatatgtaatagggccaaagaacaacctgaagaaatacaacctattttccgtctccaaccactatgggggactagacgggggtcattataccgcctactgtaagaacgccgctcgccaacgctggtttaagttcgacgatcatgaggtatctgatatttccgtctcatccgtgaaatcctccgctgcgtacattctcttttatacctctttaggccctcgcgtaacagacgtcgccacctag

SEQ ID NO: 315408 - DNA, 408 bp, Artificial Sequence
  derived and/or modified sequence
atgcctgccgtcgcgtctgtgcctaaggagttatatctatccagttctctcaaggatttgaataaaaaaaccgaggtcaaacccgagaagataagtaccaagtcttatgtgcactctgctctaaaaattttcaaaacagctgaggagtgtcgcttggaccgagacgaagagcgggcttacgtgctatacatgaaatatgtgacagtgtacaatcttatcaaaaaaaggcctgatttcaagcagcagcaggactacttccattcgatcctgggccctgggaatattaagaaggctgttgaggaggccgagcgccttagcgaaagtctcaagctacggtatgaagaagccgaggtccgaaagaaattagaggaaaaagatcgccaggaggaggctcaaagactccagtag

SEQ ID NO: 315409 - DNA, 291 bp, Artificial Sequence
  derived and/or modified sequence
atgcccgcagtggcgagtgtgcccaaagaactgtatctttcctcgtcactgaaagacctgaacaagaaaaccgaggtcaagcccgaaaaaattagcactaagtcctatgtccatagcgccctgaagattttcaagactgcggaggagtgtcgtcttgaccgtgacgaggaaagagcctacgttctgtacatgaagtacgtgacagtctacaacctgattaagaagcgtccagattttaagcagcagcaggattactttcactctatcctcggacccggtaatatcaaatag

SEQ ID NO: 315410 - DNA, 222 bp, Artificial Sequence
  derived and/or modified sequence
atgcccgctgtggcgagcgtacctaaggaactgtatctgagcagctcgctcaaggatttgaacaagaagaccgaggtgaaacctgaaaaaattagcaccaagagttatgtacactccgcattaaagatattcaagacagcggaagagtgtaggctggaccgcgacgaagagcgggcatatgttctgtacatgaagtacgtgacagtgtacaatctgatttag

SEQ ID NO: 315411 - DNA, 2987 bp, Artificial Sequence
  derived and/or modified sequence
cttactggacttcgtaacttaggaaatacttgttatatgaactcaatattgcagtgcctatgtaacgctccacatttggctgattatttcttaacaggtaaatacatgtcaaatttgttggggcataaaggtgaagtggcagaagaatttggtataatcatgaaagccctgtggacaggacagtatagatatatcagtccaaaggactttaaaatcaccattgggaagatcaatgaccagtttgcaggatacagtcagcaagattcacaagaattgcttctgttcctaatggatggtctccatgaagatctaaataaattccaggctgataatcggaagagatataaagaagaaactgcagaacatgcctggcagaaacacaagcagctcaatgagtctattattgttgcactttttcagggtcaattcaaatctacagtacagtgcctcacatgtcacaaaaagtctaggacatttgaggccttcatgtatttgtctctaccactagcatccacaagtaaatgtacattacaggattgccttagattattttccaaagaagaaaaactcacagataacaacagattttactgcagtcattgcagagctcgacgggattctctaaaaaagatagaaatctggaagttaccacctgtgcttttagtgcatctgaaacgtttttcctacgatggcaggtggaaacaaaaattacagacatctgtggacttcccgttagaaaatcttgacttgtcacagtatgttattggtccaaagaacaatttgaagaaatataatttgttttctgtttcaaatcactacggtgggctggatggaggccactacacagcctattgtaaaaatgcagcaagacaacggtggtttaagtttgatgatcatgaagtttctgatatctccgtttcttctgtgaaatcttcagcagcttatatcctcttttatacttcattgggaccacgagtaactgatgtagccacataaggagacataggttataaactagttatcttttaaaaggctcagcaacacaactcttgaaatgcttatcaggataatggtagctatagctggccatttagaggaattctaggacagtgggagctgtgttactagcactatataattccggtcagtgctgacaaataacatttaacaagtattgcagtaatcatcacttacaggtaccatttatttcaaaacaacttttttagtctgctccaaagttaaaataattaactagctaagcattattattcgactggtctaaaaactattgttatcttttttttttccttttcactgttatggccttttcacatttctaaatcccatcttgatatactatgaatactctagaatgatgtaaagcagataggaatgtatgtgtacatatttattgcatacttgcacatcaaatcgatgtacatagtttaacacgtggtccttttgtgaaacctagaactcagaggattgctttttttctttcagcctattttgagttaacttcagtgctttcttagggaaatgacagggcaaagcaatttttctgttggctttgggctgtatttgtgcactaaatctttattctaaaaaaaaaaatggaaactttaatttttttaaaacgagaatttcatttacagctacattaaaatcttaatgagaaaaataatttataaccctgtgggtgttctgtctttaatattgtattatcaaatataggacagtaaaaccatagattttatatacacacgtgctatataataacacccagagtcattctttcaagactagtattctcacatattgagaatattcattctaaatattaaagtaaaaatgccgggagtcaggcatgattgcaaagtgaactgcattataaactacatctttacagagtgatgtattaagagggttaaaggagcttataatttatttaaccgagggactcagttgctatatatatagtcagtaaaacactccatataaaaataagattctaaaagtgcttcagaaagagaccaccattagcaggctctcagggagaagatgaaaggatggggttcaaattgtgaagctgacaacttttcatgttttacaattagtctaagagaccacttcttggctaaattattatatcaaatatattcaaatcatattcttaaactcatcgagccatttgaacaaaaattatttttgtttagcttcatgagtatctttggaaaataatttgttgaatatatatgattatgagatattttctgataaacactgaattttgaaacctgaactcactatataattgcagtgttttgaaggcctgcatccattagcattgcattatattcacactgccttttttagtgaaccaagacccatcttctggacgacagatttatcttaagatgaaaggttgtataacatgcccacaaggcataaaaatgttaatgatgcaagtaagttctaagagtttaatgaccaagcaaaactctaccaccagatgctgactgcttgttttgcagtgttcaggaaacaccattttcctggctcttaacgcttttgtattggtatggaaaagggctggcagctatagaacaggagatccatagcattttgaacagaagtatctggaatctcactgactcgtgtgttatcaaagctatatcaggcctgggtgactgaattcttgcagaaagcagtgtagtggccaccatccaaatcaccaaaatggttctatgggagaaaggaatgtcaaacttagtattcacatatgaacactaactactggaacagaaatgatagggccaagagatgctttttaaattgtcccttattctaaattaaaaggaagtgataattttgttgttaaatcatgcatatagcctgactgctatattgcttctcatttcattgtaactacttatatgttgtgcccattgactatcatctgtgaataaagaaagacaatatttagc

SEQ ID NO: 315412 - DNA, 498 bp, Artificial Sequence
  derived and/or modified sequence
gcatttatatagcagatgaagaatcaggaaagaagcacttgtaaggaaatatagcatccattgtgaaagtggaaaagtaaagataattcatcatgcctgctgtggcttcagttcctaaagaactctacctcagttcttcactaaaagaccttaataagaagacagaagttaaaccagagaaaataagcactaagagttatgtgcacagtgccctgaagatctttaagacagcagaagaatgcagattagatcgtgatgaggaaagggcctatgtactatatatgaaatacgtgactgtttataatcttatcaaaaaaagacctgatttcaagcaacagcaggattatttccattcaatacttggacctggaaacatcaaaaaagctgtcgaagaagctgaaagactctctgaaagccttaaattaagatatgaagaagctgaagtccggaaaaaacttgaggaaaaagacaggcaggaggaagcacagcggctacaac

SEQ ID NO: 315413 - DNA, 652 bp, Artificial Sequence
  derived and/or modified sequence
gcaatgcaaatcgggaaaagggggtgagctgggctggcttccgtcctggtagccaaggctaattctccctcgagttcttgggagatgggcatttggcgagaaggctggcgttagtgaagcgcgcccggcgtcacggcaacaacaatactcaacataaatatctgttcttgaactcctgggctcaagcagtcctcccacctcagtctcccagagtgttgggattacagctgtgaggcaccacgcccagtcagtgcactgctttttgcatggagaaagtcttgctgctactttaaaaaggaaagaagcacttgtaaggaaatatagcatccattgtgaaagtggaaaagtaaagataattcatcatgcctgctgtggcttcagttcctaaagaactctacctcagttcttcactaaaagaccttaataagaagacagaagttaaaccagagaaaataagcactaagagttatgtgcacagtgccctgaagatctttaagacagcagaagaatgcagattagatcgtgatgaggaaagggcctatgtactatatatgaaatacgtgactgtttataatcttatcaaaaaaagacctgatttcaagcaacagcaggattatttccattcaatacttggacctggaaacatcaaaaa

SEQ ID NO: 315414 - DNA, 410 bp, Artificial Sequence
  derived and/or modified sequence
ctcgagttcttgggagatgggcatttggcgagaaggctggcgttagtgaagcgcgcccggcgtcacgctgctggttaccccggagacaagctctgtccgcggagaggagtgggacaactcctaaaggaaagaagcacttgtaaggaaatatagcatccattgtgaaagtggaaaagtaaagataattcatcatgcctgctgtggcttcagttcctaaagaactctacctcagttcttcactaaaagaccttaataagaagacagaagttaaaccagagaaaataagcactaagagttatgtgcacagtgccctgaagatctttaagacagcagaagaatgcagattagatcgtgatgaggaaagggcctatgtactatatatgaaatacgtgactgtttataatcttatc

SEQ ID NO: 315415 - protein, 658 aa, Artificial Sequence
  derived and/or modified sequence
MEKASGRQSIALSTVETGTVNPGLELMEKEVEPEGSKRTDAQGHSLGDGLGPSTYQRRSRWPFSKARSFCKTHASLFKKILLGLLCLAYAAYLLAACILNFQRALALFVITCLVIFVLVHSFLKKLLGKKLTRCLKPFENSRLRLWTKWVFAGVSLVGLILWLALDTAQRPEQLIPFAGICMFILILFACSKHHSAVSWRTVFSGLGLQFVFGILVIRTDLGYTVFQWLGEQVQIFLNYTVAGSSFVFGDTLVKDVFAFQALPIIIFFGCVVSILYYLGLVQWVVQKVAWFLQITMGTTATETLAVAGNIFVGMTEAPLLIRPYLGDMTLSEIHAVMTGGFATISGTVLGAFIAFGVDASSLISASVMAAPCALASSKLAYPEVEESKFKSEEGVKLPRGKERNVLEAASNGAVDAIGLATNVAANLIAFLAVLAFINAALSWLGELVDIQGLTFQVICSYLLRPMVFMMGVEWTDCPMVAEMVGIKFFINEFVAYQQLSQYKNKRLSGMEEWIEGEKQWISVRAEIITTFSLCGFANLSSIGITLGGLTSIVPHRKSDLSKVVVRALFTGACVSLISACMAGILYVPRGAEADCVSFPNTSFTNRTYETYMCCRGLFQSTSLNGTNPPSFSGPWEDKEFSAMALTNCCGFYNNTVCA

SEQ ID NO: 315416 - DNA, 1977 bp, Artificial Sequence
  derived and/or modified sequence
atggagaaagcctctgggcggcagtccatcgcattgagcaccgtcgagaccggtacagtgaaccccgggctggaattgatggagaaggaggtagagccagaaggatccaagagaactgacgctcaaggccactccctcggcgatggcctaggaccaagcacctaccaacgccggtctcggtggccatttagcaaagcgcgctcattttgtaaaacgcacgcttctttgttcaaaaagattctgctcggtcttctctgtctagcgtatgccgcataccttcttgctgcatgcattctgaattttcagagagccctggcgctgttcgtaataacctgcctggtgatattcgtcctggttcactcttttctgaaaaaactgctgggtaagaaactgactaggtgtttgaagcccttcgagaactcccgcctgagattgtggactaaatgggtcttcgccggtgtcagcctggtcggacttatattatggctggccttggacactgcccagcgacctgaacagctgatccccttcgccggcatctgtatgttcatcctcatactttttgcttgttctaagcaccatagcgctgtgtcctggaggaccgtcttctccggtctcggactgcagttcgtgtttggaatcctcgtcatacggaccgacctggggtacaccgtgttccagtggttgggagaacaggttcagattttcctgaactacacggttgctggctctagttttgtgttcggcgacacgcttgtgaaggacgtgtttgcttttcaggcattgcctatcatcatcttctttggatgcgttgtttcgatcctgtattatcttgggctggttcagtgggttgtccagaaggttgcttggttcctacagataacgatgggcactacagcaaccgagacccttgctgtggcagggaatattttcgtgggcatgaccgaggccccgctcctaataagaccatatctgggagatatgaccctttccgaaatccacgcagtgatgaccggcggcttcgccacaattagcggtaccgtgctcggtgcgtttatagcctttggagtcgatgcctcatcattgataagcgcctccgtcatggcagcgccttgcgccctggcttcttccaagctggcctatccagaggtcgaagaatcaaagttcaaatctgaggagggtgtaaaactccctcgcggcaaggagaggaatgttttggaagccgcctccaacggcgccgtcgatgctatcgggctagcaaccaacgtcgccgctaacttaattgcttttctcgctgttctggcctttattaacgccgcgctatcatggttgggggagcttgttgatatacaggggctgacttttcaggtgatctgctcctatctgctccgccctatggtttttatgatgggagttgaatggacggactgcccaatggttgctgagatggtgggcatcaagttcttcatcaatgagttcgtagcttaccagcagttgagtcagtataaaaataagcgactgtccgggatggaagagtggattgaaggggaaaaacaatggatttctgtccgggcagagattatcacaacgttctccttgtgcggcttcgcaaatctgagttctatcggcatcacgctggggggcctcacttctattgttccccataggaagagcgacctcagtaaggtcgtagtacgcgcccttttcaccggggcttgcgtctcactcatctccgcctgcatggctgggatcctgtacgtcccacggggtgccgaggccgattgcgtgtcctttccaaacaccagcttcaccaacaggacttacgagacttatatgtgttgccgcggcctgttccaaagcacctcactaaatgggacaaaccccccaagcttttcaggtccttgggaggacaaagaatttagcgccatggcactcacgaattgctgcgggttttataacaatacggtgtgcgcatag

SEQ ID NO: 315417 - DNA, 1977 bp, Artificial Sequence
  derived and/or modified sequence
atggagaaggccagcggccggcagagcatcgccctgagcacagtggagactggaacagtgaaccctggcctggagctgatggagaaggaggtggagcctgagggcagcaagaggacagatgcccagggccacagcctgggagatggcctgggccccagcacctaccagaggaggagccgctggcccttcagcaaggcccggagcttctgcaagacccacgccagcctcttcaagaagatcctgctgggcctgctgtgcctggcctatgctgcctacctgctggccgcctgcatcctgaacttccagagggccctggccctcttcgtcatcacctgcctggtgatctttgtgctggtgcacagcttcctgaagaagctgctgggcaagaagctgacccgctgcctgaagccctttgagaacagccggctgcggctgtggaccaagtgggtgtttgctggggtgtccctggtgggcctcatcctgtggctggccctggacacagcccagaggcctgagcagctgatcccctttgctggcatctgcatgttcatcctgatcctgtttgcctgcagcaagcaccacagcgctgtgtcctggaggacagtgttcagcggcctgggcctgcagtttgtgtttggcatcctggtgatcagaacagacctgggctacaccgtcttccagtggctgggggagcaggtgcagatcttcctgaactacacagtggccggcagcagctttgtgtttggagacaccctggtgaaggatgtgtttgccttccaggccctgcccatcatcatcttcttcggctgtgtggtgtccatcctgtactacctgggcctggtgcagtgggtggtgcagaaggtggcctggttcctgcagatcaccatgggcaccacagccacagagaccctggccgtggccggcaacatctttgtgggcatgacagaggcccccctgctgatccggccctacctgggggacatgaccctgtctgagatccatgctgtgatgactggaggctttgccaccatctctggaacagtgctgggcgccttcatcgcctttggagtggatgccagcagcctcatcagcgcctctgtgatggccgccccctgtgccctggccagcagcaagctggcctacccagaggtggaggagagcaagttcaagtctgaggagggcgtgaagctgccccggggcaaggagagaaatgtgctggaggccgccagcaatggagctgtggatgccatcggcctggccaccaacgtggccgccaacctgattgccttcctggccgtgctggccttcatcaatgctgccctgtcctggctgggggagctggtggacatccagggcctgaccttccaggtgatctgcagctacctgctgcggcccatggtgttcatgatgggcgtggagtggacagactgccccatggtggccgagatggtgggcatcaagttcttcatcaatgaatttgtggcctaccagcagctgagccagtacaagaacaagaggctgagcggcatggaggagtggattgaaggagagaagcagtggatctctgtgcgggcagagatcatcaccaccttcagcctgtgtggctttgccaacctgagcagcatcggcatcaccctgggcggcctgaccagcatcgtgccccacaggaagagtgacctgagcaaggtggtggtgcgggccctcttcaccggggcctgtgtgtccctcatcagcgcctgcatggccggcatcctgtatgtgcccagaggagctgaggccgactgtgtgtccttccccaacaccagcttcaccaacagaacctatgagacctacatgtgctgccggggcctcttccagagcaccagcctgaatggcaccaacccccccagcttcagcggcccctgggaggacaaggagttcagcgccatggccctgaccaactgctgcggcttctacaacaacacagtgtgtgcctag

SEQ ID NO: 315418 - DNA, 1977 bp, Artificial Sequence
  derived and/or modified sequence
atggagaaggccagcggccggcagagcatcgccctgagcaccgtggagacagggacagtcaaccctggcctggaactgatggagaaagaagtagagcccgaggggtccaaacggactgatgcacaagggcatagccttggcgacggactcggtcctagcacatatcagcggaggtcccgatggcctttttccaaagcgcgaagcttctgcaagacccacgccagcctttttaaaaagatcctgctcggcctgctgtgcctggcatacgccgcctatctgctcgctgcatgcatactgaatttccagcgggccctggcattgtttgttataacttgcttggttatattcgtgctggttcacagcttcctgaaaaagcttctcggaaagaagctcactagatgtttgaaaccctttgagaattcaagattacgcctatggactaagtgggtcttcgccggggtgtctttggtgggcctcatcttatggttggccctggatactgcccaaaggcctgagcagcttatacctttcgccgggatctgtatgttcattctgatcctgttcgcctgcagcaagcaccactcggcagtcagctggagaaccgttttttcaggactgggtctccaatttgtcttcggcattctagtcatccgaactgatctcggctacacagtgttccaatggctcggagagcaggtccagatttttctgaactacaccgtggccggctctagtttcgtgttcggtgataccctggtcaaggacgttttcgcgttccaggcactgcctatcatcatcttttttggctgcgttgtgtccattctctactacttaggattagtgcagtgggtggttcagaaagttgcatggttcctacaaatcacgatgggcacgactgctacagagactctcgccgttgccggcaatattttcgtcgggatgactgaggctccactgctcatcagaccatatttgggggacatgacactatcagagatccacgccgtcatgacggggggttttgcaaccatcagcggaacggtgctcggtgcctttatagcattcggcgtcgacgcaagttccctaattagcgcaagtgtcatggctgctccatgcgcactcgcaagtagcaaactggcctatcccgaagtggaggagtctaaatttaagtcagaggaaggagtgaaactccctcgaggaaaagaaagaaatgtgctggaagccgccagcaacggagcagtggacgcgatcggtctggcaaccaatgtggctgccaatctcatcgcattcctcgctgtgctggcctttataaacgctgccctatcctggctcggggaactcgtcgacattcagggtctcacgtttcaggtgatctgcagttacctcttgaggcccatggtcttcatgatgggtgtcgagtggaccgactgtccgatggttgccgagatggtggggatcaagttttttattaacgagtttgtggcatatcagcaactatctcagtacaagaataaaagactctccggtatggaggagtggatcgaaggagaaaagcagtggattagcgtgagggccgaaattataacgacctttagcttatgtggattcgccaatttgagtagcataggaatcacattgggcggtctcacctccatcgtaccacacagaaagtcggacctctcgaaggtagtggtgagggcactgtttacaggagcttgcgtgtccctgatttccgcctgtatggccggtatcctgtatgtccccagaggcgcagaagcggattgcgtatcattcccaaatacctctttcacgaaccggacgtatgagacatacatgtgttgccgaggtctttttcagagtacgtctctcaatgggaccaatccccccagcttctctgggccatgggaggacaaggagttttccgctatggctttaaccaattgttgtggcttctacaataatacagtctgtgcttag

SEQ ID NO: 315419 - DNA, 1977 bp, Artificial Sequence
  derived and/or modified sequence
atggagaaagcgagcggacggcagtctatcgccctgtctaccgttgagacaggcacagtcaatcccggactagagctaatggagaaggaggtcgaacccgagggatccaagcgaacagatgcacagggacattctttgggcgatgggctgggcccaagtacctatcagagacgcagccgctggccattttctaaagcccgatcattttgcaagactcatgcttccttgtttaagaagattctcctcgggcttctgtgtctggcctatgctgcctaccttcttgctgcttgtatcctgaattttcagagagcacttgccctgtttgttattacatgtcttgtgatattcgttttagtgcatagtttccttaaaaaactgttaggtaaaaaactgacccgctgtctgaaaccgttcgagaatagccgcttacggctctggaccaagtgggttttcgcaggggtctctctcgtaggactgattctctggttagcactggacaccgcccaaagaccagaacaactcatccccttcgctgggatatgtatgtttatccttatattattcgcctgctctaagcatcatagtgccgtctcgtggcggacagtgttctcaggacttggtctgcagtttgttttcggtatcttagttattcggactgacctgggctacactgtctttcaatggctcggagagcaggtacaaatctttttgaattatactgtagccggttcgtctttcgtcttcggagatacgctggtcaaagatgtttttgcttttcaggctctgccaataattatctttttcggatgcgtcgtatctattctttattatctcggcctggtccagtgggtagtgcaaaaggttgcttggttcctccagataaccatgggtacaacggccaccgagaccctagccgtcgcgggaaatatcttcgtcgggatgaccgaggcacctttactgatcaggccctatctcggcgacatgaccctctcagagatacatgctgtcatgaccggaggctttgcaacgataagcggcaccgtattaggagcattcattgcattcggagtggacgccagctctctcatcagcgcttctgtgatggccgcaccctgtgcgctggcctcctcaaagcttgcctacccggaagtggaagagagcaaatttaagagcgaagaaggcgtcaagctacccagggggaaagagagaaatgtgcttgaagcagctagcaatggggctgttgacgcaatcgggctggcaaccaacgtcgctgcaaacctcatagctttcctcgcagtcctcgcctttatcaatgcagccctgagttggcttggcgagctcgtggacatccaggggctgacattccaagttatttgctcgtatctgcttcgccctatggtgtttatgatgggcgtggaatggaccgactgtcccatggtagccgagatggtcgggattaagttcttcatcaatgagttcgtcgcctatcagcagttgagtcagtacaagaataaaaggcttagcggcatggaagagtggatagagggggaaaagcagtggatatcagttagagccgaaataatcacgaccttctccctttgtggcttcgccaacctcagcagcattggaatcacactggggggactcaccagcatcgtgccccaccgtaaaagcgacttgtcaaaggtggtggtgcgcgctcttttcaccggcgcatgcgtctccctgatttcagcttgcatggcaggaatcctgtatgttcctaggggggcagaagctgactgcgtctcattccctaatacatctttcaccaatcgtacctatgaaacatatatgtgttgcagagggctttttcagagcacgtccctgaatgggaccaaccctccctcattttcgggtccatgggaggacaaagaattttcagcgatggccttgaccaattgttgcggtttttacaataatactgtctgtgcctag

SEQ ID NO: 315420 - DNA, 2464 bp, Artificial Sequence
  derived and/or modified sequence
tttcagtccttcactgaggagccagagggaatcaattccacaagctgggttgaggagaacaggagatggagaaagcaagtggaagacagtccattgctctgtccacagtggagactggcacagtgaacccggggctggagctcatggaaaaagaagtagagcctgagggaagcaagaggactgacgcacaaggacacagcctgggggatggactgggcccttccacttaccagaggaggagtcggtggcctttcagcaaagcaagaagtttctgcaaaacacacgccagcttgttcaagaagatcctgttgggcctgttgtgtttggcctatgctgcctatctcctggcagcttgcatcttgaatttccagagggcactggccttgtttgtcatcacctgcttggtgatctttgtcctggttcactcgtttttgaaaaagctcctgggcaaaaaattaacaagatgtctgaagccctttgaaaactcccgcctgaggctttggacgaaatgggtgtttgcaggagtctccttggttggccttatactgtggttggctttagacacagcccaaaggccagagcagctgatcccctttgcaggaatctgcatgttcatccttatcctctttgcctgctccaaacaccacagcgcagtgtcctggaggacagtgttttcgggcctaggtcttcaatttgtctttgggatcttggtcatcagaactgatcttggatatactgtatttcagtggctgggagagcaggtccagattttcctgaactacactgtggccggctccagttttgtctttggggatacactggtcaaggatgtctttgcttttcaggccttaccaatcatcattttctttggatgtgtggtgtccattctctactacctgggccttgtgcaatgggtagttcagaaggtcgcctggtttttacaaatcactatgggcaccactgctacagagaccctggctgtggcaggaaacatctttgtgggtatgacagaggcacctctgctcatccgtccctaccttggggacatgacactctctgaaatccatgcggtgatgactggagggtttgccaccatttctggcactgtgctgggagccttcatagcctttggggttgatgcatcatccctgatttctgcctctgtgatggccgccccttgtgctctcgcctcatcaaagctagcgtatccggaagtggaggagtccaagttcaagagtgaggagggggtaaagctgccccgtgggaaggagaggaatgtcctggaagctgccagcaacggagccgtagatgccataggccttgctactaatgtagcagccaacctgattgcctttttggctgtgttggccttcatcaatgctgccctctcctggctgggggaattggtggacatacaggggctcactttccaggtcatctgctcctatctcctaaggcccatggttttcatgatgggtgtagagtggacagactgtccaatggtggctgagatggtgggaatcaagttcttcataaatgagtttgtggcttatcagcaactgtctcaatacaagaacaaacgtctctctggaatggaggagtggattgagggagagaaacagtggatttctgtgagagctgaaatcattacaacattttcactctgtggatttgccaatcttagttccataggaatcacacttggaggcttgacatcaatagtacctcaccggaagagtgacttgtccaaggttgtggtcagggccctcttcacaggggcctgtgtatcccttatcagtgcctgtatggcaggaatcctctatgtccccaggggagctgaagctgactgtgtctccttcccaaacacaagtttcaccaatagaacctatgagacctacatgtgctgcagagggctctttcagagtacttctctgaatggcaccaaccctccttctttttctggtccctgggaagataaggagttcagtgctatggcccttactaactgctgtggattctacaacaataccgtctgtgcctaaggctgcttgatctatttctataacagttttgatcttaaaagctttgtgattgcaaaggtgtttatgtactcagggtgcccacaactcactcaccaagatgtttaacagtaagtaacagtaaatgtaaaagattcattttgggccgggctcagtggctcatgcctgtaatcccagcactttgggaggccgaggcgggcggatcacaaggtcaggagatcgagaccatcctggctaacacagtgaaaccccgtctctactaaaaatacaaaaaattagccgggagtggtgtcgggcgactgtagtcccagctactcgcgaggctgaggcaggagaatggcgtgaatccgggaggcggagcttgcagcgagccaagatcgcgccactgcactccagcctgggtgacagagcgagactctgtctca

SEQ ID NO: 315421 - DNA, 1977 bp, Artificial Sequence
  derived and/or modified sequence
atggagaaggccagcggcagacagagcatcgccctgagcaccgtggagaccggcaccgtgaaccccggcctggagctgatggagaaggaggtggagcccgagggcagcaagagaaccgacgcccagggccacagcctgggcgacggcctgggccccagcacctaccagagaagaagcagatggcccttcagcaaggccagaagcttctgcaagacccacgccagcctgttcaagaagatcctgctgggcctgctgtgcctggcctacgccgcctacctgctggccgcctgcatcctgaacttccagagagccctggccctgttcgtgatcacctgcctggtgatcttcgtgctggtgcacagcttcctgaagaagctgctgggcaagaagctgaccagatgcctgaagcccttcgagaacagcagactgagactgtggaccaagtgggtgttcgccggcgtgagcctggtgggcctgatcctgtggctggccctggacaccgcccagagacccgagcagctgatccccttcgccggcatctgcatgttcatcctgatcctgttcgcctgcagcaagcaccacagcgccgtgagctggagaaccgtgttcagcggcctgggcctgcagttcgtgttcggcatcctggtgatcagaaccgacctgggctacaccgtgttccagtggctgggcgagcaggtgcagatcttcctgaactacaccgtggccggcagcagcttcgtgttcggcgacaccctggtgaaggacgtgttcgccttccaggccctgcccatcatcatcttcttcggctgcgtggtgagcatcctgtactacctgggcctggtgcagtgggtggtgcagaaggtggcctggttcctgcagatcaccatgggcaccaccgccaccgagaccctggccgtggccggcaacatcttcgtgggcatgaccgaggcccccctgctgatcagaccctacctgggcgacatgaccctgagcgagatccacgccgtgatgaccggcggcttcgccaccatcagcggcaccgtgctgggcgccttcatcgccttcggcgtggacgccagcagcctgatcagcgccagcgtgatggccgccccctgcgccctggccagcagcaagctggcctaccccgaggtggaggagagcaagttcaagagcgaggagggcgtgaagctgcccagaggcaaggagagaaacgtgctggaggccgccagcaacggcgccgtggacgccatcggcctggccaccaacgtggccgccaacctgatcgccttcctggccgtgctggccttcatcaacgccgccctgagctggctgggcgagctggtggacatccagggcctgaccttccaggtgatctgcagctacctgctgagacccatggtgttcatgatgggcgtggagtggaccgactgccccatggtggccgagatggtgggcatcaagttcttcatcaacgagttcgtggcctaccagcagctgagccagtacaagaacaagagactgagcggcatggaggagtggatcgagggcgagaagcagtggatcagcgtgagagccgagatcatcaccaccttcagcctgtgcggcttcgccaacctgagcagcatcggcatcaccctgggcggcctgaccagcatcgtgccccacagaaagagcgacctgagcaaggtggtggtgagagccctgttcaccggcgcctgcgtgagcctgatcagcgcctgcatggccggcatcctgtacgtgcccagaggcgccgaggccgactgcgtgagcttccccaacaccagcttcaccaacagaacctacgagacctacatgtgctgcagaggcctgttccagagcaccagcctgaacggcaccaacccccccagcttcagcggcccctgggaggacaaggagttcagcgccatggccctgaccaactgctgcggcttctacaacaacaccgtgtgcgcctag

SEQ ID NO: 315422 - protein, 636 aa, Artificial Sequence
  derived and/or modified sequence
MENDPSRRRESISLTPVAKGLENMGADFLESLEEGQLPRSDLSPAEIRSSWSEAAPKPFSRWRNLQPALRARSFCREHMQLFRWIGTGLLCTGLSAFLLVACLLDFQRALALFVLTCVVLTFLGHRLLKRLLGPKLRRFLKPQGHPRLLLWFKRGLALAAFLGLVLWLSLDTSQRPEQLVSFAGICVFVALLFACSKHHCAVSWRAVSWGLGLQFVLGLLVIRTEPGFIAFEWLGEQIRIFLSYTKAGSSFVFGEALVKDVFAFQVLPIIVFFSCVISVLYHVGLMQWVILKIAWLMQVTMGTTATETLSVAGNIFVSQTEAPLLIRPYLADMTLSEVHVVMTGGYATIAGSLLGAYISFGIDATSLIAASVMAAPCALALSKLVYPEVEESKFRREEGVKLTYGDAQNLIEAASTGAAISVKVVANIAANLIAFLAVLDFINAALSWLGDMVDIQGLSFQLICSYILRPVAFLMGVAWEDCPVVAELLGIKLFLNEFVAYQDLSKYKQRRLAGAEEWVGDRKQWISVRAEVLTTFALCGFANFSSIGIMLGGLTSMVPQRKSDFSQIVLRALFTGACVSLVNACMAGILYMPRGAEVDCMSLLNTTLSSSSFEIYQCCREAFQRIFKSTPAESQP

SEQ ID NO: 315423 - protein, 287 aa, Artificial Sequence
  derived and/or modified sequence
MQLFRWIGTGLLCTGLSAFLLVACLLDFQRALALFVLTCVVLTFLGHRLLKRLLGPKLRRFLKPQGHPRLLLWFKRGLALAAFLGLVLWLSLDTSQRPEQLVSFAGICVFVALLFACSKHHCAVSWRAVSWGLGLQFVLGLLVIRTEPGFIAFEWLGEQIRIFLSYTKAGSSFVFGEALVKDVFAFQVLPIIVFFSCVISVLYHVGLMQWVILKIAWLMQVTMGTTATETLSVAGNIFVSQTEAPLLIRPYLADMTLSEVHVVMTGGYATIAGSLLGAYISFGLEKL

SEQ ID NO: 315424 - DNA, 1911 bp, Artificial Sequence
  derived and/or modified sequence
atggaaaacgacccatctagacgacgagagagcattagtctcacaccagtggctaaaggcctggaaaacatgggcgccgactttctggaaagtttggaggagggacagctaccgcgatccgatctgtccccagccgagatcaggagcagttggtctgaagccgcacccaaaccatttagtcgatggcgaaatctgcagccagccctcagggcacggtcattctgcagagagcatatgcagctgtttcgttggattggcacagggctgctctgcacgggtcttagcgcctttttgcttgtagcctgcttgctcgacttccaacgagccctcgccctcttcgtgctgacctgtgttgtgttgacctttctcggccacaggttgctgaaacgcctgcttggccctaagcttcgcagattcctgaagcctcagggacatcctaggctattgctctggttcaagcgggggctggctctcgcagccttcctgggccttgttctttggctctcgctggacactagccaaagaccagagcagctcgtgtcttttgctgggatttgcgtgttcgtagcattgctgttcgcctgtagcaagcatcactgtgcagtgtcttggcgagctgtgagctggggactgggtctgcagttcgttcttgggctcctggtgatccgaaccgagccaggttttattgcatttgaatggctgggcgagcaaattcgcatctttctcagctatacaaaagccggctctagtttcgtttttggcgaagccctggtgaaggacgtgtttgcgttccaggtgctccccatcattgtgtttttttcatgcgtgattagtgttctataccatgtcgggctgatgcagtgggtgattctgaagatagcatggttaatgcaagtaactatggggaccacagctaccgagacactcagtgttgcaggcaatattttcgtgtcccaaacagaagcccctctgctgatccggccctatctcgctgacatgacactctccgaagtgcacgtcgtaatgaccgggggatacgccacaattgccggctctctcctcggtgcgtatatcagcttcggaattgatgctacttctctgatcgctgcatcagtcatggcagcgccgtgtgccctggccctgagcaaactagtgtaccctgaggtggaagaatcgaaattccgtcgggaagagggcgttaagctgacctacggggacgcgcagaacctcattgaggccgcgagcacgggggccgctataagcgtcaaggtcgtggctaacatcgctgccaatctgatcgccttccttgctgtccttgacttcataaacgcagcattaagttggctcggtgatatggtggatatacagggtttgtcctttcagcttatctgcagctacatattgagaccggtcgcctttcttatgggcgtggcctgggaggattgccccgttgtggctgagctattggggattaagctgtttcttaatgaattcgttgcctaccaagatctgtctaaatataaacagagacgcttggccggggcagaggagtgggtgggtgaccgcaaacagtggataagtgtgagagccgaagtgcttaccacctttgccctgtgtggcttcgccaatttctcctctatcgggatcatgctggggggtctgacttccatggttccacagagaaagtccgatttttcccagatagtgctgcgagccctgttcactggggcttgcgtcagcctggtgaacgcttgcatggcaggcatcctttatatgccaaggggcgccgaggttgactgcatgagcctactcaatactactctgtcaagctctagcttcgagatatatcaatgttgtagggaagcctttcagcggattttcaagagcacgccggcagagtcccagccctag

SEQ ID NO: 315425 - DNA, 1911 bp, Artificial Sequence
  derived and/or modified sequence
atggagaatgaccccagcagaagaagagagagcatcagcctgacccctgtggccaagggcctggagaacatgggcgctgacttcctggagagcctggaggagggccagctgcccaggagtgacctgagccctgctgagatccgcagctcctggagcgaggccgcccccaagcccttcagccgctggaggaacctgcagcctgccctgcgggcccgctccttctgccgggagcacatgcagctgttccgctggattggaacaggcctgctgtgcaccggcctgagcgccttcctgctggtggcctgcctgctggacttccagagggccctggccctgtttgtgctgacctgtgtggtgctgaccttcctgggccaccggctgctgaagaggctgctgggccccaagctgcggcgcttcctgaagccccagggccacccccggctgctgctgtggttcaagaggggcctggccctggccgccttcctgggcctggtgctgtggctgagcctggacaccagccagaggcctgagcagctggtgtcctttgctggcatctgtgtgtttgtggccctgctgtttgcctgcagcaagcaccactgtgctgtgtcctggagggctgtgtcctggggcctgggcctgcagtttgtgctgggcctgctggtgatcagaacagagcccggcttcatcgcctttgagtggctgggggagcagatccgcatcttcctgagctacaccaaggccggcagcagctttgtgtttggagaggccctggtgaaggatgtgtttgccttccaggtgctgcccatcatcgtgttcttcagctgtgtgatctctgtgctgtaccacgtgggcctgatgcagtgggtgatcctgaagatcgcctggctgatgcaggtgaccatgggcaccacagccacagagaccctgtctgtggccggcaacatctttgtgtcccagacagaggcccccctgctgatccggccctacctggccgacatgaccctgtctgaggtgcacgtggtgatgactggaggctacgccaccatcgccggcagcctgctgggcgcctacatcagctttggaattgatgccaccagcctgattgctgcctctgtgatggccgccccctgtgccctggccctgagcaagctggtgtacccagaggtggaggagagcaagttcagaagagaggagggcgtgaagctgacctatggagatgcccagaacctgattgaagctgccagcactggagctgccatctctgtgaaggtggtggccaacattgctgccaacctgattgccttcctggccgtgctggacttcatcaatgctgccctgtcctggctgggggacatggtggacatccagggcctgtccttccagctgatctgcagctacatcctgcggcctgtggccttcctgatgggcgtggcctgggaggactgccctgtggtggccgagctgctgggcatcaagctgttcctgaatgaatttgtggcctaccaggacctgagcaagtacaagcagaggcggctggccggggctgaggagtgggtgggggacaggaagcagtggatctctgtgcgggcagaggtgctgaccacctttgccctgtgtggctttgccaacttcagcagcatcggcatcatgctgggcggcctgacctccatggtgccccagaggaagagtgacttcagccagatcgtgctgcgggccctcttcaccggggcctgtgtgtccctggtgaatgcctgcatggccggcatcctgtacatgcccagaggagctgaggtggactgcatgagcctgctgaacaccaccctgagcagcagcagctttgagatctaccagtgctgccgggaggccttccagaggatcttcaagagcaccccagctgagagccagccctag

SEQ ID NO: 315426 - DNA, 1911 bp, Artificial Sequence
  derived and/or modified sequence
atggagaacgaccccagccggcggcgggagagcatcagcctgacccccgttgctaaagggctagagaacatgggcgccgatttcctcgagtctctcgaagaggggcaacttcccaggagcgaccttagtcccgccgagattcggtccagctggagcgaggctgcacccaagccgtttagccgatggagaaatctgcagcccgccttgcgggctcggagcttctgtcgtgagcacatgcagctttttcgttggatcggcactggactcctgtgcacgggactgtccgcctttctcttggtggcctgtctgctagatttccagcgagcactcgccctgtttgtactgacctgtgtggtgctcaccttcttgggacaccgcctgctcaaacggcttctcggacccaaactccggcgattcctcaagccccagggccatccccgattgcttctgtggtttaagcggggcctggccttggcggcctttttggggctggtcctgtggctcagtctggacacatctcagcggccagagcaactcgtgtcgtttgccggaatttgcgtatttgttgcccttctctttgcctgctccaagcatcactgtgccgtctcttggcgcgccgtctcatggggcttgggcctgcagttcgtgttgggacttctcgttattagaacagagcccggcttcatagcctttgaatggttaggtgaacagatccgaatctttctgtcttatactaaggctggatctagctttgtatttggggaggccctggttaaggacgtcttcgccttccaggtgctccccattatcgtattctttagttgtgtgataagtgtgctctatcacgtgggactgatgcaatgggtgattctgaaaattgcctggcttatgcaggttaccatgggaaccaccgctactgagaccctgagcgttgctggcaatattttcgtgagtcagaccgaggcacccctacttatccgtccgtacctggctgacatgaccctgtctgaagttcatgtggtgatgacggggggctacgcaacgattgccggaagcttactgggagcttatatctccttcggcatcgatgcaacttcgctaatcgctgcaagcgtgatggccgctccatgcgccctcgcactgagtaaactggtgtatccggaagtggaggaaagcaaattccgcagagaagaaggggttaaactgacatacggagacgcgcagaatttgatcgaagctgccagtaccggtgcagctattagtgttaaagtcgtggctaacatagctgcaaatcttattgccttcttagcggtgttggatttcatcaatgcggccctgtcatggctgggggatatggtggacatccagggactcagtttccagctaatttgttcctacatcctgagacccgtggctttcttgatgggcgtggcctgggaggattgccctgtcgtggccgagcttctgggaatcaagttgttccttaatgagttcgttgcgtaccaggatctgagtaagtacaagcagcggcgtctggccggcgcggaggaatgggtcggggatcggaaacagtggatttcggttagggctgaggtgttgaccacattcgctctgtgcggctttgcaaacttcagttccataggaattatgttggggggactgactagcatggtgcctcagaggaagtcagactttagccaaatcgtgctacgagccctctttaccggagcttgcgtgtccctcgtcaacgcgtgtatggcagggatcctgtatatgccccgcggagctgaggtggattgcatgtccttactgaatacgaccctgagctcgagttccttcgagatctaccagtgctgtcgtgaagccttccagcgcatcttcaagagtacacctgccgagagtcaaccgtag

SEQ ID NO: 315427 - DNA, 1911 bp, Artificial Sequence
  derived and/or modified sequence
atggaaaacgatccatctagacgcagggagagcattagcctcacacccgtggccaaaggcctggagaacatgggcgcagactttctcgagagcctcgaggagggtcagttacccaggagtgacctgagcccagctgagatcaggtctagctggtcggaggccgctccaaagcccttctcaagatggcggaacctccagcctgctttacgcgctcggtccttttgtcgagagcacatgcagttgttccggtggatcgggacggggttgttatgcaccggcctttctgccttcctcctagtagcttgcttactcgattttcagcgcgcactcgcactgttcgtgctcacatgcgtggttctgacatttctggggcatcggcttttgaaaagactcttaggtcccaagttaagacggttccttaagcctcagggccatccaagactgcttctgtggttcaagcggggtctggctttggctgcctttctggggctagtgttgtggttaagcctggatacatctcaaagacctgagcagttggttagcttcgccggaatctgtgtcttcgtggctctgctgttcgcttgttccaagcaccattgtgcagtgagctggcgcgctgtttcctggggtctcggcttgcagttcgtgctgggtctgctcgtgatacgtacagaaccgggttttattgcgttcgagtggttgggcgagcagatcaggatctttctgtcatacaccaaggccggatccagcttcgtgttcggcgaggcactggttaaagatgtattcgctttccaagtcctcccaatcatcgtgttcttttcctgcgtcatctccgtactatatcacgttggcctgatgcaatgggtaattctgaagattgcctggctaatgcaggtgaccatgggcaccactgctaccgaaacattaagcgtcgcgggaaatatcttcgtctctcagaccgaagccccattgttgattcgtccatatctcgctgacatgacactgtcagaagtgcacgttgtcatgacaggcggatatgctaccattgccggatcacttcttggagcctatatttcctttggaatagatgcaacaagccttatcgctgccagtgtgatggctgcaccctgtgccttggccctgtcgaaactggtataccccgaagttgaagagagcaagttcaggcgggaggagggagtgaaactgacctatggtgatgcccagaatctgatagaggccgctagtacgggagccgcaatcagtgtcaaggtcgtggcgaatatcgcagcgaatctgattgccttcttagctgttttggatttcattaacgcagcgctgagttggctcggtgacatggttgatatccagggcttatcgttccagctgatatgcagttacatccttcggccagtcgctttcctcatgggagtggcctgggaagattgtcccgttgtagccgaactgctcggcatcaagctgtttttgaatgaatttgtcgcttatcaggatctctccaagtataagcagcggcgactggctggtgctgaagagtgggtcggggaccggaaacagtggatcagtgttcgcgctgaagttctgacaacttttgctctttgtgggttcgctaatttctcttcgattggcattatgcttggcggactgaccagcatggtgcctcaacgcaaatctgatttttcccaaatcgttttaagggcactgtttaccggcgcttgtgtgagcttggtgaacgcctgcatggctggcattctttatatgccacgaggcgcagaggtggactgtatgtccctcttgaacaccacactgtctagctccagctttgagatctatcaatgctgcagagaggcgttccagcgcatatttaagtctacacccgctgaaagccaaccatag

SEQ ID NO: 315428 - DNA, 2237 bp, Artificial Sequence
  derived and/or modified sequence
caacgatgtgaaggttataagctgcactgcatggttgctgctggatgtgttgtgttcctggcttccctctggatgctgacagaaacaagggaatttctgctgaagtgacaaggcaagccagagccaaagcaggttggacccagcttgtccccacagagacgtgtgcttccctctctctctgagagcgacctgttaaccgcaaatacctggaaggtctgggacatggagaacgacccctcgagacgaagagagtccatctctctcacacctgtggccaagggtctggagaacatgggggctgatttcttggaaagcctggaggaaggccagctccctaggagtgacttgagccccgcagagatcaggagcagctggagcgaggcggcgccgaagcccttctccagatggaggaacctgcagccagccctgagagccagaagcttctgcagggagcacatgcagctgtttcgatggatcggcacaggcctgctctgcactgggctctctgccttcctgctggtggcctgcctcctggatttccagagggccctggctctgtttgtcctcacctgtgtggtcctcaccttcctgggccaccgcctgctgaaacggcttctggggccaaagctgaggaggtttctcaagcctcagggccatccccgcctgctgctctggtttaagaggggtctagctcttgctgctttcctgggcctggtcctgtggctgtctctggacacctcccagcggcctgagcaactggtgtccttcgcaggaatctgcgtgttcgtcgctctcctctttgcctgctcaaagcatcattgcgcagtgtcctggagggccgtgtcttggggacttggactgcagtttgtacttggactcctcgtcatcagaacagaaccaggattcattgcgttcgagtggctgggcgagcagatccggatcttcctgagctacacgaaggctggctccagcttcgtgtttggggaggcgctggtcaaggatgtctttgcctttcaggttctgcccatcattgtctttttcagctgtgtcatatccgttctctaccacgtgggcctcatgcagtgggtgatcctgaagattgcctggctgatgcaagtcaccatgggcaccacagccactgagaccctgagtgtggctggaaacatctttgtgagccagaccgaggctccattactgatccggccctacttggcagacatgacactctctgaagtccacgttgtcatgaccggaggttacgccaccattgctggcagcctgctgggtgcctacatctcctttgggatcgatgccacctcgttgattgcagcctctgtgatggctgccccttgtgccttggccctctccaagctggtctacccggaggtggaggagtccaagtttaggagggaggaaggagtgaaactgacctatggagatgctcagaacctcatagaagcagccagcactggggccgccatctccgtgaaggtggtcgccaacatcgctgccaacctgattgcgttcctggctgtgctggactttatcaatgctgccctctcctggctgggagacatggtggacatccaagggctcagcttccagctcatctgctcctacatcctgcggcctgtagccttcttgatgggtgtggcgtgggaggactgcccagtggtagctgagctgctggggatcaagctgtttctgaacgagtttgtggcctatcaagacctctccaagtacaagcaacgccgcctggcaggggccgaggagtgggtcggcgacaggaagcagtggatctccgtcagagctgaagtcctcacgacgtttgccctctgtggatttgccaatttcagctccattgggatcatgctgggaggcttgacctccatggtcccccaacggaagagcgacttctcccagatagtgctccgggcgctcttcacgggagcctgtgtgtccctggtgaacgcctgtatggcagggatcctctacatgcccaggggggctgaagttgactgcatgtccctcttgaacacgaccctcagcagcagtagctttgagatttaccagtgctgccgtgaggccttccagaggatattcaaaagtacacctgccgagtcccagccctgaggagtgttttcgtgcttcattgttaagtatcttggaggctctcagctggaaataaatgctcttcatttattaaagaagcatccttatatttttaagagtctttg

SEQ ID NO: 315429 - DNA, 1911 bp, Artificial Sequence
  derived and/or modified sequence
atggagaacgaccccagcagaagaagagagagcatcagcctgacccccgtggccaagggcctggagaacatgggcgccgacttcctggagagcctggaggagggccagctgcccagaagcgacctgagccccgccgagatcagaagcagctggagcgaggccgcccccaagcccttcagcagatggagaaacctgcagcccgccctgagagccagaagcttctgcagagagcacatgcagctgttcagatggatcggcaccggcctgctgtgcaccggcctgagcgccttcctgctggtggcctgcctgctggacttccagagagccctggccctgttcgtgctgacctgcgtggtgctgaccttcctgggccacagactgctgaagagactgctgggccccaagctgagaagattcctgaagccccagggccaccccagactgctgctgtggttcaagagaggcctggccctggccgccttcctgggcctggtgctgtggctgagcctggacaccagccagagacccgagcagctggtgagcttcgccggcatctgcgtgttcgtggccctgctgttcgcctgcagcaagcaccactgcgccgtgagctggagagccgtgagctggggcctgggcctgcagttcgtgctgggcctgctggtgatcagaaccgagcccggcttcatcgccttcgagtggctgggcgagcagatcagaatcttcctgagctacaccaaggccggcagcagcttcgtgttcggcgaggccctggtgaaggacgtgttcgccttccaggtgctgcccatcatcgtgttcttcagctgcgtgatcagcgtgctgtaccacgtgggcctgatgcagtgggtgatcctgaagatcgcctggctgatgcaggtgaccatgggcaccaccgccaccgagaccctgagcgtggccggcaacatcttcgtgagccagaccgaggcccccctgctgatcagaccctacctggccgacatgaccctgagcgaggtgcacgtggtgatgaccggcggctacgccaccatcgccggcagcctgctgggcgcctacatcagcttcggcatcgacgccaccagcctgatcgccgccagcgtgatggccgccccctgcgccctggccctgagcaagctggtgtaccccgaggtggaggagagcaagttcagaagagaggagggcgtgaagctgacctacggcgacgcccagaacctgatcgaggccgccagcaccggcgccgccatcagcgtgaaggtggtggccaacatcgccgccaacctgatcgccttcctggccgtgctggacttcatcaacgccgccctgagctggctgggcgacatggtggacatccagggcctgagcttccagctgatctgcagctacatcctgagacccgtggccttcctgatgggcgtggcctgggaggactgccccgtggtggccgagctgctgggcatcaagctgttcctgaacgagttcgtggcctaccaggacctgagcaagtacaagcagagaagactggccggcgccgaggagtgggtgggcgacagaaagcagtggatcagcgtgagagccgaggtgctgaccaccttcgccctgtgcggcttcgccaacttcagcagcatcggcatcatgctgggcggcctgaccagcatggtgccccagagaaagagcgacttcagccagatcgtgctgagagccctgttcaccggcgcctgcgtgagcctggtgaacgcctgcatggccggcatcctgtacatgcccagaggcgccgaggtggactgcatgagcctgctgaacaccaccctgagcagcagcagcttcgagatctaccagtgctgcagagaggccttccagagaatcttcaagagcacccccgccgagagccagccctag

SEQ ID NO: 315430 - protein, 543 aa, Artificial Sequence
  derived and/or modified sequence
MENDPSRRRESISLTPVAKGLENMGADFLESLEEGQLPRSDLSPAEIRSSWSEAAPKPFSRWRNLQPALRARSFCREHMQLFRWIGTGLLCTGLSAFLLVACLLDFQRALALFVLTCVVLTFLGHRLLKRLLGPKLRRFLKPQGHPRLLLWFKRGLALAAFLGLVLWLSLDTSQRPEQLVSFAGICVFVALLFACSKHHCAVSWRAVSWGLGLQFVLGLLVIRTEPGFIAFEWLGEQIRIFLSYTKAGSSFVFGEALVKDVFAFQVLPIIVFFSCVISVLYHVGLMQWVILKIAWLMQVTMGTTATETLSVAGNIFVSQTEAPLLIRPYLADMTLSEVHVVMTGGYATIAGSLLGAYISFGIDATSLIAASVMAAPCALALSKLVYPEVEESKFRREEGVKLTYGDAQNLIEAASTGAAISVKVVANIAANLIAFLAVLDFINAALSWLGDMVDIQGLSFQLICSYILRPVAFLMGVAWEDCPVVAELLGIKLFLNEFVAYQDLSKYKQRRLAGAEEWVGDRKQWISRRGLAMLTRLVLNSWP

SEQ ID NO: 315431 - DNA, 1632 bp, Artificial Sequence
  derived and/or modified sequence
atggagaatgatccatccaggcgtagggaatccattagtctgacacccgtcgctaaggggctggagaacatgggagccgactttctggagtctcttgaggagggtcagctcccaaggagcgatctcagtccagcggagattcggtcaagctggtccgaggcagcccccaagccattctcccgatggcgtaacctccaaccggctctgagggcgcgaagcttctgccgtgagcatatgcagctctttagatggatcggaaccgggctactctgcactggcctgtcagccttcctcctcgtcgcatgtttgcttgattttcagcgtgccctcgcccttttcgtacttacatgtgtggtactcacttttttaggtcacaggcttttaaagagactcctgggccctaagttgcgccgtttcctaaagcctcagggccatcccagattactactttggttcaaaagaggactggctttagctgccttcctcggtcttgtgctttggctgagcctggacaccagtcagcgccctgagcagttggtgtcctttgctggtatctgcgttttcgtcgctttactcttcgcttgctccaagcatcattgcgcagtctcatggcgggctgtttcctgggggcttggactgcagtttgtgcttgggttgttggtgattcgcactgaaccgggcttcatcgcctttgaatggttgggggagcagataaggatatttctgtcgtatactaaggccggctctagcttcgtttttggggaggctctcgttaaagacgtctttgcctttcaggtgctgccaataatcgtcttttttagttgcgtaatcagtgtgctctatcacgtcgggctcatgcagtgggtcattctgaaaatcgcttggctgatgcaggtgacgatggggactaccgctactgaaacattgagcgttgctgggaacatattcgtctctcaaactgaagccccactcctgattcgcccttacctggccgacatgacgctgagcgaggtgcacgtcgtgatgactggcggctacgctacgattgccggaagtctgctgggagcatacattagcttcgggatagacgctaccagcctaatcgcggcatctgtcatggccgccccatgcgccctagcactgtctaaactcgtttatccagaggtggaagagtccaagttcaggcgggaagagggtgtgaagctcacttacggggacgctcagaacttgattgaggcagcaagtacgggcgctgccatctccgtgaaagttgtagccaatatcgcagccaacctaatcgcttttttagctgtgctggactttattaacgcagctctgagctggctgggtgacatggtcgatatccagggtcttagctttcaactcatctgcagctacattttacggcccgtagcgtttctgatgggcgtggcctgggaagactgtcccgtcgttgcagagctccttggcatcaaattgtttctgaatgaatttgtcgcgtaccaagatctgtcaaagtacaaacagcggcgtctggccggcgcagaggaatgggtgggggaccgaaaacagtggattagtaggcgcgggcttgcaatgctgacaaggctggtcctgaactcatggccctag

SEQ ID NO: 315432 - DNA, 1632 bp, Artificial Sequence
  derived and/or modified sequence
atggagaatgaccccagcagaagaagagagagcatcagcctgacccctgtggccaagggcctggagaacatgggcgctgacttcctggagagcctggaggagggccagctgcccaggagtgacctgagccctgctgagatccgcagctcctggagcgaggccgcccccaagcccttcagccgctggaggaacctgcagcctgccctgcgggcccgctccttctgccgggagcacatgcagctgttccgctggattggaacaggcctgctgtgcaccggcctgagcgccttcctgctggtggcctgcctgctggacttccagagggccctggccctgtttgtgctgacctgtgtggtgctgaccttcctgggccaccggctgctgaagaggctgctgggccccaagctgcggcgcttcctgaagccccagggccacccccggctgctgctgtggttcaagaggggcctggccctggccgccttcctgggcctggtgctgtggctgagcctggacaccagccagaggcctgagcagctggtgtcctttgctggcatctgtgtgtttgtggccctgctgtttgcctgcagcaagcaccactgtgctgtgtcctggagggctgtgtcctggggcctgggcctgcagtttgtgctgggcctgctggtgatcagaacagagcccggcttcatcgcctttgagtggctgggggagcagatccgcatcttcctgagctacaccaaggccggcagcagctttgtgtttggagaggccctggtgaaggatgtgtttgccttccaggtgctgcccatcatcgtgttcttcagctgtgtgatctctgtgctgtaccacgtgggcctgatgcagtgggtgatcctgaagatcgcctggctgatgcaggtgaccatgggcaccacagccacagagaccctgtctgtggccggcaacatctttgtgtcccagacagaggcccccctgctgatccggccctacctggccgacatgaccctgtctgaggtgcacgtggtgatgactggaggctacgccaccatcgccggcagcctgctgggcgcctacatcagctttggaattgatgccaccagcctgattgctgcctctgtgatggccgccccctgtgccctggccctgagcaagctggtgtacccagaggtggaggagagcaagttcagaagagaggagggcgtgaagctgacctatggagatgcccagaacctgattgaagctgccagcactggagctgccatctctgtgaaggtggtggccaacattgctgccaacctgattgccttcctggccgtgctggacttcatcaatgctgccctgtcctggctgggggacatggtggacatccagggcctgtccttccagctgatctgcagctacatcctgcggcctgtggccttcctgatgggcgtggcctgggaggactgccctgtggtggccgagctgctgggcatcaagctgttcctgaatgaatttgtggcctaccaggacctgagcaagtacaagcagaggcggctggccggggctgaggagtgggtgggggacaggaagcagtggatcagccggcggggcctggccatgctgacccggctggtgctgaacagctggccctag

SEQ ID NO: 315433 - DNA, 1632 bp, Artificial Sequence
  derived and/or modified sequence
atggagaacgaccccagccggcggcgggagagcatcagcctgaccccagtggctaagggactggaaaacatgggggcagactttctggagtcacttgaagaggggcagctgcccagatcagatctgtctcccgctgagatccgttcctcatggtcagaagcggccccaaagcccttctcccgctggcggaacctgcagccggctctgcgcgccagatcattctgccgggagcacatgcagttgttccgttggatcgggacaggactgttgtgcacagggctatcggcgtttctgcttgtggcctgtttgctggattttcagagggccctcgccttgtttgttcttacatgcgttgtgttaactttcctgggccaccgcttgcttaagcggctgttgggcccaaaactgcggcggttcttaaagccccagggacaccctagactacttttatggtttaaaagaggactggcacttgctgccttcctgggactggtgttgtggctatcgctcgacacctcacaaagacccgagcagctggtgtcatttgcaggaatatgcgtgtttgttgctctgctgttcgcttgttcaaaacaccactgtgctgtgagctggagggctgtctcgtggggcctaggattacagtttgtgctcgggttgttggttattagaactgagccaggcttcatcgccttcgaatggcttggggagcagatccgcatcttcctgtcctacaccaaagcaggatcctcatttgtgtttggggaggccttggtgaaagacgtgttcgcttttcaggtcctgccaataattgtgttcttcagctgtgtaatttctgtgctttatcacgtggggctgatgcagtgggtgattctgaagatcgcttggctgatgcaggtgacaatggggactaccgcaaccgagaccctgtctgttgccgggaacatctttgtctcacagaccgaggctcccctgttaattcgcccttatttggccgacatgacactgtctgaggtgcatgtcgttatgacaggcggatatgccactatcgccggatcactgctcggagcatatataagttttggcattgacgccaccagcctcatcgcagccagcgttatggcagctccctgtgcactggcgctcagcaagcttgtttaccctgaagtggaggagagtaaatttagacgagaagagggggtaaaattgacctacggcgatgcacagaacctcatcgaagctgctagcactggcgccgcaatttcagtcaaagtggtcgcaaatatcgccgccaatttgatcgcattcctggctgtgctggacttcattaatgctgccctaagctggttgggtgatatggtggacattcagggcctgtccttccagctgatctgctcatatatcctgcgccccgttgccttcctaatgggtgtagcctgggaagactgccctgtggtggcagagctactgggaattaaattgttcctcaatgagtttgttgcctaccaagatctttctaagtacaagcagcgaaggttagctggcgccgaagaatgggttggggatagaaagcagtggatctcgcgccgagggctagccatgctgactaggctggttcttaatagttggccgtag

SEQ ID NO: 315434 - DNA, 1632 bp, Artificial Sequence
  derived and/or modified sequence
atggagaatgacccatcaaggcggagggagtcaatcagtctgaccccggtggctaaaggactggagaatatgggcgctgatttcctggagtccctcgaggagggacagctacctaggtctgacttgagccctgcagagatccgatcgagttggagcgaggcagcccctaaaccgttctcgcggtggcgcaatctccaacccgctttgcgagccagatccttctgtcgagagcacatgcaattatttcgctggattggcacgggactgctctgcactggcctgagcgctttcctcctggttgcctgtctcttagacttccagagagcgttggccttgttcgtcctgacctgcgttgtccttactttcctggggcacagacttctcaagcggctgctggggccaaagcttcgtcgctttctgaaaccccagggacaccctaggttactgctatggtttaaacgcggattagcgctcgcggcatttctgggactcgtcctgtggctgagcttggatacatcccaacgtccagagcagctggtgtcatttgcaggcatctgcgttttcgttgctctgctgtttgcttgcagcaagcaccactgcgcagtctcttggcgagccgtatcctggggcctaggcctgcagttcgtgctggggctactggtaatccggactgaaccaggattcattgctttcgaatggctgggagagcaaataagaatattcctcagttacaccaaagctggatcttcatttgtgtttggggaggccctcgtcaaagacgtgttcgcatttcaagttcttcctatcattgtgttcttcagctgcgtgataagtgtcttataccacgtgggtctcatgcaatgggtgatcctgaagattgcctggctcatgcaggtcaccatggggactaccgcaacagagacgctctcagttgcagggaacatttttgtcagccagactgaggcaccccttctgatcaggccttacttggctgacatgacccttagtgaggttcatgtggtgatgactggagggtacgctaccatagccggttccctgttaggggcatacatctctttcggcattgatgccacctccctgatagcggctagcgtcatggctgctccttgcgcgctcgctctgtccaaactggtctacccagaggttgaagaatccaagttccgcagggaagagggtgtcaagctaacttatggcgatgctcaaaacctgatcgaagctgctagcacgggggctgcgatctccgttaaagtagtagctaatattgcagcaaaccttattgccttcttagcagttttagatttcattaacgctgccttgtcctggctgggggacatggtggatattcaggggctaagctttcaactcatttgcagctatatcctgcggcctgttgcatttctgatgggtgtggcatgggaggactgcccagtggtggccgaattgctgggtatcaagttgttcctgaatgagtttgtcgcctatcaggatctgtctaagtacaaacagaggagacttgctggcgcagaggagtgggtgggcgaccgcaaacagtggatatctaggaggggattagccatgctgactcgcctcgtgctgaactcttggccatag

SEQ ID NO: 315435 - DNA, 1934 bp, Artificial Sequence
  derived and/or modified sequence
acaacgatgtgaaggttataagctgcactgcatggttgctgctggatgtgttgtgttcctggcttccctctggatgctgacagaaacaagggaatttctgctgaagtgacaaggcaagccagagccaaagcaggttggacccagcttgtccccacagagacgtgtgcttccctctctctctgagagcgacctgttaaccgcaaatacctggaaggtctgggacatggagaacgacccctcgagacgaagagagtccatctctctcacacctgtggccaagggtctggagaacatgggggctgatttcttggaaagcctggaggaaggccagctccctaggagtgacttgagccccgcagagatcaggagcagctggagcgaggcggcgccgaagcccttctccagatggaggaacctgcagccagccctgagagccagaagcttctgcagggagcacatgcagctgtttcgatggatcggcacaggcctgctctgcactgggctctctgccttcctgctggtggcctgcctcctggatttccagagggccctggctctgtttgtcctcacctgtgtggtcctcaccttcctgggccaccgcctgctgaaacggcttctggggccaaagctgaggaggtttctcaagcctcagggccatccccgcctgctgctctggtttaagaggggtctagctcttgctgctttcctgggcctggtcctgtggctgtctctggacacctcccagcggcctgagcaactggtgtccttcgcaggaatctgcgtgttcgtcgctctcctctttgcctgctcaaagcatcattgcgcagtgtcctggagggccgtgtcttggggacttggactgcagtttgtacttggactcctcgtcatcagaacagaaccaggattcattgcgttcgagtggctgggcgagcagatccggatcttcctgagctacacgaaggctggctccagcttcgtgtttggggaggcgctggtcaaggatgtctttgcctttcaggttctgcccatcattgtctttttcagctgtgtcatatccgttctctaccacgtgggcctcatgcagtgggtgatcctgaagattgcctggctgatgcaagtcaccatgggcaccacagccactgagaccctgagtgtggctggaaacatctttgtgagccagaccgaggctccattactgatccggccctacttggcagacatgacactctctgaagtccacgttgtcatgaccggaggttacgccaccattgctggcagcctgctgggtgcctacatctcctttgggatcgatgccacctcgttgattgcagcctctgtgatggctgccccttgtgccttggccctctccaagctggtctacccggaggtggaggagtccaagtttaggagggaggaaggagtgaaactgacctatggagatgctcagaacctcatagaagcagccagcactggggccgccatctccgtgaaggtggtcgccaacatcgctgccaacctgattgcgttcctggctgtgctggactttatcaatgctgccctctcctggctgggagacatggtggacatccaagggctcagcttccagctcatctgctcctacatcctgcggcctgtagccttcttgatgggtgtggcgtgggaggactgcccagtggtagctgagctgctggggatcaagctgtttctgaacgagtttgtggcctatcaagacctctccaagtacaagcaacgccgcctggcaggggccgaggagtgggtcggcgacaggaagcagtggatctccagacgaggtcttgctatgttgaccaggctggtcttgaactcctggccttaaatgatcctactgccttggcttcccaaagtgctgggattacaggatattcaaaagtacacctgccgagtcccagccctga

SEQ ID NO: 315436 - DNA, 1632 bp, Artificial Sequence
  derived and/or modified sequence
atggagaacgaccccagcagaagaagagagagcatcagcctgacccccgtggccaagggcctggagaacatgggcgccgacttcctggagagcctggaggagggccagctgcccagaagcgacctgagccccgccgagatcagaagcagctggagcgaggccgcccccaagcccttcagcagatggagaaacctgcagcccgccctgagagccagaagcttctgcagagagcacatgcagctgttcagatggatcggcaccggcctgctgtgcaccggcctgagcgccttcctgctggtggcctgcctgctggacttccagagagccctggccctgttcgtgctgacctgcgtggtgctgaccttcctgggccacagactgctgaagagactgctgggccccaagctgagaagattcctgaagccccagggccaccccagactgctgctgtggttcaagagaggcctggccctggccgccttcctgggcctggtgctgtggctgagcctggacaccagccagagacccgagcagctggtgagcttcgccggcatctgcgtgttcgtggccctgctgttcgcctgcagcaagcaccactgcgccgtgagctggagagccgtgagctggggcctgggcctgcagttcgtgctgggcctgctggtgatcagaaccgagcccggcttcatcgccttcgagtggctgggcgagcagatcagaatcttcctgagctacaccaaggccggcagcagcttcgtgttcggcgaggccctggtgaaggacgtgttcgccttccaggtgctgcccatcatcgtgttcttcagctgcgtgatcagcgtgctgtaccacgtgggcctgatgcagtgggtgatcctgaagatcgcctggctgatgcaggtgaccatgggcaccaccgccaccgagaccctgagcgtggccggcaacatcttcgtgagccagaccgaggcccccctgctgatcagaccctacctggccgacatgaccctgagcgaggtgcacgtggtgatgaccggcggctacgccaccatcgccggcagcctgctgggcgcctacatcagcttcggcatcgacgccaccagcctgatcgccgccagcgtgatggccgccccctgcgccctggccctgagcaagctggtgtaccccgaggtggaggagagcaagttcagaagagaggagggcgtgaagctgacctacggcgacgcccagaacctgatcgaggccgccagcaccggcgccgccatcagcgtgaaggtggtggccaacatcgccgccaacctgatcgccttcctggccgtgctggacttcatcaacgccgccctgagctggctgggcgacatggtggacatccagggcctgagcttccagctgatctgcagctacatcctgagacccgtggccttcctgatgggcgtggcctgggaggactgccccgtggtggccgagctgctgggcatcaagctgttcctgaacgagttcgtggcctaccaggacctgagcaagtacaagcagagaagactggccggcgccgaggagtgggtgggcgacagaaagcagtggatcagcagaagaggcctggccatgctgaccagactggtgctgaacagctggccctag

SEQ ID NO: 315437 - protein, 483 aa, Artificial Sequence
  derived and/or modified sequence
MENDPSRRRESISLTPVAKGLENMGADFLESLEEGQLPRSDLSPAEIRSSWSEAAPKPFSRWRNLQPALRARSFCREHMQLFRWIGTGLLCTGLSAFLLVACLLDFQRALALFVLTCVVLTFLGHRLLKRLLGPKLRRFLKPQGHPRLLLWFKRGLALAAFLGLVLWLSLDTSQRPEQLVSFAGICVFVALLFACSKHHCAVSWRAVSWGLGLQFVLGLLVIRTEPGFIAFEWLGEQIRIFLSYTKAGSSFVFGEALVKDVFAFQVLPIIVFFSCVISVLYHVGLMQWVILKIAWLMQVTMGTTATETLSVAGNIFVSQTEAPLLIRPYLADMTLSEVHVVMTGGYATIAGSLLGAYISFGVRAEVLTTFALCGFANFSSIGIMLGGLTSMVPQRKSDFSQIVLRALFTGACVSLVNACMAGILYMPRGAEVDCMSLLNTTLSSSSFEIYQCCREAFQSVNPEFSPEALDNCCRFYNHTICAQ

SEQ ID NO: 315438 - DNA, 1452 bp, Artificial Sequence
  derived and/or modified sequence
atggagaacgatccttctcgaaggcgtgagagcattagtcttacacccgtggccaagggcctggagaacatgggcgccgatttcctggagtctttagaggaagggcagcttccaagatcggatctcagccctgccgagattagatcttcttggtcagaagcggctccgaagccgttctcccgatggcgtaacctccaaccagctctgagggccaggagcttttgccgtgagcatatgcaacttttccggtggatcggcactggtttgttatgtaccggcctgtcggccttcttacttgttgcatgcttgttagattttcagcgggctctggctctgttcgtccttacctgcgtggtcctcaccttcctaggtcatcggctattgaagaggctgctcggacctaaactcaggaggttcctgaagccccaagggcacccaaggctcctgctgtggttcaagagaggccttgccctggctgcctttctgggcctggtgttatggctttccctcgacacatcccagcgacccgagcaactcgttagtttcgctgggatttgcgtgtttgtcgccttgctttttgcatgctcaaaacaccattgtgctgttagctggagggccgtctcttggggtctcggactgcagttcgttctcggcctgctggtcataaggacggaaccgggtttcatcgctttcgagtggctgggggagcagattcgcatcttcctctcctacacaaaagcagggagcagttttgtgttcggggaagccctggtcaaagacgtgttcgcttttcaggtattgcccattatcgtgttcttttcctgtgtcatcagcgtgctgtaccatgtcggcctgatgcagtgggtgatactgaaaatcgcctggctcatgcaggttaccatgggaacgactgcaaccgagacactgagcgtcgccggcaacatattcgtgtctcagaccgaagcaccattgttgattcggccctacctggccgacatgacacttagcgaagtgcacgtcgtgatgactggtgggtatgctactattgcagggtcactgctgggagcttacatctcctttggcgtgagagctgaggtgctcaccacttttgcactctgcggatttgctaatttcagctccatcggcattatgctcggcggcctgacgagtatggtcccccaacggaagtcagacttctctcagatcgtgctgcgcgcactgtttactggcgcttgcgtgagcctcgtaaacgcctgcatggcaggcatcctgtacatgccaaggggagctgaagtggactgtatgtcattgcttaatacaacgctgagcagtagcagctttgagatttaccaatgttgtagagaggcgtttcagtctgttaatcctgaattctcccctgaggcgcttgacaattgttgccgcttttacaaccacaccatctgtgcccagtag

SEQ ID NO: 315439 - DNA, 1452 bp, Artificial Sequence
  derived and/or modified sequence
atggagaatgaccccagcagaagaagagagagcatcagcctgacccctgtggccaagggcctggagaacatgggcgctgacttcctggagagcctggaggagggccagctgcccaggagtgacctgagccctgctgagatccgcagctcctggagcgaggccgcccccaagcccttcagccgctggaggaacctgcagcctgccctgcgggcccgctccttctgccgggagcacatgcagctgttccgctggattggaacaggcctgctgtgcaccggcctgagcgccttcctgctggtggcctgcctgctggacttccagagggccctggccctgtttgtgctgacctgtgtggtgctgaccttcctgggccaccggctgctgaagaggctgctgggccccaagctgcggcgcttcctgaagccccagggccacccccggctgctgctgtggttcaagaggggcctggccctggccgccttcctgggcctggtgctgtggctgagcctggacaccagccagaggcctgagcagctggtgtcctttgctggcatctgtgtgtttgtggccctgctgtttgcctgcagcaagcaccactgtgctgtgtcctggagggctgtgtcctggggcctgggcctgcagtttgtgctgggcctgctggtgatcagaacagagcccggcttcatcgcctttgagtggctgggggagcagatccgcatcttcctgagctacaccaaggccggcagcagctttgtgtttggagaggccctggtgaaggatgtgtttgccttccaggtgctgcccatcatcgtgttcttcagctgtgtgatctctgtgctgtaccacgtgggcctgatgcagtgggtgatcctgaagatcgcctggctgatgcaggtgaccatgggcaccacagccacagagaccctgtctgtggccggcaacatctttgtgtcccagacagaggcccccctgctgatccggccctacctggccgacatgaccctgtctgaggtgcacgtggtgatgactggaggctacgccaccatcgccggcagcctgctgggcgcctacatcagctttggagtgcgggcagaggtgctgaccacctttgccctgtgtggctttgccaacttcagcagcatcggcatcatgctgggcggcctgacctccatggtgccccagaggaagagtgacttcagccagatcgtgctgcgggccctcttcaccggggcctgtgtgtccctggtgaatgcctgcatggccggcatcctgtacatgcccagaggagctgaggtggactgcatgagcctgctgaacaccaccctgagcagcagcagctttgagatctaccagtgctgccgggaggccttccagagcgtgaaccctgagttcagccctgaggccctggacaactgctgccgcttctacaaccacaccatctgtgcccagtag

SEQ ID NO: 315440 - DNA, 1452 bp, Artificial Sequence
  derived and/or modified sequence
atggagaacgaccccagccggcggcgggagagcatcagcctgacccccgtcgcgaaaggtctcgagaacatgggggctgacttcctggaaagcttagaggaggggcagcttccacgaagcgatttatcaccagcagagataaggtcctcctggagcgaagcagcccccaagcctttctccaggtggcgcaatctacaacccgccctcagagccagatcattctgcagggagcacatgcagctttttcgttggattggcaccggattactgtgtactggactatccgcgtttcttctagtggcatgtctcctcgacttccagagagctctggcactcttcgtgctgacgtgcgtcgtgcttaccttcttaggtcatcggttactgaagagactgctcggtccaaagcttagacgcttcctgaaaccccaaggacacccgaggcttcttttgtggtttaagagagggcttgccctggcagcgttcctaggactcgtgctctggctatctctggatacttctcagcggcccgagcagctcgtgtcgttcgctggtatctgcgtttttgtcgctctcctttttgcgtgtagcaaacaccactgtgccgtgagctggcgggcggtttcctgggggctggggcttcagttcgtcctcggcttgcttgtaattaggacagagccgggatttattgccttcgagtggctgggggaacagataagaatttttctgtcatacacaaaagcgggcagttcatttgtgtttggagaagccctagtcaaagacgtgttcgcatttcaagtgcttccaatcattgttttttttagctgcgtgatcagcgttctgtaccatgttggtctgatgcaatgggtaatactgaagatagcctggctcatgcaggtgactatgggaaccacggctactgagactctctccgtcgccgggaatatctttgtctcccagaccgaggccccactactcattaggccctacctggccgatatgaccctttccgaagtgcacgtcgttatgactggcggatacgcaactattgccggcagcctccttggagcctacatcagtttcggggtacgggctgaggtcctcacaacctttgctctgtgcggcttcgcgaatttttcatccataggaattatgctaggaggattgacatccatggttccccagcgcaaatccgatttttctcagattgtcttaagagccctttttaccggtgcctgtgtaagcctggtgaatgcctgtatggcaggtatcctgtacatgccgcgcggcgcggaggtcgattgcatgagtctcttgaatactacacttagctctagttcttttgaaatttaccaatgctgtcgagaggctttccaaagtgtgaaccctgagtttagccctgaagctcttgataactgttgcagattttataaccatacgatctgcgctcagtag

SEQ ID NO: 315441 - DNA, 1452 bp, Artificial Sequence
  derived and/or modified sequence
atggaaaatgatccatcaagaagaagagagtctatctccctcaccccagttgccaagggcctggaaaatatgggcgcagactttcttgaatccctggaagaagggcagctgcctaggtctgacctcagtccggcagaaattagatcttcttggagcgaggcagctcccaaaccattcagcagatggcgaaatctccaaccagccttgcgagctcggagcttttgccgtgagcacatgcagctgtttagatggataggcacaggtttgctgtgcacggggttgagcgctttcctgctggtggcctgcctactggactttcaacgtgccctggcattgtttgtgctgacctgtgtcgtactgacattcctgggccaccgcctgctaaaaaggctcctgggccctaaactaagaaggttcctcaagccccaaggccaccccaggttgctgttgtggttcaaacggggtctcgccctggctgctttcctgggcttagtgctgtggctttccctggatacaagccaacgccctgagcagctggtctcttttgcagggatttgcgtgtttgtagctctccttttcgcatgttcgaagcaccattgtgccgtgagttggcgagcagtgagttggggacttggactgcagtttgtgcttggcctactagtcattcgaaccgaaccagggttcatcgcgtttgaatggctcggcgaacagatacggatcttcctgagttacaccaaagcaggctcctcttttgtcttcggagaggccctcgtaaaagatgtttttgcatttcaggtgcttcctatcattgttttctttagctgcgtcatatccgtcctttaccacgtgggcctcatgcagtgggtgattctgaaaattgcctggctgatgcaggtgacaatgggaaccaccgcaacagaaaccctgagcgtggctggaaatatctttgttagccagaccgaggctcctttgctgatacgcccatatctcgctgatatgacgctctcagaagtccacgtggtcatgaccggcggatacgccaccatcgcgggttccctgctgggagcttacatctccttcggtgtccgcgcagaagttttgactaccttcgccctgtgcggttttgctaatttttccagcatcggcattatgctcggcggactgacaagtatggtcccacagaggaagagtgactttagccagattgtgctgagggccctgttcacgggggcttgtgtctcactggtgaatgcctgcatggcaggcattctgtacatgcccagaggagccgaggtagattgtatgtccctgctgaacacaactttgtcttcttcttctttcgagatatatcaatgctgccgtgaggctttccagagtgtgaacccggagtttagccccgaagcgctggacaactgctgcagattctacaaccataccatctgtgcacaatag

SEQ ID NO: 315442 - DNA, 1590 bp, Artificial Sequence
  derived and/or modified sequence
acaacgatgtgaaggttataagctgcactgcatggttgctgctggatgtgttgtgttcctggcttccctctggatgctgacagaaacaaggctggaaggtctgggacatggagaacgacccctcgagacgaagagagtccatctctctcacacctgtggccaagggtctggagaacatgggggctgatttcttggaaagcctggaggaaggccagctccctaggagtgacttgagccccgcagagatcaggagcagctggagcgaggcggcgccgaagcccttctccagatggaggaacctgcagccagccctgagagccagaagcttctgcagggagcacatgcagctgtttcgatggatcggcacaggcctgctctgcactgggctctctgccttcctgctggtggcctgcctcctggatttccagagggccctggctctgtttgtcctcacctgtgtggtcctcaccttcctgggccaccgcctgctgaaacggcttctggggccaaagctgaggaggtttctcaagcctcagggccatccccgcctgctgctctggtttaagaggggtctagctcttgctgctttcctgggcctggtcctgtggctgtctctggacacctcccagcggcctgagcaactggtgtccttcgcaggaatctgcgtgttcgtcgctctcctctttgcctgctcaaagcatcattgcgcagtgtcctggagggccgtgtcttggggacttggactgcagtttgtacttggactcctcgtcatcagaacagaaccaggattcattgcgttcgagtggctgggcgagcagatccggatcttcctgagctacacgaaggctggctccagcttcgtgtttggggaggcgctggtcaaggatgtctttgcctttcaggttctgcccatcattgtctttttcagctgtgtcatatccgttctctaccacgtgggcctcatgcagtgggtgatcctgaagattgcctggctgatgcaagtcaccatgggcaccacagccactgagaccctgagtgtggctggaaacatctttgtgagccagaccgaggctccattactgatccggccctacttggcagacatgacactctctgaagtccacgttgtcatgaccggaggttacgccaccattgctggcagcctgctgggtgcctacatctcctttggggtcagagctgaagtcctcacgacgtttgccctctgtggatttgccaatttcagctccattgggatcatgctgggaggcttgacctccatggtcccccaacggaagagcgacttctcccagatagtgctccgggcgctcttcacgggagcctgtgtgtccctggtgaacgcctgtatggcagggatcctctacatgcccaggggggctgaagttgactgcatgtccctcttgaacacgaccctcagcagcagtagctttgagatttaccagtgctgccgtgaggccttccagagcgtcaatccagagttcagcccagaggccctggacaactgctgtcggttttacaaccacacgatctgtgcacagtgaggacagaacatgcttgtgcttctgcgcttct

SEQ ID NO: 315443 - DNA, 1452 bp, Artificial Sequence
  derived and/or modified sequence
atggagaacgaccccagcagaagaagagagagcatcagcctgacccccgtggccaagggcctggagaacatgggcgccgacttcctggagagcctggaggagggccagctgcccagaagcgacctgagccccgccgagatcagaagcagctggagcgaggccgcccccaagcccttcagcagatggagaaacctgcagcccgccctgagagccagaagcttctgcagagagcacatgcagctgttcagatggatcggcaccggcctgctgtgcaccggcctgagcgccttcctgctggtggcctgcctgctggacttccagagagccctggccctgttcgtgctgacctgcgtggtgctgaccttcctgggccacagactgctgaagagactgctgggccccaagctgagaagattcctgaagccccagggccaccccagactgctgctgtggttcaagagaggcctggccctggccgccttcctgggcctggtgctgtggctgagcctggacaccagccagagacccgagcagctggtgagcttcgccggcatctgcgtgttcgtggccctgctgttcgcctgcagcaagcaccactgcgccgtgagctggagagccgtgagctggggcctgggcctgcagttcgtgctgggcctgctggtgatcagaaccgagcccggcttcatcgccttcgagtggctgggcgagcagatcagaatcttcctgagctacaccaaggccggcagcagcttcgtgttcggcgaggccctggtgaaggacgtgttcgccttccaggtgctgcccatcatcgtgttcttcagctgcgtgatcagcgtgctgtaccacgtgggcctgatgcagtgggtgatcctgaagatcgcctggctgatgcaggtgaccatgggcaccaccgccaccgagaccctgagcgtggccggcaacatcttcgtgagccagaccgaggcccccctgctgatcagaccctacctggccgacatgaccctgagcgaggtgcacgtggtgatgaccggcggctacgccaccatcgccggcagcctgctgggcgcctacatcagcttcggcgtgagagccgaggtgctgaccaccttcgccctgtgcggcttcgccaacttcagcagcatcggcatcatgctgggcggcctgaccagcatggtgccccagagaaagagcgacttcagccagatcgtgctgagagccctgttcaccggcgcctgcgtgagcctggtgaacgcctgcatggccggcatcctgtacatgcccagaggcgccgaggtggactgcatgagcctgctgaacaccaccctgagcagcagcagcttcgagatctaccagtgctgcagagaggccttccagagcgtgaaccccgagttcagccccgaggccctggacaactgctgcagattctacaaccacaccatctgcgcccagtag

SEQ ID NO: 315444 - DNA, 864 bp, Artificial Sequence
  derived and/or modified sequence
atgcagctgtttcgatggataggcacaggtctgctctgcaccggcctgtctgccttcctcctcgtcgcctgcctgctggattttcagcgcgccttagcgctgtttgttcttacttgtgtggtactgacatttctcggtcaccgacttcttaaacgcctgcttggacccaagctgcgaagattcctgaaacctcagggacatcccagattactgctttggtttaaacgaggtcttgctcttgcagcgttcttagggctagtgctgtggctgtcactagacacgagccagcgcccggaacagctggttagcttcgccggcatttgcgtttttgtcgctttgctgttcgcttgttcaaagcaccattgcgccgtttcctggcgggcagtctcctggggcctcggcttacagttcgtgctcggtctcctggtcattaggactgaaccaggcttcattgcctttgaatggctcggggaacagatcagaatctttctgtcatatacaaaagccgggtcttcctttgttttcggagaggccctggttaaagacgtttttgccttccaagtgctacctatcattgtgtttttttcatgcgtgatttcagtgttgtatcatgtcggactgatgcagtgggttattctgaaaattgcctggttaatgcaagttactatgggaacaaccgcgacagagaccctgtcagtcgccggtaatatttttgtttcacagaccgaggccccattgctgattcgaccatacctggcagatatgaccctgtccgaggtccacgtagttatgaccggcggctacgccactattgccggcagtctactgggcgcatacataagtttcggattagagaaactgtag

SEQ ID NO: 315445 - DNA, 864 bp, Artificial Sequence
  derived and/or modified sequence
atgcagctgttccgctggattggaacaggcctgctgtgcaccggcctgagcgccttcctgctggtggcctgcctgctggacttccagagggccctggccctgtttgtgctgacctgtgtggtgctgaccttcctgggccaccggctgctgaagaggctgctgggccccaagctgcggcgcttcctgaagccccagggccacccccggctgctgctgtggttcaagaggggcctggccctggccgccttcctgggcctggtgctgtggctgagcctggacaccagccagaggcctgagcagctggtgtcctttgctggcatctgtgtgtttgtggccctgctgtttgcctgcagcaagcaccactgtgctgtgtcctggagggctgtgtcctggggcctgggcctgcagtttgtgctgggcctgctggtgatcagaacagagcccggcttcatcgcctttgagtggctgggggagcagatccgcatcttcctgagctacaccaaggccggcagcagctttgtgtttggagaggccctggtgaaggatgtgtttgccttccaggtgctgcccatcatcgtgttcttcagctgtgtgatctctgtgctgtaccacgtgggcctgatgcagtgggtgatcctgaagatcgcctggctgatgcaggtgaccatgggcaccacagccacagagaccctgtctgtggccggcaacatctttgtgtcccagacagaggcccccctgctgatccggccctacctggccgacatgaccctgtctgaggtgcacgtggtgatgactggaggctacgccaccatcgccggcagcctgctgggcgcctacatcagctttggcctggagaagctgtag

SEQ ID NO: 315446 - DNA, 864 bp, Artificial Sequence
  derived and/or modified sequence
atgcagctgttccggtggatcggcaccggcctgctgtgcaccggcctatcggccttcctgttagtggcctgcctattagacttccaaagggctttggctctcttcgtgttaacttgtgtcgtcctgacatttctgggccacagactccttaagagattacttggccccaagttgagacggttcctcaaacctcaggggcatcctaggttactcctctggttcaagagaggcctcgccctggccgcatttttgggcctcgtgctttggctctccctggacacaagccaaagaccagaacagctcgtgtcctttgccgggatttgtgtgttcgttgcactgttgtttgcttgctcgaaacaccattgtgccgtgtcttggcgtgccgtgagctgggggttggggctgcagtttgtgttgggcctgctggtgatcagaactgagccgggtttcatagcatttgagtggttgggtgaacagattcgtatattcctaagctataccaaagctggatccagcttcgtgttcggcgaggctctcgtgaaagacgtctttgcattccaggtgctccccattatcgtctttttttcctgtgttatctccgtgctgtaccatgttggcctcatgcagtgggtcatactgaagattgcctggctgatgcaagtaacaatggggaccactgccacggaaacactgtccgtagctggcaacatattcgtgtcccagacagaggcccccctgttaattagaccctacctcgccgacatgaccctgagcgaagtccatgtggtaatgaccggtggttatgcaaccattgctgggagtttactaggtgcctacatctcttttggactggaaaaactatag

SEQ ID NO: 315447 - DNA, 864 bp, Artificial Sequence
  derived and/or modified sequence
atgcagctcttcagatggattgggacgggacttctgtgcaccgggctgagcgccttccttctagttgcctgcttgctggactttcagagggccctggctttgtttgtccttacatgtgttgtcctgacattcctgggtcaccggcttctaaaacgtttgctcgggccaaagctccgacgctttcttaaaccacagggacatcctcgactgctgctttggttcaaacgcggactggcgctggccgcattcctgggtttggtgctttggctgagcctagatactagccagcgaccggaacagctggtgtcatttgctggcatctgtgtcttcgttgccctgctgttcgcctgctccaagcatcattgcgctgtctcctggcgggctgtaagttggggtctgggtttgcaattcgtattaggcctgctggtgatccggacggaacccggattcattgcgttcgaatggcttggggaacaaatacggattttcctgagctacaccaaggcgggatcatctttcgtgtttggggaagcgctcgtaaaggacgtgtttgccttccaggtgttacccattatcgttttcttctcctgcgtgatctccgttctataccacgtgggtctgatgcaatgggtgattctcaagattgcctggctgatgcaggttacaatgggtaccaccgcaacggaaacactgtcagtagctggaaacatctttgtgtcacagacggaggctcctcttttgatccgcccatatctggccgatatgacattaagcgaagtgcacgtggtgatgaccgggggatacgctacaatcgctggtagcttactgggtgcctacatctctttcggacttgaaaagctgtag

SEQ ID NO: 315448 - DNA, 1300 bp, Artificial Sequence
  derived and/or modified sequence
gctgcactgcatggttgctgctggatgtgttgtgttcctggcttccctctggatgctgacagaaacaagggaatttctgctgaagtgacaaggcaagccagagccaaagcaggttggacccagcttgtccccacagagacgtgtgcttccctctctctctgagagcgacctgttaaccgcaaatacctggaaggtctgggacatggagaacgacccctcgagacgaagagagtccatctctctcacacctgtggccaagggtctggagaacatgggggctgatttcttggaaagcctggaggaaggccagctccctaggagtgacttgagccccgcagagatcaggagcagctggagcgaggcggcgccgaagcccttctccagatggaggaacctgcagccagccctgagagccagaagcttctgcagggagcacatgcagctgtttcgatggatcggcacaggcctgctctgcactgggctctctgccttcctgctggtggcctgcctcctggatttccagagggccctggctctgtttgtcctcacctgtgtggtcctcaccttcctgggccaccgcctgctgaaacggcttctggggccaaagctgaggaggtttctcaagcctcagggccatccccgcctgctgctctggtttaagaggggtctagctcttgctgctttcctgggcctggtcctgtggctgtctctggacacctcccagcggcctgagcaactggtgtccttcgcaggaatctgcgtgttcgtcgctctcctctttgcctgctcaaagcatcattgcgcagtgtcctggagggccgtgtcttggggacttggactgcagtttgtacttggactcctcgtcatcagaacagaaccaggattcattgcgttcgagtggctgggcgagcagatccggatcttcctgagctacacgaaggctggctccagcttcgtgtttggggaggcgctggtcaaggatgtctttgcctttcaggttctgcccatcattgtctttttcagctgtgtcatatccgttctctaccacgtgggcctcatgcagtgggtgatcctgaagattgcctggctgatgcaagtcaccatgggcaccacagccactgagaccctgagtgtggctggaaacatctttgtgagccagaccgaggctccattactgatccggccctacttggcagacatgacactctctgaagtccacgttgtcatgaccggaggttacgccaccattgctggcagcctgctgggtgcctacatctcctttgggctagaaaaattgtga

SEQ ID NO: 315449 - DNA, 864 bp, Artificial Sequence
  derived and/or modified sequence
atgcagctgttcagatggatcggcaccggcctgctgtgcaccggcctgagcgccttcctgctggtggcctgcctgctggacttccagagagccctggccctgttcgtgctgacctgcgtggtgctgaccttcctgggccacagactgctgaagagactgctgggccccaagctgagaagattcctgaagccccagggccaccccagactgctgctgtggttcaagagaggcctggccctggccgccttcctgggcctggtgctgtggctgagcctggacaccagccagagacccgagcagctggtgagcttcgccggcatctgcgtgttcgtggccctgctgttcgcctgcagcaagcaccactgcgccgtgagctggagagccgtgagctggggcctgggcctgcagttcgtgctgggcctgctggtgatcagaaccgagcccggcttcatcgccttcgagtggctgggcgagcagatcagaatcttcctgagctacaccaaggccggcagcagcttcgtgttcggcgaggccctggtgaaggacgtgttcgccttccaggtgctgcccatcatcgtgttcttcagctgcgtgatcagcgtgctgtaccacgtgggcctgatgcagtgggtgatcctgaagatcgcctggctgatgcaggtgaccatgggcaccaccgccaccgagaccctgagcgtggccggcaacatcttcgtgagccagaccgaggcccccctgctgatcagaccctacctggccgacatgaccctgagcgaggtgcacgtggtgatgaccggcggctacgccaccatcgccggcagcctgctgggcgcctacatcagcttcggcctggagaagctgtag

SEQ ID NO: 315450 - protein, 1081 aa, Artificial Sequence
  derived and/or modified sequence
MGKLIRMGPQERWLLRTKRLHWSRLLFLLGMLIIGSTYQHLRRPRGLSSLWAAVSSHQPIKLASRDLSSEEMMMMSSSPSKPSSEMGGKMLVPQASVGSDEATLSMTVENIPSMPKRTAKMIPTTTKNNYSPTAAGTERRKEDTPTSSRTLTYYTSTSSRQIVKKYTPTPRGEMKSYSPTQVREKVKYTPSPRGRRVGTYVPSTFMTMETSHAITPRTTVKDSDITATYKILETNSLKRIMEETTPTTLKGMFDSTPTFLTHEVEANVLTSPRSVMEKNNLFPPRRVESNSSAHPWGLVGKSNPKTPQGTVLLHTPATSEGQVTISTMTGSSPAETKAFTAAWSLRNPSPRTSVSAIKTAPAIVWRLAKKPSTAPSTSTTPTVRAKLTMQVHHCVVVKPTPAMLTTPSPSLTTALLPEELSPSPSVLPPSLPDLHPKGEYPPDLFSVEERRQGWVVLHVFGMMYVFVALAIVCDEYFVPALGVITDKLQISEDVAGATFMAAGGSAPELFTSLIGVFISHSNVGIGTIVGSAVFNILFVIGTCSLFSREILNLTWWPLFRDVSFYILDLIMLILFFLDSLIAWWESLLLLLAYAFYVFTMKWNKHIEVWVKEQLSRRPVAKVMALEDLSKLPSLLTRGSSSTSLHNSTIRSTIYQLMLHSLDPLREVRLAKEKEEESLNQGARAQPQAKAESKPEEEEPAKLPAVTVTPAPVPDIKGDQKENPGGQEDVAEAESTGEMPGEEGETAGEGETEEKSGGETQPEGEGETETQGKGEECEDENEAEGKGDNEGEDEGEIHAEDGEMKGNEGETESQELSAENHGEAKNDEKGVEDGGGSDGGDSEEEEEEEEEQEEEEEEEEQEEEEEEEEEEEEKGNEEPLSLDWPETRQKQAIYLFLLPIVFPLWLTVPDVRRQESRKFFVFTFLGSIMWIAMFSYLMVWWAHQVGETIGISEEIMGLTILAAGTSIPDLITSVIVARKGLGDMAVSSSVGSNIFDITVGLPVPWLLFSLINGLQPVPVSSNGLFCAIVLLFLMLLFVISSIASCKWRMNKILGFTMFLLYFVFLIISVMLEDRIISCPVSV

SEQ ID NO: 315451 - DNA, 3246 bp, Artificial Sequence
  derived and/or modified sequence
atgggtaagttaattcgcatgggtccgcaggagcgctggctgttgaggaccaagagactccactggagtcggctactttttctgctaggtatgttaatcatcggcagcacatatcaacatctgcgaagacccagggggttgtctagcttgtgggctgcagtgagctcccatcagcccatcaaactggcgagtagagatttgtcctctgaggaaatgatgatgatgagtagttcccccagtaaaccaagctcagagatgggcggaaagatgctagtaccccaagcttccgtgggaagtgatgaggctaccttgtctatgacggtggaaaatatcccctcaatgccaaaacgcacagccaagatgatcccaaccactaccaaaaacaactattcacctactgccgccggcacggagcggcgtaaggaagacactcccaccagctctcgcactctaacctattatacgagcacttctagtaggcaaatcgtgaagaaatacacccccactccacgtggggaaatgaaatcttacagcccgacccaggttagagaaaaagtgaagtataccccaagccctcgaggtcggagagtcggcacatatgtgccatcaacatttatgaccatggagaccagccacgcgatcaccccgagaacaactgttaaagattcagatattacagctacttataaaatcctcgaaaccaatagcctgaaacgcatcatggaagagacaacgcctactactctcaaagggatgtttgactccactccaacctttttaactcatgaagtcgaagccaatgtactaactagcccaagaagcgttatggagaaaaataacctatttccacccaggcgggtcgagagcaactctagcgcacatccctggggtcttgtagggaagtctaatcccaaaaccccacaaggcactgtcttgcttcacacacccgctacttccgagggtcaagtcacaatatctacaatgacaggtagttcccctgccgagactaaagcctttactgccgcctggagcctgcggaacccctccccaagaacttctgtgtccgccataaaaactgcgcccgccattgtctggcggctagccaaaaagccatccacagccccgtctaccagcacaacccctaccgttcgggcaaagttgacgatgcaggttcaccactgtgttgtcgtgaagcccacccccgccatgctgacaacgccttcacctagtctgaccaccgccctgctccccgaggagttgagcccgagcccttcagttctcccaccttctctgccagaccttcatcccaagggcgagtatccaccagacttgttctctgtggaggaaagacggcagggttgggtcgtgctccatgtgtttggtatgatgtacgtcttcgtggccctggcgatcgtgtgtgatgaatatttcgtcccggcattaggggttattaccgataaactccagatctcagaggacgttgcaggtgccacattcatggcggctggaggatcagctcctgaattgttcaccagcctcatcggagtgttcatcagtcacagcaatgtagggataggcacaattgtcggctcagccgtgttcaacattcttttcgtgatcgggacctgcagtctcttcagccgcgaaattctcaacctgacttggtggccactctttcgagacgtgtctttttatattctggatctcatcatgctgatactgtttttcctcgacagcctgatagcttggtgggagtccctgctacttttgctggcatacgctttctatgtgttcactatgaagtggaacaagcatatcgaagtctgggtaaaagaacaattaagtagacgcccggtggccaaggtaatggccctggaggacctgtccaagctgccttccctcctgactcgggggagctcttctacgtccctgcacaacagtacgatcaggtcaaccatatatcagctgatgttgcacagcctggacccactgagggaagtccggctggctaaggagaaggaggaggaatccctcaaccagggggccagagcccagccccaggcaaaagctgagagcaaacccgaggaggaggagccagcaaaactccctgcagtgaccgtgacacccgctcctgtgccagacattaagggtgatcaaaaggaaaatccagggggacaagaggacgtggccgaggcggagtcaactggcgagatgcccggagaagaaggggagactgctggtgaaggagagacggaagaaaaatccggtggggaaacccagccagagggcgaaggggaaacggagacccaggggaaaggcgaggagtgtgaagacgagaacgaggctgagggaaaaggcgacaatgagggcgaagacgagggagagatacacgccgaggatggcgaaatgaagggcaacgaaggcgagaccgaatcccaggaactctccgcggagaatcatggcgaggctaaaaacgatgagaagggggtcgaggatggcggcggctctgatggtggcgacagcgaagaggaggaagaagaagaggaggaacaggaagaagaagaggaggaagaggagcaggaggaggaagaggaggaggaagaagaagaggaggaaaaaggaaatgaggagccgctgagcctagattggcctgaaactagacagaaacaggcgatatacctgtttctcttaccgatcgtgttccctttgtggctgactgttcctgatgtgcgcaggcaagagtcacgcaaattttttgtgtttactttcctgggtagtatcatgtggattgcaatgttttcatatctgatggtgtggtgggcccaccaggtgggtgagaccatcggtatttcggaagagattatggggctcactattctggcagcagggacgtccattccagacctgatcacttctgtgattgtcgccaggaagggtctgggggacatggctgtcagttccagcgttggaagcaacatattcgatattaccgtcgggctgccggtcccttggctgctgttcagcctcatcaacggcctgcagcctgtgcctgtgagtagcaatggcctcttttgcgcaatcgtgctcttgtttctgatgctgctgttcgtgataagcagcatagcaagttgcaagtggaggatgaacaaaattttgggatttacaatgttcctgctctattttgtgttcctgattattagcgtaatgctggaggatcgcattatatcttgccccgtttccgtgtag

SEQ ID NO: 315452 - DNA, 3246 bp, Artificial Sequence
  derived and/or modified sequence
atgggaaaacttattcgcatgggcccccaggagagatggctgctgagaacgaaacgcctccattggagccgcctgctgttccttctcggaatgctgatcatagggagcacataccagcatctccggcggccgaggggcttgagcagtctatgggcggctgtgagctcccatcagcctatcaagctcgccagtcgcgacctgagttctgaggaaatgatgatgatgtctagcagtcccagtaaaccatccagcgagatgggcggcaagatgctcgtgccgcaggcgagtgtgggcagtgatgaagcaacattatctatgacagtagagaacatcccctcaatgcccaaacgcacagccaaaatgatcccgacaacaaccaaaaacaactacagtccgacagccgcaggcaccgagcgccgtaaagaggacactccgacatcgtcacggacgcttacctactacacaagcactagctcccgacagatcgtaaagaaatatactcccactccacgaggcgaaatgaagtcttattctcctacacaagtgagagagaaggtcaagtacactccctctcctcgcggtaggagggtgggaacatacgtgcctagcacgtttatgacgatggagacgagtcacgctattacccctcgcaccacagtgaaagactccgacattactgctacctacaaaatcctggaaactaacagcctcaagcgaatcatggaagagactacccccaccactttaaagggcatgtttgattcaacgcctacgtttttgactcatgaggtcgaggccaatgtgctcactagtccacgttctgtgatggaaaaaaacaatctgttcccccctcgtagggtggagagcaactcttccgcgcacccctggggtctggtggggaagtcaaatcccaagaccccacagggcaccgtgctcctgcacacacctgcaacgtctgagggacaggtcacaataagcactatgacgggctcctcacctgctgaaaccaaggccttcacagctgcttggtctctccggaatccttccccgagaacaagtgtgtcagctatcaaaacagcccctgccatcgtctggaggctggccaagaaaccgagtaccgctcccagcaccagcacaacacctacggtaagagcaaaactgaccatgcaggtacaccattgcgtcgttgtgaagccaacccccgctatgctgacaacaccaagtcctagtttgacaactgcgttactgcccgaagaattaagcccatccccgtccgtgctaccccccagcctgcctgatctgcaccctaagggcgagtatccccctgacctcttctccgtcgaggaaagaaggcaaggatgggtcgtcctccacgtgttcggtatgatgtatgtcttcgttgccctcgccatagtctgtgatgagtactttgtaccagccttgggagttataacggacaagcttcagatatctgaagacgtggctggcgctaccttcatggccgctggcggcagtgcccctgaactctttaccagcctgataggtgtgtttattagccacagcaacgtgggcattggcaccatcgttggcagcgcagtcttcaacattctcttcgtcattggcacctgctcccttttctctagggaaatacttaatttaacttggtggccgctcttcagggatgtgtccttctacatcctagatctcattatgttaatcttattctttctggacagcttgatcgcttggtgggaatcattactcttactgttggcctacgccttctatgtgttcactatgaaatggaacaagcatatcgaagtttgggttaaagaacagctgtctcgaaggcctgtcgccaaggtcatggctctggaggatctgtcaaaattacccagcctgctaactagaggttcgtcaagcacctctctgcacaatagtacaatcagaagcactatttaccagttaatgctgcactcacttgacccgctccgtgaggtgcgccttgccaaagaaaaggaagaagaatctctcaaccagggagccagggcccagcctcaagcaaaagctgagtctaagccagaagaagaagaacccgccaagttacccgcagtcacagtaacccctgctcccgttcccgacatcaagggggatcaaaaggaaaatcctggagggcaggaagacgtggcggaggccgagtctacgggggaaatgcctggggaggaaggcgaaacagcaggggaaggagagacggaggagaaatctgggggtgaaacccagccagaaggcgaaggtgagactgagacccagggcaagggtgaggaatgtgaagatgaaaacgaagctgagggtaagggcgacaatgagggagaggacgaaggtgagattcacgcagaggacggcgagatgaaaggcaatgaaggggagacagagagtcaggagctgtctgccgaaaatcacggtgaagccaaaaatgacgagaagggggtcgaggacggaggcgggtctgatgggggagacagcgaggaggaagaagaggaggaagaagagcaggaggaagaggaggaggaagaagagcaagaggaagaggaagaggaggaagaggaggaggaagaaaaggggaatgaggagcccctgtctctagactggcctgaaacccgccagaagcaggctatatatctgtttctactgccgatcgtctttcctctgtggcttacggtcccagacgtgcgtcggcaagaaagcagaaagttcttcgttttcactttcctcgggtccattatgtggatcgcgatgttcagctatctcatggtgtggtgggctcaccaggtgggcgagacaatcggcatctcggaagaaattatgggcctgactattctggcagcaggtacgtcgattcctgatctgattacatccgtgatcgtggctagaaagggcctgggcgacatggcggtatctagcagcgtggggtctaacatctttgacatcacagtgggtttgcctgtcccttggctactgtttagcttaatcaacggactgcaacctgtgcccgttagttctaacgggctgttttgcgcgattgtcttactcttcctgatgcttctctttgttatcagctctattgccagctgcaagtggaggatgaataagattctcggcttcaccatgttcctactctattttgtctttttgattatcagtgtgatgctagaagatcgcattattagttgtcctgtgtccgtgtag

SEQ ID NO: 315453 - DNA, 3246 bp, Artificial Sequence
  derived and/or modified sequence
atgggcaagctgatccgcatgggcccccaggagcgctggctgctgcggaccaagaggctgcactggagccggctgctcttcctgctgggcatgctgatcatcggcagcacctaccagcacctgcggcggccccggggcctgagcagcctgtgggccgctgtgagcagccaccagcccatcaagctggccagccgggacctgagcagcgaggagatgatgatgatgagcagcagccccagcaagcccagcagcgagatgggcggcaagatgctggtgccccaggcctctgtgggcagtgatgaggccaccctgtccatgacagtggagaacatccccagcatgcccaagaggacagccaagatgatccccaccaccaccaagaacaactacagccccacagctgctggaacagaaagaaggaaggaggacacccccaccagcagcaggaccctgacctactacaccagcaccagcagccggcagatcgtgaagaagtacacccccaccccaagaggagagatgaagagctacagccccacccaggtgcgggagaaggtgaagtacacccccagcccccggggcagaagagtgggcacctacgtgcccagcaccttcatgaccatggagaccagccacgccatcacccccaggaccaccgtgaaggacagcgacatcacagccacctacaagatcctggagaccaacagcctgaagaggatcatggaggagaccacccccaccaccctgaagggcatgtttgacagcacccccaccttcctgacccatgaggtggaggccaacgtgctgaccagccccaggtctgtgatggagaagaacaacctcttccccccaagaagagtggagagcaacagcagcgcccacccctggggcctggtgggcaagagcaaccccaagaccccccagggcaccgtgctgctgcacaccccagccaccagcgagggccaggtgaccatcagcaccatgacaggcagcagccctgctgagaccaaggccttcaccgctgcctggagcctgaggaaccccagccccaggacctctgtgtctgccatcaagacagccccagccatcgtgtggaggctggccaagaagcccagcacagcccccagcaccagcaccacccccaccgtgcgggccaagctgaccatgcaggtgcaccactgtgtggtggtgaagcccaccccagccatgctgaccacccccagccccagcctgaccacagccctgctgcctgaggagctgagccccagccccagcgtgctgccccccagcctgcctgacctgcaccccaagggggagtaccccccagacctcttctctgtggaggagcggcggcagggctgggtggtgctgcacgtgtttggcatgatgtatgtgtttgtggccctggccatcgtgtgtgatgagtactttgtgcctgccctgggcgtcatcacagacaagctgcagatcagtgaagatgtggccggggccaccttcatggccgccggcggcagcgcccctgagctgttcaccagcctcatcggggtcttcatcagccacagcaatgtgggcatcggcaccatcgtgggcagcgctgtgttcaacatcctcttcgtcatcggcacctgcagcctcttcagccgggagatcctgaacctgacctggtggcccctcttcagagatgtgtccttctacatcctggacctgatcatgctgatcctcttcttcctggacagcctgattgcctggtgggagagcctgctgctgctgctggcctatgccttctacgtgttcaccatgaagtggaacaagcacatcgaggtgtgggtgaaggagcagctgagccggcggcctgtggccaaggtgatggccctggaggacctgagcaagctgcccagcctgctgacccggggcagcagcagcaccagcctgcacaacagcaccatccgcagcaccatctaccagctgatgctgcacagcctggaccccctgcgggaggtgcggctggccaaggagaaggaggaggagagcctgaaccagggcgcccgggcccagccccaggccaaggccgagagcaagccagaggaggaggagcccgccaagctgcctgctgtgacagtgaccccagcccctgtgcctgacatcaagggggaccagaaggaaaatcctgggggccaggaggatgtggccgaggccgagagcactggagagatgcctggagaggagggggagacagctggggagggggagacagaggagaagtctggaggagagacccagcctgagggggagggggagacagagacccagggcaagggggaggagtgtgaagatgaaaatgaggccgagggcaaaggagacaatgaaggagaagatgaaggagagatccacgcagaagatggagagatgaagggaaatgaaggagaaacagagagccaggagctgtctgctgagaaccacggggaggccaagaatgatgagaagggcgtggaggatggcggcggcagtgatggaggagacagcgaggaggaggaggaggaggaggaggagcaggaggaggaggaggaggaggaggagcaggaggaggaggaggaggaggaggaggaggaggaggagaagggaaatgaggagcccctgagcctggactggccagagacccggcagaagcaggccatctacctgttcctgctgcccatcgtgttccccctgtggctgactgtgcctgatgtgcggcggcaggagagcaggaagttctttgtgttcaccttcctgggcagcatcatgtggatcgccatgttctcctacctgatggtgtggtgggcccaccaggtgggggagaccatcggcatcagcgaggagatcatgggcctgaccatcctggccgccggcaccagcatcccagacctgatcaccagcgtcatcgtggccaggaagggcctgggggacatggctgtgagcagctctgtgggcagcaacatctttgacatcaccgtgggcctgcctgtgccctggctgctcttcagcctcatcaatggcctgcagcctgtgcctgtgagcagcaatggcctcttctgtgccatcgtgctgctcttcctgatgctgctcttcgtcatcagcagcatcgccagctgcaagtggaggatgaacaagatcctgggcttcaccatgttcctgctgtactttgtgttcctgatcatctctgtgatgctggaggaccgcatcatcagctgccctgtgtctgtgtag

SEQ ID NO: 315454 - DNA, 3246 bp, Artificial Sequence
  derived and/or modified sequence
atgggcaagctgatccggatgggcccccaggagcggtggctgctgcggaccaagcgcctgcattggagcagactcctattcctgctcggaatgctaatcatcggctccacttaccagcacctgcgtaggccaagaggcctctcctccttgtgggcggccgtctcttcacaccagcctattaagctggccagccgcgacctatcatcagaagagatgatgatgatgtcgtcaagcccttccaagcccagttctgaaatgggaggaaagatgcttgtgcctcaggcttcggtggggtcggacgaagccactcttagtatgacagtagagaatattccgtcgatgccgaagcggaccgcaaaaatgatacccacgacaacaaagaacaattatagtcctacggcagcgggtacagaaaggcgcaaggaggacacaccaacgagttcccggactctaacgtactacacgtcaacgtcttcccgacagattgttaagaagtatacccctacacctagaggagaaatgaaatcatattcaccgacccaggtgcgcgaaaaagtaaagtacacaccatctcctcgcggcagacgagtgggaacctatgtcccctccaccttcatgacaatggagacgtctcatgcaattactccacggacgacagtaaaggacagtgatatcacagccacgtataaaatactcgaaacaaattctctcaaaaggatcatggaagaaactactcccacaacgttaaagggaatgttcgactcgactccgacattcttgacccacgaggtcgaagccaacgtgctaacaagcccccggtccgttatggagaagaacaatctttttccgcccagaagggtcgaatccaactcatcagcccacccttgggggctagtgggcaagtcgaacccaaagacccctcaaggaaccgtcctgcttcacacacctgcaacctccgagggacaggtgactatcagtacaatgactgggagctcacccgccgagacaaaggccttcacggctgcctggagtctgcgaaaccctagcccccgaacctccgtgtccgcaataaagaccgcccccgccatagtttggcgtttggcaaagaagccgtcaaccgctccaagcacatccacgacgccaaccgtgagggccaaactcacaatgcaggttcatcattgtgttgtggtcaaacctacacccgccatgctgactaccccatccccctcactgaccacagcgttgctcccagaggagctttccccatctccttctgtcctgccgccttcgttacctgatctgcacccaaagggcgagtatccccctgacttgttttccgttgaagagagaaggcaggggtgggttgttctacacgtttttggtatgatgtatgtgttcgtcgccctagcgattgtctgcgatgaatattttgtgcccgcacttggcgttatcaccgataagctccaaatttccgaggatgtcgcgggggccacgtttatggccgccgggggctctgcacccgagctgtttacctcactgatcggagtcttcataagtcacagcaacgtgggaatagggacgatcgtaggttctgctgtgttcaacatcctgttcgttataggaacttgctctttgttctctcgggagatcctgaacctgacctggtggcccctgttcagggatgtttctttctatatcctcgatctgataatgctgatactattctttcttgacagtctaattgcttggtgggaatctctgcttttgctcctggcttatgcattctatgtgtttacgatgaagtggaacaagcacatcgaagtatgggtgaaagaacaactgagcaggcggcccgttgcgaaagttatggcgctcgaggacctgagtaaactgccaagcttgctaacgaggggctccagctctacctctcttcacaattcaacaatccgatccactatctaccagctgatgttacactcactggatcccctgcgtgaggtgcggcttgcaaaagaaaaggaagaggaaagtctcaaccaaggagcccgagcccaaccccaggccaaggccgagagcaagcccgaagaggaggagcccgccaagctacccgccgtcaccgttactcctgcacctgtaccagatattaaaggagaccagaaagagaaccccggtgggcaagaggatgtcgctgaagccgagagcacgggggaaatgccgggtgaagaaggcgaaacagcaggcgagggggagacagaagaaaagtctgggggagagacacaacctgagggcgagggtgagaccgaaacccaaggcaagggggaagagtgtgaggatgaaaatgaggccgaaggaaagggcgacaatgaaggagaggacgagggcgaaatccacgcggaagacggtgagatgaaggggaatgagggggaaactgaaagccaggagttatctgctgagaatcatggcgaagcaaagaacgacgaaaaaggagtagaagacggagggggcagcgatggaggagattctgaggaagaagaggaggaggaggaggaacaagaggaagaggaggaggaagaggaacaggaagaagaagaagaggaagaggaggaggaggaggagaaaggcaacgaggagcccctcagcttggattggcccgagacccggcagaagcaggctatctacttgttcctgctgcccatagttttccccctgtggttaacagtgcccgatgtgcggcggcaggagtctagaaaatttttcgtcttcaccttcttgggtagtattatgtggatcgctatgttttcatacctgatggtgtggtgggcccaccaggtgggcgagactattgggatttccgaagagatcatgggactcactatcctcgcagccgggacctcgattcctgatttgataactagtgtcattgtagcccggaaaggactgggcgatatggcagtgtcaagttccgtgggaagtaacattttcgatatcacagtaggcctgcctgtaccatggctgctgttcagcctgattaatggcctgcaaccagtcccagtgagctccaacggactgttttgtgcaattgttctactgttcctgatgctcttgtttgtaatctcttctattgcttcgtgtaagtggcggatgaataagatactgggctttaccatgttcctgctgtatttcgtgtttctgataatcagtgtcatgctcgaagaccgcatcattagctgtcccgtgagcgtatag

SEQ ID NO: 315455 - DNA, 3246 bp, Artificial Sequence
  derived and/or modified sequence
atgggcaagctgatccggatgggcccccaggagcggtggctgctgcgaacgaagaggctgcactggagcaggcttctctttctcttaggcatgctcataatcgggagcacataccaacacctgcgccgcccccgcgggctgtcatccctctgggcggcagtgagcagccaccagccaatcaagttggcgtcaagggacctaagctctgaagagatgatgatgatgtcctcctccccttccaaaccctctagtgaaatgggaggaaaaatgttggtccctcaggcatccgtgggtagcgatgaggccacgctgtctatgaccgtggagaacatcccatccatgcctaagcgtaccgctaagatgatccctacaacaacaaagaacaattacagtccaaccgccgccggtactgagaggcgcaaggaagacacaccgaccagcagtcggaccctgacatattataccagtaccagttcaaggcagattgtgaagaaatatacacccacacctcgcggagagatgaagtcctacagccccactcaagtccgtgagaaggttaagtatactcccagtcctcgcggcagaagagttggaacctacgtacccagtactttcatgactatggagacctcccacgccataacaccacgcaccacagtcaaggacagcgacattacagcgacctacaagatcctagaaactaacagtctgaagcgaatcatggaagagacgacacccaccaccttgaagggtatgtttgactccaccccaaccttcttgacacacgaggtcgaggctaacgtgctcacgtcaccacgatctgtgatggagaagaacaacctgtttcctccacggcgcgtggaatccaatagttccgcccatccatggggtctggtgggcaagtcaaatcccaagaccccccaggggactgtgctgttgcatacaccggccacatctgagggtcaggtcaccatcagcaccatgacaggaagttctcccgcagagacaaaggcttttacagcggcctggtccttacggaatccgagtccgcgcacatccgtaagcgctatcaagacagcccccgccatcgtgtggaggttggcaaaaaagcctagtacagccccctctacaagtacaactcccaccgtcagggcgaaattaactatgcaagtgcatcattgtgttgtcgtgaagcccaccccagctatgttaacaactccatcaccttctctgacaaccgctttacttcctgaagagctcagtcctagcccatccgtcttacctccttcactgcccgatctgcaccctaagggcgagtacccccctgacttgttcagtgttgaggagcgacggcaaggctgggtggtcctgcatgtcttcggaatgatgtatgtgtttgttgcactcgctatagtgtgcgacgaatacttcgtaccagccctgggtgtgattacggacaaactacagattagcgaggatgttgctggggccacgttcatggcggccgggggctcagccccagaacttttcacgtcgctgattggggtgtttatatctcactccaatgtagggatagggacaatcgttgggagcgccgttttcaacattcttttcgttataggtacttgttccttgttctccagggagatattgaacctcacctggtggccattattcagggatgtcagtttttatatccttgacctcattatgttgatccttttttttctggactcactaatcgcatggtgggagagtttactgcttcttctggcatacgctttctatgtgttcacaatgaagtggaacaagcacatcgaagtttgggtcaaagagcagctgagccgtcggcctgtcgcgaaggtgatggccctggaagatttgtctaaactgccctccttgttaacgagagggagttcatcaacttcactgcacaattctaccatcagaagcaccatctatcaacttatgctacattccctcgaccctttgcgggaagttagacttgctaaagagaaggaggaggagagtctgaaccaaggtgctagagcccagccacaagctaaggcggagagcaagccagaagaggaggaacccgctaagctcccggctgtgacagtcactccagcacccgtgcccgatatcaaaggcgaccaaaaggagaatcctgggggacaagaggacgtcgcagaggccgaatctacaggcgagatgcctggagaggagggggaaacggcgggagagggcgaaaccgaggaaaagtcagggggtgagacgcaacccgaaggtgaaggcgaaaccgaaacacagggtaagggcgaagagtgtgaggacgaaaacgaggcagagggaaaaggtgataacgaaggcgaggacgaaggtgagatccatgccgaagatggagagatgaagggtaacgagggcgaaactgaatctcaggagctatctgcagagaatcacggtgaggctaagaacgatgagaaaggtgtggaggatggtggaggtagtgatgggggagacagcgaagaggaagaggaggaggaggaagaacaggaagaggaggaggaagaagaagaacaggaggaggaagaagaagaggaagaggaggaagaggaaaagggtaacgaggagccactgagcctggactggcccgagactagacagaaacaagccatttacttgtttctgctccccattgtgtttcctttgtggctgaccgtacctgatgttcgacgtcaggagtcgaggaagttcttcgtgttcacgtttctcggctcaattatgtggatcgccatgtttagctatctcatggtgtggtgggctcaccaagtgggggagaccatcggcatcagcgaggagattatgggcctgaccatccttgctgcaggaacctccatcccagacctcattacgagtgtgatcgtggctcggaagggacttggcgacatggccgtgtcctctagcgtggggagcaatatctttgacatcactgttggccttcctgtgccgtggctgctgttcagtttaatcaatggactccagccagtgcctgtgagctccaatggactgttctgcgcaattgttctgctcttcctgatgctgctttttgtgatatcatccatcgccagttgtaaatggcgcatgaataagatcctcggctttacgatgttcctgctatacttcgtgtttcttatcatctctgtgatgctcgaagatcggatcattagctgcccagtgagtgtgtag

SEQ ID NO: 315456 - DNA, 3246 bp, Artificial Sequence
  derived and/or modified sequence
atgggcaagttgatccgaatggggcctcaggagaggtggctactgcgcaccaagaggctgcactggagcagactgctgttcctactcggtatgctgattatcgggtcaacttaccagcacctgcggagacctcgaggcctttcgtctctttgggctgccgtgtcttcccatcagccaattaaattagcatctagagacctcagcagcgaagagatgatgatgatgagctcaagcccttccaagccaagctccgaaatggggggaaaaatgttggtaccacaagctagtgttggaagtgatgaagccactctgtccatgaccgtggagaacattccctccatgccgaaacgcaccgctaaaatgatccctactactacgaaaaacaactatagcccaaccgccgcagggactgagcgacgcaaggaggacacgcctacttcatcacggactctcacatattacaccagcacctcctctaggcagattgtgaagaaatatacaccaactcccaggggagaaatgaagagttattcacccacccaagtgagggagaaagtgaagtatacgccaagccccagaggccgacgcgtggggacatatgttccaagcacatttatgacaatggagactagccatgccatcaccccaaggaccaccgtgaaagactcagacatcacggctacctacaagattctggagactaatagtttgaagcggatcatggaggagacaacacccacaacgcttaaggggatgtttgactctacacccacatttctgacacatgaggtggaagctaacgtgctgacctcacctcgaagtgttatggagaagaataatctctttccccctagacgcgtcgagtcaaactcgagcgcccatccatggggactggtgggaaagtctaacccaaaaactccacagggcacagtgctcttgcacaccccagccactagcgaggggcaggtgaccatcagcacgatgacaggatcgagtcctgctgaaacaaaggcctttacagcagcatggtccctcaggaaccccagcccacgcacctctgtcagcgctatcaaaactgctcctgccattgtatggaggctggccaaaaaaccttctacagctccttccacatctacgacacccactgttcgtgccaagctgaccatgcaagttcaccactgcgtagttgtcaagcctacgcccgcaatgttgactacaccatcaccctctctcactacggctctgctccctgaggagctctctccttctcccagtgttctccccccaagcctgccagatctccaccccaaaggagagtatcctccggatctgtttagcgttgaggagcgtagacaaggctgggtcgtgctccatgtatttgggatgatgtacgtgttcgtggctctggcaattgtgtgtgacgagtacttcgtccccgcactaggagtgattacagacaaattacagatcagcgaagatgttgcgggagccacctttatggctgccggtgggagcgccccagagctctttacttcactcattggagtttttatctctcactcaaatgtcggtattggcaccatcgtggggtccgcagtgttcaacatcctcttcgtcatcggaacttgcagcctgttttcgcgcgaaattctgaacctaacatggtggccactgttccgagacgtgagcttttacatcctcgacttgatcatgttgattctgttcttcctcgattcactgatcgcctggtgggagagcttgctgctattactcgcttatgctttctatgtcttcaccatgaaatggaataaacatatcgaggtgtgggtgaaagaacagctgagcagacggccagtagccaaagttatggcactagaagatctatctaagttgccctcacttctgacacgagggtcttccagcacatcgcttcacaacagtacaattcggtccacaatctatcagctgatgctccatagcctggacccgcttcgcgaagtcagactggccaaggaaaaagaagaagagagcctgaatcaaggagcccgtgcccaacctcaagccaaagcggaaagtaagccggaagaggaggaacccgcaaagctaccggcagtcaccgtgacgcctgctcctgtccctgatattaagggggaccagaaggagaaccctggtggccaggaagacgttgctgaggcagaaagcaccggcgaaatgccgggtgaggagggggaaacagccggtgagggagagactgaggaaaaaagcggaggcgaaacccagccagaaggcgagggggaaaccgagactcaagggaagggtgaggagtgcgaagacgagaacgaagctgaaggtaaaggcgataatgaaggcgaagacgaaggcgaaatacatgccgaggacggcgagatgaagggaaatgagggggagacagagtcacaggagctcagcgccgagaatcacggcgaagctaaaaatgacgagaagggcgtggaggacggcggtggttcagatggcggagactctgaagaagaggaggaagaggaagaagagcaggaagaagaggaagaagaggaggaacaagaggaggaggaggaggaggaggaggaggaagaggagaaaggtaatgaggagccactcagcttagactggccagagacccgccagaaacaggcaatctacctgtttctcctgcctatcgtgtttcctttgtggctgacggtaccagacgtccggagacaggagtccaggaagttcttcgtgtttacttttttaggcagcataatgtggattgccatgttctcttacctgatggtatggtgggcccaccaggtgggagaaactatagggatttccgaggagattatgggcctgaccatcctagcagctggaaccagcatcccggatttaatcacatctgtgatagtggccaggaagggtttaggtgatatggccgtcagctcaagcgtcggcagtaacatttttgatataaccgtgggcctacccgtgccttggctgttattctctctgatcaatgggctacagccggtacctgtttccagcaatgggctcttttgcgcaatcgttctcctgtttctgatgctgctgttcgtcatatcctccatcgcctcttgcaagtggcgtatgaacaaaattcttggctttacgatgtttctgctctattttgtgttcctcatcatttcagtaatgcttgaggacagaattatttcgtgtccagtctctgtgtag

SEQ ID NO: 315457 - DNA, 3246 bp, Artificial Sequence
  derived and/or modified sequence
atgggaaaattaatccgtatggggccacaggaacgctggctgctaaggaccaagaggctccattggtcccgtctgttatttctccttggcatgttaatcatcggcagtacatatcaacatttgaggagacctcgaggacttagctctctgtgggccgctgtgagtagccatcaacctataaagttggcgagtcgagatctaagttcggaagagatgatgatgatgtcaagcagcccatcgaaaccaagttccgagatgggtggcaagatgttggtgcctcaggcaagcgtcggctcagacgaggccaccctaagtatgacggtggaaaacatcccgtccatgcctaagagaactgccaaaatgatccccaccaccaccaaaaacaactattcacctaccgcggcaggaaccgagagaagaaaagaggacaccccgacatcgagccggacccttacctactacactagtacatcatccagacagattgtgaagaaatacacacccacgcccaggggcgaaatgaagagctattctcccacccaggtgagggaaaaggttaagtacactccctcccccagaggacggcgtgttggaacctacgtgccttcgacatttatgaccatggaaacctcacatgctattaccccccgaacaacagtcaaggatagcgacattactgcaacatataagatactggagacaaatagtcttaagcgtatcatggaggagacgacgcctaccacgttgaaaggtatgtttgactctactcctacctttctaacccacgaggtggaggcgaacgtgttaacctccccaagatctgttatggaaaagaataaccttttcccaccccgtagagtggagtctaatagctccgcccacccttggggcctggtggggaagtcaaatccaaaaacgccccagggaacagtgctgctgcacacaccggcaacatctgaaggacaagtcacaatttctactatgactgggagcagtcccgctgaaaccaaggcctttaccgcagcatggtcacttcggaatccaagtcctagaacaagcgtgtccgcgattaaaacagcgcctgctattgtgtggaggctggcgaaaaaaccttctactgcaccttcaacctctaccacccccaccgtgagggccaaactcaccatgcaggttcaccattgcgtcgtagtcaaacctactcccgctatgctgaccactccctctcctagccttactacagcattgctgcctgaagagctgagccctagcccttcagtgctgccacctagcctcccagatctgcatccaaagggcgaatatcctcccgacctcttctcagtggaagagagaagacagggctgggttgtgctccatgtatttgggatgatgtacgtgttcgtggccttggcaattgtgtgcgacgagtatttcgtgcccgcacttggagtgattaccgacaagttgcagatatctgaggatgtggcaggagccactttcatggcagccggaggttcagctcccgagttattcacatctctaataggggtgttcatctcccattcaaacgtcggcatcggaacaattgtaggaagcgccgtctttaatatcctgtttgttattggcacctgttccctcttcagcagagaaatcctgaatctgacatggtggccactctttagagacgtgtcgttctacattctggacctcatcatgctgatccttttcttcctcgactccctgatcgcctggtgggaaagcttattgctgttacttgcctatgccttctacgtttttactatgaagtggaataagcatatagaagtctgggtaaaggagcaactgagcaggagaccagttgctaaggtgatggcgctggaagacttgtctaagttaccatcattgctgacgagggggtcatcctctacttccttacacaactcaacaattagaagtactatttaccaattgatgctgcacagcttagacccgctgcgggaggtccggctggctaaggagaaagaggaggagtctttgaatcagggggctcgggctcaacctcaggcgaaagcggaatccaagcctgaagaggaagaacctgccaagctgccagcagttaccgtaaccccggcaccagtaccggacattaaaggcgaccagaaggaaaaccccggtggccaggaggatgtggcagaagccgagagcaccggagaaatgccaggagaggaaggcgaaaccgcaggggagggcgaaacggaggaaaagtcaggcggagaaacccaacccgagggcgaaggtgagaccgagacccagggtaaaggagaggagtgcgaagacgagaacgaggcagagggaaagggcgacaatgagggcgaagatgagggggaaattcatgccgaggatggggaaatgaagggaaatgagggcgagacagagagtcaggaactgtccgctgagaatcacggagaagctaaaaatgacgagaaaggtgttgaagacggaggcggtagtgacggtggagacagcgaagaggaggaggaagaggaggaagaacaggaggaggaagaggaagaagaggaacaggaagaggaggaagaggaagaggaagaggaggaggaaaaaggaaatgaagagcctctgagtcttgactggccagagactcgacagaagcaggcaatttacttatttcttttgccaatcgtgttcccattgtggctcacagttccggacgtgaggaggcaggaatctcggaaatttttcgtgttcactttcctcgggagtattatgtggattgcaatgttctcctaccttatggtctggtgggcacaccaggtgggtgaaacaattggaatctccgaagaaattatggggctcaccattctcgccgctggaacgtctattcccgatctgattactagtgtgatcgtggcgagaaaaggtctgggcgacatggctgtgtctagtagcgtcggctcgaatatcttcgatattactgtgggtcttccagtgccttggctgctgtttagtttgatcaatggcttacaaccagttcctgtgagcagtaatggactgttttgcgccattgtcctactatttctcatgctcctgtttgtgatatcaagcatcgcatcgtgtaagtggcgaatgaacaaaattctcggctttaccatgtttctgctctactttgtctttttgatcatttccgtgatgctggaagatcggattatctcttgccccgtgagcgtctag

SEQ ID NO: 315458 - DNA, 5714 bp, Artificial Sequence
  derived and/or modified sequence
cccttcacacccgaccctgccttgaattaggattccataggagagctgggggcaggagaatggggtgttccctgctgtccagcttcagacccactctttgagatattggattctgacaagtttccagagctgagaagacagccagatgtcaaggtctgaagggttgtggataccccctggctgggcttcatggagaaatcttctctgatcaccaacctgaatcccagagtagcctccatcttaggacagaatgagaggccttctgtaaccagatataactggccagcatggggaaattgatcaggatggggccgcaagagaggtggttactccggacaaagcggcttcattggagtcgcctcctcttcttactgggaatgttgatcatcggttctacttatcagcaccttaggagaccccggggcctttcctcattgtgggcagcagtctcttctcatcagcctataaaactggccagtcgggacctctccagtgaagagatgatgatgatgagcagcagcccttcaaaacctagctccgaaatggggggtaagatgctggtaccccaagcctcagtgggcagtgatgaagcaacactgagcatgacagtggagaatatccccagtatgcctaaaagaacagccaagatgatcccaacaacaaccaagaataattacagcccaacagcagcaggtacagaaagaaggaaggaagacaccccaacatccagtagaacactgacttactacacctcaacttcaagcagacaaatagtaaaaaagtataccccaacacccaggggagaaatgaagagctacagcccaactcaagtgagggaaaaggtgaagtatactccttccccacgtggtagaagagtaggcacttacgtgccgtccacattcatgacaatggaaacaagccatgcgatcacccccaggacaacagtgaaagacagtgacattacagcaacctataaaatactcgaaaccaactctcttaagagaataatggaggaaaccaccccaaccactctcaagggaatgtttgatagcaccccaacttttctgacacatgaggtagaagcaaacgtcttgacttctccaaggagcgtcatggaaaaaaacaacctgtttccccccagaagagtggaaagtaacagctcagcccatccctgggggttagtgggaaagagcaacccgaagactccccagggaacagtcctgttgcataccccagccacctctgaggggcaggtgacaataagcaccatgacaggcagcagcccagcagaaaccaaagccttcactgctgcctggagtcttaggaatccttcacccaggaccagtgtatcagccatcaaaacagccccagccatagtctggaggctggcaaagaaaccttccacagcacccagcacctcaacaacccctacggtcagggcaaagctgaccatgcaggtccatcactgtgtggttgtgaagccaaccccagccatgctcaccactccctccccaagcctcacaacagccctgctcccagaggagctcagtcctagtccctcagtgctgcctcccagcttgccagacctccaccccaagggagagtaccccccagatctgttcagtgtggaggagcggcggcagggctgggtggtcctgcacgtttttggcatgatgtatgtgtttgtggccttggccattgtttgcgacgagtacttcgttccagccctgggtgtcatcacagacaagctgcagatctccgaggatgtggcaggcgccacattcatggctgctggaggctctgctcctgagctcttcacctccctcatcggtgtcttcatttcccacagcaacgtgggcattggtaccattgtgggctctgctgtgttcaacattctctttgtcattggcacttgttccctcttctcccgagagatcctcaacctcacctggtggcccttattccgtgatgtctccttctacatccttgacctgataatgctcatcctcttcttcctggacagcctcattgcctggtgggagagcctgctgctgctgctggcctatgccttctatgtgttcaccatgaagtggaacaagcatatcgaggtctgggtgaaggagcagctcagcaggaggccagtggccaaggtcatggccttagaagacctcagcaagctcccgtccttgctgacccgagggagcagctcgacctctctgcacaacagcaccatccgcagcaccatctaccagctcatgctccacagcctggaccccctgagggaagttcgccttgccaaggagaaggaggaggagagcttgaatcaaggggccagagcccaaccccaggccaaagcagaaagcaaaccagaagaggaggagccagccaagctccctgcggtcacggtcacaccagcccctgttccagacatcaagggagatcagaaggagaatccaggcggtcaggaagatgtggctgaggccgagagcacaggtgaaatgccaggcgaagagggcgaaactgctggtgaaggtgaaactgaagagaaaagtggaggtgaaactcaaccagaaggtgaaggtgaaactgaaacacaaggaaaaggagaagaatgtgaagatgaaaatgaagcagaaggaaaaggagacaatgaaggtgaagatgagggtgaaatccacgcagaagatggtgaaatgaaaggtaatgaaggtgaaactgaaagccaggaactcagtgctgaaaatcacggtgaagccaaaaatgatgagaaaggtgtagaagatggagggggaagtgatggaggggatagcgaagaggaggaagaggaggaggaagagcaggaggaagaggaggaggaggaagagcaggaggaagaggaggaggaggaggaggaagaggaggagaagggaaatgaagagcctctgtccctggactggcctgaaaccaggcagaagcaggccatttacctcttccttctgcccatcgtgttcccactgtggctgacagtccccgacgtccgaaggcaggagtctaggaagttttttgttttcaccttcctgggatctatcatgtggatagccatgttctcatacctcatggtgtggtgggctcaccaggttggtgaaacaatagggatttctgaagagatcatgggcctgacaatccttgcagcaggcacatcaattcctgacctcatcaccagtgtgattgtcgctcgaaaaggcctgggagacatggctgtgtcaagctctgtgggcagtaacatatttgatatcactgtgggcttgcctgttccttggttgcttttctctcttatcaatggattacagccagttccagtcagcagcaatggcttgttttgtgcaattgttttgctttttctcatgcttctgtttgtgatctcttcaattgcgtcatgtaaatggagaatgaacaagatcctgggcttcacaatgttcctcctttactttgtattcctgataatcagtgtgatgttagaagatcgaatcatatcctgtcctgtatctgtctgaatcagtcactcttgctcacaatgggcatggatcagaagaccatgcagaagttactgtatctcttgtgaccctaatgaaagaatgtatatgatcctggaaagtgaactgggtgacctaggacctctgatatgaatgtgatctgagactaaagtttgtccttggaaacacctgcagctcattgtggattaagaacctcacccctggaggggtggagtttctacccctgactcatgcagacatctattacatggaggcagtagaaggacccctggagccagagggttttctaaatgagataactgggggcaaaggttgggataggcgcagcagctataagacaagctcctacgctcactgttccctgatcattccaaaggctgctggcccaaaagatgcagatgtggtctacatctcagccttcctgacctctgccccaaacacacgctgcaattttgtctcctccttttctgttcaaattgtgaggttctatcaggtttgtaatcactgtagcttcagttattggtgagtctaaggatccaaggctacagaaaaaaaagaaatataacaggaattaatgatcattccacgttttgtagcccactgcatctggatatataccagtattttctttttttttttttttgagacagagtttggctcttgttgcccaggctggtgtgcaatggcgtgatctcggcacaccacaaccttcacctccccggttcaagcaattctcctgcctcagcctgaagtcgtgatctgcccgcctcggcctcccaaagtgctgggattacaggcgtcagccaccgcgcctggcctataccagtattttctagtttaaaggaggactacattaactcttattgttgtgtttctgaaaagtgaaatttaaaaagcagcctgaaaaataaaaatttataatttgcccttgaattggaaggaatggagattagggaaggaaaactactctagaggccatttaaaagtatgtatttattagaacatgcaaattcatgttgtctccatcagtggtcaccttgagggattagacattctaatggaatgtcctggctccaccctccagcatgttctcacccaacaatgacagttgagtggagtgggaagggaagtcattctaaagagtccaaagtcagtagcgccacatctggtttataaagtaagagatccagtgggacaatgctatttttgtatgccaacctagataggattataaagcaagactgatttcttctgtggtttatgaatggatcttaaggtaattacaaaagggaaattccaagaatgcataacacaatgacaacatggtgagaaaagtgcagtactacttccaaggtagctagtgtaaaggacacttgagtttttaaaactgtggttaaatgttttatgtggaatttgatgagtttgtatattaaataccactgcttgctgcttttactagaatcaagttaagggacacgttagaaatagaacagcttaatatcactggcttcagagcaaaatgagctcgggtgactgcagattatgatggtaaatatggctttaattacaaacatgaggaatgattcactgaagatgaaaagataggacggatgtgatatgaaaaaaacccaaacattttggcattgaatgatggctaaggtgttccaagtattccatcttttaagatgaattgcttaattaattgcctcgctaccccaggattctcattctttggaaataatttttattaaatttcaataaactgtgaatcccaatggtattttactttacaacatggatgggctcatccttatctttaggtcatttggtcagaatcctcccgagaagactgatgaagagtatggaatcatgttccaattctatattcttaattatccttattcctgatgctactgcattgctgggtttccatagccaaggcctaagaacaggaggagaaggcaatgcttgtgggagggaggtcccaataccaaaattctgggcactaacctggtgtctgcagcccgttcccgttagcctcggggatgtcacctcacccacagcctgggatctgacgttcttcctcagactggagtaaggagtgatggaccgtaaaatgctgtgtaatgataaaaggctgaaatatccactgaatgattaaaaccaactctaataatctga

SEQ ID NO: 315459 - DNA, 3246 bp, Artificial Sequence
  derived and/or modified sequence
atggggaaattgatcaggatggggccgcaagagaggtggttactccggacaaagcggcttcattggagtcgcctcctcttcttactgggaatgttgatcatcggttctacttatcagcaccttaggagaccccggggcctttcctcattgtgggcagcagtctcttctcatcagcctataaaactggccagtcgggacctctccagtgaagagatgatgatgatgagcagcagcccttcaaaacctagctccgaaatggggggtaagatgctggtaccccaagcctcagtgggcagtgatgaagcaacactgagcatgacagtggagaatatccccagtatgcctaaaagaacagccaagatgatcccaacaacaaccaagaataattacagcccaacagcagcaggtacagaaagaaggaaggaagacaccccaacatccagtagaacactgacttactacacctcaacttcaagcagacaaatagtaaaaaagtataccccaacacccaggggagaaatgaagagctacagcccaactcaagtgagggaaaaggtgaagtatactccttccccacgtggtagaagagtaggcacttacgtgccgtccacattcatgacaatggaaacaagccatgcgatcacccccaggacaacagtgaaagacagtgacattacagcaacctataaaatactcgaaaccaactctcttaagagaataatggaggaaaccaccccaaccactctcaagggaatgtttgatagcaccccaacttttctgacacatgaggtagaagcaaacgtcttgacttctccaaggagcgtcatggaaaaaaacaacctgtttccccccagaagagtggaaagtaacagctcagcccatccctgggggttagtgggaaagagcaacccgaagactccccagggaacagtcctgttgcataccccagccacctctgaggggcaggtgacaataagcaccatgacaggcagcagcccagcagaaaccaaagccttcactgctgcctggagtcttaggaatccttcacccaggaccagtgtatcagccatcaaaacagccccagccatagtctggaggctggcaaagaaaccttccacagcacccagcacctcaacaacccctacggtcagggcaaagctgaccatgcaggtccatcactgtgtggttgtgaagccaaccccagccatgctcaccactccctccccaagcctcacaacagccctgctcccagaggagctcagtcctagtccctcagtgctgcctcccagcttgccagacctccaccccaagggagagtaccccccagatctgttcagtgtggaggagcggcggcagggctgggtggtcctgcacgtttttggcatgatgtatgtgtttgtggccttggccattgtttgcgacgagtacttcgttccagccctgggtgtcatcacagacaagctgcagatctccgaggatgtggcaggcgccacattcatggctgctggaggctctgctcctgagctcttcacctccctcatcggtgtcttcatttcccacagcaacgtgggcattggtaccattgtgggctctgctgtgttcaacattctctttgtcattggcacttgttccctcttctcccgagagatcctcaacctcacctggtggcccttattccgtgatgtctccttctacatccttgacctgataatgctcatcctcttcttcctggacagcctcattgcctggtgggagagcctgctgctgctgctggcctatgccttctatgtgttcaccatgaagtggaacaagcatatcgaggtctgggtgaaggagcagctcagcaggaggccagtggccaaggtcatggccttagaagacctcagcaagctcccgtccttgctgacccgagggagcagctcgacctctctgcacaacagcaccatccgcagcaccatctaccagctcatgctccacagcctggaccccctgagggaagttcgccttgccaaggagaaggaggaggagagcttgaatcaaggggccagagcccaaccccaggccaaagcagaaagcaaaccagaagaggaggagccagccaagctccctgcggtcacggtcacaccagcccctgttccagacatcaagggagatcagaaggagaatccaggcggtcaggaagatgtggctgaggccgagagcacaggtgaaatgccaggcgaagagggcgaaactgctggtgaaggtgaaactgaagagaaaagtggaggtgaaactcaaccagaaggtgaaggtgaaactgaaacacaaggaaaaggagaagaatgtgaagatgaaaatgaagcagaaggaaaaggagacaatgaaggtgaagatgagggtgaaatccacgcagaagatggtgaaatgaaaggtaatgaaggtgaaactgaaagccaggaactcagtgctgaaaatcacggtgaagccaaaaatgatgagaaaggtgtagaagatggagggggaagtgatggaggggatagcgaagaggaggaagaggaggaggaagagcaggaggaagaggaggaggaggaagagcaggaggaagaggaggaggaggaggaggaagaggaggagaagggaaatgaagagcctctgtccctggactggcctgaaaccaggcagaagcaggccatttacctcttccttctgcccatcgtgttcccactgtggctgacagtccccgacgtccgaaggcaggagtctaggaagttttttgttttcaccttcctgggatctatcatgtggatagccatgttctcatacctcatggtgtggtgggctcaccaggttggtgaaacaatagggatttctgaagagatcatgggcctgacaatccttgcagcaggcacatcaattcctgacctcatcaccagtgtgattgtcgctcgaaaaggcctgggagacatggctgtgtcaagctctgtgggcagtaacatatttgatatcactgtgggcttgcctgttccttggttgcttttctctcttatcaatggattacagccagttccagtcagcagcaatggcttgttttgtgcaattgttttgctttttctcatgcttctgtttgtgatctcttcaattgcgtcatgtaaatggagaatgaacaagatcctgggcttcacaatgttcctcctttactttgtattcctgataatcagtgtgatgttagaagatcgaatcatatcctgtcctgtatctgtctga

SEQ ID NO: 315460 - DNA, 3246 bp, Artificial Sequence
  derived and/or modified sequence
atgggcaagctgatcagaatgggcccccaggagagatggctgctgagaaccaagagactgcactggagcagactgctgttcctgctgggcatgctgatcatcggcagcacctaccagcacctgagaagacccagaggcctgagcagcctgtgggccgccgtgagcagccaccagcccatcaagctggccagcagagacctgagcagcgaggagatgatgatgatgagcagcagccccagcaagcccagcagcgagatgggcggcaagatgctggtgccccaggccagcgtgggcagcgacgaggccaccctgagcatgaccgtggagaacatccccagcatgcccaagagaaccgccaagatgatccccaccaccaccaagaacaactacagccccaccgccgccggcaccgagagaagaaaggaggacacccccaccagcagcagaaccctgacctactacaccagcaccagcagcagacagatcgtgaagaagtacacccccacccccagaggcgagatgaagagctacagccccacccaggtgagagagaaggtgaagtacacccccagccccagaggcagaagagtgggcacctacgtgcccagcaccttcatgaccatggagaccagccacgccatcacccccagaaccaccgtgaaggacagcgacatcaccgccacctacaagatcctggagaccaacagcctgaagagaatcatggaggagaccacccccaccaccctgaagggcatgttcgacagcacccccaccttcctgacccacgaggtggaggccaacgtgctgaccagccccagaagcgtgatggagaagaacaacctgttcccccccagaagagtggagagcaacagcagcgcccacccctggggcctggtgggcaagagcaaccccaagaccccccagggcaccgtgctgctgcacacccccgccaccagcgagggccaggtgaccatcagcaccatgaccggcagcagccccgccgagaccaaggccttcaccgccgcctggagcctgagaaaccccagccccagaaccagcgtgagcgccatcaagaccgcccccgccatcgtgtggagactggccaagaagcccagcaccgcccccagcaccagcaccacccccaccgtgagagccaagctgaccatgcaggtgcaccactgcgtggtggtgaagcccacccccgccatgctgaccacccccagccccagcctgaccaccgccctgctgcccgaggagctgagccccagccccagcgtgctgccccccagcctgcccgacctgcaccccaagggcgagtacccccccgacctgttcagcgtggaggagagaagacagggctgggtggtgctgcacgtgttcggcatgatgtacgtgttcgtggccctggccatcgtgtgcgacgagtacttcgtgcccgccctgggcgtgatcaccgacaagctgcagatcagcgaggacgtggccggcgccaccttcatggccgccggcggcagcgcccccgagctgttcaccagcctgatcggcgtgttcatcagccacagcaacgtgggcatcggcaccatcgtgggcagcgccgtgttcaacatcctgttcgtgatcggcacctgcagcctgttcagcagagagatcctgaacctgacctggtggcccctgttcagagacgtgagcttctacatcctggacctgatcatgctgatcctgttcttcctggacagcctgatcgcctggtgggagagcctgctgctgctgctggcctacgccttctacgtgttcaccatgaagtggaacaagcacatcgaggtgtgggtgaaggagcagctgagcagaagacccgtggccaaggtgatggccctggaggacctgagcaagctgcccagcctgctgaccagaggcagcagcagcaccagcctgcacaacagcaccatcagaagcaccatctaccagctgatgctgcacagcctggaccccctgagagaggtgagactggccaaggagaaggaggaggagagcctgaaccagggcgccagagcccagccccaggccaaggccgagagcaagcccgaggaggaggagcccgccaagctgcccgccgtgaccgtgacccccgcccccgtgcccgacatcaagggcgaccagaaggagaaccccggcggccaggaggacgtggccgaggccgagagcaccggcgagatgcccggcgaggagggcgagaccgccggcgagggcgagaccgaggagaagagcggcggcgagacccagcccgagggcgagggcgagaccgagacccagggcaagggcgaggagtgcgaggacgagaacgaggccgagggcaagggcgacaacgagggcgaggacgagggcgagatccacgccgaggacggcgagatgaagggcaacgagggcgagaccgagagccaggagctgagcgccgagaaccacggcgaggccaagaacgacgagaagggcgtggaggacggcggcggcagcgacggcggcgacagcgaggaggaggaggaggaggaggaggagcaggaggaggaggaggaggaggaggagcaggaggaggaggaggaggaggaggaggaggaggaggagaagggcaacgaggagcccctgagcctggactggcccgagaccagacagaagcaggccatctacctgttcctgctgcccatcgtgttccccctgtggctgaccgtgcccgacgtgagaagacaggagagcagaaagttcttcgtgttcaccttcctgggcagcatcatgtggatcgccatgttcagctacctgatggtgtggtgggcccaccaggtgggcgagaccatcggcatcagcgaggagatcatgggcctgaccatcctggccgccggcaccagcatccccgacctgatcaccagcgtgatcgtggccagaaagggcctgggcgacatggccgtgagcagcagcgtgggcagcaacatcttcgacatcaccgtgggcctgcccgtgccctggctgctgttcagcctgatcaacggcctgcagcccgtgcccgtgagcagcaacggcctgttctgcgccatcgtgctgctgttcctgatgctgctgttcgtgatcagcagcatcgccagctgcaagtggagaatgaacaagatcctgggcttcaccatgttcctgctgtacttcgtgttcctgatcatcagcgtgatgctggaggacagaatcatcagctgccccgtgagcgtgtag

SEQ ID NO: 315461 - protein, 1069 aa, Artificial Sequence
  derived and/or modified sequence
MGKLIRMGPQERWLLRTKRLHWSRLLFLLGMLIIGSTYQHLRRPRGLSSLWAAVSSHQPIKLASRDLSSEEMMMMSSSPSKPSSEMGGKMLVPQASVGSDEATLSMTVENIPSMPKRTAKMIPTTTKNNYSPTAAGTERRKEDTPTSSRTLTYYTSTSSRQIVKKYTPTPRGEMKSYSPTQVREKVKYTPSPRGRRVGTYVPSTFMTMETSHAITPRTTVKDSDITATYKILETNSLKRIMEETTPTTLKGMFDSTPTFLTHEVEANVLTSPRSVMEKNNLFPPRRVESNSSAHPWGLVGKSNPKTPQGTVLLHTPATSEGQVTISTMTGSSPAETKAFTAAWSLRNPSPRTSVSAIKTAPAIVWRLAKKPSTAPSTSTTPTVRAKLTMQVHHCVVVKPTPAMLTTPSPSLTTALLPEELSPSPSVLPPSLPDLHPKGEYPPDLFSVEERRQGWVVLHVFGMMYVFVALAIVCDEYFVPALGVITDKLQISEDVAGATFMAAGGSAPELFTSLIGVFISHSNVGIGTIVGSAVFNILFVIGTCSLFSREILNLTWWPLFRDVSFYILDLIMLILFFLDSLIAWWESLLLLLAYAFYVFTMKWNKHIEVWVKEQLSRRPVAKVMALEDLSKPGDGAIAVDELQDNKKLKLPSLLTRGSSSTSLHNSTIRSTIYQLMLHSLDPLREVRLAKEKEEESLNQGARAQPQAKAESKPEEEEPAKLPAVTVTPAPVPDIKGDQKENPGGQEDVAEAESTGEMPGEEGETAGEGETEEKSGGETQPEGEGETETQGKGEECEDENEAEGKGDNEGEDEGEIHAEDGEMKGNEGETESQELSAENHGEAKNDEKGVEDGGGSDGGDSEEEEEEEEEQEEEEEEEEQEEEEEEEEEEEEKGNEEPLSLDWPETRQKQAIYLFLLPIVFPLWLTVPDVRRQVGETIGISEEIMGLTILAAGTSIPDLITSVIVARKGLGDMAVSSSVGSNIFDITVGLPVPWLLFSLINGLQPVPVSSNGLFCAIVLLFLMLLFVISSIASCKWRMNKILGFTMFLLYFVFLIISVMLEDRIISCPVSV

SEQ ID NO: 315462 - DNA, 3210 bp, Artificial Sequence
  derived and/or modified sequence
atgggtaaattgattcgtatgggaccccaggaacgctggctcctgaggacaaaacgcctacattggagtcgccttttgtttttattgggaatgctgattattggtagtacttaccagcatcttagacggccacggggcctatcttctctctgggcagcagtctcatcccaccaaccgatcaagcttgcttcaagggacttgtcatccgaggagatgatgatgatgagctcatctcctagcaagccatccagcgagatgggaggtaaaatgctcgtgccccaagcttcagtagggtcagacgaagcaacgctcagcatgaccgttgagaatattccttccatgcctaagcgcacagcaaagatgatacctaccacgacgaaaaataactatagtcctacagctgcaggtactgaaagacggaaggaagatacgcctacgtcatctcggacactgacttattacacctccacttcgtcacggcagatcgtcaaaaagtacacacccacaccacgcggggaaatgaaatcatactctccaactcaggtcagagagaaggtcaaatacactccttcgcctcgtgggcgccgagtgggtacttacgtcccatccacttttatgactatggagacatcgcacgccattactccaagaaccacggtgaaggactcggacattaccgcaacatacaagatcctggagacaaatagtctcaagaggatcatggaggagacgacacctactacactcaagggcatgtttgactctacccctactttcctaactcatgaagtggaggccaacgtcctgacctcaccgcggtcagtgatggagaaaaataatctgttccccccgagacgggtagagtcgaactcgtcagcccacccttgggggttggtcggcaagtcgaatcccaaaactccacaaggcacagtgctgctgcacacccctgccacctcagaaggacaagtgactatcagcaccatgacaggaagctcaccagctgaaactaaagccttcaccgcggcgtggagtctcagaaatccatccccacgcacctctgtcagcgccataaagacagcccctgctatcgtgtggcggctcgccaagaaacctagtaccgcccccagcacatctactacaccaaccgtgcgagctaaactgaccatgcaggtacaccactgcgtggtggtgaagcctacgcctgctatgctgacaacaccctcgccatcactgactactgctcttctccccgaggagttatccccgtcaccaagcgttctgccacccagtctgcctgacctgcaccctaagggcgagtatccacctgatctcttctccgttgaagaaaggaggcaggggtgggtcgtgctgcacgtcttcggtatgatgtacgtctttgtggccctggccattgtttgcgatgaatactttgtgcccgcactgggtgtgattactgataaactgcagatcagcgaagatgtagccggggctacttttatggcagccggtgggagtgcgcctgagctgttcacgtctctcataggagtctttattagccactccaatgtgggcataggcaccattgtcgggtcagccgtgtttaacatactttttgtcatcggcacctgctctctctttagcagagagattctgaacctgacttggtggcctctgttcagggatgtaagcttctatattctggaccttataatgcttattctgtttttcctggatagtttgattgcttggtgggaaagcctactccttttgctggcctatgcgttctatgtatttacaatgaagtggaacaagcatatcgaggtgtgggtaaaagaacagctctcaagaagaccagttgccaaggtgatggccctagaggacctctctaaaccgggggacggcgccatcgccgtggacgaactgcaggataacaagaaactgaaattaccttccctcctaacaaggggcagcagctcaacatcattacacaattcaacaattaggtctacaatttatcagctgatgctgcactcactggatcccctcagagaagtccgattagccaaggagaaagaggaggaatctctgaaccagggcgcgcgtgcgcagccccaggcgaaggctgagagcaagcccgaggaagaagagcctgccaaactgcctgcagtgacggttaccccagcgccagttcctgacatcaaaggagatcagaaagaaaatccaggggggcaggaggacgtcgctgaagctgagtctactggggagatgccgggtgaagagggcgagacagccggggagggggaaacggaggagaaaagtggaggcgagactcagcctgagggtgaaggcgagacagaaacgcagggcaagggcgaggaatgtgaggatgaaaacgaagcggaggggaagggtgataatgaaggagaagatgaaggcgaaatacatgcagaggatggtgagatgaagggcaatgagggggaaaccgagtcacaggagctgagcgcagagaaccacggcgaagccaaaaatgacgagaagggggtggaggatggcggaggatccgatggcggagatagcgaggaggaagaagaagaggaagaggagcaagaggaagaggaagaggaagaggagcaggaggaggaggaagaggaagaggaagaggaggaggaaaaaggaaatgaggagcccctttcactcgactggccggagacccgccagaagcaggcaatctatctatttctcctgccaattgtttttccactctggctgactgtcccggatgtgaggcgccaggtcggagagaccatcggaatctccgaagaaattatgggcctaactattctcgccgcaggaacgtctattcctgatcttatcacaagcgtgatagtggccagaaaggggctcggcgacatggctgtgagttccagtgtgggatctaatatattcgatattactgttgggttgcctgttccgtggctcctgttcagtctgattaacggcctgcaacccgtaccagtcagttcaaacggcctgttctgcgccatcgttctgcttttcttgatgttactgtttgttatatccagtattgcgagctgcaaatggaggatgaacaagatcttgggcttcactatgtttcttctgtattttgtgtttcttatcatttccgtgatgttggaggatcgaattatttcatgccccgtgtctgtgtag

SEQ ID NO: 315463 - DNA, 3210 bp, Artificial Sequence
  derived and/or modified sequence
atgggcaagctgatccgcatgggcccccaggagcgctggctgctgcggaccaagaggctgcactggagccggctgctcttcctgctgggcatgctgatcatcggcagcacctaccagcacctgcggcggccccggggcctgagcagcctgtgggccgctgtgagcagccaccagcccatcaagctggccagccgggacctgagcagcgaggagatgatgatgatgagcagcagccccagcaagcccagcagcgagatgggcggcaagatgctggtgccccaggcctctgtgggcagtgatgaggccaccctgtccatgacagtggagaacatccccagcatgcccaagaggacagccaagatgatccccaccaccaccaagaacaactacagccccacagctgctggaacagaaagaaggaaggaggacacccccaccagcagcaggaccctgacctactacaccagcaccagcagccggcagatcgtgaagaagtacacccccaccccaagaggagagatgaagagctacagccccacccaggtgcgggagaaggtgaagtacacccccagcccccggggcagaagagtgggcacctacgtgcccagcaccttcatgaccatggagaccagccacgccatcacccccaggaccaccgtgaaggacagcgacatcacagccacctacaagatcctggagaccaacagcctgaagaggatcatggaggagaccacccccaccaccctgaagggcatgtttgacagcacccccaccttcctgacccatgaggtggaggccaacgtgctgaccagccccaggtctgtgatggagaagaacaacctcttccccccaagaagagtggagagcaacagcagcgcccacccctggggcctggtgggcaagagcaaccccaagaccccccagggcaccgtgctgctgcacaccccagccaccagcgagggccaggtgaccatcagcaccatgacaggcagcagccctgctgagaccaaggccttcaccgctgcctggagcctgaggaaccccagccccaggacctctgtgtctgccatcaagacagccccagccatcgtgtggaggctggccaagaagcccagcacagcccccagcaccagcaccacccccaccgtgcgggccaagctgaccatgcaggtgcaccactgtgtggtggtgaagcccaccccagccatgctgaccacccccagccccagcctgaccacagccctgctgcctgaggagctgagccccagccccagcgtgctgccccccagcctgcctgacctgcaccccaagggggagtaccccccagacctcttctctgtggaggagcggcggcagggctgggtggtgctgcacgtgtttggcatgatgtatgtgtttgtggccctggccatcgtgtgtgatgagtactttgtgcctgccctgggcgtcatcacagacaagctgcagatcagtgaagatgtggccggggccaccttcatggccgccggcggcagcgcccctgagctgttcaccagcctcatcggggtcttcatcagccacagcaatgtgggcatcggcaccatcgtgggcagcgctgtgttcaacatcctcttcgtcatcggcacctgcagcctcttcagccgggagatcctgaacctgacctggtggcccctcttcagagatgtgtccttctacatcctggacctgatcatgctgatcctcttcttcctggacagcctgattgcctggtgggagagcctgctgctgctgctggcctatgccttctacgtgttcaccatgaagtggaacaagcacatcgaggtgtgggtgaaggagcagctgagccggcggcctgtggccaaggtgatggccctggaggacctgagcaagccaggagatggagccatcgctgtggatgagctgcaggacaacaagaagctgaagctgcccagcctgctgacccggggcagcagcagcaccagcctgcacaacagcaccatccgcagcaccatctaccagctgatgctgcacagcctggaccccctgcgggaggtgcggctggccaaggagaaggaggaggagagcctgaaccagggcgcccgggcccagccccaggccaaggccgagagcaagccagaggaggaggagcccgccaagctgcctgctgtgacagtgaccccagcccctgtgcctgacatcaagggggaccagaaggaaaatcctgggggccaggaggatgtggccgaggccgagagcactggagagatgcctggagaggagggggagacagctggggagggggagacagaggagaagtctggaggagagacccagcctgagggggagggggagacagagacccagggcaagggggaggagtgtgaagatgaaaatgaggccgagggcaaaggagacaatgaaggagaagatgaaggagagatccacgcagaagatggagagatgaagggaaatgaaggagaaacagagagccaggagctgtctgctgagaaccacggggaggccaagaatgatgagaagggcgtggaggatggcggcggcagtgatggaggagacagcgaggaggaggaggaggaggaggaggagcaggaggaggaggaggaggaggaggagcaggaggaggaggaggaggaggaggaggaggaggaggagaagggaaatgaggagcccctgagcctggactggccagagacccggcagaagcaggccatctacctgttcctgctgcccatcgtgttccccctgtggctgactgtgcctgatgtgcggcggcaggtgggggagaccatcggcatcagcgaggagatcatgggcctgaccatcctggccgccggcaccagcatcccagacctgatcaccagcgtcatcgtggccaggaagggcctgggggacatggctgtgagcagctctgtgggcagcaacatctttgacatcaccgtgggcctgcctgtgccctggctgctcttcagcctcatcaatggcctgcagcctgtgcctgtgagcagcaatggcctcttctgtgccatcgtgctgctcttcctgatgctgctcttcgtcatcagcagcatcgccagctgcaagtggaggatgaacaagatcctgggcttcaccatgttcctgctgtactttgtgttcctgatcatctctgtgatgctggaggaccgcatcatcagctgccctgtgtctgtgtag

SEQ ID NO: 315464 - DNA, 3210 bp, Artificial Sequence
  derived and/or modified sequence
atgggcaagctgatccggatgggcccccaggagcggtggctgctgagaacaaagcggcttcactggagcaggctgctgtttctgcttggcatgttgataattggctcaacctatcagcatctgagacgaccgagagggttgagtagcctttgggcagctgtctccagtcatcagccgatcaagctggcttcccgcgatctgagtagcgaggagatgatgatgatgtccagctcacctagcaaaccctccagtgagatgggaggaaaaatgctcgtgccacaagcaagcgtgggctccgacgaagcaaccctgtctatgactgtcgagaacatcccgagcatgcctaagcgaaccgccaagatgatccctaccaccactaaaaataattattctcccaccgccgcaggcacggaacgtcgcaaggaagatacacctacctcctcacgcaccctgacttactacacgtccacctcctcacggcaaattgtcaagaagtacaccccaactccccggggggagatgaagtcatactcccctactcaagttagagagaaggtaaaatacaccccaagccctcgcggacgcagagtggggacgtacgttccatccaccttcatgactatggaaaccagccatgcaatcactcccagaaccaccgtgaaggactctgatattactgcgacctacaagatcctggagaccaatagtctgaaaaggatcatggaggaaacgacacccacgacactaaagggtatgttcgacagtaccccaactttcctgacgcacgaggttgaggctaatgtgctgacttccccacgttcggtgatggagaaaaataacctgttccctccaagaagggtagaaagtaactcctccgcacacccgtggggactggtcgggaagagcaatccgaagactccccagggaaccgtgctgctgcatactcccgccacctccgaggggcaggttacgataagcactatgactgggtcatctcctgccgaaacaaaagccttcactgccgcttggagtctgaggaatccctctcctagaacttcagtgagcgccatcaaaacggcaccggccatcgtgtggagattagcaaagaagcccagcactgcaccttcaaccagcaccacgccaacagtaagggccaaactgactatgcaggttcaccactgcgtcgtcgtgaaacccacccctgccatgctgactaccccaagcccctccctaactacggctttgcttccagaggagctctcccctagtccctctgtcctgccccctagcttgcctgacctccatccaaaaggcgagtacccacccgatctgttttcggtggaggaacgcagacaggggtgggttgttcttcacgtattcggcatgatgtatgtgtttgtagccctagcgattgtctgtgacgaatattttgtgcccgctctgggcgttataacagacaaactgcagatctccgaggatgtggctggcgcaactttcatggccgctggcggaagcgcccctgaactcttcaccagcctgataggggtgttcatctctcatagcaacgttggaattgggacaatcgtcggttccgccgtctttaacattctatttgtcatcggaacctgttccctgttttcaagggagattttgaatcttacctggtggcctctgtttcgcgacgtaagcttttatattctcgatcttatcatgcttattctgttcttcctggacagtctgatagcctggtgggaatccttgctgcttctgctggcttacgccttctacgtttttaccatgaaatggaataaacacatcgaagtgtgggttaaggaacagctcagtcgcagacccgtggccaaagttatggcactcgaagatttaagcaaacccggcgacggcgccatcgcggtggatgaactgcaggacaataaaaagctcaaattgccaagcttgcttacacggggaagctctagcacctcccttcacaatagcaccattagatccacaatataccagctcatgctacattcactggacccattgagagaagtcagactggccaaagagaaggaggaggaaagtctgaatcagggggcaagggcccagcctcaggcgaaagctgaaagtaagccagaggaggaggagcctgctaaactcccagccgtgaccgtgacaccggcccctgtcccagatattaagggcgatcagaaggaaaatcccgggggccaagaagacgtcgcagaagcagaatctacaggggaaatgcctggggaagaaggggagacagcaggggaaggagagacggaggagaagtccgggggcgaaactcaaccagagggagaaggagagacagagacgcagggcaagggcgaggagtgtgaagacgagaacgaggccgaaggcaagggagataatgagggcgaggatgagggggagattcacgccgaagacggcgagatgaaaggtaacgagggtgaaacagaatcgcaggagttgagcgcagagaaccacggtgaggccaagaacgatgagaagggagtcgaggacggcggagggtcagatgggggcgacagcgaagaggaggaggaagaggaagaagaacaggaggaggaggaagaagaggaagaacaggaggaagaagaagaagaagaggaggaggaggaggagaagggtaacgaagagccactctcattggattggcccgagacccggcagaaacaagcaatctacttattcctgctccccattgtgttccccctctggttaactgtgcccgacgtgcggcgccaggtgggcgaaaccatcggtatctctgaggaaataatggggctgactatactagccgcggggaccagcataccggacttgatcacgtccgtaatcgtcgctcggaaaggcctgggagatatggcagtgtcctcaagcgtagggtcaaacatatttgatataactgtgggccttccagttccctggctgctcttcagtttgataaatgggcttcagcctgtgcccgtctcgagtaatggtctattctgcgcgattgtgcttctcttcctaatgttgctgtttgtaataagttctattgcctcctgcaagtggcggatgaataagattctagggttcacaatgttccttctctattttgtctttctcattatatcagtgatgctcgaagatcggatcatctcttgcccagtttccgtgtag

SEQ ID NO: 315465 - DNA, 3210 bp, Artificial Sequence
  derived and/or modified sequence
atgggaaagttgatccgaatgggcccacaggagagatggctcttgcgtactaaaagactgcattggtcaagactgctgttcctcttggggatgctgattataggttccacttatcagcatttaaggcggccaaggggattatcatctctgtgggccgctgtgtcctctcaccagcccataaagctggcctccagggacctgagctccgaggagatgatgatgatgtcttcctcccccagcaaaccatcaagtgaaatgggagggaaaatgctggtgcctcaggcaagtgtcggatccgacgaagccacactgagtatgaccgtggaaaacatccctagcatgcctaaacggaccgctaagatgatccccactactactaaaaacaactatagtccgacagctgccggaacggagcgaagaaaagaggatacaccaacaagttctcgcaccctgacctactacaccagtacatccagcagacaaatcgtgaaaaagtacaccccaacacctagaggggagatgaagtcttattcccctacgcaggtccgcgaaaaggtgaaatataccccttctccgcgtgggagacgagttggcacctacgtcccttctacctttatgaccatggagacatcccacgcgataacccctaggaccacggtaaaagatagtgatatcacagctacatacaaaattctggagacaaactcactcaagaggattatggaagaaaccacgcccaccacactgaagggcatgttcgacagtacgccaacttttctgacccacgaggtggaagccaatgtgttgacatccccacgctcagttatggaaaagaataacctgttcccaccacggagagtagaaagtaactctagcgctcacccctggggtctggtggggaagtccaaccctaagactccacaaggcaccgtcttgctccacaccccagccaccagcgagggccaggtgactatcagcacaatgacaggctccagccccgctgagaccaaggctttcactgcggcatggagtttgaggaatccctcccctagaacgtccgtgtccgcaatcaagacggcgcctgctatcgtgtggagactcgctaagaagccctcgactgctccatcaacaagcacaactccaaccgttagagctaagctaacaatgcaggttcatcattgtgtggtggtgaagcctacgcctgccatgctgactacccctagccctagcttaacaactgccctgctccccgaagagttatcccctagtccatcagtgttgcccccatctttaccagatctacatcctaagggagagtatccccctgacctatttagcgtcgaggaacgacggcagggttgggtcgtattgcacgttttcggtatgatgtacgtcttcgtggcattggccatcgtgtgcgatgagtatttcgtacccgcactgggcgtaatcactgacaaactgcagatcagtgaagacgtggctggtgccacctttatggccgctggcggttccgcgccagaactgttcacatcactgattggcgttttcataagccactctaatgtggggatcggaactatagttggctccgccgttttcaatatcctgtttgttatcggtacatgcagcctcttttctcgggagattttaaatcttacatggtggcccctgtttcgggacgtatctttttatatcctagatctcatcatgctcattctgttcttcttagatagcctcatcgcatggtgggagagcttactactactgctggcttacgccttctatgtgttcactatgaaatggaacaagcacatcgaggtttgggttaaagaacagctgtcccgcaggccagtcgctaaggtgatggcgttagaggaccttagtaagcccggagatggcgctatcgcggtcgacgaactgcaggacaataaaaaactgaaactaccctcactattaaccaggggttcaagctcgacgtctttacacaacagcacaatccgctccacaatataccagctgatgttgcactcccttgatccacttagggaagtccgcttagccaaggagaaggaggaggagtctctgaaccagggagcccgagcccagcctcaggcaaaggcagaaagtaagccagaagaggaagagcctgccaagctcccagcagtcactgtgacccctgcacctgtcccggacatcaaaggagaccagaaggagaatccaggaggccaggaagatgttgctgaggcagagtcaacaggagaaatgccaggggaggagggcgagaccgcgggtgagggcgagaccgaggagaagtctggcggtgagacccaaccagaaggcgagggagagaccgagacacagggaaaaggagaggaatgtgaagacgagaatgaggctgagggaaaaggggacaacgagggcgaggacgaaggtgaaatccacgccgaagacggcgagatgaagggtaatgagggcgaaacagagagccaggagttaagcgccgagaaccacggcgaagcgaaaaacgatgagaagggcgtggaggatgggggaggttctgacgggggagactcggaagaggaagaagaagaggaggaagaacaagaggaagaagaagaggaggaggagcaagaggaggaggaggaggaagaagaggaagaggaagagaaaggaaacgaagaaccactttccctggactggccagagacaagacagaagcaagctatatacctgttcctgctgcccatagtgttccctctgtggctaaccgtccctgacgttcgaagacaggtcggcgagactataggtatctcagaggagatcatgggtctgactattctggccgctggcaccagcattcccgatctgattaccagcgtgatcgtggcaagaaaaggtctcggggacatggcggtaagcagttcggtggggtctaacattttcgatataactgtgggcttgccagtgccctggctcctcttctcactcatcaacgggcttcagcccgtgcccgtgtcctcaaacggtttattttgtgctatagtgctgctcttcctcatgctgctttttgtgatctcctcgatcgcttcctgcaaatggcgcatgaacaaaatcctgggtttcaccatgttcttactatattttgttttcctgatcatcagcgtgatgctcgaagatcgtatcatctcatgcccagtctcagtgtag

SEQ ID NO: 315466 - DNA, 3323 bp, Artificial Sequence
  derived and/or modified sequence
tgatcaccaacctgaatcccagagtagcctccatcttaggacagaatgagaggccttctgtaaccagatataactggccagcatggggaaattgatcaggatggggccgcaagagaggtggttactccggacaaagcggcttcattggagtcgcctcctcttcttactgggaatgttgatcatcggttctacttatcagcaccttaggagaccccggggcctttcctcattgtgggcagcagtctcttctcatcagcctataaaactggccagtcgggacctctccagtgaagagatgatgatgatgagcagcagcccttcaaaacctagctccgaaatggggggtaagatgctggtaccccaagcctcagtgggcagtgatgaagcaacactgagcatgacagtggagaatatccccagtatgcctaaaagaacagccaagatgatcccaacaacaaccaagaataattacagcccaacagcagcaggtacagaaagaaggaaggaagacaccccaacatccagtagaacactgacttactacacctcaacttcaagcagacaaatagtaaaaaagtataccccaacacccaggggagaaatgaagagctacagcccaactcaagtgagggaaaaggtgaagtatactccttccccacgtggtagaagagtaggcacttacgtgccgtccacattcatgacaatggaaacaagccatgcgatcacccccaggacaacagtgaaagacagtgacattacagcaacctataaaatactcgaaaccaactctcttaagagaataatggaggaaaccaccccaaccactctcaagggaatgtttgatagcaccccaacttttctgacacatgaggtagaagcaaacgtcttgacttctccaaggagcgtcatggaaaaaaacaacctgtttccccccagaagagtggaaagtaacagctcagcccatccctgggggttagtgggaaagagcaacccgaagactccccagggaacagtcctgttgcataccccagccacctctgaggggcaggtgacaataagcaccatgacaggcagcagcccagcagaaaccaaagccttcactgctgcctggagtcttaggaatccttcacccaggaccagtgtatcagccatcaaaacagccccagccatagtctggaggctggcaaagaaaccttccacagcacccagcacctcaacaacccctacggtcagggcaaagctgaccatgcaggtccatcactgtgtggttgtgaagccaaccccagccatgctcaccactccctccccaagcctcacaacagccctgctcccagaggagctcagtcctagtccctcagtgctgcctcccagcttgccagacctccaccccaagggagagtaccccccagatctgttcagtgtggaggagcggcggcagggctgggtggtcctgcacgtttttggcatgatgtatgtgtttgtggccttggccattgtttgcgacgagtacttcgttccagccctgggtgtcatcacagacaagctgcagatctccgaggatgtggcaggcgccacattcatggctgctggaggctctgctcctgagctcttcacctccctcatcggtgtcttcatttcccacagcaacgtgggcattggtaccattgtgggctctgctgtgttcaacattctctttgtcattggcacttgttccctcttctcccgagagatcctcaacctcacctggtggcccttattccgtgatgtctccttctacatccttgacctgataatgctcatcctcttcttcctggacagcctcattgcctggtgggagagcctgctgctgctgctggcctatgccttctatgtgttcaccatgaagtggaacaagcatatcgaggtctgggtgaaggagcagctcagcaggaggccagtggccaaggtcatggccttagaagacctcagcaagccgggcgatggggccattgcggtggatgagctacaggataacaagaagctgaagctcccgtccttgctgacccgagggagcagctcgacctctctgcacaacagcaccatccgcagcaccatctaccagctcatgctccacagcctggaccccctgagggaagttcgccttgccaaggagaaggaggaggagagcttgaatcaaggggccagagcccaaccccaggccaaagcagaaagcaaaccagaagaggaggagccagccaagctccctgcggtcacggtcacaccagcccctgttccagacatcaagggagatcagaaggagaatccaggcggtcaggaagatgtggctgaggccgagagcacaggtgaaatgccaggcgaagagggcgaaactgctggtgaaggtgaaactgaagagaaaagtggaggtgaaactcaaccagaaggtgaaggtgaaactgaaacacaaggaaaaggagaagaatgtgaagatgaaaatgaagcagaaggaaaaggagacaatgaaggtgaagatgagggtgaaatccacgcagaagatggtgaaatgaaaggtaatgaaggtgaaactgaaagccaggaactcagtgctgaaaatcacggtgaagccaaaaatgatgagaaaggtgtagaagatggagggggaagtgatggaggggatagcgaagaggaggaagaggaggaggaagagcaggaggaagaggaggaggaggaagagcaggaggaagaggaggaggaggaggaggaagaggaggagaagggaaatgaagagcctctgtccctggactggcctgaaaccaggcagaagcaggccatttacctcttccttctgcccatcgtgttcccactgtggctgacagtccccgacgtccgaaggcaggttggtgaaacaatagggatttctgaagagatcatgggcctgacaatccttgcagcaggcacatcaattcctgacctcatcaccagtgtgattgtcgctcgaaaaggcctgggagacatggctgtgtcaagctctgtgggcagtaacatatttgatatcactgtgggcttgcctgttccttggttgcttttctctcttatcaatggattacagccagttccagtcagcagcaatggcttgttttgtgcaattgttttgctttttctcatgcttctgtttgtgatctcttcaattgcgtcatgtaaatggagaatgaacaagatcctgggcttcacaatgttcctcctttactttgtattcctgataatcagtgtgatgttagaagatcgaatcatatcctgtcctgtatctgtctgaatcagtcactcttgctcacaatgggcatgga

SEQ ID NO: 315467 - DNA, 3210 bp, Artificial Sequence
  derived and/or modified sequence
atgggcaagctgatcagaatgggcccccaggagagatggctgctgagaaccaagagactgcactggagcagactgctgttcctgctgggcatgctgatcatcggcagcacctaccagcacctgagaagacccagaggcctgagcagcctgtgggccgccgtgagcagccaccagcccatcaagctggccagcagagacctgagcagcgaggagatgatgatgatgagcagcagccccagcaagcccagcagcgagatgggcggcaagatgctggtgccccaggccagcgtgggcagcgacgaggccaccctgagcatgaccgtggagaacatccccagcatgcccaagagaaccgccaagatgatccccaccaccaccaagaacaactacagccccaccgccgccggcaccgagagaagaaaggaggacacccccaccagcagcagaaccctgacctactacaccagcaccagcagcagacagatcgtgaagaagtacacccccacccccagaggcgagatgaagagctacagccccacccaggtgagagagaaggtgaagtacacccccagccccagaggcagaagagtgggcacctacgtgcccagcaccttcatgaccatggagaccagccacgccatcacccccagaaccaccgtgaaggacagcgacatcaccgccacctacaagatcctggagaccaacagcctgaagagaatcatggaggagaccacccccaccaccctgaagggcatgttcgacagcacccccaccttcctgacccacgaggtggaggccaacgtgctgaccagccccagaagcgtgatggagaagaacaacctgttcccccccagaagagtggagagcaacagcagcgcccacccctggggcctggtgggcaagagcaaccccaagaccccccagggcaccgtgctgctgcacacccccgccaccagcgagggccaggtgaccatcagcaccatgaccggcagcagccccgccgagaccaaggccttcaccgccgcctggagcctgagaaaccccagccccagaaccagcgtgagcgccatcaagaccgcccccgccatcgtgtggagactggccaagaagcccagcaccgcccccagcaccagcaccacccccaccgtgagagccaagctgaccatgcaggtgcaccactgcgtggtggtgaagcccacccccgccatgctgaccacccccagccccagcctgaccaccgccctgctgcccgaggagctgagccccagccccagcgtgctgccccccagcctgcccgacctgcaccccaagggcgagtacccccccgacctgttcagcgtggaggagagaagacagggctgggtggtgctgcacgtgttcggcatgatgtacgtgttcgtggccctggccatcgtgtgcgacgagtacttcgtgcccgccctgggcgtgatcaccgacaagctgcagatcagcgaggacgtggccggcgccaccttcatggccgccggcggcagcgcccccgagctgttcaccagcctgatcggcgtgttcatcagccacagcaacgtgggcatcggcaccatcgtgggcagcgccgtgttcaacatcctgttcgtgatcggcacctgcagcctgttcagcagagagatcctgaacctgacctggtggcccctgttcagagacgtgagcttctacatcctggacctgatcatgctgatcctgttcttcctggacagcctgatcgcctggtgggagagcctgctgctgctgctggcctacgccttctacgtgttcaccatgaagtggaacaagcacatcgaggtgtgggtgaaggagcagctgagcagaagacccgtggccaaggtgatggccctggaggacctgagcaagcccggcgacggcgccatcgccgtggacgagctgcaggacaacaagaagctgaagctgcccagcctgctgaccagaggcagcagcagcaccagcctgcacaacagcaccatcagaagcaccatctaccagctgatgctgcacagcctggaccccctgagagaggtgagactggccaaggagaaggaggaggagagcctgaaccagggcgccagagcccagccccaggccaaggccgagagcaagcccgaggaggaggagcccgccaagctgcccgccgtgaccgtgacccccgcccccgtgcccgacatcaagggcgaccagaaggagaaccccggcggccaggaggacgtggccgaggccgagagcaccggcgagatgcccggcgaggagggcgagaccgccggcgagggcgagaccgaggagaagagcggcggcgagacccagcccgagggcgagggcgagaccgagacccagggcaagggcgaggagtgcgaggacgagaacgaggccgagggcaagggcgacaacgagggcgaggacgagggcgagatccacgccgaggacggcgagatgaagggcaacgagggcgagaccgagagccaggagctgagcgccgagaaccacggcgaggccaagaacgacgagaagggcgtggaggacggcggcggcagcgacggcggcgacagcgaggaggaggaggaggaggaggaggagcaggaggaggaggaggaggaggaggagcaggaggaggaggaggaggaggaggaggaggaggaggagaagggcaacgaggagcccctgagcctggactggcccgagaccagacagaagcaggccatctacctgttcctgctgcccatcgtgttccccctgtggctgaccgtgcccgacgtgagaagacaggtgggcgagaccatcggcatcagcgaggagatcatgggcctgaccatcctggccgccggcaccagcatccccgacctgatcaccagcgtgatcgtggccagaaagggcctgggcgacatggccgtgagcagcagcgtgggcagcaacatcttcgacatcaccgtgggcctgcccgtgccctggctgctgttcagcctgatcaacggcctgcagcccgtgcccgtgagcagcaacggcctgttctgcgccatcgtgctgctgttcctgatgctgctgttcgtgatcagcagcatcgccagctgcaagtggagaatgaacaagatcctgggcttcaccatgttcctgctgtacttcgtgttcctgatcatcagcgtgatgctggaggacagaatcatcagctgccccgtgagcgtgtag

SEQ ID NO: 315468 - protein, 839 aa, Artificial Sequence
  derived and/or modified sequence
MTGSPGEGGLLPRCLDMIFNSIGSFQAKRYVFKSNDRNSMDIQCEVDALLERQKREAMPNPKTSSSKRQVDPEFADMITVQEFCKAEEVDEDSVYGVFVSYIEIYNNYIYDLLEEVPFDPIKPKPPQSKLLREDKNHNMYVAGCTEVEVKSTEEAFEVFWRGQKKRRIANTHLNRESSRSHSVFNIKLVQAPLDADGDNVLQEKEQITISQLSLVDLAGSERTNRTRAEGNRLREAGNINQSLMTLRTCMDVLRENQMYGTNKMVPYRDSKLTHLFKNYFDGEGKVRMIVCVNPKAEDYEENLQVMRFAEVTQEVEVARPVDKAICGLTPGRRYRNQPRGPVGNEPLVTDVVLQSFPPLPSCEILDINDEQTLPRLIEALEKRHNLRQMMIDEFNKQSNAFKALLQEFDNAVLSKENHMQGKLNEKEKMISGQKLEIERLEKKNKTLEYKIEILEKTTTIYEEDKRNLQQELETQNQKLQRQFSDKRRLEARLQGMVTETTMKWEKECERRVAAKQLEMQNKLWVKDEKLKQLKAIVTEPKTEKPERPSRERDREKVTQRSVSPSPVPLSSNYIAQISNGQQLMSQPQLHRRSNSCSSISVASCISEWEQKIPTYNTPLKVTSIARRRQQEPGQSKTCIVSDRRRGMYWTEGREVVPTFRNEIEIEEDHCGRLLFQPDQNAPPIRLRHRRSRSAGDRWVDHKPASNMQTETVMQPHVPHAITVSVANEKALAKCEKYMLTHQELASDGEIETKLIKGDIYKTRGGGQSVQFTDIETLKQESPNGSRKRRSSTVAPAQPDGAESEWTDVETRCSVAVEMRAGSQLGPGYQHHAQPKRKKP

SEQ ID NO: 315469 - protein, 637 aa, Artificial Sequence
  derived and/or modified sequence
MSDFHVHPQATVGEEGGVARFQCQIHGLPKPLITWEKNRVPIDTDNERYTLLPKGVLQITGLRAEDGGIFHCVASNIASIRISHGARLTVSGSGSGAYKEPAILVGPENLTLTVHQTAVLECVATGNPRPIVSWSRLDGRPIGVEGIQVLGTGNLIISDVTVQHSGVYVCAANRPGTRVRRTAQGRLVVQAPAEFVQHPQSISRPAGTTAMFTCQAQGEPPPHVTWLKNGQVLGPGGHVRLKNNNSTLTISGIGPEDEAIYQCVAENSAGSSQASARLTVLWAEGLPGPPRNVRAVSVSSTEVRVSWSEPLANTKEIIGYVLHIRKAADPPELEYQEAVSKSTFQHLVSDLEPSTAYSFYIKAYTPRGASSASVPTLASTLGEAPAPPPLSVRVLGSSSLQLLWEPWPRLAQHEGGFKLFYRPASKTSFTGPILLPGTVSSYNLSQLDPTAVYEVKLLAYNQHGDGNATVRFVSLRGASERTALSPPCDCRKEEAANQTSTTGIVIGIHIGVTCIIFCVLFLLFGQRGRVLLCKDVDMKELEQLFPPASAAGQPDPRPTDPAAPAPCEETQLSVLPLQGCGLMEGKTTEAKTTEATAPCAGLAAAPPPPDGGPGLLSEGQASRPAAARVTQPAHSEQ

SEQ ID NO: 315470 - DNA, 1914 bp, Artificial Sequence
  derived and/or modified sequence
atgagcgacttccacgtgcacccccaggccaccgtgggcgaggagggcggcgtggccagattccagtgccagatccacggcctgcccaagcccctgatcacctgggagaagaacagagtgcccatcgacaccgacaacgagagatacaccctgctgcccaagggcgtgctgcagatcaccggcctgagagccgaggacggcggcatcttccactgcgtggccagcaacatcgccagcatcagaatcagccacggcgccagactgaccgtgagcggcagcggcagcggcgcctacaaggagcccgccatcctggtgggccccgagaacctgaccctgaccgtgcaccagaccgccgtgctggagtgcgtggccaccggcaaccccagacccatcgtgagctggagcagactggacggcagacccatcggcgtggagggcatccaggtgctgggcaccggcaacctgatcatcagcgacgtgaccgtgcagcacagcggcgtgtacgtgtgcgccgccaacagacccggcaccagagtgagaagaaccgcccagggcagactggtggtgcaggcccccgccgagttcgtgcagcacccccagagcatcagcagacccgccggcaccaccgccatgttcacctgccaggcccagggcgagccccccccccacgtgacctggctgaagaacggccaggtgctgggccccggcggccacgtgagactgaagaacaacaacagcaccctgaccatcagcggcatcggccccgaggacgaggccatctaccagtgcgtggccgagaacagcgccggcagcagccaggccagcgccagactgaccgtgctgtgggccgagggcctgcccggcccccccagaaacgtgagagccgtgagcgtgagcagcaccgaggtgagagtgagctggagcgagcccctggccaacaccaaggagatcatcggctacgtgctgcacatcagaaaggccgccgacccccccgagctggagtaccaggaggccgtgagcaagagcaccttccagcacctggtgagcgacctggagcccagcaccgcctacagcttctacatcaaggcctacacccccagaggcgccagcagcgccagcgtgcccaccctggccagcaccctgggcgaggcccccgcccccccccccctgagcgtgagagtgctgggcagcagcagcctgcagctgctgtgggagccctggcccagactggcccagcacgagggcggcttcaagctgttctacagacccgccagcaagaccagcttcaccggccccatcctgctgcccggcaccgtgagcagctacaacctgagccagctggaccccaccgccgtgtacgaggtgaagctgctggcctacaaccagcacggcgacggcaacgccaccgtgagattcgtgagcctgagaggcgccagcgagagaaccgccctgagccccccctgcgactgcagaaaggaggaggccgccaaccagaccagcaccaccggcatcgtgatcggcatccacatcggcgtgacctgcatcatcttctgcgtgctgttcctgctgttcggccagagaggcagagtgctgctgtgcaaggacgtggacatgaaggagctggagcagctgttcccccccgccagcgccgccggccagcccgaccccagacccaccgaccccgccgcccccgccccctgcgaggagacccagctgagcgtgctgcccctgcagggctgcggcctgatggagggcaagaccaccgaggccaagaccaccgaggccaccgccccctgcgccggcctggccgccgccccccccccccccgacggcggccccggcctgctgagcgagggccaggccagcagacccgccgccgccagagtgacccagcccgcccacagcgagcagtag

SEQ ID NO: 315471 - DNA, 1914 bp, Artificial Sequence
  derived and/or modified sequence
atgagcgactttcacgtacatccgcaggcaacagtgggagaagagggcggagttgcccgtttccagtgtcagattcacggcctgcccaaaccccttataacttgggagaagaatcgggtgcctatcgacacagacaatgagcgatatacgcttctcccaaagggagtcctgcagatcaccggtttgagggctgaagacggtggaatttttcattgtgtggcatccaacatagctagtatccgaatcagccatggcgctcgcctgacagtgtccggctccggtagcggtgcttacaaggagccggccatattagtgggccccgaaaacttaaccttaacagtgcatcaaaccgcggtcttggagtgcgtggctaccggcaatccgaggcctatcgtgagttggtcgcgcttggacggacggccaattggggtggaaggcatccaggtgctggggactggaaacctcattatcagtgacgtaacagtgcagcatagcggcgtttatgtgtgcgccgccaacagaccagggactagagtgcgacgtactgctcagggacgactggttgtgcaggccccggctgaattcgtgcagcatcctcagtcaatctcccgtccagccggcacgacagccatgtttacatgccaggctcaaggcgaaccgccaccgcacgtcacctggctgaaaaacgggcaagtgctgggccctggaggacacgtcagactcaaaaataacaacagtactttgactattagtgggattggccctgaggacgaggccatatatcagtgtgtcgcagagaactccgccgggagttctcaggcatccgctagactgacggtgctgtgggccgagggtctgcctgggcccccaagaaacgtgcgcgcggtgtccgtgagcagcactgaagttcgcgtgtcctggtccgaaccacttgctaatactaaagagattatcgggtatgtgttgcacatcagaaaggccgcagatcctccagaactggaatatcaggaggccgtgagtaagtctacctttcagcacctcgtatccgacctagagcccagcacagcatattctttctatattaaagcttacactcccaggggcgcatccagcgctagtgtgcccactcttgcttccacactcggggaagcgcccgcgccaccacccttgtccgttcgggtcctggggtccagctcccttcaactgctgtgggaaccatggcctcggttggcccaacacgagggaggttttaagcttttttatcggcccgcctcgaagaccagcttcaccggtcccatattgcttcctggtactgtgtcttcttacaacttgtctcagcttgatcccacggcggtgtacgaggtaaagttactggcatacaaccagcacggcgatggaaatgcaaccgtgcgatttgtcagcctgaggggcgcttccgaacgtaccgcacttagcccaccttgtgattgcagaaaagaagaggcggctaaccagacctccaccacggggatcgtgatcgggatccatattggagttacttgtattatattctgtgtgctatttcttttgtttgggcagcggggccgggttctgctatgtaaggacgtggacatgaaggagctggaacagctgttccccccggcgtctgctgcggggcagcctgatccacgccctactgatcccgccgctcccgctccctgcgaggagacccagctgtccgttctgccactccaaggctgtgggctaatggaaggaaagacaactgaggccaagaccaccgaggccactgcgccatgtgctgggctcgctgccgcaccacctcccccagatggggggccaggcttgttatctgagggccaggcttctcgtcccgccgctgcacgggtgacacagccagcgcactctgagcagtag

SEQ ID NO: 315472 - DNA, 2577 bp, Artificial Sequence
  derived and/or modified sequence
agcggtgcgagtgtggagcgcgcaccccgggcgaggctgacagatcgcccgggtgggtgcaagatggcgcaagcggcgctccccctgcgccccccgcgctgctgagcaggcatgcggccccagtcccccaccgcctgggctcggccccggccggagccccagccccggccccggcgccggccccgcgggacgctgtgagccgcgagaggcccgggagccgcgcgtcgccgagccgagctgaccgagagccccatggctgtgcagcgcgccgcgtctccgcgccgcccgcccgccccgctctggccccggctcctgctgccgctgctgttgctgctgctgcccgcgccgagcgagggtcttggccactctgctgaactggcatttgctgtggagccaagtgatgatgttgccgtccccgggcagcctatagtgctggactgcagggtggaggggacccctccagtgcgaatcacctggaggaagaatggggtagagctgccagagagtacccactccaccttgctggccaatgggtccttgatgatccgtcacttcaggctggagccgggaggcagcccttcggatgaaggtgactatgagtgtgtggcccagaaccgctttgggctggtggtcagccggaaggctcgcatccaagctgcaaccatgtcggacttccacgtgcatccccaggccaccgtgggtgaggagggtggtgtggcccgcttccagtgccaaatccatgggcttcccaaacccctgatcacttgggagaagaacagagtcccaattgacacggacaatgagaggtacacattgctgcccaagggggtcctgcagatcacaggacttcgagctgaggacggtggcatcttccactgtgtggcctcaaacatcgccagtatccggatcagccacggggccaggctcactgtgtcaggctcgggctctggggcctacaaggagccagccatcctcgtggggcctgagaacctcaccctgacagtgcaccagaccgcggtgcttgagtgtgtcgccacgggcaacccgcgccccattgtgtcctggagccgcctggatggtcgccctatcggggtggagggcatccaggtgctgggcacaggaaacctcatcatctcagacgtgacggtccagcactctggcgtctacgtctgtgcagccaacagacctggcacccgggtgaggagaacggcacagggccggctggtggtgcaagccccagctgagtttgtgcagcatccccagtccatctccaggccagctgggaccacagccatgttcacctgccaagcccagggtgagccaccgcctcatgtcacgtggctgaaaaatggacaggtgctggggccaggaggccacgtcaggctcaagaataacaacagcacactgaccatttctggaatcggtcctgaggatgaagccatttatcagtgtgtggccgagaacagtgcgggctcatcacaggccagtgccaggctgaccgtactgtgggctgaggggctccccgggcctccccgcaatgtgcgggcagtctctgtgtcttccactgaggtgcgtgtgtcctggagtgagccgctggccaacaccaaggagatcatcggctacgtcctgcacatcaggaaggctgctgacccaccggagctggagtatcaggaggcagtcagcaagagcacctttcagcacctggtcagcgacctggagccctccacagcctacagtttctacatcaaggcctacacaccaaggggggccagctcagcctctgtgcccaccctagctagcaccctgggtgaagcccctgccccacccccactgtcagtgcgagtcctgggcagctcctccttgcagctgctgtgggagccttggccccggctggcccagcacgagggcggcttcaagctgttttaccgcccagcaagcaagacctccttcaccggccccatcctgctgcctggaaccgtctcctcctacaacctcagccagctcgaccccactgcagtgtatgaggtgaagctgctcgcctacaaccagcatggagatggcaatgccacagtccgctttgtgtctttgaggggagcatctgagaggacagccttgagcccaccatgtgactgccggaaggaggaggccgccaaccagacgtccaccacaggcatcgtcatcggcatccacatcggggtcacttgcatcatcttctgtgtcctcttcctcctgttcggccaaaggggcagggtcctcctgtgtaaagatgtggatatgaaggagctggagcagctgttccccccggccagcgcagcagggcagccggaccccagacccacagatcctgcagcccccgctccgtgtgaggagacccagctctccgtgctgccacttcaggggtgcggcctgatggaggggaagacgacggaggcgaagaccacagaggccacggctccctgcgccggcctggcggctgccccaccacccccagatggaggccctggcctcctcagtgaaggccaggcttccaggcctgcagcggcccgggttacccagccagctcactcggaacagtag

SEQ ID NO: 315473 - DNA, 1914 bp, Artificial Sequence
  derived and/or modified sequence
atgtctgacttccacgtgcacccccaggccaccgtgggggaggagggcggcgtggcccgcttccagtgccagatccacggcctgcccaagcccctcatcacctgggagaagaacagagtgcccatcgacacagacaatgaaagatacaccctgctgcccaagggcgtgctgcagatcaccggcctgcgggcagaagatggcggcatcttccactgtgtggccagcaacatcgccagcatccgcatcagccacggggcccggctgactgtgtctggcagcggcagcggggcctacaaggagcccgccatcctggtgggccctgagaacctgaccctgactgtgcaccagacagctgtgctggagtgtgtggccactggaaacccccggcccatcgtgtcctggagccggctggatggccggcccatcggcgtggagggcatccaggtgctgggcaccggcaacctgatcatcagtgatgtgacagtgcagcacagcggcgtgtatgtgtgtgccgccaacagacctggcaccagggtgcggaggacagcccagggccgcctggtggtgcaggccccagctgagtttgtgcagcacccccagagcatcagcaggcctgctggcaccacagccatgttcacctgccaggcccagggcgagcccccacctcatgtgacctggctgaagaatggccaggtgctgggccctgggggccacgtgcggctgaagaacaacaacagcaccctgaccatctctggaattggaccagaagatgaggccatctaccagtgtgtggccgagaacagcgctggcagcagccaggccagcgcccggctgactgtgctgtgggccgagggcctgcccggccccccaagaaatgtgcgggctgtgtctgtgagcagcacagaggtgcgggtgtcctggagcgagcccctggccaacaccaaggagatcatcggctacgtgctgcacatcaggaaggctgctgaccccccagagctggagtaccaggaggccgtgtccaagagcaccttccagcacctggtgtctgacctggagcccagcacagcctacagcttctacatcaaggcctacacccccaggggggccagcagcgcctctgtgcccaccctggccagcaccctgggggaggccccagcccccccacccctgtctgtgcgggtgctgggcagcagcagcctgcagctgctgtgggagccctggccccggctggcccagcatgaaggaggcttcaagctgttctacagacctgccagcaagaccagcttcaccggccccatcctgctgcccggcaccgtgtcctcctacaacctgagccagctggaccccacagctgtgtatgaggtgaagctgctggcctacaaccagcacggagatggaaatgccaccgtgcgctttgtgtccctgcggggggccagcgagaggacagccctgagccccccctgtgactgcaggaaggaggaggccgccaaccagaccagcaccaccggcatcgtcatcggcatccacatcggcgtgacctgcatcatcttctgtgtgctcttcctgctgtttggccagaggggccgggtgctgctgtgcaaggatgtggacatgaaggagctggagcagctgttccccccagccagcgctgctggccagcctgacccccggcccacagatcctgctgccccagccccctgtgaggagacccagctgtctgtgctgcccctgcagggctgcggcctgatggagggcaagaccacagaggccaagaccacagaggccacagccccctgtgccggcctggccgccgcccctcctcctccagatggcggccctggcctgctgtctgagggccaggccagcaggcctgctgctgcccgggtgacccagcctgcccacagcgagcagtag

SEQ ID NO: 315474 - DNA, 1914 bp, Artificial Sequence
  derived and/or modified sequence
atgagcgacttccacgtgcacccccaggccaccgtgggcgaggaggggggagtcgcccgctttcaatgccagattcacggtctgcctaaacccctgattacgtgggagaaaaatagagtacccatcgacaccgataatgagaggtataccttactacccaagggcgttctccagataacaggactgcgcgccgaagacggggggattttccattgtgttgcatccaacatcgcctcaattcgcatctcacatggagccagattgactgtgagcgggagcgggtctggagcttataaggagcctgccatcctggtgggccctgagaatcttacactaactgtacaccagacggctgtgctcgaatgtgtggccactgggaatcctcgccctattgtcagttggtctagactagatgggcgccctataggcgtggagggcatccaggtcctggggaccggtaacttaatcatctctgatgtcactgtacagcacagtggcgtttatgtgtgcgccgcaaatcggcccgggacgcgagtgagaagaacggcccagggtcggctcgtggtgcaggccccagctgagttcgtccagcatccccagtctatctcaagaccagctggcaccactgctatgtttacctgccaagctcagggggagcctcctccccacgtaacctggctgaaaaacggccaggtgttgggacctggaggtcacgttcgccttaaaaacaataacagtactctcacaatctccggcattggccccgaggacgaggcaatctatcaatgtgttgcggagaattctgccggcagttctcaggcctcagcccgactcactgtgctctgggctgagggcctgccagggcctcctcgtaacgtgcgcgcggtctcagtgtcaagtaccgaggtccgggtgtcctggtccgaacctcttgcaaacaccaaagagatcatcggatacgtccttcatatacggaaggccgccgaccctcctgaactggagtaccaggaggcggtgtctaagtctacattccagcacctagtatcggatcttgagcctagtacagcgtacagcttctacatcaaggcctacactcctcgcggggcatcctcagcatccgtccccacactagcgagtaccctgggcgaggcacctgccccaccacctctctcagttcgcgttctgggatcttcttctctgcaacttctgtgggagccgtggccacggctggcacagcacgagggcggttttaagttattctatcgcccagctagcaagacctcattcactgggccaattctgcttcctggaacggtgagcagttacaatttgagccagcttgaccctactgctgtttatgaagtgaagctgttagcctataatcaacatggtgacggcaacgctactgtgcgttttgtgtccctccgcggcgcaagtgagagaacagcactctcccccccgtgcgactgcaggaaagaggaggccgctaaccagacctcaacgacaggcatcgtgattggcatccacataggggtgacttgtatcatattctgtgttctcttcctgttatttggacagcgggggagggttctcctgtgtaaggatgtggacatgaaagaactcgagcagctcttccctcctgctagtgcagcaggtcagcccgacccccgcccaactgacccagccgccccagccccctgcgaagagactcagctgagcgtgctacctcttcagggctgcggactcatggaaggaaagacgactgaggctaagacaactgaagctacagcaccctgcgctgggcttgccgcagccccaccccctccggatggggggccgggcttgctgagtgaaggacaagcaagtagacccgccgctgccagggttacacagccagctcactcggagcaatag

SEQ ID NO: 315475 - DNA, 1914 bp, Artificial Sequence
  derived and/or modified sequence
atgtcagacttccacgtgcaccctcaggccaccgtgggggaagaagggggagtcgcccgatttcaatgccagattcatggtctgcccaagcctctaataacatgggaaaaaaacagggtcccaatagacacggataatgagcggtatactcttcttcccaagggcgtactgcagattaccgggttgcgagccgaagatggcggtatcttccattgcgttgccagcaatatcgcctcaatccgaatttctcacggcgctaggctgaccgtgagcggctcaggttccggtgcctacaaagagcctgcaatcctcgttgggccagagaacctgaccctgaccgtgcatcagaccgcggtgcttgagtgtgttgctaccggaaaccccagacccattgtcagctggtctcggctagacggacgacccatcggagtggaggggatccaagtgttgggcactggtaacctgatcataagcgatgtgacagttcagcattccggcgtctatgtatgtgctgctaacaggcctggtactcgggtccgtcgtactgcccagggtaggctggtggtccaagctcctgctgagtttgtccagcatccccagagtattagccgaccagccggaactactgctatgttcacttgccaagcacagggtgagcctccccctcatgttacctggctgaaaaacgggcaagtcctggggcctggagggcatgtgagactcaaaaacaacaattcaacactcacaatctcagggattgggcctgaagacgaggcgatctaccagtgcgtcgccgagaacagtgccggatcctctcaggctagtgcccgtctaacggtgctatgggccgaggggctcccaggaccccctcgcaacgtcagggccgtttctgtgagttccacagaagtgagggtctcctggtctgagcctctggccaacactaaggagatcatcggctacgttctgcatattagaaaggcagccgatccccctgagctcgaatatcaagaggcagtatccaaatccacttttcaacacctcgtgtcagaccttgaacctagcactgcttacagcttctacatcaaagcctacacacctcgaggtgccagtagcgccagcgtgcctaccctggcgagcacattaggagaagctccggctcctcccccattgagtgtgcgagttctggggtccagctctctccagctgctatgggagccttggcccaggctggctcaacacgaaggcggattcaaactgttctatcggccagctagcaagacctccttcacagggcctattctgctgccgggaacagtttcatcatataatctgtcccagttagaccctaccgccgtatatgaggtgaaactgttggcctacaatcaacacggcgacgggaacgcgacagtgcgcttcgtgtcactacggggagccagcgaacgtacggccctgagtcccccatgtgattgcagaaaagaggaagctgctaatcaaactagcactacagggatcgtaataggtatacacatcggagtgacctgcataattttctgcgttctgtttttactctttgggcagcgaggacgtgtccttctttgtaaggacgtcgatatgaaggaactcgagcagctgtttcccccagcctctgcagctggtcagcccgatcctaggcctacagaccctgccgctcccgctccctgcgaagaaacccagttgagtgtactgcctctgcaggggtgcgggctgatggaagggaaaactaccgaggcaaaaacgacggaggccacagcaccttgcgcgggtcttgcagccgctcccccacctcctgatggcggacctggccttctgtctgagggtcaggcctcccgtcccgctgccgcaagggtcactcagcccgcacattcggagcagtag

SEQ ID NO: 315476 - protein, 817 aa, Artificial Sequence
  derived and/or modified sequence
MWSLTASEGESTTAHFFLGAGDEGLGTRGIGMRPEESDSELLEDEEDEVPPEPQIIVGICAMTKKSKSKPMTQILERLCRFDYLTVVILGEDVILNEPVENWPSCHCLISFHSKGFPLDKAVAYSKLRNPFLINDLAMQYYIQDRREVYRILQEEGIDLPRYAVLNRDPARPEECNLIEGEDQVEVNGAVFPKPFVEKPVSAEDHNVYIYYPSSAGGGSQRLFRKIGSRSSVYSPESSVRKTGSYIYEEFMPTDGTDVKVYTVGPDYAHAEARKSPALDGKVERDSEGKEIQYPVMLTAMEKLVARKVCVAFKQTVCGFDLLRANGHSFVCDVNGFSFVKNSMKYYDDCAKILGNTIMRELAPQFQIPWSIPTEAEDIPIVPTTSGTMMELRCVIAIIRHGDRTPKQKMKMEVKHPRFFALFEKHGGYKTGKLKLKRPEQLQEVLDITRLLLAELEKEPGGEIEEKTGKLEQLKSVLEMYGHFSGINRKVQLTYYPHGVKASNEGQDPQRETLAPSLLLVLKWGGELTPAGRVQAEELGRAFRCMYPGGQGDYAGFPGCGLLRLHSTFRHDLKIYASDEGRVQMTAAAFAKGLLALEGELTPILVQMVKSANMNGLLDSDGDSLSSCQHRVKARLHHILQQDAPFGPEDYDQLAPTRSTSLLNSMTIIQNPVKVCDQVFALIENLTHQIRERMQDPRSVDLQLYHSETLELMLQRWSKLERDFRQKSGRYDISKIPDIYDCVKYDVQHNGSLGLQGTAELLRLSKALADVVIPQEYGISREEKLEIAVGFCLPLLRKILLDLQRTHEDESVNKLHPL

SEQ ID NO: 315477 - DNA, 345 bp, Artificial Sequence
  derived and/or modified sequence
atgtggagcctgaccgccagcgagggcgagagcaccaccgcccacttcttcctgggcgccggcgacgagggcctgggcaccagaggcatcggcatgagacccgaggagagcgacagcgagctgctggaggacgaggaggacgaggtgccccccgagccccagatcatcgtgggcatctgcgccatgaccaagaagagcaagagcaagcccatgacccagatcctggagagactgtgcagattcgactacctgaccgtggtgatcctgggcgaggacgtgatcctgaacgagcccgtggagaactggcccagctgccactgcctgatcagcttccacagcaagtag

SEQ ID NO: 315478 - DNA, 402 bp, Artificial Sequence
  derived and/or modified sequence
atgtggagcctgaccgccagcgagggcgagagcaccaccgcccacttcttcctgggcgccggcgacgagggcctgggcaccagaggcatcggcatgagacccgaggagagcgacagcgagctgctggaggacgaggaggacgaggtgccccccgagccccagatcatcgtgggcatctgcgccatgaccaagaagagcaagagcaagcccatgacccagatcctggagagactgtgcagattcgactacctgaccgtggtgatcctgggcgaggacgtgatcctgaacgagcccgtggagaactggcccagctgccactgcctgatcagcttccacagcaagggcttccccctggacaaggccgtggcctacagcaagctgagaaaccccttcctgatctag

SEQ ID NO: 315479 - DNA, 345 bp, Artificial Sequence
  derived and/or modified sequence
atgtggagccttaccgcatctgaaggcgaaagcacgactgcccatttttttttgggagcaggtgatgagggattaggcactcgcgggatcggcatgcggcctgaggaatcagacagcgaattgctagaagatgaggaggatgaggttcccccagaaccacagatcatcgtggggatctgcgcaatgactaaaaagtccaagtctaagcctatgactcagattttagaacgactctgccggttcgattacctcactgtcgtgattttgggggaagatgtgatccttaatgaaccagtagagaattggcccagctgccattgtttgatttcttttcactctaagtag

SEQ ID NO: 315480 - DNA, 345 bp, Artificial Sequence
  derived and/or modified sequence
atgtggtcgttaactgcttcagaaggagagagcacaaccgcccattttttcctcggtgccggcgacgagggtctgggcacacgcggaataggcatgaggccagaagagtctgattcggaattactcgaggacgaagaggatgaggtgccccccgaaccacagatcattgttggcatttgtgctatgaccaagaaaagtaagtccaagcctatgactcaaatcctggaacggctctgccgcttcgactatcttactgtcgtcatcctgggcgaggacgtgattctcaacgaacctgttgagaactggccttcctgtcattgtctcattagttttcattctaaatag

SEQ ID NO: 315481 - DNA, 402 bp, Artificial Sequence
  derived and/or modified sequence
atgtggagtctgaccgcgagcgagggggaatcaaccacagctcacttcttcctgggagcaggagacgaagggctgggcacccgcggaatcggaatgcgtcccgaagaatccgacagcgaactgctggaagatgaggaggacgaggtgcccccagagccccaaatcatagtaggcatttgcgcaatgaccaagaagtctaaaagtaaaccgatgactcagatcctcgagaggctctgccggtttgattatctcacagtcgtcattctgggggaagacgtgattttgaacgagccggtggagaattggccaagctgtcactgcctgatatccttccatagcaaaggcttcccacttgataaggcagtggcttacagtaaactgcgaaatccttttcttatttag

SEQ ID NO: 315482 - DNA, 345 bp, Artificial Sequence
  derived and/or modified sequence
atgtggagcctgacagccagcgagggggagagcaccacagcccacttcttcctgggcgctggagatgagggcctgggcacccggggcatcggcatgaggcctgaggagagtgacagcgagctgctggaggatgaggaggatgaggtgcccccagagccccagatcatcgtgggcatctgtgccatgaccaagaagagcaagagcaagcccatgacccagatcctggagcggctgtgccgctttgactacctgactgtggtgatcctgggagaagatgtgatcctgaatgaacctgtggagaactggcccagctgccactgcctgatctccttccacagcaagtag

SEQ ID NO: 315483 - DNA, 402 bp, Artificial Sequence
  derived and/or modified sequence
atgtggagcctgacagccagcgagggggagagcaccacagcccacttcttcctgggcgctggagatgagggcctgggcacccggggcatcggcatgaggcctgaggagagtgacagcgagctgctggaggatgaggaggatgaggtgcccccagagccccagatcatcgtgggcatctgtgccatgaccaagaagagcaagagcaagcccatgacccagatcctggagcggctgtgccgctttgactacctgactgtggtgatcctgggagaagatgtgatcctgaatgaacctgtggagaactggcccagctgccactgcctgatctccttccacagcaagggcttccccctggacaaggctgtggcctacagcaagctgaggaaccccttcctgatctag

SEQ ID NO: 315484 - DNA, 345 bp, Artificial Sequence
  derived and/or modified sequence
atgtggagcctgaccgccagcgagggcgagagcaccaccgcccacttttttctgggcgctggcgacgaagggctgggtacccgtgggattggcatgagaccggaggaaagcgacagcgagctgctggaagacgaggaagacgaggtacccccagaaccccaaataattgtcggtatttgcgcaatgaccaagaagtccaaatcgaaaccaatgacacaaattctggagcgcctttgcaggttcgattatttgactgtggtcatactgggcgaggacgtaatactcaacgagccagtggagaattggcccagctgtcactgcttgatctcttttcattccaaatag

SEQ ID NO: 315485 - DNA, 345 bp, Artificial Sequence
  derived and/or modified sequence
atgtggagcctgaccgccagcgagggcgagagcaccaccgcccacttttttttaggagctggtgatgaagggcttgggacgaggggaattggaatgcgaccagaggagtctgactctgaactcctggaggatgaggaagatgaggtcccccctgaacctcagattatcgtcggtatctgtgcgatgaccaaaaaaagcaaatcaaagccgatgacccagatactggagagactgtgcagattcgattacctcacagtggtgatattgggggaggacgtgatcttaaatgagccagtggaaaactggccaagctgtcactgcttaataagctttcattcaaaatag

SEQ ID NO: 315486 - DNA, 402 bp, Artificial Sequence
  derived and/or modified sequence
atgtggagcctgaccgccagcgagggcgagagcaccaccgcccactttttcctaggggccggggacgaagggctggggacccgggggattgggatgcgccccgaggagtccgactcagagctcctggaggatgaagaggatgaggtgccaccggaaccgcagatcattgtgggaatttgcgcaatgacaaaaaaatctaagtcaaagccaatgacccagattttggaacggttatgcaggttcgattatcttactgttgtgattctcggggaggatgtcattctgaacgagccagttgagaattggccttcctgtcactgcctgatctcttttcattctaagggctttcccctagacaaggccgtggcctattctaagttgcgaaatccgttcctgatttag

SEQ ID NO: 315487 - DNA, 345 bp, Artificial Sequence
  derived and/or modified sequence
atgtggagcctgactgcttctgagggggagtccacgacagcccacttctttcttggtgccggagacgaaggattgggaaccagggggatcggcatgagacccgaggagtctgattccgaactgctggaggacgaggaggacgaggtaccccctgaaccgcaaataatcgtcggcatatgtgcaatgacaaagaagagcaagagcaagcccatgactcaaatcctggaaagactctgccggttcgattatctaactgtggtgattctcggggaggacgtgatattaaatgagccagtagagaattggccatcctgtcactgcctcatctcattccattccaaatag

SEQ ID NO: 315488 - DNA, 345 bp, Artificial Sequence
  derived and/or modified sequence
atgtggtccctgaccgccagtgagggtgagtcaacaaccgcccacttctttctgggtgctggcgacgagggactgggaactagggggatcggcatgcggccagaagagtcagattcagaactcctggaagatgaagaggacgaagtgccccctgaaccgcaaatcatagttgggatctgcgccatgacgaagaagagtaagagtaagccgatgacacagatcctcgagaggctgtgccgttttgattatctgactgttgtgattctcggcgaagatgtgattctgaacgaaccagtggaaaactggccctcttgccattgcctcatatcatttcacagcaagtag

SEQ ID NO: 315489 - DNA, 402 bp, Artificial Sequence
  derived and/or modified sequence
atgtggtccttaactgcttccgagggcgaatcaaccaccgcacactttttcttgggcgctggcgatgaagggctgggcaccagggggatcggtatgcgccctgaggaatcggatagtgaactgctcgaagatgaggaggacgaggtgccccctgaaccacagatcattgtcggaatatgcgcaatgaccaagaagtccaaatccaagccaatgactcaaattctggagcggctgtgtaggttcgattatctgactgtggtaattctcggtgaagatgtcatactgaatgagcctgtcgaaaactggccttcttgtcactgcttaatctcattccacagtaagggctttcccttagataaggccgtggcttattccaagctgagaaatcctttcctaatctag

SEQ ID NO: 315490 - protein, 72 aa, Artificial Sequence
  derived and/or modified sequence
MWSLTASEGESTTAHFFLGAGDEGLGTRGIGMRPEESDSELLEDEEDEVPPEPQIIVGICAMTKKSKSKPMT

SEQ ID NO: 315491 - DNA, 568 bp, Artificial Sequence
  derived and/or modified sequence
gtactttctgagacttcatcctcgaggcctggtggctaccggctcttttcatcttcacggccacccacagaaatgaagcagagtggcctaggctcacagtgcacagggctgttcagcaccacagtgctgggtggctcctccagtgccccgaatcttcaggactacgcccgcagccatggcaaaaagctaccacctgccagtctgaagcaccgagatgaggtatctgccggtactgagatgtaagtgatcagctgaagggagaaactgtacaccatgtgacggacaaattgcctgcctcaagaaagcacttaggaccattctgcagccactcagtgaccttggctagaaaccaatggctgtgcggcgtgagcagacatggccgcttaccaacaagaagagcagatgcagcttccccgagctgatgccattcgttcacgtctcatcgatactttctctctcattgagcatttgcaaggcttgagccaagctgtgccgcggcacactatcagggagttacttgatccttcccgccagaagaaacttgtattgggagatcaacaccagctag

SEQ ID NO: 315492 - protein, 271 aa, Artificial Sequence
  derived and/or modified sequence
MPNFRGYQQQDAHEFMRYLLDHLHLELQGGFNGVSRSAILQENSTLSASNKCCINGASTVVTAIFGGILQNEVNCLICGTESRKFDPFLDLSLDIPSQFRSKRSKNQENGPVCSLRDCLRSFTDLEELDETELYMCHKCKKKQKSTKKFWIQKLPKVLCLHLKRFHWTAYLRNKVDTYVEFPLRGLDMKCYLLEPENSGPESCLYDLAAVVVHHGSGVGSGHYTAYATHEGRWFHFNDSTVTLTDEETVVKAKAYILFYVEHQAKAGSDKL

SEQ ID NO: 315493 - DNA, 816 bp, Artificial Sequence
  derived and/or modified sequence
atgcccaacttcagaggctaccagcagcaggacgcccacgagttcatgagatacctgctggaccacctgcacctggagctgcagggcggcttcaacggcgtgagcagaagcgccatcctgcaggagaacagcaccctgagcgccagcaacaagtgctgcatcaacggcgccagcaccgtggtgaccgccatcttcggcggcatcctgcagaacgaggtgaactgcctgatctgcggcaccgagagcagaaagttcgaccccttcctggacctgagcctggacatccccagccagttcagaagcaagagaagcaagaaccaggagaacggccccgtgtgcagcctgagagactgcctgagaagcttcaccgacctggaggagctggacgagaccgagctgtacatgtgccacaagtgcaagaagaagcagaagagcaccaagaagttctggatccagaagctgcccaaggtgctgtgcctgcacctgaagagattccactggaccgcctacctgagaaacaaggtggacacctacgtggagttccccctgagaggcctggacatgaagtgctacctgctggagcccgagaacagcggccccgagagctgcctgtacgacctggccgccgtggtggtgcaccacggcagcggcgtgggcagcggccactacaccgcctacgccacccacgagggcagatggttccacttcaacgacagcaccgtgaccctgaccgacgaggagaccgtggtgaaggccaaggcctacatcctgttctacgtggagcaccaggccaaggccggcagcgacaagctgtag

SEQ ID NO: 315494 - DNA, 816 bp, Artificial Sequence
  derived and/or modified sequence
atgcccaattttaggggctaccagcagcaggacgcccatgagttcatgagatacctgttagaccatctccacctggaactgcagggaggatttaatggggtgagccgtagcgccattcttcaagagaactccacactgagtgcctcgaataagtgttgcattaatggggcttccacagttgttacagcaatttttggcggcatactgcaaaacgaggttaactgccttatttgcggaacagaaagccgtaaattcgaccccttcctggacctcagcctggacatcccttcccagtttcggtccaaacgctccaaaaatcaggaaaacggaccagtgtgcagtctgagggattgcctcagaagcttcacagacttggaggagctggacgaaacagagctctatatgtgccacaaatgtaagaagaaacagaaatccacgaagaaattctggatccagaaactgcccaaagtcttatgtctgcacctgaaaaggttccattggacagcttacctcaggaacaaggtggacacttacgtggaattccctcttcgaggccttgatatgaagtgttacctgctagaaccagagaatagcggacctgaaagttgcctttatgatttggctgccgttgtggtgcaccatggatcgggcgtgggctcaggacattacactgcctacgctacccacgagggcaggtggtttcatttcaacgacagcacggtgaccctgacagacgaagagaccgtagtaaaggccaaagcttacatactgttttacgtggagcaccaggcaaaggccgggagtgacaagctttag

SEQ ID NO: 315495 - DNA, 816 bp, Artificial Sequence
  derived and/or modified sequence
atgcccaacttccggggctaccagcagcaggatgcccacgagttcatgagatacctgctggaccacctgcacctggagctgcagggcggcttcaacggggtgagccgcagcgccatcctgcaggagaacagcaccctgagcgccagcaacaagtgctgcatcaatggagccagcacagtggtgacagccatctttggaggcatcctgcagaatgaggtgaactgcctgatctgtggcacagagagcaggaagtttgaccccttcctggacctgagcctggacatccccagccagttccgcagcaagaggagcaagaaccaggagaatggacctgtgtgcagcctgcgggactgcctgcgctccttcacagacctggaggagctggatgaaacagagctgtacatgtgccacaagtgcaagaagaagcagaagagcaccaagaagttctggatccagaagctgcccaaggtgctgtgcctgcacctgaagcgcttccactggacagcctacctgaggaacaaggtggacacctacgtggagttccccctgcggggcctggacatgaagtgctacctgctggagcctgagaacagcggccctgagagctgcctgtatgacctggccgctgtggtggtgcaccacggcagcggcgtgggcagcggccactacacagcctatgccacccatgagggccgctggttccacttcaatgacagcacagtgaccctgacagatgaggagaccgtggtgaaggccaaggcctacatcctcttctacgtggagcaccaggccaaggccggcagtgacaagctgtag

SEQ ID NO: 315496 - DNA, 816 bp, Artificial Sequence
  derived and/or modified sequence
atgcccaacttccggggctaccagcagcaggacgcccacgagttcatgcgatacctgctggaccacctgcatctggagcttcaaggaggctttaacggtgtttcacgttccgctatactgcaagaaaacagcactttgtctgcgtctaacaaatgctgcatcaacggcgcctccaccgtggtcactgccatcttcggaggcatcttgcagaacgaagtcaactgtctgatttgtggtactgagagccgcaaattcgacccgtttctcgacctcagtttggacatcccttcacagtttaggagcaagaggtctaagaatcaggagaacgggcccgtctgctcactgcgcgactgtctccgctcctttaccgacctggaggaacttgatgagaccgagctctatatgtgccacaagtgcaaaaagaagcagaagtcgactaagaaattttggatccagaagctaccaaaagtgttgtgtctgcatttgaagaggtttcactggaccgcatacctaagaaacaaagtcgacacctacgtagagtttcctctgagagggctggacatgaagtgctatctgcttgagcccgaaaactcagggcccgagagttgcctatatgatctggccgctgtcgtggtgcatcacggctctggtgtggggtccggccactacactgcctatgctacacacgagggtaggtggttccattttaacgatagcacggtgacgctgacagacgaagagaccgtggtaaaagcaaaagcctacatactgttttacgtggaacatcaggccaaggcaggaagcgataagctttag

SEQ ID NO: 315497 - DNA, 816 bp, Artificial Sequence
  derived and/or modified sequence
atgcccaactttagaggataccaacagcaggacgcccacgagttcatgagatacctattggaccatctgcacctggaacttcagggtggatttaacggggtatccaggtccgctatcctccaggagaactcaacattatcagcttccaacaaatgctgtattaatggcgcttcgaccgtggtgactgctatcttcgggggtattctccagaacgaagttaattgtctcatctgcgggaccgaaagcaggaagttcgatcccttcttggatctaagcctggacatcccttcccagttccgctctaagaggtcaaagaaccaggaaaatggtcccgtgtgctccttgagggactgtttgagatcctttacagaccttgaggaactggatgaaaccgagctgtacatgtgtcataaatgcaagaaaaagcaaaaatctacaaagaaattctggattcaaaagctgcccaaagttttgtgcctgcacttgaagcgcttccattggacagcctatttgcgtaataaagtggatacctacgtagagttccctctaaggggcttggatatgaaatgttacctgctcgaaccagagaactcaggcccagagagttgtctatatgatctcgccgctgtggttgtgcatcatgggtccggggtcgggtctggccattatacagcctatgcaactcacgaaggacggtggttccatttcaatgattccactgtgaccctgactgatgaggagactgtggtgaaagcaaaagcctacatcttgttttacgtggagcaccaggctaaggccggatccgataaactgtag

SEQ ID NO: 315498 - DNA, 1502 bp, Artificial Sequence
  derived and/or modified sequence
accagacggagcctccggagttcctccgcccccacctcgccgggtcctggagccgcagtcctcccagctgccctcctcgtggccatggagtgtccacacctgagctccagcgtctgcattgctccggactcagccaagttccccaacggctccccgtcgtcctggtgctgcagcggtctttggtagaagagtttagaaagacactctgtgctttatggcaaggcagccagactgcatttagcccagagtccttattttatgttgtttggaagattatgccaaactttaggggctatcaacagcaggacgcccatgaattcatgcgctaccttttggaccacctacacttggaacttcagggcggtttcaacggtgtttcccgctcagcaattctgcaggagaattctactctgtctgcaagtaacaagtgttgcataaatggagcatctactgttgtcacggctatattcggaggcattctccaaaatgaggttaactgcctcatatgtgggacagaatctagaaagtttgatccattcctagacctttcattagatattccaagtcagttcagaagtaagcgctctaagaatcaagaaaatggaccagtttgttcgttacgagattgtcttcgcagttttaccgacttagaagaacttgatgagacagagttatatatgtgccataaatgcaaaaagaaacaaaagtccacaaaaaagttttggattcaaaaactacccaaggtgctatgcttacatttgaaaagatttcattggacagcatatttaagaaataaagttgatacatacgtagaatttccactgagaggcctagacatgaaatgctacttactagagcctgagaacagtggcccggagagctgcctgtatgacctcgccgctgtggtggtgcaccatggttccggggttggttctggacattacacagcatacgcaactcacgaaggccgctggttccacttcaatgacagtactgtaacactgactgacgaggagactgtggtgaaggcgaaggcctacatccttttctacgtggaacaccaggccaaagctggatcggataaactttaatacctcctccaaatcatcattcaccaaccataccagagaaacatttccagttttccacaaatacttgatacaagatttaatttcattatgcacttttcaatttcctattttggatttagttttgtcaatggtagtgacttactgaacatgggcaccaactaattttgttgttgttctaccagaaaacctcagcagatgttttgatttgctgctttagttgtaataattcaatttttataggtagttgtaagaacttagtcttatttgacttttttattttatgttaatgttttcagttctcactttgaggcacatttacatcaatgcttttgttcctctcacatgctgaaagcaagatgtgttccttattgtgaagagcgacacaactgcctgctgcctttccacagctat

SEQ ID NO: 315499 - protein, 1150 aa, Artificial Sequence
  derived and/or modified sequence
MHPPETTTKMASVRFMVTPTKIDDIPGLSDTSPDLSSRSSSRVRFSSRESVPETSRSEPMSEMSGATTSLATVALDPPSDRTSHPQDVIEDLSQNSITGEHSQLLDDGHKKARNAYLNNSNYEEGDEYFDKNLALFEEEMDTRPKVSSLLNRMANYTNLTQGAKEHEEAENITEGKKKPTKTPQMGTFMGVYLPCLQNIFGVILFLRLTWVVGTAGVLQAFAIVLICCCCTMLTAISMSAIATNGVVPAGGSYFMISRALGPEFGGAVGLCFYLGTTFAAAMYILGAIEIFLVYIVPRAAIFHSDDALKESAAMLNNMRVYGTAFLVLMVLVVFIGVRYVNKFASLFLACVIVSILAIYAGAIKSSFAPPHFPVCMLGNRTLSSRHIDVCSKTKEINNMTVPSKLWGFFCNSSQFFNATCDEYFVHNNVTSIQGIPGLASGIITENLWSNYLPKGEIIEKPSAKSSDVLGSLNHEYVLVDITTSFTLLVGIFFPSVTGIMAGSNRSGDLKDAQKSIPIGTILAILTTSFVYLSNVVLFGACIEGVVLRDKFGDAVKGNLVVGTLSWPSPWVIVIGSFFSTCGAGLQSLTGAPRLLQAIAKDNIIPFLRVFGHSKANGEPTWALLLTAAIAELGILIASLDLVAPILSMFFLMCYLFVNLACALQTLLRTPNWRPRFRYYHWALSFMGMSICLALMFISSWYYAIVAMVIAGMIYKYIEYQGAEKEWGDGIRGLSLSAARFALLRLEEGPPHTKNWRPQLLVLLKLDEDLHVKHPRLLTFASQLKAGKGLTIVGSVIVGNFLENYGEALAAEQTIKHLMEAEKVKGFCQLVVAAKLREGISHLIQSCGLGGMKHNTVVMGWPNGWRQSEDARAWKTFIGTVRVTTAAHLALLVAKNISFFPSNVEQFSEGNIDVWWIVHDGGMLMLLPFLLKQHKVWRKCSIRIFTVAQLEDNSIQMKKDLATFLYHLRIEAEVEVVEMHDSDISAYTYERTLMMEQRSQMLRHMRLSKTERDREAQLVKDRNSMLRLTSIGSDEDEETETYQEKVHMTWTKDKYMASRGQKAKSMEGFQDLLNMRPDQSNVRRMHTAVKLNEVIVNKSHEAKLVLLNMPGPPRNPEGDENYMEFLEVLTEGLERVLLVRGGGSEVITIYS

SEQ ID NO: 315500 - DNA, 3453 bp, Artificial Sequence
  derived and/or modified sequence
atgcacccacccgaaactaccaccaaaatggctagtgtgcgcttcatggtcacacccactaagatcgacgatatccccggcttgagcgacacatcgcccgacctgtcttcgcggtcatcctcacgcgtacgattctcaagtcgagaatctgtaccagaaactagccgaagcgaaccaatgtccgagatgagcggggccaccacatctctggccaccgtggcattagaccctccttcagatagaaccagccatcctcaagatgtcattgaggacctctcgcagaatagtattacaggtgagcactctcagctgctggacgacggtcacaaaaaagcccgcaatgcctatctcaacaactcaaactatgaggagggggacgagtattttgacaaaaacttggctttattcgaagaagaaatggacactcgtcccaaggtgagtagcctgcttaatcggatggctaattacacaaatctgactcaaggtgcaaaagaacacgaagaggcagagaacattaccgagggtaagaagaagcccaccaagacccctcagatgggtacttttatgggtgtgtacctgccatgcctgcagaacatatttggagtgattctcttcctgcggttaacttgggtcgtgggtactgccggcgtcctgcaggcctttgctatcgttcttatctgctgctgctgtacaatgctgaccgcaatttcgatgtcggccatcgccaccaatggggtggtccccgccgggggatcctatttcatgatctcaagagcactgggtccagagttcggaggggccgttggactctgtttttacctaggcaccacctttgcagcagctatgtacatcctcggagccatcgagatttttctggtgtacatcgtgcccagagcagcaatttttcactcggatgatgccctcaaggaatccgccgccatgttgaacaatatgcgagtctacgggacagcgtttctggttttgatggtgcttgttgtgttcattggcgttcggtacgtgaacaaatttgcttcgctcttcctggcatgtgtcatcgtgtccatcctcgcaatctacgccggtgcaataaaatcctcatttgccccccctcatttccccgtgtgcatgctaggcaaccgcacgctgagttcgcggcatatcgatgtttgcagcaaaactaaggagataaataatatgacagtgcctagcaagctgtggggcttcttctgtaatagttcccagttttttaacgcgacatgcgatgagtattttgtgcacaataatgtgacttccatccagggcatcccagggttggcctcaggaatcattacagagaatctctggagcaactatctaccaaaaggcgagataattgagaaaccatcagctaaatcctccgacgtgctgggatcattaaatcacgaatatgtcctggttgacattaccacctccttcaccttactggtcggcatcttttttccatccgtgactggtatcatggcgggctctaaccggtcaggcgacctcaaagacgcccagaagagcattcccattggcactatcctcgcaatactgactacatccttcgtgtacctgtccaatgttgtgctcttcggtgcatgcattgaaggcgttgtgttacgagataagtttggcgatgcggtcaaaggcaacttggtagttgggacactgagctggccttcaccatgggtgattgtcatcggcagctttttttcaacatgcggagccggcctgcagtctctgacgggcgcccctcgcctgctccaggcaattgccaaagacaatataatcccattcttacgggtctttggtcatagtaaggcaaatggggagcccacttgggccctgcttctcaccgccgccatagccgagttggggatcttgatagcgagccttgatctagtagcaccgatcttgagtatgtttttcctgatgtgctacctcttcgtcaaccttgcatgtgctctacagaccctgctccgcacccctaattggagacccaggttccgctactatcactgggcactgtctttcatggggatgagtatctgtctggctttgatgtttatcagttcctggtactatgccattgtcgctatggtgatcgcgggtatgatttataagtatatagagtaccaaggcgcggagaaggagtggggcgacgggattagggggctttcgctctctgcagccagatttgctttgctgaggctcgaggagggacccccccacacaaaaaactggagaccacagttgctagtcttgttgaaactggacgaagatctgcacgttaaacacccacgattgctgacatttgccagtcagctcaaagcaggcaagggcttgacgattgtcggctccgtaatcgtgggtaattttctggagaattacggagaggccctcgccgctgaacagactataaagcacctcatggaagctgagaaagttaaaggtttttgtcagctagtggtggccgccaagctgcgcgagggtattagtcacctcattcagtcatgtggtctaggagggatgaagcataatactgtggtgatgggatggcccaacgggtggcggcaaagcgaggacgctcgggcttggaagacatttatcggcacagtgagggtaaccacagcagcccacctcgctctcctggtcgcaaaaaatatctcttttttccctagtaatgtagagcagttcagtgaggggaacatcgacgtgtggtggattgtccacgatggaggcatgctgatgcttctcccctttctccttaaacagcataaggtgtggaggaaatgctctatcaggatttttaccgtagcccagctggaggataattccatccagatgaaaaaggacctggccaccttcttgtatcatctcagaattgaggcagaagtggaggtcgtggagatgcatgacagcgacatctctgcttatacatacgagcgcaccctgatgatggaacagcgcagtcagatgttgcgacatatgcgcctgtcgaaaacagaaagagaccgggaggcacagctcgtgaaagaccgaaacagcatgctgcgcctgacatccatcggttccgacgaggacgaggagacagaaacttatcaggagaaggtacacatgacatggaccaaagataagtacatggcttcccgaggacagaaggccaaaagcatggaggggttccaagacttgctcaatatgcgccccgaccaatcaaatgtccgccgcatgcataccgccgtaaagctcaacgaggttatcgtgaacaagtcacatgaagccaagctcgttttgcttaacatgcctggcccgcctagaaatcccgagggagatgaaaactacatggaattcctcgaagtcctgacagaagggttggagcgcgtgctgcttgttaggggcgggggcagcgaggttatcacaatttattcgtag

SEQ ID NO: 315501 - DNA, 3276 bp, Artificial Sequence
  derived and/or modified sequence
atgagcgagatgagcggcgccaccacttccctcgccaccgtcgcactggaccccccttcagataggaccagccaccctcaggacgtgattgaggacctttctcagaatagtatcactggcgagcatagccagctcctggatgatgggcacaaaaaggcacggaacgcctacctcaataacagtaattatgaagagggtgacgagtattttgacaaaaacctggctttatttgaagaggaaatggatacgagaccgaaggtgtcatccctgttaaatcgcatggccaactacaccaacctaacacagggcgctaaggagcacgaggaagcagagaacatcactgaagggaaaaaaaaaccgaccaagaccccccaaatgggcacgtttatgggggtgtatctgccctgtctgcagaatatttttggagtaattttattcctgcgcctgacatgggtggttggtacagcaggtgttctgcaggcctttgctatagttctcatatgttgctgttgtaccatgctgaccgccatttcaatgagcgccatcgctacaaatggcgtggtgcctgccggaggaagttattttatgatctcccgagcactgggccccgaatttggtggtgccgtcggcctgtgcttttaccttggcacgaccttcgcagccgccatgtatatcctgggtgctatcgagatcttcctggtttatattgtgcctagggccgccatcttccattccgatgatgcactgaaggaatccgccgccatgctcaataacatgagggtctatggcaccgccttcctggtactgatggtcctcgtggtattcattggcgtccgctacgtgaacaaatttgcatctcttttcctggcctgcgttattgtaagcatccttgctatctacgctggtgctattaagtccagttttgcacccccgcatttccctgtctgcatgttggggaataggaccctgtccagccgccatatcgacgtatgttccaaaactaaggagattaacaatatgaccgttcccagtaagctgtggggatttttctgtaatagctcccagttctttaacgccacctgtgatgaatatttcgttcataataacgtgacaagtatccaaggaattcctggcttggcttctggaatcatcaccgagaacctgtggtccaattacctgccaaaaggcgaaataatagagaaacccagtgccaaaagcagcgacgtgctcggatctctcaatcatgagtacgtcctggttgacataaccacatcttttactctgctggtgggaattttctttccttcagttaccggtatcatggccggaagtaaccgatctggtgatcttaaagacgcacagaaaagcattccaatcggcactatactcgcaatccttactacaagcttcgtttacctttccaatgtagttctgttcggcgcttgcattgagggggtcgtgctgagagacaaattcggcgatgcagtgaaggggaatttagtggtcggcacactgagctggcccagcccctgggtgattgttataggatctttcttctccacctgcggagccggtctacagtccctgaccggtgcacccaggcttcttcaggctatcgcgaaggataacataatcccatttctccgcgtcttcggccattcaaaagccaacggggagcctacatgggcacttttgcttactgctgcgattgctgagctcgggattctaatcgcctccctggatctggtggctcctatcctctctatgttcttccttatgtgttatttgttcgttaacctagcgtgcgccctgcagacccttttgagaacacctaactggagaccccggtttagatattaccattgggctttatccttcatgggtatgtccatttgcctcgctcttatgttcatttccagctggtattatgccattgtcgcgatggtgatcgcagggatgatctataagtatattgaatatcagggcgccgagaaagagtggggtgatggaatcaggggcttaagcctcagcgcggcccggtttgcactcctccgactggaggaaggacctccccataccaagaattggcgaccccagctacttgtgctgttaaagcttgatgaagatctgcacgttaaacacccccggttactgaccttcgccagtcagttaaaggctggcaagggcctgaccattgtgggaagcgtaatcgtgggcaactttctcgagaactacggcgaagcgcttgcagccgagcaaacgattaagcacttgatggaagcagagaaggtaaaaggcttctgccagttagtggtcgctgcaaagctgagggaaggaatatcccatcttatccagtcttgtggactgggaggcatgaagcataacacagttgttatggggtggcccaatggatggcgccagagcgaagacgctcgagcatggaagaccttcatcgggaccgtgcgcgtcaccacagctgcccacttggccctgctggtcgctaagaacatttcgttctttcctagcaatgtggaacagttcagcgaagggaacattgatgtgtggtggattgtacatgacggcggcatgctaatgctcctcccttttctacttaaacaacacaaagtctggagaaaatgtagtatccggatttttacagtggcgcagttggaggacaacagcattcagatgaagaaagatttagccaccttcctgtatcatctgaggattgaggccgaagtcgaggtggtggaaatgcacgatagcgacatcagtgcctacacctatgaacgcaccctcatgatggagcaaagaagccagatgttacgccacatgagactgtcaaaaacggagcgagatcgggaggctcagctcgttaaagatcgcaattccatgctcagactgaccagtatcggatcagatgaggacgaggaaactgagacatatcaggagaaggtgcacatgacgtggaccaaagacaaatacatggcttctagagggcagaaggcaaagagtatggaaggattccaggatcttcttaacatgaggcctgaccagtctaacgtccgaagaatgcacacagctgtgaaactgaacgaagtgatagtcaataagtcccatgaagccaagctcgtgctgctcaatatgcctggaccaccacgcaatcccgaaggcgacgagaactatatggagttcttggaagtgctgaccgagggcctcgagagagtgcttctggttcgaggaggggggtctgaggtgattactatttactcatag

SEQ ID NO: 315502 - DNA, 3276 bp, Artificial Sequence
  derived and/or modified sequence
atgtcggagatgtcaggcgccacgaccagcctggcaaccgttgcactcgaccccccatcagatagaaccagccaccctcaagacgttattgaagatttatcccaaaattccattactggagaacacagccagcttctggacgatggacacaaaaaagctcgcaacgcctacctcaataatagtaactacgaagaaggagacgaatacttcgataagaatttagccctcttcgaagaggaaatggatactagacccaaggtgtcatcgcttttgaataggatggcaaactacacaaatctgacccaaggcgccaaggagcacgaggaggctgagaatattacagaagggaaaaagaaaccaacaaagacaccgcagatgggaacttttatgggcgtgtatctgccctgtttgcaaaatatttttggcgttatcctatttctgcggctgacttgggtcgtgggtacggccggcgttcttcaagcctttgccattgtcctcatttgctgctgttgtacaatgctcaccgccatttcaatgtcagcaatagcaacgaatggagtagtacccgctggcggttcctattttatgatttcccgggcacttggtcctgagtttggaggcgctgtggggctgtgtttctatctgggaactacttttgccgccgctatgtatatcttaggagctattgagatattcctggtgtatatcgtgcctagagccgccatctttcactcagacgacgccctcaaggagtcagcagcaatgcttaataacatgagagtatatgggaccgcatttcttgtccttatggtgctggtggtatttatcggtgtccggtatgttaataagtttgcctcactgttcttggcctgtgtcatcgtcagcatactcgccatctacgccggagcgatcaagagctcctttgccccacctcacttccccgtctgcatgctgggcaacagaacacttagctctcgacacattgacgtgtgttccaaaacaaaggagattaacaatatgaccgtaccgagcaagctgtggggattcttctgtaacagctcccaatttttcaatgctacatgtgatgagtatttcgtccacaataatgttacatcaatccagggaatccccgggcttgccagcggaataatcaccgaaaatttgtggagcaactatctccctaaaggcgagatcattgaaaagccgtcagccaaaagctccgacgttttgggaagtctgaatcacgagtacgtgctggtcgatatcactacatctttcacactgctcgtcggcatcttctttccatctgtgacaggaatcatggccgggagcaatcgaagcggggacttaaaggacgcccagaaaagcatccccatcggaaccattctcgctattcttaccactagttttgtgtacctgagcaatgtcgtgctcttcggtgcctgtattgaaggggtggtcttgagggacaagttcggcgacgccgtgaaaggaaatttggtggtggggactctctcttggccatctccgtgggtgattgttattggctccttctttagcacttgcggcgctggacttcaaagtctgacaggggccccccgattgctgcaggcgatcgcgaaggacaacattattcctttcctgagagtctttggccactccaaagctaacggcgagcccacttgggcattgcttctgacggcagccattgccgagttaggaatcttaatcgcttcactggacttagtcgctcccatcctgtccatgtttttcctaatgtgttacctcttcgttaacctggcctgtgccttgcagaccctgctacgaactccaaactggcggcctaggttccggtactaccactgggccctgtcatttatgggtatgtcaatatgcctggccttgatgttcatctccagttggtattacgcaatcgtggctatggttattgccgggatgatttacaagtatatcgaataccagggagctgagaaggagtggggtgatggcatccgtgggctctcactctcagcagccaggttcgcgctgctgcgcctggaagaagggcccccacacaccaaaaactggcgtccacagctcctggtgttgctcaagttggacgaagacctgcacgtcaaacacccacggcttcttacatttgcttctcagcttaaagcaggcaaaggactcaccattgtgggctcagtgattgtgggcaattttctggaaaactacggcgaagctctggctgctgagcagactatcaagcatctaatggaagcagagaaggtgaaggggttctgtcagctggtggtggctgccaaactgcgtgagggaatatcacatttgatacagtcctgcggcttgggcggaatgaagcataataccgtggtgatgggctggcccaacgggtggcgtcaaagcgaggacgcccgcgcctggaaaaccttcatcggaacggtaagagtgaccaccgcagcacatctggccctgttagtcgctaagaatatcagcttcttcccaagcaacgtggaacagttcagcgaaggaaatattgacgtttggtggatcgtgcacgacggtggaatgcttatgctcttgccattcctgctcaaacagcacaaagtgtggcgtaagtgtagcatccggatctttaccgtggcccaactggaggataattctattcagatgaagaaggacctggccacatttttataccatctgaggatcgaagcagaagtcgaggtggtcgagatgcacgactccgacatctctgcatacacctacgagcgtacccttatgatggagcaacgctcacagatgttgaggcatatgcggctctctaagaccgagagagatcgggaggcacagcttgttaaagatagaaacagcatgctgcgactgacctctataggaagcgacgaggacgaggagactgagacttaccaggagaaagtgcatatgacctggacaaaggataaatacatggcttcaaggggtcagaaagccaagagcatggaggggtttcaggatctcctaaatatgagaccagatcagtccaatgtgagacggatgcatacagccgtgaagctaaacgaggtcattgtgaacaaaagccatgaagcaaagcttgttctgctaaacatgcctgggcccccacgcaatccagagggcgatgaaaattatatggagtttctggaagtgctgacggaagggctcgagcgagtgctcctagtacgtggcggaggctctgaagtcatcactatttactcctag

SEQ ID NO: 315503 - DNA, 3426 bp, Artificial Sequence
  derived and/or modified sequence
atggcatctgtgaggtttatggtcacacctactaagattgacgacattcctgggctaagtgacacctctccagaccttagcagcaggagcagctcacgggtcagattctcttcacgagaaagcgtgccggagaccagtcggtctgagccaatgagcgaaatgtctggtgcgactacctcccttgctaccgtcgcactggatcctccatccgacaggacatcccatcctcaggatgtgatcgaggatctaagccagaattcgattaccggggaacatagtcagttgcttgacgatggccataagaaggcccgtaacgcctatttgaacaatagtaattatgaagaaggcgatgagtactttgacaaaaatctcgctcttttcgaggaagagatggacactcggcccaaagtctcctccctgcttaatagaatggccaactacacaaacctgacccagggggccaaggaacacgaggaggccgagaatattacggagggaaaaaaaaagccaactaaaacacctcagatggggacatttatgggcgtctatctcccctgtctccagaacatcttcggcgtgattctgtttttacgcctaacgtgggtagtgggaaccgccggagtgctgcaagcatttgctattgtgcttatttgttgctgctgcacgatgctgactgctatctctatgtctgccatagctaccaatggtgtggtaccagccggaggatcttatttcatgattagccgagctttggggccagagtttggaggggcagtgggactttgcttttatctcggaacaactttcgctgcggccatgtacatcctcggcgcaatcgagatctttctggtgtatattgtgccacgggctgcaattttccacagtgatgacgcccttaaagaatcggccgccatgctgaacaacatgcgcgtatacggcactgctttcctggtgctcatggtgctcgtcgtattcataggtgtgcgctatgtaaacaagttcgcctctctatttctggcctgtgtgatcgttagcatactggccatctacgctggagcaataaagagcagtttcgcccccccgcacttccctgtgtgcatgcttgggaacaggaccctgagctctcgtcacattgacgtctgcagcaagaccaaggagatcaataatatgaccgtgccatcgaagttgtgggggttcttctgcaatagttcccagttttttaacgccacatgcgacgaatattttgttcataataatgtgaccagcattcaaggcatccctgggctggcctctggtattatcacagagaacttgtggagtaattatctgcccaaaggcgagataatagaaaagccaagtgccaaatcctctgatgtgctggggagtctgaatcacgagtacgtcttagtggatattacaacctccttcacactgttggtcgggattttctttccctctgttactggcattatggcaggcagcaataggagcggcgacttgaaggatgcccagaaaagcatccccatagggactatacttgcaatcctgactacttctttcgtttatctgagcaatgtcgtgctcttcggcgcttgcatcgagggcgtggtattacgagataaattcggggacgccgttaagggcaatctcgtggtgggaacactaagctggccgtctccgtgggtgattgtgatcgggagtttcttcagcacctgtggagctggactgcagagtctgactggagccccccgactgctgcaggctattgccaaggataacattattccctttcttcgagtttttggccattctaaggcaaacggagagcctacatgggccttactactaaccgccgccattgcagaactgggaatactgatcgcgagcctcgatctggtcgcaccgattctgtcgatgttcttccttatgtgctatttgttcgtcaatctggcttgcgccctccagactctcttacggacccctaactggagaccgagattccggtactatcattgggccctcagcttcatgggaatgtcaatctgcctggccctgatgtttatttcttcatggtattacgcaattgtggctatggtgatcgccggaatgatctacaagtatatagagtaccagggtgccgagaaagagtggggggacggcattaggggtctaagcctaagcgccgcccgcttcgccctcctgcgcctcgaagaagggcctccacatactaagaactggaggccgcagttacttgtactgctgaagctagacgaggatctccacgtgaagcatccaagattgctgacattcgcatcacagcttaaagccgggaaggggttaaccattgtgggctctgtaatcgttgggaatttcctggagaactacggagaagcactggctgctgaacaaaccattaaacatcttatggaggccgaaaaagtgaagggcttttgccagctggtggtggccgcaaagttaagagaagggattagccacctgattcagtcttgcggtctcgggggaatgaaacacaataccgtggtcatgggctggcccaacggatggagacaatctgaggacgcccgagcctggaagacattcatcggcacggtgcgagttactactgcggcacatttggctctgctggtggcaaaaaatattagtttttttccgagcaatgtggagcaattttccgaggggaacattgacgtatggtggatcgtccacgacggaggtatgctgatgctcctgcctttcctactcaagcaacataaagtctggaggaagtgttcgatcagaatcttcaccgtggcacagttggaggacaacagcattcagatgaagaaagacctggctaccttcttatatcaccttcggatcgaggcggaagttgaagtcgtggagatgcacgactccgatatctcagcctacacatacgaacggaccctgatgatggagcagcgctctcaaatgcttcgccacatgcgtctctccaaaactgagagagaccgcgaggctcagctggtaaaggaccggaactccatgctgcgcttaacgtctattggctcggacgaggatgaggagaccgaaacctaccaagaaaaggttcacatgacctggacgaaagacaaatatatggccagtagggggcagaaggcgaaatcaatggaaggattccaagatctgctgaatatgcggccagatcagagtaatgttaggcgcatgcacacagccgttaagctgaatgaggtgatcgtgaacaaatcacatgaggccaaactggtcctcctaaatatgccagggccaccccgcaaccccgagggagacgagaactacatggagtttttggaagttcttacagagggccttgaaagagtgctcttggttaggggtggtggttccgaagtgattacaatctactcctag

SEQ ID NO: 315504 - DNA, 3453 bp, Artificial Sequence
  derived and/or modified sequence
atgcacccccctgagaccaccaccaaaatggccagcgtccggttcatggtaacacctaccaaaatcgacgatattccaggtttaagtgatacctcgcctgaccttagcagcaggtctagctctcgagtgcggtttagctctcgggaaagtgttccagagacatcgaggtccgagcccatgagcgagatgagtggcgctacgacctcccttgccaccgtggccttggatcccccttccgatcggacatcacacccacaggacgtgatcgaggatctcagccaaaacagcattacaggggagcatagtcagctgctcgatgatggtcataagaaggcacgaaacgcatacctgaataactctaactacgaggagggggacgagtactttgacaagaacctggccctgttcgaagaggaaatggatactcgccccaaagtaagttccttgctaaatagaatggccaactatacaaatctaacccagggtgctaaggagcacgaagaagccgagaatataactgaaggcaagaagaagcctaccaagacaccgcagatgggaactttcatgggagtatatctgccatgtttgcagaatatttttggcgtaatcctgttcttacggctaacctgggttgttggcacagccggagttttgcaagcattcgctatcgttctgatttgctgctgttgcactatgcttaccgcgatatccatgtctgcgattgctaccaacggggttgtgccagccggtggatcctattttatgatctctagggcccttggccctgaattcggcggcgcagtcggattatgcttttacctggggacaacattcgctgctgccatgtatattctgggggccatcgagatcttcctggtgtacatcgtacccagagccgccattttccacagtgatgatgcacttaaagagtcagcagctatgttgaataatatgagggtgtatgggactgcgttcctagtgctcatggtgttagtggtcttcattggcgttagatacgtgaataagttcgcttcactgttcctcgcctgcgtgattgtgtctattctggccatttacgccggtgcaatcaagtctagttttgctccaccccactttcctgtgtgtatgctcggaaacagaacgctgtcttcccgtcacattgacgtatgcagcaaaaccaaagaaatcaataatatgaccgtccctagtaaactgtggggctttttttgcaactcttcccagttctttaacgcgacttgtgatgaatatttcgttcacaataacgttacttcaatccaaggtattccaggtctggcctccggaattattacggagaacttatggtctaattaccttccgaaaggagagatcatagagaaacccagcgcgaaaagttcggatgtgcttgggagcctcaatcatgagtatgtgctggtagatatcaccacgagtttcaccctcctggtgggtatcttcttcccaagcgttacagggataatggcaggatcaaaccggtccggtgacctaaaggatgcccagaaaagcatccctattggtacgatccttgcaattttgaccacctcattcgtgtacctcagcaatgttgtcctctttggcgcttgcattgaaggtgtcgtgctgcgcgacaagttcggggacgctgttaaggggaatctagttgttggaaccttgtcctggccctccccatgggtgattgtgatcggctcatttttctcaacatgtggcgccgggctccagtccttgacaggcgcccctaggttgttgcaggcaatcgctaaggataatattatacccttcctccgggtcttcggtcacagcaaagcgaacggcgagcccacctgggctttactgctcacagctgcgatcgctgagctgggcatcttaattgcctctctagatttggtcgctcctattctctcaatgttcttcctcatgtgctatctgtttgtcaacctggcctgcgcactccagacactgctgagaacccccaattggagacccaggtttcggtactaccactgggccttatcctttatggggatgagcatatgcctcgccctcatgttcatcagctcatggtactacgcaatagtagctatggtaattgccgggatgatatacaagtacatcgaataccaaggtgccgaaaaggagtggggggatggcatcaggggactaagcttatccgccgcaaggtttgcactcctccggctcgaagaaggccctccgcataccaaaaattggagaccgcagctgctggttttgttgaaacttgacgaggacttgcatgtcaagcatcctagactgctgacttttgcctctcagctgaaagctggcaaggggctgacgattgtaggctcagtaatcgttggcaacttcttggagaactatggggaagcactggcagcagaacagaccataaagcacctgatggaagctgaaaaggtaaaaggcttctgccaactagttgtggccgctaagttgcgcgagggtatcagccacctgatccaatcctgtgggctgggcggtatgaaacacaacaccgttgtgatgggctggccgaacgggtggcggcagagcgaggacgcaagggcatggaaaactttcattgggactgtgagggttactactgccgcacatctggccttgttagtcgccaaaaacatctccttcttcccgtccaatgtcgagcaattctctgagggcaatattgatgtgtggtggattgtgcacgacggaggcatgttgatgcttcttcctttcctgctcaaacagcataaagtctggaggaagtgctccatcagaatcttcactgtggctcagcttgaggataatagcattcagatgaagaaagacctcgccacttttctgtaccacctccggatcgaggccgaggtggaggtggtggaaatgcatgacagtgatatctcggcctatacttatgagagaaccttgatgatggagcagaggtcccagatgcttcgccacatgcgactttctaagactgaaagagatcgggaggcccagttggtgaaagatcgcaattctatgctcagattaacctcgattggttcagacgaggatgaagaaaccgaaacttatcaggagaaggtgcatatgacatggactaaggacaagtacatggccagcagagggcagaaagccaaatctatggaggggtttcaagatttactgaatatgcgcccagatcagagtaacgtgcggcgcatgcataccgccgtaaagttaaacgaggtgatcgtgaataaatcacatgaggccaagctcgtccttctgaacatgccaggaccaccccgcaaccctgaaggggacgaaaattacatggagtttttggaggttctcactgaaggtttagagagggtacttctggtgcgaggtggcggatccgaagtcattactatctattcctag

SEQ ID NO: 315505 - DNA, 3453 bp, Artificial Sequence
  derived and/or modified sequence
atgcatccaccagaaacaacaacaaagatggctagtgtaaggttcatggtgacaccaaccaagatcgatgacatacccggactgtccgatacatccccagatttgtcatctcgatccagtagcagagtcagattctctagcagggaatctgtccctgagacatcaagaagcgaacccatgtccgagatgtcaggagccaccacgtctctggccaccgtcgccttggaccccccttcagaccgcacttcccatccgcaggatgtgatcgaagacctatcacagaactcgataacaggcgaacactcccaactgttggacgacgggcataagaaggctagaaatgcatacctgaacaactccaactacgaagaaggagatgaatattttgataaaaacttggctctcttcgaagaggaaatggacacccggccaaaggtcagttctctactcaatcggatggccaactacacaaacttgacccagggagccaaggagcacgaagaggctgaaaacattactgagggcaagaaaaagcccaccaagacccctcagatgggaactttcatgggcgtgtacctgccatgtctgcagaatatcttcggagtgatcttgttcctccgcctgacatgggtcgtggggacggcaggggtgctccaggctttcgctatagtgctcatctgttgctgttgtacaatgctcaccgccatttcaatgagtgccattgcaactaacggcgtggtgccggccggcggcagctactttatgatttctcgggcgctcggacctgaattcgggggcgcggttgggctctgcttttacctgggcactacctttgcggctgcaatgtatatcctgggagccattgaaatattccttgtctacatcgtgcctcgggccgcaatatttcattcggatgacgccctcaaagagagcgccgctatgctgaataacatgagagtgtatggaaccgccttcttggtgctcatggtcctggtcgtcttcatcggcgtacgctacgttaataaattcgcctccctcttcttggcatgtgtgatcgtctcaattctggcgatctatgctggagccattaagagcagctttgccccgcctcacttcccagtatgcatgcttggcaatcgcactttgagtagtcggcatatcgatgtgtgctcgaaaacaaaggagattaacaacatgactgtacctagcaagctgtggggttttttctgtaacagcagccagtttttcaatgcaacctgcgacgaatactttgtgcacaacaacgttaccagcatccagggcataccagggttagcttcaggcatcatcacagaaaacctgtggagcaactatcttcctaaaggggaaatcatcgagaaaccatccgcaaaatcctcagatgttctgggcagtctcaaccatgagtatgtactggtggatataaccacttccttcactcttctcgtgggaatcttttttccatcagtcaccgggatcatggctggctccaataggtcgggtgatctgaaggacgctcagaagtcaattccaatcggcacaattctggctattcttacaacatctttcgtgtatctgtccaatgtcgtgctgttcggggcctgtattgaaggcgtcgttctgcgcgacaagtttggcgatgccgtgaagggaaacttggtcgtgggcactctatcctggccctcaccctgggtgatagttatcgggtcctttttttctacttgtggtgctggtctgcaaagcttaacgggagcgcctaggctgctccaggcgatcgccaaggacaacattattccgttcctgagggtctttggccatagcaaagctaatggagaacccacctgggccctgctgctcacagccgctatagcggagctgggcattctgatagctagccttgacttagtagcacccatactctctatgttttttctaatgtgctacctgttcgtgaatctggcatgtgccctccagacacttctgcgtacacccaattggagacccagattccgatattaccattgggccctgagtttcatgggcatgtcaatctgcttggcgctcatgttcatcagttcttggtactatgcgattgtcgctatggtgattgctggcatgatatacaagtatattgaataccagggtgccgaaaaggagtggggtgacgggatccggggactgtccctgagcgcagctcggttcgcccttctccggttggaagaaggacccccccacacaaagaactggcgaccacagctcttggtattgttgaagttggacgaagacctgcatgtgaaacacccacgccttctcacgtttgcctctcagcttaaagctgggaagggcctcactatagtcggttcggtcatcgtagggaactttctggagaattacggggaggctctggctgccgagcagacgatcaaacatctgatggaagctgagaaggtaaaaggattctgccagttagtggtggccgctaaacttagagaagggatcagtcacctaatccaatcctgcggcctcgggggcatgaagcacaacaccgtggtcatggggtggcctaacggttggcgccaatccgaagatgcccgcgcatggaagaccttcataggtaccgttagagtgacaaccgccgcccatctagctctgctcgtagctaaaaacatctctttcttcccttctaatgtggagcagtttagcgagggtaacattgatgtgtggtggatcgtacacgatgggggaatgttgatgctgttaccctttcttctgaagcagcataaggtgtggagaaagtgctccattcggatttttaccgtggcgcagctggaggataactctatccagatgaaaaaagacttggccacctttttgtaccatttgaggatcgaggctgaggttgaagtggtggagatgcatgactcggacatttctgcgtatacctatgaacgcacactgatgatggaacaacgctcccagatgctgagacatatgcggctgagcaaaacagagagagaccgggaggctcaattggtcaaggaccgaaactcaatgctgcggctgacatctatcgggagcgatgaggacgaggagactgagacataccaggagaaggtgcatatgacttggacaaaggataagtacatggcatctcgcggacagaaggctaagagtatggagggatttcaggacctgcttaacatgcgccctgaccagtccaacgtaagacgtatgcacacggccgtcaaattgaatgaagtcattgtaaataaatctcacgaggctaagttggtcctcctgaatatgcccggacccccacggaaccctgagggcgatgaaaattatatggaattcctggaggtcctgaccgagggtcttgaaagagtactgcttgtgcgaggtggagggtccgaagtcattacgatctatagttag

SEQ ID NO: 315506 - DNA, 3453 bp, Artificial Sequence
  derived and/or modified sequence
atgcaccccccagagaccaccaccaagatggcctctgtgcgcttcatggtgacccccaccaagattgatgacatccctggcctgagtgacaccagcccagacctgagcagccgcagcagcagccgggtgcgcttcagcagccgggagagcgtgcctgagaccagccgctctgagcccatgtctgagatgtctggggccaccaccagcctggccaccgtggccctggaccccccaagtgacaggaccagccacccccaggatgtgattgaggacctgagccagaacagcatcaccggggagcacagccagctgctggatgatggccacaagaaggccagaaatgcctacctgaacaacagcaactatgaggagggagatgagtactttgacaagaacctggccctgtttgaggaggagatggacacccggcccaaggtgagcagcctgctgaacaggatggccaactacaccaacctgacccagggcgccaaggagcacgaggaggccgagaacatcacagagggcaagaagaagcccaccaagaccccccagatgggcaccttcatgggcgtgtacctgccctgcctgcagaacatctttggagtcatcctcttcctgcggctgacctgggtggtgggcacagctggggtgctgcaggcctttgccatcgtgctgatctgctgctgctgcaccatgctgacagccatctccatgtctgccatcgccaccaacggggtggtgcctgctgggggcagctacttcatgatcagccgggccctgggccctgagtttggaggagctgtgggcctgtgcttctacctgggcaccacctttgctgctgccatgtacatcctgggcgccatcgagatcttcctggtgtacatcgtgcccagggctgccatcttccacagtgatgatgccctgaaggagagcgctgccatgctgaacaacatgagggtgtatggaacagccttcctggtgctgatggtgctggtggtgttcatcggcgtgcgctacgtgaacaagtttgccagcctcttcctggcctgcgtcatcgtgtccatcctggccatctatgctggggccatcaagagcagctttgccccaccccacttccctgtgtgcatgctgggcaacagaaccctgagcagccgccacattgatgtgtgcagcaagaccaaggagatcaacaacatgacagtgcccagcaagctgtggggcttcttctgcaacagcagccagttcttcaatgccacctgtgatgagtactttgtgcacaacaacgtgaccagcatccagggcatccctggcctggccagcggcatcatcacagagaacctgtggagcaactacctgcccaagggggagatcatcgagaagcccagcgccaagagcagtgatgtgctgggcagcctgaaccacgagtatgtgctggtggacatcaccaccagcttcaccctgctggtgggcatcttcttccccagcgtgacaggcatcatggccggcagcaacagaagtggggacctgaaggatgcccagaagagcatccccatcggcaccatcctggccatcctgaccaccagctttgtgtacctgagcaatgtggtgctgtttggagcctgcatcgagggcgtggtgctgcgggacaagtttggagatgctgtgaagggcaacctggtggtgggcaccctgtcctggcccagcccctgggtgattgtcatcggcagcttcttcagcacctgtggggccggcctgcagagcctgactggagccccccggctgctgcaggccatcgccaaggacaacatcatccccttcctgcgggtgtttggccacagcaaggccaacggggagcccacctgggccctgctgctgacagctgccatcgccgagctgggcatcctgattgccagcctggacctggtggcccccatcctgtccatgttcttcctgatgtgctacctgtttgtgaacctggcctgtgccctgcagaccctgctgcggacccccaactggaggccccgcttccgctactaccactgggccctgtccttcatgggcatgagcatctgcctggccctgatgttcatcagctcctggtactatgccatcgtggccatggtgattgctggcatgatctacaagtacatcgagtaccagggcgctgagaaggagtggggagatggcatccggggcctgagcctgtctgctgccaggtttgccctgctgcggctggaggagggccccccccacaccaagaactggaggccccagctgctggtgctgctgaagctggatgaggacctgcacgtgaagcacccccggctgctgacctttgccagccagctgaaggccggcaagggcctgaccatcgtgggcagcgtcatcgtgggcaacttcctggagaactacggggaggccctggccgctgagcagaccatcaagcacctgatggaggccgagaaggtgaagggcttctgccagctggtggtggccgccaagctgcgggagggcatcagccacctgatccagagctgtggcctgggcggcatgaagcacaacacagtggtgatgggctggcccaacggctggaggcagagtgaagatgcccgggcctggaagaccttcatcggcaccgtgcgggtgaccacagctgcccacctggccctgctggtggccaagaacatctccttcttccccagcaatgtggagcagttcagcgagggcaacattgatgtgtggtggatcgtgcatgatggcggcatgctgatgctgctgcccttcctgctgaagcagcacaaggtgtggaggaagtgcagcatccgcatcttcaccgtggcccagctggaggacaacagcatccagatgaagaaggacctggccaccttcctgtaccacctgagaattgaagctgaggtggaggtggtggagatgcatgacagcgacatcagcgcctacacctatgaaagaaccctgatgatggagcagaggagccagatgctgcggcacatgaggctgagcaagacagagcgggaccgggaggcccagctggtgaaggacagaaattccatgctgcggctgaccagcatcggcagtgatgaagatgaggagacagagacctaccaggagaaggtgcacatgacctggaccaaggacaagtacatggccagccggggccagaaggccaagtccatggagggcttccaggacctgctgaacatgaggccagaccagagcaatgtgcggaggatgcacacagctgtgaagctgaatgaagtcatcgtgaacaagagccatgaggccaagctggtgctgctgaacatgcctggccccccaagaaatccagaaggagatgagaactacatggagttcctggaggtgctgacagagggcctggagcgggtgctgctggtgcggggcggcggcagcgaggtgatcaccatctacagctag

SEQ ID NO: 315507 - DNA, 3276 bp, Artificial Sequence
  derived and/or modified sequence
atgtctgagatgtctggggccaccaccagcctggccaccgtggccctggacccccccagcgacaggaccagccacccccaggatgtgattgaggacctgagccagaacagcatcactggagagcacagccagctgctggatgatggccacaagaaggccagaaatgcctacctgaacaacagcaactatgaggagggagatgagtactttgacaagaacctggccctgtttgaggaggagatggacacccggcccaaggtgagcagcctgctgaacaggatggccaactacaccaacctgacccagggcgccaaggagcacgaggaggccgagaacatcacagagggcaagaagaagcccaccaagaccccccagatgggcaccttcatgggcgtgtacctgccctgcctgcagaacatctttggagtcatcctcttcctgcggctgacctgggtggtgggcacagctggggtgctgcaggcctttgccatcgtgctgatctgctgctgctgcaccatgctgacagccatctccatgtctgccatcgccaccaatggagtggtgcctgctgggggcagctacttcatgatcagccgggccctgggccctgagtttggaggagctgtgggcctgtgcttctacctgggcaccacctttgctgctgccatgtacatcctgggcgccatcgagatcttcctggtgtacatcgtgccccgggccgccatcttccacagtgatgatgccctgaaggagagcgctgccatgctgaacaacatgagggtgtatggaacagccttcctggtgctgatggtgctggtggtgttcatcggcgtgcgctacgtgaacaagtttgccagcctcttcctggcctgtgtgattgtgtccatcctggccatctatgctggggccatcaagagcagctttgccccaccccacttccctgtgtgcatgctgggcaacagaaccctgagcagccgccacattgatgtgtgcagcaagaccaaggagatcaacaacatgacagtgcccagcaagctgtggggcttcttctgcaacagcagccagttcttcaatgccacctgtgatgagtactttgtgcacaacaacgtgaccagcatccagggcatccctggcctggccagcggcatcatcacagagaacctgtggagcaactacctgcccaagggggagatcatcgagaagcccagcgccaagagcagtgatgtgctgggcagcctgaaccatgaatatgtgctggtggacatcaccaccagcttcaccctgctggtgggcatcttcttccccagcgtgacaggcatcatggccggcagcaacagaagtggggacctgaaggatgcccagaagagcatccccatcggcaccatcctggccatcctgaccaccagctttgtgtacctgagcaatgtggtgctgtttggagcctgcattgaaggagtggtgctgcgggacaagtttggagatgctgtgaagggcaacctggtggtgggcaccctgtcctggcccagcccctgggtgattgtgattggcagcttcttcagcacctgtggggccggcctgcagagcctgaccggggccccccggctgctgcaggccatcgccaaggacaacatcatccccttcctgcgggtgtttggccacagcaaggccaatggagagcccacctgggccctgctgctgacagctgccatcgccgagctgggcatcctgattgccagcctggacctggtggcccccatcctgtccatgttcttcctgatgtgctacctgtttgtgaacctggcctgtgccctgcagaccctgctgcggacccccaactggaggccccgcttccgctactaccactgggccctgtccttcatgggcatgagcatctgcctggccctgatgttcatcagctcctggtactatgccatcgtggccatggtgattgctggcatgatctacaagtacatcgagtaccagggcgctgagaaggagtggggagatggcatccggggcctgagcctgtctgctgccaggtttgccctgctgcggctggaggagggccccccccacaccaagaactggaggccccagctgctggtgctgctgaagctggatgaggacctgcacgtgaagcacccccggctgctgacctttgccagccagctgaaggccggcaagggcctgaccatcgtgggctctgtgattgtgggcaacttcctggagaactatggagaggccctggccgctgagcagaccatcaagcacctgatggaggccgagaaggtgaagggcttctgccagctggtggtggccgccaagctgcgggagggcatcagccacctgatccagagctgtggcctgggcggcatgaagcacaacacagtggtgatgggctggcccaacggctggaggcagagtgaagatgcccgggcctggaagaccttcatcggcaccgtgcgggtgaccacagctgcccacctggccctgctggtggccaagaacatctccttcttccccagcaatgtggagcagttcagcgagggcaacattgatgtgtggtggatcgtgcatgatggcggcatgctgatgctgctgcccttcctgctgaagcagcacaaggtgtggaggaaatgttccatccgcatcttcaccgtggcccagctggaggacaacagcatccagatgaagaaggacctggccaccttcctgtaccacctgcgcatcgaggccgaggtggaggtggtggagatgcatgacagcgacatcagcgcctacacctatgaaagaaccctgatgatggagcagaggagccagatgctgcggcacatgaggctgagcaagacagagcgggaccgggaggcccagctggtgaaggacaggaacagcatgctgcggctgaccagcattggaagtgatgaagatgaggagacagagacctaccaggagaaggtgcacatgacctggaccaaggacaagtacatggccagccggggccagaaggccaagtccatggagggcttccaggacctgctgaacatgaggccagaccagagcaatgtgcggaggatgcacacagctgtgaagctgaatgaggtgattgtgaacaagagccatgaggccaagctggtgctgctgaacatgcctggcccccccaggaacccagaaggagatgagaactacatggagttcctggaggtgctgacagagggcctggagcgggtgctgctggtgcggggcggcggcagcgaggtgatcaccatctacagctag

SEQ ID NO: 315508 - DNA, 3426 bp, Artificial Sequence
  derived and/or modified sequence
atggcctctgtgcgcttcatggtgacccccaccaagattgatgacatccctggcctgagtgacaccagcccagacctgagcagccgcagcagcagccgggtgcgcttcagcagccgggagagcgtgcctgagaccagccgctctgagcccatgtctgagatgtctggggccaccaccagcctggccaccgtggccctggacccccccagcgacaggaccagccacccccaggatgtgattgaggacctgagccagaacagcatcactggagagcacagccagctgctggatgatggccacaagaaggccagaaatgcctacctgaacaacagcaactatgaggagggagatgagtactttgacaagaacctggccctgtttgaggaggagatggacacccggcccaaggtgagcagcctgctgaacaggatggccaactacaccaacctgacccagggcgccaaggagcacgaggaggccgagaacatcacagagggcaagaagaagcccaccaagaccccccagatgggcaccttcatgggcgtgtacctgccctgcctgcagaacatctttggagtcatcctcttcctgcggctgacctgggtggtgggcacagctggggtgctgcaggcctttgccatcgtgctgatctgctgctgctgcaccatgctgacagccatctccatgtctgccatcgccaccaatggagtggtgcctgctgggggcagctacttcatgatcagccgggccctgggccctgagtttggaggagctgtgggcctgtgcttctacctgggcaccacctttgctgctgccatgtacatcctgggcgccatcgagatcttcctggtgtacatcgtgccccgggccgccatcttccacagtgatgatgccctgaaggagagcgctgccatgctgaacaacatgagggtgtatggaacagccttcctggtgctgatggtgctggtggtgttcatcggcgtgcgctacgtgaacaagtttgccagcctcttcctggcctgtgtgattgtgtccatcctggccatctatgctggggccatcaagagcagctttgccccaccccacttccctgtgtgcatgctgggcaacagaaccctgagcagccgccacattgatgtgtgcagcaagaccaaggagatcaacaacatgacagtgcccagcaagctgtggggcttcttctgcaacagcagccagttcttcaatgccacctgtgatgagtactttgtgcacaacaacgtgaccagcatccagggcatccctggcctggccagcggcatcatcacagagaacctgtggagcaactacctgcccaagggggagatcatcgagaagcccagcgccaagagcagtgatgtgctgggcagcctgaaccatgaatatgtgctggtggacatcaccaccagcttcaccctgctggtgggcatcttcttccccagcgtgacaggcatcatggccggcagcaacagaagtggggacctgaaggatgcccagaagagcatccccatcggcaccatcctggccatcctgaccaccagctttgtgtacctgagcaatgtggtgctgtttggagcctgcattgaaggagtggtgctgcgggacaagtttggagatgctgtgaagggcaacctggtggtgggcaccctgtcctggcccagcccctgggtgattgtgattggcagcttcttcagcacctgtggggccggcctgcagagcctgaccggggccccccggctgctgcaggccatcgccaaggacaacatcatccccttcctgcgggtgtttggccacagcaaggccaatggagagcccacctgggccctgctgctgacagctgccatcgccgagctgggcatcctgattgccagcctggacctggtggcccccatcctgtccatgttcttcctgatgtgctacctgtttgtgaacctggcctgtgccctgcagaccctgctgcggacccccaactggaggccccgcttccgctactaccactgggccctgtccttcatgggcatgagcatctgcctggccctgatgttcatcagctcctggtactatgccatcgtggccatggtgattgctggcatgatctacaagtacatcgagtaccagggcgctgagaaggagtggggagatggcatccggggcctgagcctgtctgctgccaggtttgccctgctgcggctggaggagggccccccccacaccaagaactggaggccccagctgctggtgctgctgaagctggatgaggacctgcacgtgaagcacccccggctgctgacctttgccagccagctgaaggccggcaagggcctgaccatcgtgggctctgtgattgtgggcaacttcctggagaactatggagaggccctggccgctgagcagaccatcaagcacctgatggaggccgagaaggtgaagggcttctgccagctggtggtggccgccaagctgcgggagggcatcagccacctgatccagagctgtggcctgggcggcatgaagcacaacacagtggtgatgggctggcccaacggctggaggcagagtgaagatgcccgggcctggaagaccttcatcggcaccgtgcgggtgaccacagctgcccacctggccctgctggtggccaagaacatctccttcttccccagcaatgtggagcagttcagcgagggcaacattgatgtgtggtggatcgtgcatgatggcggcatgctgatgctgctgcccttcctgctgaagcagcacaaggtgtggaggaaatgttccatccgcatcttcaccgtggcccagctggaggacaacagcatccagatgaagaaggacctggccaccttcctgtaccacctgcgcatcgaggccgaggtggaggtggtggagatgcatgacagcgacatcagcgcctacacctatgaaagaaccctgatgatggagcagaggagccagatgctgcggcacatgaggctgagcaagacagagcgggaccgggaggcccagctggtgaaggacaggaacagcatgctgcggctgaccagcattggaagtgatgaagatgaggagacagagacctaccaggagaaggtgcacatgacctggaccaaggacaagtacatggccagccggggccagaaggccaagtccatggagggcttccaggacctgctgaacatgaggccagaccagagcaatgtgcggaggatgcacacagctgtgaagctgaatgaggtgattgtgaacaagagccatgaggccaagctggtgctgctgaacatgcctggcccccccaggaacccagaaggagatgagaactacatggagttcctggaggtgctgacagagggcctggagcgggtgctgctggtgcggggcggcggcagcgaggtgatcaccatctacagctag

SEQ ID NO: 315509 - DNA, 3453 bp, Artificial Sequence
  derived and/or modified sequence
atgcacccccccgagaccaccaccaagatggccagcgtgcggttcatggttacgccgactaagatcgatgacattcctggattatcagacacatccccagacctgtcaagccggtcatcgtcacgcgtcaggttctcctcccgggaaagtgtaccggagacttcccgtagcgaacctatgtcagagatgtctggggccaccacatcgcttgctactgtagctctcgatcctccaagtgatcgaaccagtcaccctcaggacgtgatagaggacctgtctcagaatagcatcactggggaacactcgcaattgctcgacgacggtcacaagaaggctaggaatgcatacctaaataatagtaactatgaggagggcgatgagtattttgacaagaatctagctctgttcgaggaggagatggacacaaggcccaaagtgtcctccctcctaaaccgtatggcgaattatacgaacctaacgcagggcgccaaggagcatgaagaagctgaaaacatcaccgaggggaaaaaaaagccaaccaaaacaccccaaatgggcacgttcatgggtgtgtatctcccatgccttcagaatatcttcggagtcattttgttcttgcgcctcacctgggtggtgggaactgcgggtgtactgcaggcctttgcaattgtgttaatatgctgttgttgcactatgttgactgccatttcgatgagcgcgattgccaccaatggggttgtcccagccggagggtcctactttatgattagcagggctctgggaccagaatttggaggagcagttggcctttgcttctatcttggaaccactttcgctgctgccatgtatatactcggagccatagagatatttctggtctacatcgtcccccgggctgcaattttccactccgatgacgctttaaaagagtcagcagccatgttgaataacatgagggtctacggcacagctttcctggtcttgatggtgcttgtggtgttcattggtgtgcgctacgtgaacaagtttgcctccttattcctggcctgcgtgatcgtctctatcttggccatttatgcaggggccatcaagagcagtttcgcaccacctcacttccccgtgtgtatgttgggaaaccgtacactatcttcccggcatatagacgtgtgctccaagaccaaggaaattaacaatatgactgtaccatccaagctgtggggcttcttctgcaactcctcacaattcttcaacgcaacttgtgatgagtactttgttcacaacaatgtcacctctattcagggcatccctggactcgcgtctggcattatcaccgaaaatttatggtctaactaccttcctaagggcgagatcatcgagaagccttctgcgaaaagttcagacgtgctggggtcacttaatcatgagtacgtgctggtggacattacgacttcctttaccctcctcgtgggaatatttttcccctctgtgacgggcattatggcgggctcaaatagaagtggagatctcaaagacgcgcagaagagtatcccgattgggaccatccttgctattctgactacttcatttgtgtatctgagcaacgtcgtgctgttcggagcctgcattgagggggtggtcttgcgggacaagtttggggatgctgttaaaggcaacttagtggttggcaccctgtcatggccttctccttgggtgatcgtgatcggtagcttctttagcacctgtggcgcaggcctccaatctctgactggggccccgcggctgctgcaggctatcgctaaggacaatatcattccattcctgcgggtctttgggcacagtaaggcaaacggagaacccacatgggcgttgttactgaccgccgcaattgccgagttagggatcctcattgcaagtcttgacttggttgcaccaatattatctatgttttttttgatgtgctatctgttcgttaatctggcctgcgcactccagacattactgcgtacccctaattggagacctaggttccgctactatcactgggctctgagctttatggggatgtctatctgcttggccctcatgttcatcagctcctggtactacgccatcgtagctatggttatagccggaatgatttacaagtatatcgagtaccagggagccgagaaggaatggggggacggcatacggggtctctccctgtcagctgcgagattcgccttgttacggcttgaggaaggccccccacacaccaagaattggagaccccaactccttgtgttattgaaactggatgaggacctccacgtcaagcatccccgcttactaacttttgctagccagctcaaagctgggaagggattgaccatcgtgggcagtgtaatcgtgggtaacttcctagagaactacggcgaggcgctggctgccgaacaaaccatcaagcatctcatggaagctgagaaggtgaagggcttttgccagctggtggtggccgccaaattacgagaaggaatatcccacctcatacagtcatgcggcctgggaggaatgaagcacaacacagtagtgatggggtggcccaatggctggcgacaatccgaggatgcgcgggcgtggaagactttcataggcactgtaagagtgaccaccgccgcacatttggcccttttagtcgccaaaaacatttcattcttcccctcgaatgtagagcaatttagcgaaggtaatatagacgtttggtggattgtccatgacgggggaatgctgatgcttctgccttttctcctcaagcagcataaggtctggcgaaaatgctcaatacggatttttactgtggcccagctggaggacaacagtatacaaatgaagaaggacctcgccaccttcttgtatcacctgcggatcgaggcggaagtggaagtggtggagatgcacgatagtgacattagtgcgtacacatatgaacgaaccctcatgatggagcagcgatctcagatgctcagacacatgcgactctcaaagacagaaagggaccgcgaggcgcagctggtaaaggaccgcaactcaatgctgcgactgacttccattggcagcgatgaggacgaagaaactgagacataccaggagaaggtacacatgacatggaccaaggacaagtatatggcctctcggggccagaaagcaaagagtatggagggatttcaagatctgctgaatatgcgtcctgatcaatctaatgtgcggcggatgcacacggcagttaaattgaatgaagtcattgtgaacaaaagccacgaagccaaacttgttctgctgaacatgccagggccaccaaggaacccagagggcgacgagaattacatggagttcctggaggtgctcaccgaggggctggaacgagtcctcctggttaggggtggcggcagcgaggtcatcaccatctactcgtag

SEQ ID NO: 315510 - DNA, 3276 bp, Artificial Sequence
  derived and/or modified sequence
atgagcgagatgagcggcgccaccaccagcctggccaccgtggccttggatccgccttccgaccgtacttcccaccctcaggatgtcatcgaagacctaagccagaattcgatcactggcgaacacagccagttgctggacgatgggcacaaaaaagcaaggaatgcttaccttaataactctaactacgaagaaggggatgaatatttcgacaagaacctcgccttattcgaggaggaaatggatacccgaccgaaagtttcctcgttgctgaatcgtatggctaattatactaatctaacgcagggggccaaagaacacgaggaagcagaaaacattacagaaggcaagaaaaagcctaccaagacaccacagatgggtaccttcatgggcgtgtacctgccttgtctgcagaacatcttcggcgtaatattgttcctcagattgacctgggttgtgggcactgccggggtcctccaagcttttgcaatcgtgcttatctgctgttgctgtaccatgttgacagccatcagtatgtccgccatagcaaccaatggagtggtccccgcggggggatcctacttcatgatctccagagcgctgggccccgaatttggcggggccgtaggactctgtttctatctgggcaccacttttgccgccgccatgtatatcctcggcgcgattgagatttttttggtttacatagtgcctagggcagccatcttccactctgacgatgctctgaaggagtcagctgcaatgctcaacaatatgagagtatacggaaccgctttcctcgtgctcatggtccttgtggtctttataggggtccggtatgtaaacaagtttgcttctctgtttctcgcctgcgtaatagtatctattctggctatctacgctggcgccataaaaagtagttttgcccctccccattttcccgtttgcatgcttggaaacagaacccttagctcacgacacatcgatgtctgttccaaaacgaaagagataaacaacatgaccgttcctagcaagttatgggggtttttctgcaattcttcccagtttttcaatgcaacgtgtgatgaatacttcgtgcacaacaacgtgacctctatccagggcatccctgggttagcctctggcatcataactgaaaatctatggagtaactacttgcccaaaggtgaaattatcgaaaaaccctccgcaaaatcctccgatgtcttaggatcactgaaccacgaatatgtactggtggacattacaacctcattcacactgctcgtgggcattttctttccgtcagtgacggggatcatggcaggatctaatcggagcggagatttgaaggatgctcagaaatcaatccccattggaacgatcttagcaattctgacaacctcctttgtgtacttgagtaatgtggtcctgtttggagcctgcattgagggggtggtcctccgggacaaattcggggatgctgtaaaggggaacctcgtggtgggcaccctgagttggccgtccccttgggtcatcgttattggatctttcttctctacatgcggagcaggcctccagtctctaacaggtgcgcctcgcttgctgcaagcaatcgcaaaagataatatcattccctttctgcgcgtctttggccattctaaagcaaacggcgaacccacatgggctctgctgctgacagctgcaatcgcggagttaggcatcttgattgcgagcttggacctggtcgccccaatcctgtctatgttcttcttgatgtgctatctgttcgtcaacttggcctgtgccctgcagaccttactccgcactccaaattggcgccctcgatttcggtattatcattgggctctcagcttcatggggatgtctatctgtctggccctgatgttcatatcaagttggtattacgccatagtggctatggtcattgcgggcatgatctataagtatattgagtatcagggtgcggagaaagagtggggcgacgggatcagaggacttagtctgagcgcagcccgcttcgctctgctgcgactggaggagggacctcctcatactaagaattggcggcctcagctgttggttctactcaagctggatgaggacctccatgtgaagcaccccaggctccttacgttcgccagccagttgaaggccggcaagggactgaccattgtggggtctgttattgtgggaaatttccttgagaattatggtgaagctcttgcggcggaacagaccataaaacatttgatggaggccgagaaggtgaagggcttctgtcagctagtcgtcgcagccaaactccgcgaaggaatttcccatctgatacagagttgtggactgggtgggatgaagcacaatactgtggtgatgggatggcctaacggttggaggcaatctgaagacgcgagagcctggaagacatttatcggcactgtgcgcgtgacaaccgccgcccatctcgctctgctggttgccaaaaatatcagctttttcccgagcaatgttgagcagttttcagaaggcaatatcgatgtctggtggattgttcacgatggcgggatgctaatgttgctccccttcctgctaaagcaacacaaggtttggaggaaatgctccatccgtatcttcactgtggcacagctggaggataacagcatacagatgaagaaagatctcgccaccttcttatatcacctgcggatcgaggcagaagtagaagttgtggaaatgcatgattctgatatcagcgcttacacttatgaaaggactcttatgatggagcagcgaagtcagatgctcagacatatgcggctgtcgaagaccgagagggaccgggaagcacagctggttaaggacaggaattccatgctccgcttaacatcaattggctcagacgaagacgaggagactgaaacctatcaggagaaggtgcacatgacttggacaaaagacaaatacatggcctcccggggccagaaggcgaagtcaatggaaggcttccaggacctgctgaacatgcggccggaccagtctaacgtgagacgaatgcacacagcagttaagcttaatgaggtgatcgttaataaatcacatgaagccaaactcgttctgctgaatatgccgggcccaccacgtaacccagagggggacgaaaactacatggagttcttggaagtcctgacagaaggtctcgaacgggtgttactggtgcgaggcggcggcagcgaagttatcactatttacagctag

SEQ ID NO: 315511 - DNA, 3276 bp, Artificial Sequence
  derived and/or modified sequence
atgagcgagatgagcggcgccaccaccagcctggccaccgtggcccttgatcccccttctgatcgaacttcacatccgcaggatgtgattgaggatctctcgcagaactccataacgggcgaacacagccagctgctcgacgacggtcacaaaaaggcgcgcaacgcttacctgaacaattcaaattatgaggagggggatgagtacttcgacaaaaacttggctcttttcgaggaggaaatggatacccgcccaaaggtttcctcacttctcaacagaatggcaaattatactaacctgactcagggtgcgaaggaacacgaggaggctgaaaacatcaccgagggaaaaaagaaaccaactaagacacctcagatgggcacttttatgggagtctatctgccttgtctccaaaatatattcggtgtgatcttatttttaaggttaacgtgggttgtgggcaccgctggggttctacaggcttttgccatcgtgctgatctgctgttgctgcaccatgctgaccgccatctcaatgagtgccatcgcaacaaacggagttgtccctgctggggggtcttacttcatgatctctagggctctggggcctgagtttggaggggctgttggcctatgcttctatctgggtaccacttttgctgctgccatgtacattctgggtgctatcgagattttcttagtgtatatcgtgcctcgggctgcaatcttccacagcgacgacgctctcaaagagagcgccgctatgctcaataacatgcgcgtatatgggacagcctttctcgtgttgatggtgcttgtcgtctttatcggagtgaggtatgtgaacaagttcgcctcgctcttcctggcctgcgttatcgtctcgatccttgccatttacgctggggctatcaagtccagtttcgcaccaccacattttcccgtctgtatgctgggcaaccggacattatcttcccggcacattgatgtttgctctaaaaccaaagagataaataatatgaccgttccatcgaagctatggggcttcttttgtaattctagccagttcttcaatgcgacttgcgatgagtatttcgtgcacaataacgtgacctctatccaggggatcccagggctggcaagcgggatcataactgagaatctttggtctaattatctgcccaaaggagaaatcatcgagaagccctcagccaaaagctccgacgtgctcggctccctcaaccacgaatacgtactcgttgatataacaacctcctttaccttgctggtcggtatattctttccctcggtcacaggaattatggcaggctccaaccgttccggcgacctcaaagacgcccaaaagtccatccccattgggaccattctggcaatcctcaccacctcatttgtctatctgtccaatgtggtcctgttcggggcctgtatcgagggggtggttctccgcgacaaattcggtgatgccgtgaagggcaacctagttgttggtaccttgtcttggccttcaccctgggtaattgtgattggatctttcttttcaacctgtggtgcaggattacaatctttaacgggggccccaaggctgctccaggcaattgccaaggacaacataatccctttccttagggtgtttggacacagcaaggccaacggggagccgacttgggccctgttgttaaccgccgcgattgcggaactcgggatcctcattgcatccctagacctcgttgcacctatactcagcatgttcttcctaatgtgttacctgttcgtcaatctcgcttgtgccttgcagacactgttacgcacccccaattggcgcccccgatttaggtattaccactgggcgttatccttcatgggcatgagcatctgtttggccttgatgtttatctcgagctggtactatgctatcgttgcaatggtcattgccggtatgatttacaagtacatcgagtatcaaggggccgagaaagagtggggcgacggtatccgggggctctctttgagcgcagcacgcttcgctctactgcggctcgaggaggggccaccccatacaaagaactggaggccacagctgctggtgctgctgaaactcgatgaggatctgcacgttaagcatcctaggctgttgaccttcgcgtcacaactaaaagcgggcaagggtctgaccatcgtcggtagtgtaatcgtcggtaactttctcgagaactatggcgaagcactcgcggccgagcagacaatcaagcacctgatggaagccgagaaggtgaagggcttctgtcagttagtcgtagctgctaaacttcgcgagggcatttcgcacttgatccagtcatgtgggctaggtggaatgaaacataacaccgtcgttatgggctggcccaacggctggcgccaaagcgaggatgcaagggcgtggaagaccttcataggtaccgtgcgcgtcaccactgctgctcacctggcactgttggttgccaaaaatatttcattcttccccagtaacgtggagcaattttctgagggaaacattgatgtgtggtggattgtgcacgacgggggtatgctcatgctcttgccttttttattgaagcaacacaaggtgtggagaaaatgctccattagaatttttacagtcgcccagctggaagataacagcatccagatgaagaaggaccttgctacctttctgtatcacctcaggatcgaggctgaggtggaggtggtcgagatgcacgattcggatatttccgcctacacgtacgaacgaacattgatgatggagcagcgtagccagatgttacggcacatgaggttaagcaagaccgaacgcgacagggaggcgcaactggtgaaagatcgcaatagcatgttgcgccttactagcattgggtccgacgaagatgaggaaacggagacctatcaggagaaggtgcacatgacctggacaaaggacaaatatatggcttcgagaggacagaaggccaagtcaatggaagggttccaggaccttctgaatatgcggccagaccaaagtaatgttcggagaatgcataccgcagtgaagctgaacgaggttatcgttaataaatcccatgaagccaaattagtcctgctgaacatgccaggccctccacgaaatcccgaaggcgacgagaattatatggaatttcttgaagtgttgacggagggactagagagggttttactggttcgcggggggggttccgaagtgatcacaatatactcctag

SEQ ID NO: 315512 - DNA, 3426 bp, Artificial Sequence
  derived and/or modified sequence
atggccagcgtgcggttcatggtgacccccaccaagatcgacgacatccctggtttgagcgatacctcaccagatctgagctctagatctagcagccgtgttaggttcagttcacgagaaagcgtgcccgaaacatcaagaagcgagcctatgagcgagatgagtggtgccacaacgtcgctagcaacagtcgcgctggaccctccgtctgacagaaccagtcaccctcaggacgtgatcgaggatctgtcgcagaactccattaccggggagcactcacaactactcgacgacggccataaaaaagccagaaatgcttacctcaataactctaactacgaagagggagacgaatacttcgataaaaatctcgcactcttcgaggaggaaatggataccaggccaaaagtgtcatcgctgctgaacagaatggccaactacaccaatttaacacagggagccaaagagcacgaagaggcggagaatattacagagggtaaaaaaaagcctacgaagactccacaaatgggaacgttcatgggcgtgtatcttccgtgcctccagaatatatttggtgtgatcttgtttctgaggttaacatgggtcgtcggaactgcaggagttttacaggcattcgcgattgtcctgatttgctgctgttgtacaatgctcacagctatatctatgagcgcaatcgcaaccaatggagtcgtacctgcgggcggcagctacttcatgatcagcagggctcttggccccgagttcggcggcgcggtcgggctttgcttttacttaggcaccacgtttgccgccgcaatgtatatattaggggctatagagatcttcctggtatacatcgtgccccgagccgctatttttcatagtgacgatgcccttaaggagtccgcggcaatgctgaacaatatgagagtgtacgggaccgcttttcttgtcctgatggtcttggtggtttttattggcgtgcgatatgtgaacaagtttgcaagcctgttccttgcctgtgtgatcgttagcattctggcgatctacgccggagctattaagagctccttcgcccctccccactttccagtttgcatgctgggcaaccggacactgtcctctcgccatatagatgtgtgctcaaaaacgaaggaaattaacaacatgactgtgccatctaagctgtggggatttttttgcaactcgtcacagtttttcaatgccacctgcgacgaatatttcgtccacaacaatgtgacgtcgatccagggaatcccgggcctcgcttccgggattattactgagaatttgtggtcaaattacctgccaaaaggtgagataatcgagaaaccatcagcaaagagcagcgacgtattgggcagccttaaccatgagtatgtgcttgtagacatcactacttcctttactcttctagtagggattttcttccctagcgttacaggcatcatggcgggtagcaaccgctccggggatttgaaggacgctcaaaagagcataccgatagggaccatcctagctatactgaccacaagcttcgtgtatctcagcaatgttgtcctgtttggggcatgcatagaaggggttgtcctgcgtgataagttcggggatgccgtaaagggcaatctggttgttggcaccctgagctggccatccccctgggtgatcgttatcggttctttctttagcacatgcggagccggtcttcagagtctgacaggagctccaagactgctccaagctatcgccaaggataacatcataccatttctaagggtatttgggcacagtaaggccaacggggaacctacctgggccctattgctgaccgccgctattgccgagttgggcatcctgatcgcctctttggatttggtcgcacctatactctctatgttttttttgatgtgctatctgttcgtgaatctggcctgcgccctgcagacactcctgaggactcctaactggcggcccagatttcgctactaccattgggccctttctttcatgggcatgagcatttgcttggcgcttatgttcatttcaagttggtattatgccattgttgccatggtcatcgctggaatgatatacaagtatattgagtatcagggcgccgaaaaggaatggggagacggcatccgcggcctgagcttgagtgccgcccgcttcgcactgttgagactggaagaaggccctccacacacaaaaaattggcgcccgcagcttctggtcctcctcaagctcgacgaggatctacatgttaaacacccaagactcctcacttttgcctcccagctgaaagccggtaaaggattgacaattgtggggagcgtgattgtgggcaattttctcgaaaactacggagaggccctagcggctgaacagaccatcaaacacctaatggaagctgagaaggtgaagggcttttgccagctggttgtggcagcaaagcttcgcgaggggatctcccacctcatccagagctgcggattgggtggcatgaagcacaacaccgtggtgatgggctggcccaacggctggcgacaatctgaagacgcccgcgcctggaagactttcataggtaccgtcagggttaccaccgccgcccacctcgccctcttggtggctaagaatatctcgttctttccatctaatgtcgaacagttctctgagggcaatatcgacgtttggtggattgttcatgacggaggtatgctcatgctgctgccattcctattgaaacaacataaggtgtggcgtaaatgtagcattagaatttttactgtagcacaacttgaagacaatagcatacagatgaaaaaggatctggcaacgtttctgtaccatcttcggatagaggcagaggtggaggtggtcgagatgcatgattccgatatatcagcatacacatatgagcgtactcttatgatggagcagcggagtcagatgctgcggcacatgcggttgtctaagacagagagggatcgcgaggcacagctggttaaggacaggaattccatgctgagactaacaagcatcggtagcgacgaagatgaggagacggaaacctatcaagagaaggttcacatgacctggacaaaggataagtacatggccagccggggacagaaggctaagtccatggaagggtttcaggatctgctgaatatgcgccctgatcagtctaatgttcgcagaatgcatacagcagtgaagctcaatgaggtaatagtcaacaagtcccatgaggccaagctggttctcctcaacatgccagggccaccacgaaacccagaaggggatgagaattatatggaattcctagaggtgttgactgagggactggaacgcgtgctgctggtcagggggggcgggagtgaagtcatcacaatctactcatag

SEQ ID NO: 315513 - DNA, 3453 bp, Artificial Sequence
  derived and/or modified sequence
atgcacccccccgagaccaccaccaagatggccagcgtgcggttcatggtaacgcccacaaaaatcgacgatattcccggactttccgacacatcacctgacctcagctctcggtccagctcccgggtccggttcagtagcagagaatcagtgcctgagacctcccggagtgagcccatgagcgagatgtctggggcgaccacctcccttgctactgtcgcactggatccacccagcgatagaacatctcacccgcaggacgtcatcgaggatctgagccagaattctattacaggagaacactcgcagttgcttgatgacgggcataagaaagcaaggaatgcatatctcaataatagcaactacgaggagggcgacgaatattttgataaaaacctggcactgtttgaagaggagatggacacccgccctaaagtgagctcccttctgaaccgcatggccaattataccaatctaacacagggcgccaaagagcatgaagaggcagaaaacatcactgaaggcaaaaagaagcccacaaaaacgccccaaatgggaaccttcatgggggtgtatttgccctgtctgcaaaacatttttggtgtcatcctgtttttgaggttgacctgggtggttggaaccgcaggagttttgcaggcgtttgcaatcgtgttgatttgttgttgttgcacgatgctgactgcaatatcaatgtcagccattgcaacaaacggcgtggttccagcgggcggttcctactttatgatttctagagcactgggcccggagtttggcggcgccgtgggcttatgcttttatctcggcacaacatttgcagcagctatgtacatcttaggagctatcgaaatatttctggtttacattgtgccgcgggccgccatctttcactctgatgatgctctgaaggagtctgctgcgatgcttaataatatgagggtgtacggaaccgccttcctcgtcctcatggtgctggtcgtcttcatcggcgttagatatgtgaataaattcgcaagcctcttcctcgcctgcgttattgtaagcatcctggcaatatacgccggcgctatcaagtcctcatttgctcctccacattttcccgtgtgtatgctgggaaataggaccctctctagtcgccatatcgacgtgtgttccaagaccaaagaaatcaataatatgactgtcccttctaagctgtgggggtttttttgtaatagcagccaattttttaacgccacttgcgacgagtatttcgtccataacaatgtaacttcaattcaaggaattcccggactggctagtgggatcatcactgagaacctgtggtcgaattatctacctaaaggagaaatcatcgagaaaccttctgcaaagtcgtccgacgtactggggtccctgaatcacgagtacgttctggtggacatcaccaccagttttactcttctagtggggatcttttttccttcagtgaccgggataatggccgggagcaatcgcagcggggacctgaaagacgcgcagaagtccataccaatcggtacaattctagctattctgacaacgagctttgtttacctgtctaacgtggtgttgtttggtgcctgcattgagggcgtcgtgctgcgagacaaatttggggacgccgtcaaaggcaacttggtggtgggaacactctcatggccatccccttgggtgatagtcattggtagtttcttctccacttgtggagcaggcctgcagagcttgactggcgcccctcgcctgctccaagctattgcaaaggataacattattccttttctgcgagtgttcggccatagtaaagcgaatggagagcctacttgggccctgctgttgactgctgctatcgctgagctgggtatcctcatcgccagtctggatttagtggccccaattttatctatgttttttcttatgtgctacctgttcgtcaatctagcctgtgcccttcagacactgcttaggaccccgaactggcgaccaaggttccggtactaccattgggccttatcattcatggggatgtccatctgccttgctctcatgttcatttcatcctggtattatgccatcgtggcaatggttatcgccggcatgatctacaagtacatcgagtaccagggcgccgaaaaggagtggggggatggaatccgagggctctcgctgagcgccgcgcggttcgccctcctgcgcctagaggagggccccccccacacaaaaaactggaggcctcagctgcttgtgttgttgaagttagatgaagacctgcatgtcaagcatcctcgcctgctcacctttgcaagccagcttaaagcaggcaagggactgaccatcgtaggaagtgtcattgtgggcaattttttggagaattatggcgaagcactcgccgctgaacaaacaatcaagcatctgatggaggccgagaaggtgaagggcttttgtcagctggttgtagcggcaaagctccgagaaggaatcagtcaccttatccaaagttgtggactcggggggatgaagcataacactgttgtaatgggctggccaaacggctggagacaaagtgaagatgcgcgtgcctggaaaacattcatcggaacagtgcgcgtgacgacagcagcccatcttgccctgctcgttgctaagaatattagctttttcccatctaatgtggagcagttctcagaggggaatatagacgtctggtggatcgtgcatgatggcggaatgctgatgctcctcccgttcctgctcaagcagcataaggtctggagaaaatgcagcataaggatatttaccgtagcccagttggaggataatagcatccagatgaaaaaggacttagccactttcttataccacttgaggatcgaagccgaggtggaagtggttgagatgcacgatagcgacatcagcgcttatacctatgaaaggacgcttatgatggagcagagatctcagatgctgagacacatgcgcctgtccaagaccgagagagacagggaagctcagctcgtgaaggatagaaattccatgctgcgactaacctccattggtagtgacgaagacgaggagaccgaaacctatcaagagaaagtccacatgacatggacgaaagacaaatatatggccagcagaggccagaaggctaaaagcatggagggctttcaggatttgttaaacatgcgccctgaccagtccaatgtgagacgcatgcatacagcagttaaactcaacgaggtgattgttaacaagtcccacgaagcaaaactggtcctcttaaacatgccagggccccccagaaaccctgagggcgatgaaaattatatggaatttctggaagtgctgacagagggtctggagagggttttgttagtacggggcggcggatcagaggttatcacgatatactcctag

SEQ ID NO: 315514 - DNA, 3453 bp, Artificial Sequence
  derived and/or modified sequence
atgcacccccccgagaccaccaccaagatggccagcgtgcggttcatggtgacccctacgaagatcgatgatattcccggactgagtgacacatcccccgatctcagttctcggtcctcctcacgagttagattttcctcccgagaaagcgtgccagaaacatctcgcagtgagccaatgagtgagatgtcgggcgccactacctcccttgcgacagtagccctagacccaccttccgaccgcacaagccacccgcaggacgtcattgaggatctgtctcagaactctatcacaggggagcactctcagttgctagatgatgggcacaagaaggctcgtaacgcctacctaaacaattctaattacgaggagggcgacgagtacttcgataagaatctcgctctcttcgaagaggagatggacaccagacccaaggtgtcatctttgctgaatcgcatggctaattataccaatcttactcagggcgctaaagaacacgaggaagcagaaaatataacagaaggaaagaagaagcccacaaagacaccccagatgggaacgttcatgggagtgtatttaccatgtctccaaaacatttttggcgtgattctttttctgagactcacctgggttgtggggacggcgggcgtgcttcaagcctttgccattgtgctcatttgctgctgttgcactatgctaacggcaatatccatgtcagccatagctacaaatggcgtagtgcctgcagggggttcttactttatgatttccagagctctggggcccgaattcggcggtgccgtcggtttgtgcttctacttgggaacaacatttgccgccgctatgtacattttgggcgcgatcgagattttcctggtgtatatagtgccgcgcgccgcaatatttcattctgacgatgccctgaaggagtccgcggccatgctgaacaatatgagagtttacgggactgcgttcctcgtgttgatggtgttagttgtttttattggtgtacggtacgtgaataaattcgcgtccctcttcctcgcctgtgtgatagtttcgatcctggctatctatgctggcgccattaagtcaagcttcgccccccctcattttcctgtgtgcatgcttgggaacaggactctttcgtcacgccatattgatgtctgcagtaagaccaaggaaatcaacaatatgaccgtcccctccaaactgtgggggttcttttgcaattcaagccaattttttaatgcaacgtgtgatgaatattttgtgcataataacgtcacatcaattcagggcattccgggcctggcaagcgggatcattaccgagaatctatggagcaattatctcccgaaaggagagattattgaaaaaccgtccgcaaagagctctgacgtcctgggaagtctcaaccatgagtatgtgctagttgacatcaccacgtcttttactctattagtcggcatcttcttccctagcgttactggaataatggctgggagcaacaggagcggggatctaaaggatgctcagaaatctatcccaatcggtacgattcttgctattctgaccacatcttttgtttacctcagcaatgttgtcctcttcggcgcttgtatagaaggtgtggtgctgcgggacaaatttggcgacgccgtcaagggaaatcttgtggttggtaccctgtcctggccgagtccatgggttattgttataggatccttttttagcacgtgcggagcagggctgcaaagtttaaccggcgctccacggctgttacaggcgattgccaaagataatatcattccattcctgcgcgtgtttgggcacagtaaagcaaacggtgagccaacctgggctctgctacttactgcagcgatcgctgagttaggaattttgatcgcttccctggaccttgtagcccccatcctgtccatgttttttcttatgtgttacctttttgtaaacctcgcctgcgcactccagaccttgctccgcactcctaattggcggcctcgcttccgctattatcactgggcactgagcttcatgggaatgtctatttgcctggcactcatgttcatctcctcctggtattacgcaatagtggctatggtgatagccggaatgatatataaatatatagagtatcagggtgcagaaaaagagtggggcgatgggatccgcggacttagcttgagcgccgctcggttcgccttgctgcgcttggaggagggccctccccataccaaaaactggaggccacagctgttggtactcctcaagcttgatgaggaccttcacgtcaaacacccacgcctgctgacatttgcctcacaattaaaggctgggaagggactgaccattgtcggcagcgtgattgtgggcaattttctcgaaaattatggggaagcgcttgcagctgaacagacaatcaagcatctcatggaggccgaaaaggtgaaaggattctgtcagttggtcgtggccgccaaactaagggaaggtatcagccatctgattcaaagctgtggcctgggggggatgaagcataataccgtcgtaatgggctggccaaatgggtggaggcagagcgaagacgctcgggcttggaaaacattcattgggaccgtacgagtgaccaccgcggctcatttagcccttctggtggcgaagaacattagcttcttcccctccaacgtagagcagttctcggagggcaatatcgatgtgtggtggatcgtgcatgacggcgggatgctgatgctgctcccctttctccttaaacagcataaagtctggagaaagtgctccattcgtatcttcacggtggcccagctggaggataactccattcagatgaagaaggacctggccacatttctctatcacttgcgcatcgaagccgaagtggaagtggtggagatgcacgatagcgacatctcggcatacacatatgagagaacacttatgatggaacagcggagccagatgcttcggcacatgaggttgagtaaaacagaacgagatagggaagcacaattggtgaaggacagaaacagtatgctaagattgaccagcatcggctctgatgaggacgaagagactgagacttaccaggagaaggttcatatgacctggacaaaggataagtacatggcgtcgaggggtcagaaagccaaaagtatggaaggctttcaggacctcttgaacatgcgtccggaccagtccaatgtacggagaatgcacaccgccgttaaactgaatgaagtgattgtaaacaaaagccatgaggcaaaactcgtgctcctgaacatgcctggcccccctcgaaaccccgaaggtgatgagaattatatggaatttctggaagttctgaccgaagggctagagagggtgctcttggtaagaggaggggggtccgaagtgatcaccatctattcatag

SEQ ID NO: 315515 - DNA, 3453 bp, Artificial Sequence
  derived and/or modified sequence
atgcacccgccagagacgacaacaaagatggcatcagttagatttatggtgactcctaccaaaattgatgacattccgggacttagcgacacatctccggacttgagcagtcgaagctcctctagggtccggtttagtagccgggaatctgtgccggaaacgtcaaggtccgagcccatgtctgagatgagcggcgctaccacctccctagctacagtggcactggaccctccatccgataggacttcacatcctcaggatgtcatcgaggatctctcacagaattccatcacaggcgaacactcccagcttcttgacgatggtcacaagaaggctcggaacgcttacttaaataattctaattacgaagaaggcgacgagtacttcgacaaaaacctcgccctcttcgaggaagaaatggatacccgaccaaaagtttcgtctctcctgaaccgaatggcaaactacacaaacctgactcaaggcgctaaggagcatgaggaagccgagaacatcacggaaggcaagaagaagccgactaaaactccacaaatggggactttcatgggagtatacctgccctgcctacagaatattttcggcgtgatcctgttccttcgtctgacttgggtcgttggtaccgctggtgtgttacaggcttttgccattgtactgatctgctgctgctgcacaatgctgaccgctatcagcatgagtgccatcgccactaatggcgtggtcccagccggagggtcatactttatgatttcccgggcactgggtcctgagttcggtggcgctgtgggcctctgcttctacctcggcactactttcgcagctgccatgtacattctgggagcaatcgaaatttttctggtgtatatcgtgccccgagctgcaatttttcacagcgatgatgccctgaaggagtccgctgccatgttgaataacatgcgtgtgtacggtaccgcatttctcgtcctcatggtcctggtggttttcataggtgtacggtacgtcaacaagtttgctagccttttcttagcctgtgtgattgtgtccattctggcgatttacgccggagctatcaagtcatcttttgcgcctccccacttccccgtgtgtatgcttggcaatagaactctgtcatccagacatatcgacgtgtgtagcaagaccaaagagataaataatatgacggtgccctctaagttatgggggtttttctgtaactcctctcagttctttaatgccacctgcgacgagtacttcgtccacaataacgtcactagcatccagggcatacctggcctagcctctggcattattacggaaaatctgtggtctaactatttaccaaaaggtgaaattatagagaagcctagcgcaaaatctagtgatgttctgggcagcctgaaccatgagtacgtgctggtggatataactacgtctttcacgctcctcgtgggaatctttttcccaagcgtaactggtattatggccggatccaatcggagcggcgacttgaaagacgcgcagaagtctattcctatcggaactatcctcgccatactgacaacctcctttgtatatttgtctaatgtggtattattcggagcttgtattgagggcgtggtgctccgcgataagtttggggacgcggtcaaaggaaatctagtggttggcaccctctcctggccaagtccgtgggtaatcgttatcggttccttcttttccacatgcggtgcgggactgcagagcctgaccggcgcaccgaggctgttgcaagccattgctaaagataacatcattccttttctgagagtgttcggacactccaaagccaatggggagccaacctgggcacttctgttaacggccgctattgccgagctgggcatcttaattgctagcctggatcttgttgcacctatacttagtatgttctttctaatgtgttatttgttcgtcaatctagcatgcgcactgcagaccctcctgcggacccccaactggcgaccgaggtttcgctattatcactgggccctgagttttatggggatgagcatctgtctcgcgttaatgtttatcagtagctggtattatgctatcgtggctatggtgatcgcgggaatgatctacaaatacatagagtaccaaggcgctgagaaggagtggggggacggaatccggggtctttccctttcagctgcacggttcgccctgctcaggctggaagagggcccaccacacacgaagaactggcgaccccagctgcttgtcttactaaagctggacgaagacctgcacgttaaacaccctcggctcctcacttttgcatcccagctgaaggccggaaagggcctgaccatcgttggatctgtgatcgtgggcaattttctcgagaattacggtgaggccctggctgcagaacagaccatcaagcatctcatggaggccgagaaagtcaaggggttctgtcagctcgttgtcgcggcaaaattacgggaaggcatctctcaccttatccaatcgtgtggattaggaggcatgaaacataatactgtcgtcatgggctggccaaatggctggcgtcaaagtgaggacgccagagcttggaaaacattcattgggactgtgagagtcacaactgcagctcatctggcgctgctagtggccaaaaatatctccttctttccttcgaacgtggagcagtttagtgaaggaaacatcgatgtgtggtggatagttcatgatgggggtatgctgatgctgctgccctttctactgaagcaacacaaggtctggcggaagtgttcaattagaatatttacagtcgcacagctggaggataatagcatacagatgaagaaggatctagcaactttcctatatcacctgagaattgaagcggaggttgaggttgtggagatgcatgactcagacatttccgcctacacatatgaaaggacattaatgatggaacaacggagtcagatgttgcggcacatgaggctcagtaagacagagcgtgaccgcgaagcccagttggttaaagaccgcaactccatgttgaggctaacctcaataggaagtgacgaggatgaggagaccgaaacttatcaagagaaggtccatatgacctggactaaggacaagtatatggcttcccggggtcagaaggccaaatccatggagggcttccaagacctattaaatatgaggcccgatcagtctaacgtgaggcggatgcacaccgcggtcaaattaaacgaagtaatcgtgaataaatctcacgaggcaaaactggttctcttaaacatgcctggcccacctaggaaccccgagggcgacgaaaattacatggagtttttggaagttctaacagagggtctcgagagggtcttgctcgtcaggggtgggggatcagaggttatcactatctacagttag

SEQ ID NO: 315516 - DNA, 3276 bp, Artificial Sequence
  derived and/or modified sequence
atgtccgaaatgtccggtgctaccacatccctggctacagttgcacttgacccaccaagtgaccgaacttcgcatcctcaagatgtgatagaggacctcagccagaattccattactggcgaacattcccagctactcgatgatgggcacaagaaggcgaggaacgcatacctgaataatagcaactacgaggaaggtgatgaatactttgataagaatcttgctttgttcgaggaggagatggatacccggcctaaagtcagttccctcctcaaccgcatggccaactacactaatctcacgcagggagcaaaagaacatgaggaggccgaaaacatcacggaggggaagaaaaagcccacaaaaacaccccagatgggaacgtttatgggcgtctacctcccttgtctgcagaacatatttggggtaatcctcttcctccgcctcacctgggtcgtggggacagctggtgtgctacaggcctttgctattgtcctcatctgttgctgttgcactatgctcacagccatctccatgagtgcaatcgctactaacggcgtagtgccagcagggggatcttactttatgatttccagggcgcttggcccagagttcggtggagccgtaggactttgcttctacttgggaactacctttgccgctgccatgtatatcctcggggctatagagatctttttagtctatatagtgcctcgcgctgccatttttcactccgatgacgcattgaaagagagcgctgccatgttaaacaacatgcgcgtgtatggcactgccttcctcgttcttatggtgttggtggtgtttattggggtccgttatgtgaataaattcgccagcctattcctggcctgtgtaatagtaagcattttggccatttatgcgggagcaatcaagagctctttcgccccaccacattttcccgtctgcatgctgggcaatcgaacacttagcagccgccatatcgatgtctgttctaaaactaaagaaattaataacatgaccgtcccttccaaattgtgggggttcttttgcaactcttcccagttcttcaacgccacgtgcgatgagtacttcgtgcataacaacgttacgtctattcaaggaataccgggtcttgcctctgggatcatcaccgagaacctctggtccaattacctgccaaaaggtgaaattatcgagaaaccatctgctaagtcctcggatgtgcttgggagcctcaatcacgagtacgtgctggtggacattacaacatccttcaccttgctcgtcgggatattttttccctccgtgactggtatcatggcgggatcaaacaggtccggcgatctcaaagacgcccagaaaagcatacccattggaaccatcctcgcgatcttaacaacctccttcgtgtatctgagcaatgtggtgctgttcggtgcgtgcatagagggcgtggtccttcgggacaaatttggcgatgcagttaagggcaatctagtcgtggggacactctcatggccaagcccctgggtcatcgtaatcggatcgtttttcagtacgtgcggggctggtctccagagcttgacgggagcaccacgcctgctgcaggctatcgccaaagataatatcattccatttttacgcgtgttcgggcactcgaaagccaatggcgagccgacttgggctctgctgctgaccgccgcaattgccgaattgggtattcttatcgcatccttggacctggtggcaccaatattatcaatgttttttctcatgtgctatttgttcgtgaacctggcatgtgccttgcaaactctgttgcgcacaccaaactggcgacccagattcaggtattaccactgggcactgtcattcatgggcatgtccatttgtctggctcttatgtttatctctagctggtactacgccatagtggctatggtgatcgcagggatgatctataagtatattgagtaccagggggctgagaaggaatggggggatggaatccgcggtttaagcctgtccgccgctagatttgcccttctgcgtctagaggaggggcctccccacactaaaaactggcggcctcagctcttggtgttgctcaaactggacgaggatctccatgttaagcacccaagactcttgacatttgctagtcagttaaaagccggtaaggggctcacaattgtggggtccgtgatcgtcggcaacttcctggagaattatggagaagcactcgcggcagaacagacaattaaacacttgatggaagctgagaaggttaaggggttctgccaactggttgtggctgccaaattacgggaaggcatctcccatcttattcagtcttgcggtctcggaggcatgaagcacaacaccgtcgtaatggggtggcccaacggttggcgccagtccgaagacgcgagggcctggaaaactttcattggcacagtgcgagttactactgccgctcacctggccctactggtagccaagaacatatccttcttccctagtaacgttgagcagttcagcgaaggcaacatcgatgtctggtggatcgtacacgacggaggtatgctgatgcttctgccttttttgctgaaacagcacaaggtttggcgcaagtgctctattaggattttcaccgtggcgcaattagaagataacagtatacagatgaaaaaggatctagccaccttcctttatcacctaagaatcgaggcagaagtagaggtggtcgaaatgcacgacagcgacatatccgcctacacctatgagagaacgctgatgatggagcaaagaagccagatgttacggcatatgaggctctctaagacagagagggaccgtgaagctcaacttgtcaaggatcggaattccatgctgaggcttacttccataggcagtgatgaggacgaggaaacggagacctaccaggaaaaagttcatatgacttggacaaaagataaatacatggcgtctcgaggtcagaaggccaagagtatggaagggtttcaagacctgctgaacatgaggccagaccagtcgaacgtccgacggatgcatacagccgtcaaattaaacgaagttatcgtcaacaagtctcacgaagcaaaattggttcttctgaatatgccaggccctcctcggaatccagagggggatgagaactacatggagtttctggaggtattaaccgagggactggaaagagtcctattggttagagggggagggtcagaggtcatcaccatttattcatag

SEQ ID NO: 315517 - DNA, 3276 bp, Artificial Sequence
  derived and/or modified sequence
atgagcgaaatgtccggggcaaccacttctctcgcaaccgtcgccttagatcccccaagtgacaggacctctcaccctcaggacgtaatcgaagatctgtcacagaactcaatcacaggggaacatagtcagctgcttgacgacggccacaagaaagcaaggaatgcatatctgaacaactccaattacgaggagggggatgagtactttgataagaaccttgcactgtttgaagaggagatggatacccgcccaaaggtgagttcactcttgaacagaatggccaattatacgaatcttacccagggggctaaggaacatgaggaggcagagaatatcacggaggggaagaagaagcccaccaaaacgccccagatggggaccttcatgggggtctacctgccttgcctccaaaatatattcggagtcatcctatttctgaggcttacatgggtggtggggacagctggggtgcttcaagccttcgcaatcgtgcttatctgttgttgctgcacaatgctgaccgccatatctatgagcgcaatagccactaatggcgtagtaccggcaggaggtagctacttcatgataagcagggcactgggtcccgagttcgggggagctgtaggcctttgcttttatcttggaaccacctttgccgcagccatgtacatccttggagccattgaaatcttcttggtctacatagtcccacgggctgccattttccattctgacgacgcgctgaaggaatctgctgccatgctgaacaatatgcgcgtatacggaactgccttcctggtgcttatggtgttggtggtctttatcggcgtccgctatgtgaataaatttgcctccttattcctggcatgtgtcatagtatcgatccttgccatatacgctggagccataaagtcttccttcgcaccaccacatttccccgtgtgtatgctcggaaaccggacactaagcagtcggcacatcgatgtctgctcaaagacgaaggaaatcaataatatgacagtgccaagtaagctgtggggattcttctgtaacagttcgcagttttttaacgcgacatgcgatgagtattttgtgcataataatgtgacatctattcaggggatacctgggctggcatctgggatcataacagagaatctgtggtccaactatctgccaaagggcgaaattatagagaagccatctgccaagtcaagcgatgtgctgggatcactgaatcatgaatacgtgctcgtggacatcacgactagttttacattactagtcgggattttctttccatcagtcaccgggattatggcaggctccaaccgcagtggagatctaaaggatgcacaaaagagcattccaatcggaaccatattggcaatcctgaccacctcattcgtctacctgtcaaatgtggttcttttcggtgcatgcattgagggtgtggtgctgagagacaaattcggggacgctgttaaagggaatctggttgtcggaacactgagctggccatcaccctgggtgatcgtgattgggtccttcttctctacatgtggggcaggactgcaaagcctgacaggagctccacgcctgctccaagcaatcgcgaaggataatataatacctttcctcagagttttcggacatagcaaggccaacggcgagcccacatgggctctgctcctgactgcggctattgccgagttgggcatactcattgctagcttagaccttgtcgcaccaatcctttcgatgtttttccttatgtgttacctctttgtgaaccttgcgtgtgctctgcagacactgttgcgaacgcctaactggagaccaagatttagatattaccattgggccctgtcgtttatgggcatgtctatctgtctggcgctcatgttcatctcttcatggtactatgccattgttgctatggtgatcgcgggaatgatttacaagtacatcgagtaccagggggctgagaaggagtggggagatggcatacggggactatctctgtccgccgctcgcttcgcgctcttacgccttgaggagggcccaccccacactaaaaattggagacctcagcttctcgtgctgctgaagctagatgaggacttgcacgtgaaacatccgcgactcctaaccttcgcctcacaactgaaagccggaaaggggctgaccatcgtgggttccgttattgtcggaaactttctagagaattacggcgaggctttggcagccgagcaaactataaagcaccttatggaggccgaaaaagtaaaggggttctgtcagctcgtggtggccgctaaacttagggaaggcatcagtcacctcatccagtcgtgtggtctaggcggaatgaagcataacactgtggtcatgggttggccgaatggctggcgacagtcagaggatgcacgggcttggaaaacgtttatcgggaccgtgagggtcacaaccgcagcccacctggccctgctcgtggccaagaacataagtttcttccctagtaacgtggaacagttttctgagggaaatatagacgtgtggtggatcgtgcatgacgggggaatgctgatgctgcttccgttcctattgaaacagcacaaggtgtggagaaagtgcagtatccgaatcttcacagttgcgcagctggaagataattcaattcaaatgaagaaggacttagcgacgttcctgtaccacctgcggattgaggctgaggtcgaggtcgttgaaatgcacgacagcgatatcagcgcatacacatacgaacgtacccttatgatggaacagaggagccaaatgctgagacacatgcgcttatcaaaaaccgaacgggaccgggaggctcagctggttaaggaccggaattctatgcttagattaacttccataggcagcgacgaggacgaggaaactgaaacataccaggaaaaggtgcatatgacatggaccaaggataaatacatggctagtcggggacagaaggctaaatccatggaaggattccaggatcttttaaacatgcgcccagatcagtctaatgtccgtagaatgcatacagcagtaaaattaaacgaagtcattgtgaataaatcacatgaggctaaacttgttttattgaatatgcctgggccaccacgcaaccccgagggggacgagaattatatggagtttctggaggtgctcactgaggggctggagcgggtacttctggtcaggggtggcggatccgaggttatcactatttactcttag

SEQ ID NO: 315518 - DNA, 3426 bp, Artificial Sequence
  derived and/or modified sequence
atggcctccgttaggtttatggtgacccccacgaagatagacgatataccaggcctgagcgacacttcccccgatctttcaagtagaagttcatccagagtgcgtttttcctcacgggaatccgtgcctgaaacgtctaggagcgaaccaatgtctgagatgagtggagccactacgagtctggcaactgtggccctcgatccccctagtgaccgaaccagccatccacaagatgtcatcgaggacctcagccagaacagcatcaccggcgagcattctcagctgctggatgatggacataagaaggccaggaatgcttatctgaataacagtaattacgaggaaggcgatgagtatttcgacaagaacttagctctctttgaggaagaaatggacacacggccaaaggtgtcatctctcctgaacagaatggccaactatacgaatcttacacagggcgcaaaggagcatgaggaggcggagaatattacggagggtaagaaaaaaccgaccaagactcctcagatgggcacgttcatgggcgtctaccttccatgcctgcagaacattttcggagttattctctttttgcgactgacctgggttgtgggtacggcaggcgtcctccaggcgttcgcaattgtgttgatctgctgctgctgcaccatgctaacagccattagcatgtctgccattgccaccaatggggtagttcccgctggtgggagctattttatgatcagccgggctttggggccagagttcgggggagccgtgggtttgtgcttctaccttgggaccacttttgccgctgctatgtacattttgggtgcgatcgagatcttcctggtttacattgtgccgagggcagcaattttccactccgatgacgcattaaaggagtctgccgctatgctgaacaacatgagagtgtatggcacagcttttttagtgttgatggtgctagtcgtgttcatcggcgtcagatatgtgaacaagtttgctagcctgttcctagcgtgcgtgatcgtgagcattttggcaatctacgccggtgctataaagagtagctttgcccctccgcattttcctgtgtgcatgctgggcaacaggacgctgtcttcgagacacatcgatgtgtgctccaagacaaaggagattaataatatgacggttccctcaaaactgtggggctttttctgtaattccagccagtttttcaatgccacgtgcgacgagtacttcgtgcacaacaacgttacaagtattcagggtatacctggattggcatcaggtatcatcacagaaaatttatggagcaactatctcccgaaaggagaaattattgagaaaccttcagcaaagtcatccgacgtgctgggatcacttaatcatgagtacgttctggtggatattacaacatctttcaccctgcttgtcggtatatttttcccgtctgtgacagggatcatggcgggatccaacaggtctggtgatttgaaggacgctcagaagagtataccaatcggcacaatcctggcgatcctgaccacgtcatttgtgtatctgtctaatgtggttctgttcggggcttgtattgaaggtgtggtgctgagagacaaatttggcgacgcagtcaaaggcaatctggtagtcggaaccctctcatggccatctccctgggtgattgtaatcggatcattcttctccacatgtggtgcaggcctgcagagcttgacaggagcacctaggttgctccaggccattgcaaaagacaatatcatcccatttctgcgcgtgtttggacattcaaaagctaatggggagcccacttgggctctgttattaaccgccgcaatcgctgagctgggaatcctgatcgcgtcgctggacctggtggccccaatcctgtccatgttttttcttatgtgttacctctttgttaatcttgcgtgcgcgttgcagacattgcttcggacccctaactggcgcccaaggttcaggtattatcattgggctctttccttcatgggcatgagcatctgcttagcgcttatgttcatttccagctggtattacgcaatcgtggccatggtgatcgccggaatgatatacaagtacattgaataccagggagcagaaaaagaatggggcgatggcattcgaggcctgtctctgtctgcagccaggttcgcactgctgcgactggaggaaggacctccacacaccaagaattggcggcctcagctgctggtgctgctaaaactggacgaggacctgcatgtgaagcacccacgtctgttgacatttgcctcccagctgaaggcgggtaagggcctgaccatcgttggctccgtgattgtgggcaactttctggaaaactacggtgaggccctggctgccgagcagaccatcaagcatcttatggaagcagagaaagttaaagggttctgccagctggtggtggcggctaaactgagagagggcatttcccatcttatccagagctgcggtttaggaggtatgaaacacaataccgtcgtcatggggtggccaaatgggtggaggcagtccgaggacgcaagggcttggaagacatttatcgggacggtgcgagtgacaacagctgcacacttagctttactcgtggctaagaacatctctttctttccatcaaatgtagaacaattctccgagggaaacatcgacgtgtggtggattgtccacgacgggggaatgctgatgttattgccctttctccttaaacaacataaagtgtggagaaaatgtagtattcgcatttttaccgtggctcaactcgaagacaattccatccagatgaagaaagacctggccacgttcctataccacttaagaatagaggctgaggttgaggtggtggagatgcacgactcagacattagtgcatatacatatgagcggaccttgatgatggaacagcgctcacaaatgctgcgccatatgcggcttagcaagaccgagagagatcgagaggcacagttggtgaaagatcggaacagtatgttacgcctcacatcaatcggctcagatgaagatgaggaaaccgagacatatcaagagaaggttcatatgacctggacaaaggacaagtatatggcctctcgcggacagaaagcgaagagcatggagggcttccaggacctcctcaacatgcgaccagaccagtcgaatgtgcgcagaatgcacacagcagtcaaactcaatgaggtgatagtaaataaaagtcatgaagccaagcttgtgctgttaaatatgcccggacctccaaggaaccctgaaggcgatgagaattacatggagttcctggaggttctgaccgaaggccttgagagggtcttgctcgtgagggggggtggttccgaggtgataactatatattcctag

SEQ ID NO: 315519 - DNA, 3453 bp, Artificial Sequence
  derived and/or modified sequence
atgcaccctcccgaaacgacaacaaagatggcgagcgtccggttcatggttacgcccaccaagatcgacgacattcctggcctgtccgatacctcacccgatctgagctcacggagctctagtcgcgtccgattcagtagtcgagagtctgttccagagacaagccgctctgagccaatgtcagagatgtcaggggctaccacaagcctggccaccgtcgctctcgaccccccttctgaccggacttctcaccctcaagatgttatcgaggacctcagtcagaatagtataacaggagagcactctcagttattggacgacgggcataagaaagcaagaaacgcttacctgaacaactctaattatgaggagggggatgagtatttcgacaagaacttggccctatttgaggaggagatggacacccgacccaaagtgtcgtccctactcaataggatggcaaactacaccaacctgactcagggggctaaggagcatgaggaagcagaaaatatcaccgaaggcaagaagaaacctactaagactccgcagatgggaacgttcatgggagtgtacctcccctgcctccagaatatattcggggtgatcttgttcctgagactgacatgggtggtgggcacagctggcgtcctgcaggcctttgctatcgtcctgatctgctgctgttgtacgatgcttaccgcgataagcatgtccgccattgctaccaatggggtcgtgccagctgggggaagctactttatgatttccagagcacttggccctgagtttggaggcgctgtaggtttgtgcttttacctgggaacaaccttcgcggctgccatgtacatcctgggtgccatcgagattttcttagtgtatatcgtgcccagagccgctatttttcacagcgacgacgcattgaaagagagtgcagctatgcttaataatatgagagtgtacggcactgccttccttgttttgatggtgctggtggtctttattggcgtgaggtatgtgaacaagtttgctagtctcttcctcgcctgtgtaattgtgtccatcctcgccatttacgctggtgcaatcaagtcttcctttgcaccaccccacttcccagtatgtatgctgggtaatagaacgttgtcctcccgacacatcgatgtttgctccaagaccaaggagatcaacaacatgacagtccctagcaagttgtggggattcttttgcaattccagccaatttttcaatgctacctgcgacgagtacttcgttcacaacaatgttacctcgatccaggggatcccaggactggcgagtggaataatcaccgaaaatctctggtctaattacctgcctaaaggcgagatcatcgagaaaccatctgcaaaatccagcgacgtcctgggttcccttaaccatgaatatgttttagtggatatcaccacttctttcactctcctcgttggaattttctttccctcagtgaccggcattatggccggatccaaccgatcaggggatttgaaggatgctcaaaagtccattccgatcgggaccatcctggctatccttactacctcttttgtttacttatccaacgtcgttttgttcggggcatgcattgagggagtggtgctgcgagataaattcggcgatgccgtgaaaggtaatcttgtcgtggggactcttagttggcctagcccatgggtgattgtgattgggagcttcttctccacgtgcggtgccggactccagtcactcactggcgctcctagactgctccaagcgatagcaaaggacaatatcatcccatttctgcgcgttttcggccattccaaagccaatggagaaccaacatgggcacttctactgacagccgctattgcagaactcggtatcttgattgccagcctcgaccttgtggctcctatactgtccatgttcttcctgatgtgctacctctttgtcaatctggcatgcgcactacagacactgctgagaacccctaactggcgacccagatttaggtactatcattgggcactcagtttcatggggatgtcgatttgcctggccctgatgttcatctccagctggtattacgccattgttgctatggtgatcgcagggatgatttacaagtacattgagtaccaaggcgctgagaaggaatggggcgatggcatccgcggactttctctaagtgccgcaaggtttgcgctccttcggctggaggaaggaccgccacacacaaaaaattggcgtccgcagttgctcgtgctcctgaagctagacgaggacctgcatgttaaacaccccagattgctcacatttgccagccagctgaaagccggaaagggcctcacaatcgtgggatccgtgatcgtcgggaatttcttagaaaactacggagaggctctggcagccgagcagaccattaagcacttaatggaggctgaaaaggtcaagggattttgtcagctagtggtcgctgctaagctcagggaaggaatatcacatctcattcagtcttgtggcttgggaggtatgaagcacaacaccgtagtgatgggttggccaaatgggtggagacagagcgaggatgcaagggcttggaagacttttatcggcactgttagagttaccactgctgcgcatctggccttgctggttgccaaaaatatcagcttcttcccgtccaacgtggaacaatttagcgaagggaatatagacgtatggtggatagtgcatgacggaggcatgttaatgcttttaccattcctgctgaagcaacacaaagtttggaggaaatgtagcattcgcattttcacggtggctcaactggaggataactctatccagatgaaaaaagacttggccaccttcctgtaccatctccggattgaggccgaggtggaggtggtcgaaatgcacgacagtgacatatctgcatatacctacgagaggactttaatgatggagcaacggagtcagatgttgaggcacatgcggctatccaaaacagagagagacagggaggctcagctggttaaagataggaacagcatgctccggctgacctccattgggtccgacgaagatgaggaaaccgagacctaccaggagaaggtgcatatgacgtggacaaaggataagtacatggcatctagaggccagaaggctaagtctatggaggggttccaagatctattaaacatgcgccctgatcagagcaacgtccggaggatgcacacagccgtcaaattgaatgaagttatcgtcaacaagagccatgaggctaaactggtacttctgaacatgcccggaccaccacgcaaccccgagggggatgaaaattatatggaatttctagaggtcctgaccgaagggctggaacgcgtgctgctggtccgcggaggtggatctgaagtgatcacaatctactcctag

SEQ ID NO: 315520 - DNA, 3453 bp, Artificial Sequence
  derived and/or modified sequence
atgcacccacctgagacgacaacaaaaatggcctctgtgcgctttatggtcacacctaccaaaatagacgacattcccggtctatcagacacatcccctgatttaagtagccggtcatcatctcgagttcgcttctcctcgcgagaatcggtgcccgaaacctctcgctctgagcctatgtccgagatgtccggcgctaccacaagccttgccacagttgccttggatccccctagcgaccgcacatcccatccacaggatgtaattgaggatttatctcaaaattccataacaggcgagcattcgcagcttctggacgacggccataagaaagcccgaaacgcatacctgaataattccaattacgaagaaggagatgaatactttgataaaaacctggctctgtttgaagaggaaatggataccagacccaaggtcagcagccttctgaaccgaatggccaattacacaaatcttactcagggtgcgaaagaacatgaggaggcagagaatattaccgaagggaagaagaagcccacgaagactccacagatggggactttcatgggcgtatatcttccttgcctgcagaatatcttcggcgtgattctcttcctaagactcacatgggtggttggcaccgccggagtgctacaggcttttgctatcgtgctgatttgttgctgttgcaccatgctcacagcaatctccatgtccgcaatagcaactaacggtgtggtgccggcagggggaagctatttcatgattagcagggcattgggtcctgagtttggtggcgctgtaggcctgtgcttttatttgggcactaccttcgcagccgctatgtacatactgggcgctatagaaatctttctcgtgtacatcgtgcctcgcgctgccatatttcattcagacgacgcactaaaagaatccgccgctatgctgaataacatgcgcgtgtacgggacagcgttcttggtgctgatggttcttgtagtgttcatcggagttcgatatgttaacaaatttgcctctctgtttcttgcatgtgttatcgtgtcgatcctggctatatatgccggtgccatcaagtcttcattcgcgcctccacattttcctgtgtgtatgctagggaatagaaccctgagcagccgccacattgatgtctgtagcaagactaaagaaatcaacaacatgactgtcccctccaaactgtggggctttttttgcaacagctctcagttcttcaacgccacgtgtgatgagtacttcgttcacaataacgtaacaagcattcagggcataccagggctggccagtgggataatcacggagaatttgtggagtaattacctgccaaaaggagagatcattgaaaaaccctccgcaaaatctagcgacgtattgggttccctgaatcatgagtacgtgctcgtggacatcacgacttcgttcaccttgctcgtagggatcttctttccatcagttacgggaatcatggctggtagcaaccgatctggtgacctcaaagacgcacagaaatccattcctattggtaccattctcgctatcctcactaccagcttcgtatatctttcaaatgtagtgttgtttggcgcatgcattgagggtgtggttttacgcgacaaattcggagatgctgtcaagggcaacttagtggttgggacactgtcctggccatctccttgggtgatcgtgatcggcagctttttctccacttgtggcgctgggctgcagagcctcacaggcgctccacggttgctgcaagctattgccaaggacaacattatccctttcttgagggtgtttggacactctaaagccaacggcgagcctacttgggccctgttgctcacggccgctattgccgaactgggcattcttatcgcgtccctagaccttgtggcgccaattctttccatgttctttctgatgtgttacttattcgttaacttggcttgcgcacttcagacactcttgcggaccccaaactggagacccagattccggtattaccactgggctttgagctttatgggcatgtctatctgcctggctctcatgttcatctcatcctggtactatgcgatagttgcgatggtaatagccggtatgatttacaaatacattgagtatcagggtgcagagaaggagtggggcgatggaatcaggggcttgagcttgtctgcggctcgtttcgcccttctgcggctggaggagggcccaccccacaccaaaaattggagaccacagcttttggtgctgctcaaattggacgaggatctccatgtgaaacatcctagactgctgacatttgcgtcccaactcaaagcaggcaaaggtctgacgattgttgggtccgtgatcgtcgggaacttcctcgagaattacggcgaggcattagctgccgagcagacaataaagcatctcatggaagctgagaaagtgaagggcttctgtcagttagtggtcgcagcaaagctgagagagggcatcagccacctgattcagtcatgcggcctaggcggaatgaagcataatactgtagtaatgggctggcccaacggatggagacaatccgaagacgccagggcatggaagactttcatcggcacagtccgtgtcacaacggcagcgcatttagcacttctcgtggccaagaacatctcgtttttccccagcaacgtagaacagttctctgagggtaatatcgatgtctggtggatcgttcatgacggtggcatgctgatgcttttgccgttcctcctgaaacaacacaaagtgtggcgtaagtgcagcattaggatctttaccgtcgcccaactggaagacaatagcatccagatgaagaaagatctggccacctttctgtaccacctccgcatcgaggcagaggtagaagtcgtagaaatgcacgatagtgacatttcagcgtacacctacgagcggacgctaatgatggagcagaggagccagatgttgcgccatatgcgactgtccaagacggagagagacagggaggctcagttagtgaaagatcggaattccatgcttcgactgacaagcatcggaagcgacgaagacgaagagactgagacctaccaggagaaagtgcacatgacctggactaaggacaaatatatggcctctcgcggacagaaagcaaaaagcatggaaggctttcaggatctgttgaacatgcgccctgatcagagcaatgtccgcagaatgcatactgcggtcaagcttaacgaagttatagtaaacaagagccatgaagccaagttagtactgttgaacatgcctgggcctccccgtaatcccgagggtgacgagaactacatggagttcctggaggtgctgactgagggcctggaaagagtcctgctggtgcgtggaggcggttccgaagttatcacgatatattcctag

SEQ ID NO: 315521 - DNA, 4568 bp, Artificial Sequence
  derived and/or modified sequence
gcgcacccgcatcagctggcgccgggatactgcacctgcgacctccttctccctcaccctgctgcccagtcaggccagcctgcgtggccgtctcctcctctactgggaccctgaggaagaacgacgagggggtgacctgcgccggggcgggggtaggggagaacgcgcctccggcaaagggggtggctcgtcctgtcacacgcaggagaaacctagcgagcggaccgtggctcagtggactagctacgacttgccacgactctgagctgcagtccgaggtgtcttgatccgctaacctcctcccagaccccgaggacctttctgctaggagaagagcgggcgcgccacccccaccgacctctcggagacaggaatccgctctgcccctgcatcctcctctgctcacccttctctcagtagttcaaaagtagctagcgtaagaggaagattttgcgaggttccccccactttttttgttcttaaaaagaacaaaatgcatcctccagaaaccaccaccaagatggcttcagttcggttcatggtgacaccgacaaagatcgatgacattccaggtttgtcagacaccagtccggacctcagctctcgatctagttcccgagtaagatttagctcccgggaaagcgtgcctgaaacaagccggagtgagcctatgagtgagatgtctggggccaccacttcgctggcaactgttgcactggatccacccagtgaccggacttctcacccccaggatgtcatcgaggacctgagtcagaactccatcacaggggaacacagccaactgttagacgacggacataagaaagctcgaaatgcttatctcaataattccaattatgaagaaggagatgaatattttgataaaaatttggcactctttgaggaagaaatggacaccagaccgaaggtgtcttccctcctcaaccgcatggccaattacactaatctgactcaaggagcaaaggaacatgaagaggcagaaaacatcactgaagggaaaaagaagcccaccaagaccccccaaatgggtaccttcatgggtgtctacctcccatgtctacaaaatatttttggagtgatcctttttttacgccttacatgggtggtgggcacagctggagttcttcaggcttttgcaattgtccttatctgctgctgctgtacaatgttgactgctatctccatgagtgccattgccactaatggagtggtgccagctgggggctcatactttatgatttcccgggcactgggcccagagtttggtggggctgttggcctctgcttttatcttggtaccacatttgcagcagccatgtacatccttggtgccattgaaatctttctggtctatatcgtcccccgagctgccatctttcacagtgatgacgcactcaaggaatcagcagccatgctaaataacatgcgtgtctacggcacagctttcttggtccttatggtattagtggtatttatcggcgtacgctatgtgaacaagtttgcctcacttttcctggcctgtgtcattgtgtccatcttggccatctatgctggagccatcaagtcttcttttgctcctccacacttcccggtctgcatgctgggtaaccgcaccctttcatcaagacacattgacgtttgctctaagaccaaggaaattaacaacatgacagtcccatcaaagttatggggattcttctgtaactcgagtcaatttttcaatgccacctgtgatgaatactttgttcacaataacgtcacttcaatccagggcattcctggattggctagtggtataattacagagaatctttggagtaattacctacccaagggagagatcatcgaaaagccttcagccaaatcttctgatgtcttaggcagcttaaaccatgaatatgttcttgttgacatcaccacctccttcacgcttctggtgggaatcttctttccctctgttacaggtatcatggctggatcaaacagatctggagatctgaaagatgctcagaagtctattccgattggtactatccttgccatcctgaccacctcctttgtttatttaagcaatgttgtcctttttggtgcatgtattgaaggggttgttctcagagacaagttcggtgatgctgtgaaaggtaatttggtggtaggcaccttatcttggccatccccatgggtgattgttattggctccttcttttcaacatgtggggctggacttcagagcctcacaggtgcaccgaggctgctacaagctattgccaaggataacatcataccgtttctgagggtttttggccacagcaaagccaatggggaacctacctgggctttacttctaactgctgccattgcagagcttggaatactcattgcctccctggatcttgtggccccaattctttccatgttttttctcatgtgttacctctttgtaaacttggcatgtgccttgcaaacattacttcgaacacccaactggagaccccgattccgctactaccattgggccctttctttcatgggaatgagtatctgtctggctctgatgttcatttcttcctggtattatgccattgtagccatggtaatagctggtatgatctacaagtacattgaataccaaggagctgagaaagaatggggtgatggtatccgtgggctgtccctcagtgcagcccggtttgctttgcttcgattggaggaaggacctccacacactaaaaactggaggcctcagttgcttgtattactgaaactagatgaagacttacatgtcaagcatcctcgcctcctcacctttgcctcacagctcaaagcaggaaaaggtctcactattgtgggctctgtcatcgtggggaacttcctagagaactacggtgaagctttagctgctgagcagaccataaagcacctaatggaggcagagaaggtaaaaggattctgccagctggtggtggccgccaagctgagagagggcatttcccacctcatccagtcatgtggccttgggggcatgaagcacaacacggtggtgatgggctggcctaatggctggcgtcaaagcgaagatgcccgcgcttggaagacttttattggcacagttcgagtgacaactgctgcccatcttgcactgctggtggctaaaaacatctccttctttcccagcaatgtggagcaattttctgagggcaacattgatgtgtggtggattgtgcatgatggggggatgcttatgctactaccattcctactgaaacagcacaaggtgtggcgaaagtgcagcatacggatcttcacagtagcccaattagaagacaacagtatccaaatgaagaaggacctagccaccttcctatatcacttacgcattgaggcggaggtagaagtggtggagatgcatgacagtgatatatcagcatatacttacgagcgcactttgatgatggaacaaaggtcccagatgctccggcacatgcggctatccaaaacagagcgagacagagaggcacaattggtgaaagaccgaaactcaatgctacgattgaccagcattggctctgatgaggacgaagagacagaaacctatcaggagaaggtgcacatgacttggacaaaagacaagtacatggcatcccggggacaaaaagcgaagtcaatggaaggattccaggacctgcttaacatgcgtccggaccagtccaatgtgaggcggatgcatacagcagtgaaactcaacgaggttatagttaacaagtcccatgaagcaaagctggttttattgaatatgccagggccaccccgaaaccctgagggtgatgaaaactacatggagttcctagaggtgcttaccgagggactagagcgagtcctacttgtccggggtggtggcagtgaagtgatcaccatttattcataacctactctgaatgaccgtgcttgacctgttttcttaaaaggcctacgtcctccatggaagtgccagctcattactaccactcccactcaactagaagcctgtgttctgtacacatcatactgaactcttgatgagctgagcctcaagtacctgtgtaaaagagctcccatctgatctgcagtcattacagaaaaagcaaatattccctcaacatcagaacaatgctcaagtctttcaagccacgtctgagcagtcaaaggcaaattagaattaacaagctgagccaataaatgaattggtaaaagggatgctagaaattcaactgaagaaaaaaagcaagtcaagtacgtattcagcattaaagatgaatctcagaagtcatggttcaatgttgacactgtgaggataacaactagagacagcttcatcttactaaagaatttatggtcaagtatatttggacctattatcctcggcaagccaagatgcaaacattttttagctatatttctttagtatacccactgctgtaattttatattaggatactaacttgaaacatggctgcagcctctacttcttcaaaaacatccccccaaaataccagatttaaatatccaaa

SEQ ID NO: 315522 - DNA, 4096 bp, Artificial Sequence
  derived and/or modified sequence
tgcactcggtcaccgcgggctgcggcggctgggcggggctttcgggcgcccgcgggacggttccgccctctcactgcacccccgggcttctcttcgcaaggtttgtcagacaccagtccggacctcagctctcgatctagttcccgagtaagatttagctcccgggaaagcgtgcctgaaacaagccggagtgagcctatgagtgagatgtctggggccaccacttcgctggcaactgttgcactggatccacccagtgaccggacttctcacccccaggatgtcatcgaggacctgagtcagaactccatcacaggggaacacagccaactgttagacgacggacataagaaagctcgaaatgcttatctcaataattccaattatgaagaaggagatgaatattttgataaaaatttggcactctttgaggaagaaatggacaccagaccgaaggtgtcttccctcctcaaccgcatggccaattacactaatctgactcaaggagcaaaggaacatgaagaggcagaaaacatcactgaagggaaaaagaagcccaccaagaccccccaaatgggtaccttcatgggtgtctacctcccatgtctacaaaatatttttggagtgatcctttttttacgccttacatgggtggtgggcacagctggagttcttcaggcttttgcaattgtccttatctgctgctgctgtacaatgttgactgctatctccatgagtgccattgccactaatggagtggtgccagctgggggctcatactttatgatttcccgggcactgggcccagagtttggtggggctgttggcctctgcttttatcttggtaccacatttgcagcagccatgtacatccttggtgccattgaaatctttctggtctatatcgtcccccgagctgccatctttcacagtgatgacgcactcaaggaatcagcagccatgctaaataacatgcgtgtctacggcacagctttcttggtccttatggtattagtggtatttatcggcgtacgctatgtgaacaagtttgcctcacttttcctggcctgtgtcattgtgtccatcttggccatctatgctggagccatcaagtcttcttttgctcctccacacttcccggtctgcatgctgggtaaccgcaccctttcatcaagacacattgacgtttgctctaagaccaaggaaattaacaacatgacagtcccatcaaagttatggggattcttctgtaactcgagtcaatttttcaatgccacctgtgatgaatactttgttcacaataacgtcacttcaatccagggcattcctggattggctagtggtataattacagagaatctttggagtaattacctacccaagggagagatcatcgaaaagccttcagccaaatcttctgatgtcttaggcagcttaaaccatgaatatgttcttgttgacatcaccacctccttcacgcttctggtgggaatcttctttccctctgttacaggtatcatggctggatcaaacagatctggagatctgaaagatgctcagaagtctattccgattggtactatccttgccatcctgaccacctcctttgtttatttaagcaatgttgtcctttttggtgcatgtattgaaggggttgttctcagagacaagttcggtgatgctgtgaaaggtaatttggtggtaggcaccttatcttggccatccccatgggtgattgttattggctccttcttttcaacatgtggggctggacttcagagcctcacaggtgcaccgaggctgctacaagctattgccaaggataacatcataccgtttctgagggtttttggccacagcaaagccaatggggaacctacctgggctttacttctaactgctgccattgcagagcttggaatactcattgcctccctggatcttgtggccccaattctttccatgttttttctcatgtgttacctctttgtaaacttggcatgtgccttgcaaacattacttcgaacacccaactggagaccccgattccgctactaccattgggccctttctttcatgggaatgagtatctgtctggctctgatgttcatttcttcctggtattatgccattgtagccatggtaatagctggtatgatctacaagtacattgaataccaaggagctgagaaagaatggggtgatggtatccgtgggctgtccctcagtgcagcccggtttgctttgcttcgattggaggaaggacctccacacactaaaaactggaggcctcagttgcttgtattactgaaactagatgaagacttacatgtcaagcatcctcgcctcctcacctttgcctcacagctcaaagcaggaaaaggtctcactattgtgggctctgtcatcgtggggaacttcctagagaactacggtgaagctttagctgctgagcagaccataaagcacctaatggaggcagagaaggtaaaaggattctgccagctggtggtggccgccaagctgagagagggcatttcccacctcatccagtcatgtggccttgggggcatgaagcacaacacggtggtgatgggctggcctaatggctggcgtcaaagcgaagatgcccgcgcttggaagacttttattggcacagttcgagtgacaactgctgcccatcttgcactgctggtggctaaaaacatctccttctttcccagcaatgtggagcaattttctgagggcaacattgatgtgtggtggattgtgcatgatggggggatgcttatgctactaccattcctactgaaacagcacaaggtgtggcgaaagtgcagcatacggatcttcacagtagcccaattagaagacaacagtatccaaatgaagaaggacctagccaccttcctatatcacttacgcattgaggcggaggtagaagtggtggagatgcatgacagtgatatatcagcatatacttacgagcgcactttgatgatggaacaaaggtcccagatgctccggcacatgcggctatccaaaacagagcgagacagagaggcacaattggtgaaagaccgaaactcaatgctacgattgaccagcattggctctgatgaggacgaagagacagaaacctatcaggagaaggtgcacatgacttggacaaaagacaagtacatggcatcccggggacaaaaagcgaagtcaatggaaggattccaggacctgcttaacatgcgtccggaccagtccaatgtgaggcggatgcatacagcagtgaaactcaacgaggttatagttaacaagtcccatgaagcaaagctggttttattgaatatgccagggccaccccgaaaccctgagggtgatgaaaactacatggagttcctagaggtgcttaccgagggactagagcgagtcctacttgtccggggtggtggcagtgaagtgatcaccatttattcataacctactctgaatgaccgtgcttgacctgttttcttaaaaggcctacgtcctccatggaagtgccagctcattactaccactcccactcaactagaagcctgtgttctgtacacatcatactgaactcttgatgagctgagcctcaagtacctgtgtaaaagagctcccatctgatctgcagtcattacagaaaaagcaaatattccctcaacatcagaacaatgctcaagtctttcaagccacgtctgagcagtcaaaggcaaattagaattaacaagctgagccaataaatgaattggtaaaagggatgctagaaattcaactgaagaaaaaaagcaagtcaagtacgtattcagcattaaagatgaatctcagaagtcatggttcaatgttgacactgtgaggataacaactagagacagcttcatcttactaaagaatttatggtcaagtatatttggacctattatcctcggcaagccaagatgcaaacattttttagctatatttctttagtatacccactgctgtaattttatattaggatactaacttgaaacatggctgcagcctctacttcttcaaaaacatccccccaaaataccagatttaaatatccaaa

SEQ ID NO: 315523 - DNA, 4425 bp, Artificial Sequence
  derived and/or modified sequence
agctgcgcgcgcacccgcatcagctggcgccgggatactgcacctgcgacctccttctccctcaccctgctgcccagtcaggccagcctgcgtggccgtctcctcctctactgggaccctgaggaagaacgacgagggggtgacctgcgccggggcgggggtaggggagaacgcgcctccggcaaagggggtggctcgtcctgtcacacgcaggagaaacctagcgagcggaccgtggctcagtggactagctacgacttgccacgactctgagctgcagtccgaggtgtcttgatccgctaacctcctcccagaccccgaggacctttctgctaggagaagagcgggcgcgccacccccaccgacctctcggagacaggaatccgctctgcccctgcatcctcctctgctcacccttctctcagtagtgtttgtcagacaccagtccggacctcagctctcgatctagttcccgagtaagatttagctcccgggaaagcgtgcctgaaacaagccggagtgagcctatgagtgagatgtctggggccaccacttcgctggcaactgttgcactggatccacccagtgaccggacttctcacccccaggatgtcatcgaggacctgagtcagaactccatcacaggggaacacagccaactgttagacgacggacataagaaagctcgaaatgcttatctcaataattccaattatgaagaaggagatgaatattttgataaaaatttggcactctttgaggaagaaatggacaccagaccgaaggtgtcttccctcctcaaccgcatggccaattacactaatctgactcaaggagcaaaggaacatgaagaggcagaaaacatcactgaagggaaaaagaagcccaccaagaccccccaaatgggtaccttcatgggtgtctacctcccatgtctacaaaatatttttggagtgatcctttttttacgccttacatgggtggtgggcacagctggagttcttcaggcttttgcaattgtccttatctgctgctgctgtacaatgttgactgctatctccatgagtgccattgccactaatggagtggtgccagctgggggctcatactttatgatttcccgggcactgggcccagagtttggtggggctgttggcctctgcttttatcttggtaccacatttgcagcagccatgtacatccttggtgccattgaaatctttctggtctatatcgtcccccgagctgccatctttcacagtgatgacgcactcaaggaatcagcagccatgctaaataacatgcgtgtctacggcacagctttcttggtccttatggtattagtggtatttatcggcgtacgctatgtgaacaagtttgcctcacttttcctggcctgtgtcattgtgtccatcttggccatctatgctggagccatcaagtcttcttttgctcctccacacttcccggtctgcatgctgggtaaccgcaccctttcatcaagacacattgacgtttgctctaagaccaaggaaattaacaacatgacagtcccatcaaagttatggggattcttctgtaactcgagtcaatttttcaatgccacctgtgatgaatactttgttcacaataacgtcacttcaatccagggcattcctggattggctagtggtataattacagagaatctttggagtaattacctacccaagggagagatcatcgaaaagccttcagccaaatcttctgatgtcttaggcagcttaaaccatgaatatgttcttgttgacatcaccacctccttcacgcttctggtgggaatcttctttccctctgttacaggtatcatggctggatcaaacagatctggagatctgaaagatgctcagaagtctattccgattggtactatccttgccatcctgaccacctcctttgtttatttaagcaatgttgtcctttttggtgcatgtattgaaggggttgttctcagagacaagttcggtgatgctgtgaaaggtaatttggtggtaggcaccttatcttggccatccccatgggtgattgttattggctccttcttttcaacatgtggggctggacttcagagcctcacaggtgcaccgaggctgctacaagctattgccaaggataacatcataccgtttctgagggtttttggccacagcaaagccaatggggaacctacctgggctttacttctaactgctgccattgcagagcttggaatactcattgcctccctggatcttgtggccccaattctttccatgttttttctcatgtgttacctctttgtaaacttggcatgtgccttgcaaacattacttcgaacacccaactggagaccccgattccgctactaccattgggccctttctttcatgggaatgagtatctgtctggctctgatgttcatttcttcctggtattatgccattgtagccatggtaatagctggtatgatctacaagtacattgaataccaaggagctgagaaagaatggggtgatggtatccgtgggctgtccctcagtgcagcccggtttgctttgcttcgattggaggaaggacctccacacactaaaaactggaggcctcagttgcttgtattactgaaactagatgaagacttacatgtcaagcatcctcgcctcctcacctttgcctcacagctcaaagcaggaaaaggtctcactattgtgggctctgtcatcgtggggaacttcctagagaactacggtgaagctttagctgctgagcagaccataaagcacctaatggaggcagagaaggtaaaaggattctgccagctggtggtggccgccaagctgagagagggcatttcccacctcatccagtcatgtggccttgggggcatgaagcacaacacggtggtgatgggctggcctaatggctggcgtcaaagcgaagatgcccgcgcttggaagacttttattggcacagttcgagtgacaactgctgcccatcttgcactgctggtggctaaaaacatctccttctttcccagcaatgtggagcaattttctgagggcaacattgatgtgtggtggattgtgcatgatggggggatgcttatgctactaccattcctactgaaacagcacaaggtgtggcgaaagtgcagcatacggatcttcacagtagcccaattagaagacaacagtatccaaatgaagaaggacctagccaccttcctatatcacttacgcattgaggcggaggtagaagtggtggagatgcatgacagtgatatatcagcatatacttacgagcgcactttgatgatggaacaaaggtcccagatgctccggcacatgcggctatccaaaacagagcgagacagagaggcacaattggtgaaagaccgaaactcaatgctacgattgaccagcattggctctgatgaggacgaagagacagaaacctatcaggagaaggtgcacatgacttggacaaaagacaagtacatggcatcccggggacaaaaagcgaagtcaatggaaggattccaggacctgcttaacatgcgtccggaccagtccaatgtgaggcggatgcatacagcagtgaaactcaacgaggttatagttaacaagtcccatgaagcaaagctggttttattgaatatgccagggccaccccgaaaccctgagggtgatgaaaactacatggagttcctagaggtgcttaccgagggactagagcgagtcctacttgtccggggtggtggcagtgaagtgatcaccatttattcataacctactctgaatgaccgtgcttgacctgttttcttaaaaggcctacgtcctccatggaagtgccagctcattactaccactcccactcaactagaagcctgtgttctgtacacatcatactgaactcttgatgagctgagcctcaagtacctgtgtaaaagagctcccatctgatctgcagtcattacagaaaaagcaaatattccctcaacatcagaacaatgctcaagtctttcaagccacgtctgagcagtcaaaggcaaattagaattaacaagctgagccaataaatgaattggtaaaagggatgctagaaattcaactgaagaaaaaaagcaagtcaagtacgtattcagcattaaagatgaatctcagaagtcatggttcaatgttgacactgtgaggataacaactagagacagcttcatcttactaaagaatttatggtcaagtatatttggacctattatcctcggcaagccaagatgcaaacattttttagctatatttctttagtatacccactgctgtaattttatattaggatactaacttgaaacatggctgcagcctctacttcttcaaaaacatccccccaaaataccagatttaaatatccaaa

SEQ ID NO: 315524 - DNA, 3866 bp, Artificial Sequence
  derived and/or modified sequence
tgcgcgcgcacccgcatcagctggcgccgggatactgcacctgcgacctccttctccctcaccctgctgcccagtcaggccagcctgcgtggccgtctcctcctctactgggaccctgaggaagaacgacgagggggtgacctgcgccggggcgggggtaggggagaacgcgcctccggcaaagggggtggctcgtcctgtcacacgcaggagaaacctagcgagcggaccgtggctcagtggactagctacgacttgccacgactctgagctgcagtccgaggtgtcttgatccgctaacctcctcccagaccccgaggacctttctgctaggagaagagcgggcgcgccacccccaccgacctctcggagacaggaatccgctctgcccctgcatcctcctctgctcacccttctctcagtagtaaaccaccaccaagatggcttcagttcggttcatggtgacaccgacaaagatcgatgacattccaggtttgtcagacaccagtccggacctcagctctcgatctagttcccgagtaagatttagctcccgggaaagcgtgcctgaaacaagccggagtgagcctatgagtgagatgtctggggccaccacttcgctggcaactgttgcactggatccacccagtgaccggacttctcacccccaggatgtcatcgaggacctgagtcagaactccatcacaggggaacacagccaactgttagacgacggacataagaaagctcgaaatgcttatctcaataattccaattatgaagaaggagatgaatattttgataaaaatttggcactctttgaggaagaaatggacaccagaccgaaggtgtcttccctcctcaaccgcatggccaattacactaatctgactcaaggagcaaaggaacatgaagaggcagaaaacatcactgaagggaaaaagaagcccaccaagaccccccaaatgggtaccttcatgggtgtctacctcccatgtctacaaaatatttttggagtgatcctttttttacgccttacatgggtggtgggcacagctggagttcttcaggcttttgcaattgtccttatctgctgctgctgtacaatgttgactgctatctccatgagtgccattgccactaatggagtggtgccagctgggggctcatactttatgatttcccgggcactgggcccagagtttggtggggctgttggcctctgcttttatcttggtaccacatttgcagcagccatgtacatccttggtgccattgaaatctttctggtctatatcgtcccccgagctgccatctttcacagtgatgacgcactcaaggaatcagcagccatgctaaataacatgcgtgtctacggcacagctttcttggtccttatggtattagtggtatttatcggcgtacgctatgtgaacaagtttgcctcacttttcctggcctgtgtcattgtgtccatcttggccatctatgctggagccatcaagtcttcttttgctcctccacacttcccggtctgcatgctgggtaaccgcaccctttcatcaagacacattgacgtttgctctaagaccaaggaaattaacaacatgacagtcccatcaaagttatggggattcttctgtaactcgagtcaatttttcaatgccacctgtgatgaatactttgttcacaataacgtcacttcaatccagggcattcctggattggctagtggtataattacagagaatctttggagtaattacctacccaagggagagatcatcgaaaagccttcagccaaatcttctgatgtcttaggcagcttaaaccatgaatatgttcttgttgacatcaccacctccttcacgcttctggtgggaatcttctttccctctgttacaggtatcatggctggatcaaacagatctggagatctgaaagatgctcagaagtctattccgattggtactatccttgccatcctgaccacctcctttgtttatttaagcaatgttgtcctttttggtgcatgtattgaaggggttgttctcagagacaagttcggtgatgctgtgaaaggtaatttggtggtaggcaccttatcttggccatccccatgggtgattgttattggctccttcttttcaacatgtggggctggacttcagagcctcacaggtgcaccgaggctgctacaagctattgccaaggataacatcataccgtttctgagggtttttggccacagcaaagccaatggggaacctacctgggctttacttctaactgctgccattgcagagcttggaatactcattgcctccctggatcttgtggccccaattctttccatgttttttctcatgtgttacctctttgtaaacttggcatgtgccttgcaaacattacttcgaacacccaactggagaccccgattccgctactaccattgggccctttctttcatgggaatgagtatctgtctggctctgatgttcatttcttcctggtattatgccattgtagccatggtaatagctggtatgatctacaagtacattgaataccaaggagctgagaaagaatggggtgatggtatccgtgggctgtccctcagtgcagcccggtttgctttgcttcgattggaggaaggacctccacacactaaaaactggaggcctcagttgcttgtattactgaaactagatgaagacttacatgtcaagcatcctcgcctcctcacctttgcctcacagctcaaagcaggaaaaggtctcactattgtgggctctgtcatcgtggggaacttcctagagaactacggtgaagctttagctgctgagcagaccataaagcacctaatggaggcagagaaggtaaaaggattctgccagctggtggtggccgccaagctgagagagggcatttcccacctcatccagtcatgtggccttgggggcatgaagcacaacacggtggtgatgggctggcctaatggctggcgtcaaagcgaagatgcccgcgcttggaagacttttattggcacagttcgagtgacaactgctgcccatcttgcactgctggtggctaaaaacatctccttctttcccagcaatgtggagcaattttctgagggcaacattgatgtgtggtggattgtgcatgatggggggatgcttatgctactaccattcctactgaaacagcacaaggtgtggcgaaagtgcagcatacggatcttcacagtagcccaattagaagacaacagtatccaaatgaagaaggacctagccaccttcctatatcacttacgcattgaggcggaggtagaagtggtggagatgcatgacagtgatatatcagcatatacttacgagcgcactttgatgatggaacaaaggtcccagatgctccggcacatgcggctatccaaaacagagcgagacagagaggcacaattggtgaaagaccgaaactcaatgctacgattgaccagcattggctctgatgaggacgaagagacagaaacctatcaggagaaggtgcacatgacttggacaaaagacaagtacatggcatcccggggacaaaaagcgaagtcaatggaaggattccaggacctgcttaacatgcgtccggaccagtccaatgtgaggcggatgcatacagcagtgaaactcaacgaggttatagttaacaagtcccatgaagcaaagctggttttattgaatatgccagggccaccccgaaaccctgagggtgatgaaaactacatggagttcctagaggtgcttaccgagggactagagcgagtcctacttgtccggggtggtggcagtgaagtgatcaccatttattcataa

SEQ ID NO: 315525 - DNA, 3725 bp, Artificial Sequence
  derived and/or modified sequence
actcggtcaccgcgggctgcggcggctgggcggggctttcgggcgcccgcgggacggttccgccctctcactgcacccccgggcttctcttcgcaagaacaaaatgcatcctccagaaaccaccaccaagatggcttcagttcggttcatggtgacaccgacaaagatcgatgacattccaggtttgtcagacaccagtccggacctcagctctcgatctagttcccgagtaagatttagctcccgggaaagcgtgcctgaaacaagccggagtgagcctatgagtgagatgtctggggccaccacttcgctggcaactgttgcactggatccacccagtgaccggacttctcacccccaggatgtcatcgaggacctgagtcagaactccatcacaggggaacacagccaactgttagacgacggacataagaaagctcgaaatgcttatctcaataattccaattatgaagaaggagatgaatattttgataaaaatttggcactctttgaggaagaaatggacaccagaccgaaggtgtcttccctcctcaaccgcatggccaattacactaatctgactcaaggagcaaaggaacatgaagaggcagaaaacatcactgaagggaaaaagaagcccaccaagaccccccaaatgggtaccttcatgggtgtctacctcccatgtctacaaaatatttttggagtgatcctttttttacgccttacatgggtggtgggcacagctggagttcttcaggcttttgcaattgtccttatctgctgctgctgtacaatgttgactgctatctccatgagtgccattgccactaatggagtggtgccagctgggggctcatactttatgatttcccgggcactgggcccagagtttggtggggctgttggcctctgcttttatcttggtaccacatttgcagcagccatgtacatccttggtgccattgaaatctttctggtctatatcgtcccccgagctgccatctttcacagtgatgacgcactcaaggaatcagcagccatgctaaataacatgcgtgtctacggcacagctttcttggtccttatggtattagtggtatttatcggcgtacgctatgtgaacaagtttgcctcacttttcctggcctgtgtcattgtgtccatcttggccatctatgctggagccatcaagtcttcttttgctcctccacacttcccggtctgcatgctgggtaaccgcaccctttcatcaagacacattgacgtttgctctaagaccaaggaaattaacaacatgacagtcccatcaaagttatggggattcttctgtaactcgagtcaatttttcaatgccacctgtgatgaatactttgttcacaataacgtcacttcaatccagggcattcctggattggctagtggtataattacagagaatctttggagtaattacctacccaagggagagatcatcgaaaagccttcagccaaatcttctgatgtcttaggcagcttaaaccatgaatatgttcttgttgacatcaccacctccttcacgcttctggtgggaatcttctttccctctgttacaggtatcatggctggatcaaacagatctggagatctgaaagatgctcagaagtctattccgattggtactatccttgccatcctgaccacctcctttgtttatttaagcaatgttgtcctttttggtgcatgtattgaaggggttgttctcagagacaagttcggtgatgctgtgaaaggtaatttggtggtaggcaccttatcttggccatccccatgggtgattgttattggctccttcttttcaacatgtggggctggacttcagagcctcacaggtgcaccgaggctgctacaagctattgccaaggataacatcataccgtttctgagggtttttggccacagcaaagccaatggggaacctacctgggctttacttctaactgctgccattgcagagcttggaatactcattgcctccctggatcttgtggccccaattctttccatgttttttctcatgtgttacctctttgtaaacttggcatgtgccttgcaaacattacttcgaacacccaactggagaccccgattccgctactaccattgggccctttctttcatgggaatgagtatctgtctggctctgatgttcatttcttcctggtattatgccattgtagccatggtaatagctggtatgatctacaagtacattgaataccaaggagctgagaaagaatggggtgatggtatccgtgggctgtccctcagtgcagcccggtttgctttgcttcgattggaggaaggacctccacacactaaaaactggaggcctcagttgcttgtattactgaaactagatgaagacttacatgtcaagcatcctcgcctcctcacctttgcctcacagctcaaagcaggaaaaggtctcactattgtgggctctgtcatcgtggggaacttcctagagaactacggtgaagctttagctgctgagcagaccataaagcacctaatggaggcagagaaggtaaaaggattctgccagctggtggtggccgccaagctgagagagggcatttcccacctcatccagtcatgtggccttgggggcatgaagcacaacacggtggtgatgggctggcctaatggctggcgtcaaagcgaagatgcccgcgcttggaagacttttattggcacagttcgagtgacaactgctgcccatcttgcactgctggtggctaaaaacatctccttctttcccagcaatgtggagcaattttctgagggcaacattgatgtgtggtggattgtgcatgatggggggatgcttatgctactaccattcctactgaaacagcacaaggtgtggcgaaagtgcagcatacggatcttcacagtagcccaattagaagacaacagtatccaaatgaagaaggacctagccaccttcctatatcacttacgcattgaggcggaggtagaagtggtggagatgcatgacagtgatatatcagcatatacttacgagcgcactttgatgatggaacaaaggtcccagatgctccggcacatgcggctatccaaaacagagcgagacagagaggcacaattggtgaaagaccgaaactcaatgctacgattgaccagcattggctctgatgaggacgaagagacagaaacctatcaggagaaggtgcacatgacttggacaaaagacaagtacatggcatcccggggacaaaaagcgaagtcaatggaaggattccaggacctgcttaacatgcgtccggaccagtccaatgtgaggcggatgcatacagcagtgaaactcaacgaggttatagttaacaagtcccatgaagcaaagctggttttattgaatatgccagggccaccccgaaaccctgagggtgatgaaaactacatggagttcctagaggtgcttaccgagggactagagcgagtcctacttgtccggggtggtggcagtgaagtgatcaccatttattcataacctactctgaatgaccgtgcttgacctgttttcttaaaaggcctacgtcctccatggaagtgccagctcattactaccactcccactcaactagaagcctgtgttctgtacacatcatactgaactcttgatgagctgagcctcaagtacctgtgtaaaagagctccca

SEQ ID NO: 315526 - DNA, 4239 bp, Artificial Sequence
  derived and/or modified sequence
tgagtagaagtattcttagttggggctttttgtgtggtgtgaatcaaggttattgaaatgtgttatttttcaagttatcttttgtattgcagtcaaaagtagctagcgtaagaggaagattttgcgaggttccccccactttttttgttcttaaaaagaacaaaatgcatcctccagaaaccaccaccaagatggcttcagttcggttcatggtgacaccgacaaagatcgatgacattccaggtttgtcagacaccagtccggacctcagctctcgatctagttcccgagtaagatttagctcccgggaaagcgtgcctgaaacaagccggagtgagcctatgagtgagatgtctggggccaccacttcgctggcaactgttgcactggatccacccagtgaccggacttctcacccccaggatgtcatcgaggacctgagtcagaactccatcacaggggaacacagccaactgttagacgacggacataagaaagctcgaaatgcttatctcaataattccaattatgaagaaggagatgaatattttgataaaaatttggcactctttgaggaagaaatggacaccagaccgaaggtgtcttccctcctcaaccgcatggccaattacactaatctgactcaaggagcaaaggaacatgaagaggcagaaaacatcactgaagggaaaaagaagcccaccaagaccccccaaatgggtaccttcatgggtgtctacctcccatgtctacaaaatatttttggagtgatcctttttttacgccttacatgggtggtgggcacagctggagttcttcaggcttttgcaattgtccttatctgctgctgctgtacaatgttgactgctatctccatgagtgccattgccactaatggagtggtgccagctgggggctcatactttatgatttcccgggcactgggcccagagtttggtggggctgttggcctctgcttttatcttggtaccacatttgcagcagccatgtacatccttggtgccattgaaatctttctggtctatatcgtcccccgagctgccatctttcacagtgatgacgcactcaaggaatcagcagccatgctaaataacatgcgtgtctacggcacagctttcttggtccttatggtattagtggtatttatcggcgtacgctatgtgaacaagtttgcctcacttttcctggcctgtgtcattgtgtccatcttggccatctatgctggagccatcaagtcttcttttgctcctccacacttcccggtctgcatgctgggtaaccgcaccctttcatcaagacacattgacgtttgctctaagaccaaggaaattaacaacatgacagtcccatcaaagttatggggattcttctgtaactcgagtcaatttttcaatgccacctgtgatgaatactttgttcacaataacgtcacttcaatccagggcattcctggattggctagtggtataattacagagaatctttggagtaattacctacccaagggagagatcatcgaaaagccttcagccaaatcttctgatgtcttaggcagcttaaaccatgaatatgttcttgttgacatcaccacctccttcacgcttctggtgggaatcttctttccctctgttacaggtatcatggctggatcaaacagatctggagatctgaaagatgctcagaagtctattccgattggtactatccttgccatcctgaccacctcctttgtttatttaagcaatgttgtcctttttggtgcatgtattgaaggggttgttctcagagacaagttcggtgatgctgtgaaaggtaatttggtggtaggcaccttatcttggccatccccatgggtgattgttattggctccttcttttcaacatgtggggctggacttcagagcctcacaggtgcaccgaggctgctacaagctattgccaaggataacatcataccgtttctgagggtttttggccacagcaaagccaatggggaacctacctgggctttacttctaactgctgccattgcagagcttggaatactcattgcctccctggatcttgtggccccaattctttccatgttttttctcatgtgttacctctttgtaaacttggcatgtgccttgcaaacattacttcgaacacccaactggagaccccgattccgctactaccattgggccctttctttcatgggaatgagtatctgtctggctctgatgttcatttcttcctggtattatgccattgtagccatggtaatagctggtatgatctacaagtacattgaataccaaggagctgagaaagaatggggtgatggtatccgtgggctgtccctcagtgcagcccggtttgctttgcttcgattggaggaaggacctccacacactaaaaactggaggcctcagttgcttgtattactgaaactagatgaagacttacatgtcaagcatcctcgcctcctcacctttgcctcacagctcaaagcaggaaaaggtctcactattgtgggctctgtcatcgtggggaacttcctagagaactacggtgaagctttagctgctgagcagaccataaagcacctaatggaggcagagaaggtaaaaggattctgccagctggtggtggccgccaagctgagagagggcatttcccacctcatccagtcatgtggccttgggggcatgaagcacaacacggtggtgatgggctggcctaatggctggcgtcaaagcgaagatgcccgcgcttggaagacttttattggcacagttcgagtgacaactgctgcccatcttgcactgctggtggctaaaaacatctccttctttcccagcaatgtggagcaattttctgagggcaacattgatgtgtggtggattgtgcatgatggggggatgcttatgctactaccattcctactgaaacagcacaaggtgtggcgaaagtgcagcatacggatcttcacagtagcccaattagaagacaacagtatccaaatgaagaaggacctagccaccttcctatatcacttacgcattgaggcggaggtagaagtggtggagatgcatgacagtgatatatcagcatatacttacgagcgcactttgatgatggaacaaaggtcccagatgctccggcacatgcggctatccaaaacagagcgagacagagaggcacaattggtgaaagaccgaaactcaatgctacgattgaccagcattggctctgatgaggacgaagagacagaaacctatcaggagaaggtgcacatgacttggacaaaagacaagtacatggcatcccggggacaaaaagcgaagtcaatggaaggattccaggacctgcttaacatgcgtccggaccagtccaatgtgaggcggatgcatacagcagtgaaactcaacgaggttatagttaacaagtcccatgaagcaaagctggttttattgaatatgccagggccaccccgaaaccctgagggtgatgaaaactacatggagttcctagaggtgcttaccgagggactagagcgagtcctacttgtccggggtggtggcagtgaagtgatcaccatttattcataacctactctgaatgaccgtgcttgacctgttttcttaaaaggcctacgtcctccatggaagtgccagctcattactaccactcccactcaactagaagcctgtgttctgtacacatcatactgaactcttgatgagctgagcctcaagtacctgtgtaaaagagctcccatctgatctgcagtcattacagaaaaagcaaatattccctcaacatcagaacaatgctcaagtctttcaagccacgtctgagcagtcaaaggcaaattagaattaacaagctgagccaataaatgaattggtaaaagggatgctagaaattcaactgaagaaaaaaagcaagtcaagtacgtattcagcattaaagatgaatctcagaagtcatggttcaatgttgacactgtgaggataacaactagagacagcttcatcttactaaagaatttatggtcaagtatatttggacctattatcctcggcaagccaagatgcaaacattttttagctatatttctttagtatacccactgctgtaattttatattaggatactaacttgaaacatggctgcagcctctacttcttcaaaaacatccccccaaaataccagatttaaatatccaaa

SEQ ID NO: 315527 - DNA, 3453 bp, Artificial Sequence
  derived and/or modified sequence
atgcacccccccgagaccaccaccaagatggccagcgtgagattcatggtgacccccaccaagatcgacgacatccccggcctgagcgacaccagccccgacctgagcagcagaagcagcagcagagtgagattcagcagcagagagagcgtgcccgagaccagcagaagcgagcccatgagcgagatgagcggcgccaccaccagcctggccaccgtggccctggacccccccagcgacagaaccagccacccccaggacgtgatcgaggacctgagccagaacagcatcaccggcgagcacagccagctgctggacgacggccacaagaaggccagaaacgcctacctgaacaacagcaactacgaggagggcgacgagtacttcgacaagaacctggccctgttcgaggaggagatggacaccagacccaaggtgagcagcctgctgaacagaatggccaactacaccaacctgacccagggcgccaaggagcacgaggaggccgagaacatcaccgagggcaagaagaagcccaccaagaccccccagatgggcaccttcatgggcgtgtacctgccctgcctgcagaacatcttcggcgtgatcctgttcctgagactgacctgggtggtgggcaccgccggcgtgctgcaggccttcgccatcgtgctgatctgctgctgctgcaccatgctgaccgccatcagcatgagcgccatcgccaccaacggcgtggtgcccgccggcggcagctacttcatgatcagcagagccctgggccccgagttcggcggcgccgtgggcctgtgcttctacctgggcaccaccttcgccgccgccatgtacatcctgggcgccatcgagatcttcctggtgtacatcgtgcccagagccgccatcttccacagcgacgacgccctgaaggagagcgccgccatgctgaacaacatgagagtgtacggcaccgccttcctggtgctgatggtgctggtggtgttcatcggcgtgagatacgtgaacaagttcgccagcctgttcctggcctgcgtgatcgtgagcatcctggccatctacgccggcgccatcaagagcagcttcgcccccccccacttccccgtgtgcatgctgggcaacagaaccctgagcagcagacacatcgacgtgtgcagcaagaccaaggagatcaacaacatgaccgtgcccagcaagctgtggggcttcttctgcaacagcagccagttcttcaacgccacctgcgacgagtacttcgtgcacaacaacgtgaccagcatccagggcatccccggcctggccagcggcatcatcaccgagaacctgtggagcaactacctgcccaagggcgagatcatcgagaagcccagcgccaagagcagcgacgtgctgggcagcctgaaccacgagtacgtgctggtggacatcaccaccagcttcaccctgctggtgggcatcttcttccccagcgtgaccggcatcatggccggcagcaacagaagcggcgacctgaaggacgcccagaagagcatccccatcggcaccatcctggccatcctgaccaccagcttcgtgtacctgagcaacgtggtgctgttcggcgcctgcatcgagggcgtggtgctgagagacaagttcggcgacgccgtgaagggcaacctggtggtgggcaccctgagctggcccagcccctgggtgatcgtgatcggcagcttcttcagcacctgcggcgccggcctgcagagcctgaccggcgcccccagactgctgcaggccatcgccaaggacaacatcatccccttcctgagagtgttcggccacagcaaggccaacggcgagcccacctgggccctgctgctgaccgccgccatcgccgagctgggcatcctgatcgccagcctggacctggtggcccccatcctgagcatgttcttcctgatgtgctacctgttcgtgaacctggcctgcgccctgcagaccctgctgagaacccccaactggagacccagattcagatactaccactgggccctgagcttcatgggcatgagcatctgcctggccctgatgttcatcagcagctggtactacgccatcgtggccatggtgatcgccggcatgatctacaagtacatcgagtaccagggcgccgagaaggagtggggcgacggcatcagaggcctgagcctgagcgccgccagattcgccctgctgagactggaggagggccccccccacaccaagaactggagaccccagctgctggtgctgctgaagctggacgaggacctgcacgtgaagcaccccagactgctgaccttcgccagccagctgaaggccggcaagggcctgaccatcgtgggcagcgtgatcgtgggcaacttcctggagaactacggcgaggccctggccgccgagcagaccatcaagcacctgatggaggccgagaaggtgaagggcttctgccagctggtggtggccgccaagctgagagagggcatcagccacctgatccagagctgcggcctgggcggcatgaagcacaacaccgtggtgatgggctggcccaacggctggagacagagcgaggacgccagagcctggaagaccttcatcggcaccgtgagagtgaccaccgccgcccacctggccctgctggtggccaagaacatcagcttcttccccagcaacgtggagcagttcagcgagggcaacatcgacgtgtggtggatcgtgcacgacggcggcatgctgatgctgctgcccttcctgctgaagcagcacaaggtgtggagaaagtgcagcatcagaatcttcaccgtggcccagctggaggacaacagcatccagatgaagaaggacctggccaccttcctgtaccacctgagaatcgaggccgaggtggaggtggtggagatgcacgacagcgacatcagcgcctacacctacgagagaaccctgatgatggagcagagaagccagatgctgagacacatgagactgagcaagaccgagagagacagagaggcccagctggtgaaggacagaaacagcatgctgagactgaccagcatcggcagcgacgaggacgaggagaccgagacctaccaggagaaggtgcacatgacctggaccaaggacaagtacatggccagcagaggccagaaggccaagagcatggagggcttccaggacctgctgaacatgagacccgaccagagcaacgtgagaagaatgcacaccgccgtgaagctgaacgaggtgatcgtgaacaagagccacgaggccaagctggtgctgctgaacatgcccggcccccccagaaaccccgagggcgacgagaactacatggagttcctggaggtgctgaccgagggcctggagagagtgctgctggtgagaggcggcggcagcgaggtgatcaccatctacagctag

SEQ ID NO: 315528 - DNA, 3276 bp, Artificial Sequence
  derived and/or modified sequence
atgagcgagatgagcggcgccaccaccagcctggccaccgtggccctggacccccccagcgacagaaccagccacccccaggacgtgatcgaggacctgagccagaacagcatcaccggcgagcacagccagctgctggacgacggccacaagaaggccagaaacgcctacctgaacaacagcaactacgaggagggcgacgagtacttcgacaagaacctggccctgttcgaggaggagatggacaccagacccaaggtgagcagcctgctgaacagaatggccaactacaccaacctgacccagggcgccaaggagcacgaggaggccgagaacatcaccgagggcaagaagaagcccaccaagaccccccagatgggcaccttcatgggcgtgtacctgccctgcctgcagaacatcttcggcgtgatcctgttcctgagactgacctgggtggtgggcaccgccggcgtgctgcaggccttcgccatcgtgctgatctgctgctgctgcaccatgctgaccgccatcagcatgagcgccatcgccaccaacggcgtggtgcccgccggcggcagctacttcatgatcagcagagccctgggccccgagttcggcggcgccgtgggcctgtgcttctacctgggcaccaccttcgccgccgccatgtacatcctgggcgccatcgagatcttcctggtgtacatcgtgcccagagccgccatcttccacagcgacgacgccctgaaggagagcgccgccatgctgaacaacatgagagtgtacggcaccgccttcctggtgctgatggtgctggtggtgttcatcggcgtgagatacgtgaacaagttcgccagcctgttcctggcctgcgtgatcgtgagcatcctggccatctacgccggcgccatcaagagcagcttcgcccccccccacttccccgtgtgcatgctgggcaacagaaccctgagcagcagacacatcgacgtgtgcagcaagaccaaggagatcaacaacatgaccgtgcccagcaagctgtggggcttcttctgcaacagcagccagttcttcaacgccacctgcgacgagtacttcgtgcacaacaacgtgaccagcatccagggcatccccggcctggccagcggcatcatcaccgagaacctgtggagcaactacctgcccaagggcgagatcatcgagaagcccagcgccaagagcagcgacgtgctgggcagcctgaaccacgagtacgtgctggtggacatcaccaccagcttcaccctgctggtgggcatcttcttccccagcgtgaccggcatcatggccggcagcaacagaagcggcgacctgaaggacgcccagaagagcatccccatcggcaccatcctggccatcctgaccaccagcttcgtgtacctgagcaacgtggtgctgttcggcgcctgcatcgagggcgtggtgctgagagacaagttcggcgacgccgtgaagggcaacctggtggtgggcaccctgagctggcccagcccctgggtgatcgtgatcggcagcttcttcagcacctgcggcgccggcctgcagagcctgaccggcgcccccagactgctgcaggccatcgccaaggacaacatcatccccttcctgagagtgttcggccacagcaaggccaacggcgagcccacctgggccctgctgctgaccgccgccatcgccgagctgggcatcctgatcgccagcctggacctggtggcccccatcctgagcatgttcttcctgatgtgctacctgttcgtgaacctggcctgcgccctgcagaccctgctgagaacccccaactggagacccagattcagatactaccactgggccctgagcttcatgggcatgagcatctgcctggccctgatgttcatcagcagctggtactacgccatcgtggccatggtgatcgccggcatgatctacaagtacatcgagtaccagggcgccgagaaggagtggggcgacggcatcagaggcctgagcctgagcgccgccagattcgccctgctgagactggaggagggccccccccacaccaagaactggagaccccagctgctggtgctgctgaagctggacgaggacctgcacgtgaagcaccccagactgctgaccttcgccagccagctgaaggccggcaagggcctgaccatcgtgggcagcgtgatcgtgggcaacttcctggagaactacggcgaggccctggccgccgagcagaccatcaagcacctgatggaggccgagaaggtgaagggcttctgccagctggtggtggccgccaagctgagagagggcatcagccacctgatccagagctgcggcctgggcggcatgaagcacaacaccgtggtgatgggctggcccaacggctggagacagagcgaggacgccagagcctggaagaccttcatcggcaccgtgagagtgaccaccgccgcccacctggccctgctggtggccaagaacatcagcttcttccccagcaacgtggagcagttcagcgagggcaacatcgacgtgtggtggatcgtgcacgacggcggcatgctgatgctgctgcccttcctgctgaagcagcacaaggtgtggagaaagtgcagcatcagaatcttcaccgtggcccagctggaggacaacagcatccagatgaagaaggacctggccaccttcctgtaccacctgagaatcgaggccgaggtggaggtggtggagatgcacgacagcgacatcagcgcctacacctacgagagaaccctgatgatggagcagagaagccagatgctgagacacatgagactgagcaagaccgagagagacagagaggcccagctggtgaaggacagaaacagcatgctgagactgaccagcatcggcagcgacgaggacgaggagaccgagacctaccaggagaaggtgcacatgacctggaccaaggacaagtacatggccagcagaggccagaaggccaagagcatggagggcttccaggacctgctgaacatgagacccgaccagagcaacgtgagaagaatgcacaccgccgtgaagctgaacgaggtgatcgtgaacaagagccacgaggccaagctggtgctgctgaacatgcccggcccccccagaaaccccgagggcgacgagaactacatggagttcctggaggtgctgaccgagggcctggagagagtgctgctggtgagaggcggcggcagcgaggtgatcaccatctacagctag

SEQ ID NO: 315529 - DNA, 3426 bp, Artificial Sequence
  derived and/or modified sequence
atggccagcgtgagattcatggtgacccccaccaagatcgacgacatccccggcctgagcgacaccagccccgacctgagcagcagaagcagcagcagagtgagattcagcagcagagagagcgtgcccgagaccagcagaagcgagcccatgagcgagatgagcggcgccaccaccagcctggccaccgtggccctggacccccccagcgacagaaccagccacccccaggacgtgatcgaggacctgagccagaacagcatcaccggcgagcacagccagctgctggacgacggccacaagaaggccagaaacgcctacctgaacaacagcaactacgaggagggcgacgagtacttcgacaagaacctggccctgttcgaggaggagatggacaccagacccaaggtgagcagcctgctgaacagaatggccaactacaccaacctgacccagggcgccaaggagcacgaggaggccgagaacatcaccgagggcaagaagaagcccaccaagaccccccagatgggcaccttcatgggcgtgtacctgccctgcctgcagaacatcttcggcgtgatcctgttcctgagactgacctgggtggtgggcaccgccggcgtgctgcaggccttcgccatcgtgctgatctgctgctgctgcaccatgctgaccgccatcagcatgagcgccatcgccaccaacggcgtggtgcccgccggcggcagctacttcatgatcagcagagccctgggccccgagttcggcggcgccgtgggcctgtgcttctacctgggcaccaccttcgccgccgccatgtacatcctgggcgccatcgagatcttcctggtgtacatcgtgcccagagccgccatcttccacagcgacgacgccctgaaggagagcgccgccatgctgaacaacatgagagtgtacggcaccgccttcctggtgctgatggtgctggtggtgttcatcggcgtgagatacgtgaacaagttcgccagcctgttcctggcctgcgtgatcgtgagcatcctggccatctacgccggcgccatcaagagcagcttcgcccccccccacttccccgtgtgcatgctgggcaacagaaccctgagcagcagacacatcgacgtgtgcagcaagaccaaggagatcaacaacatgaccgtgcccagcaagctgtggggcttcttctgcaacagcagccagttcttcaacgccacctgcgacgagtacttcgtgcacaacaacgtgaccagcatccagggcatccccggcctggccagcggcatcatcaccgagaacctgtggagcaactacctgcccaagggcgagatcatcgagaagcccagcgccaagagcagcgacgtgctgggcagcctgaaccacgagtacgtgctggtggacatcaccaccagcttcaccctgctggtgggcatcttcttccccagcgtgaccggcatcatggccggcagcaacagaagcggcgacctgaaggacgcccagaagagcatccccatcggcaccatcctggccatcctgaccaccagcttcgtgtacctgagcaacgtggtgctgttcggcgcctgcatcgagggcgtggtgctgagagacaagttcggcgacgccgtgaagggcaacctggtggtgggcaccctgagctggcccagcccctgggtgatcgtgatcggcagcttcttcagcacctgcggcgccggcctgcagagcctgaccggcgcccccagactgctgcaggccatcgccaaggacaacatcatccccttcctgagagtgttcggccacagcaaggccaacggcgagcccacctgggccctgctgctgaccgccgccatcgccgagctgggcatcctgatcgccagcctggacctggtggcccccatcctgagcatgttcttcctgatgtgctacctgttcgtgaacctggcctgcgccctgcagaccctgctgagaacccccaactggagacccagattcagatactaccactgggccctgagcttcatgggcatgagcatctgcctggccctgatgttcatcagcagctggtactacgccatcgtggccatggtgatcgccggcatgatctacaagtacatcgagtaccagggcgccgagaaggagtggggcgacggcatcagaggcctgagcctgagcgccgccagattcgccctgctgagactggaggagggccccccccacaccaagaactggagaccccagctgctggtgctgctgaagctggacgaggacctgcacgtgaagcaccccagactgctgaccttcgccagccagctgaaggccggcaagggcctgaccatcgtgggcagcgtgatcgtgggcaacttcctggagaactacggcgaggccctggccgccgagcagaccatcaagcacctgatggaggccgagaaggtgaagggcttctgccagctggtggtggccgccaagctgagagagggcatcagccacctgatccagagctgcggcctgggcggcatgaagcacaacaccgtggtgatgggctggcccaacggctggagacagagcgaggacgccagagcctggaagaccttcatcggcaccgtgagagtgaccaccgccgcccacctggccctgctggtggccaagaacatcagcttcttccccagcaacgtggagcagttcagcgagggcaacatcgacgtgtggtggatcgtgcacgacggcggcatgctgatgctgctgcccttcctgctgaagcagcacaaggtgtggagaaagtgcagcatcagaatcttcaccgtggcccagctggaggacaacagcatccagatgaagaaggacctggccaccttcctgtaccacctgagaatcgaggccgaggtggaggtggtggagatgcacgacagcgacatcagcgcctacacctacgagagaaccctgatgatggagcagagaagccagatgctgagacacatgagactgagcaagaccgagagagacagagaggcccagctggtgaaggacagaaacagcatgctgagactgaccagcatcggcagcgacgaggacgaggagaccgagacctaccaggagaaggtgcacatgacctggaccaaggacaagtacatggccagcagaggccagaaggccaagagcatggagggcttccaggacctgctgaacatgagacccgaccagagcaacgtgagaagaatgcacaccgccgtgaagctgaacgaggtgatcgtgaacaagagccacgaggccaagctggtgctgctgaacatgcccggcccccccagaaaccccgagggcgacgagaactacatggagttcctggaggtgctgaccgagggcctggagagagtgctgctggtgagaggcggcggcagcgaggtgatcaccatctacagctag

SEQ ID NO: 315530 - DNA, 186 bp, Artificial Sequence
  derived and/or modified sequence
atgagtgagatgtcaggcgctaccactagcctcgccacagtggctcttgatccccctagcgaccgtacctcccacccgcaagatgtcatagaggacctgagtcagaattctatcacgggcgaacactcgcaactgttagatgacgggcataaaaaggcccgcaatgcatacttgaacaacagctag

SEQ ID NO: 315531 - DNA, 459 bp, Artificial Sequence
  derived and/or modified sequence
atggcctccgtgagatttatggtaacgccgacgaagattgacgacatcccagggctgtccgacacttcccctgacctctcgtcacggagcagtagtagggtgcggttcagtagcagggagtctgtacctgagacctcccggtctgagcccatgtctgagatgtctggggcaaccaccagcctcgcaaccgtggcgctggacccacctagcgacaggacctctcaccctcaggatgtgatcgaggatctctctcaaaacagtataacaggtgagcatagccagcttctcgatgacggccataaaaaagctcgcaatgcttatctgaacaattcaaactatgaggaaggtgatgagtacttcgacaagaatctggccttattcgaggaggaaatggataccagaccaaaagtgagctcccttctgaacaggatggctaattacactaacctcacgcagtag

SEQ ID NO: 315532 - DNA, 186 bp, Artificial Sequence
  derived and/or modified sequence
atgtctgagatgtctggggccaccaccagcctggccaccgtggccctggacccccccagcgacaggaccagccacccccaggatgtgattgaggacctgagccagaacagcatcactggagagcacagccagctgctggatgatggccacaagaaggccagaaatgcctacctgaacaacagctag

SEQ ID NO: 315533 - DNA, 459 bp, Artificial Sequence
  derived and/or modified sequence
atggcctctgtgcgcttcatggtgacccccaccaagattgatgacatccctggcctgagtgacaccagcccagacctgagcagccgcagcagcagccgggtgcgcttcagcagccgggagagcgtgcctgagaccagccgctctgagcccatgtctgagatgtctggggccaccaccagcctggccaccgtggccctggacccccccagcgacaggaccagccacccccaggatgtgattgaggacctgagccagaacagcatcactggagagcacagccagctgctggatgatggccacaagaaggccagaaatgcctacctgaacaacagcaactatgaggagggagatgagtactttgacaagaacctggccctgtttgaggaggagatggacacccggcccaaggtgagcagcctgctgaacaggatggccaactacaccaacctgacccagtag

SEQ ID NO: 315534 - DNA, 186 bp, Artificial Sequence
  derived and/or modified sequence
atgagcgagatgagcggcgccaccaccagcctggccaccgtggccctggacccccctagtgatagaacctcacatccacaggatgttattgaggacctgagccagaattcaattacaggggaacatagtcagctgctcgatgatggtcataagaaagccaggaacgcttacctaaacaactcctag

SEQ ID NO: 315535 - DNA, 459 bp, Artificial Sequence
  derived and/or modified sequence
atggccagcgtgcggttcatggtgacccccaccaagatcgacgacataccaggcttgtctgatacaagccccgatctgagctcccgttcctcctctcgtgtgcggtttagctctcgggagagcgtccccgagactagtcgaagcgagcctatgtctgaaatgtctggggcaactacatcacttgccactgtagcactcgacccccccagtgaccggacctctcatccacaggatgtgatagaggatctgtctcagaactcgatcacgggagagcattcgcaacttctggatgatggacataagaaggcccggaatgcctaccttaataattctaactacgaagagggcgacgaatacttcgataagaacctggccctatttgaggaggagatggataccaggcccaaggttagtagcctgttaaaccggatggcaaactacaccaatttgactcagtag

SEQ ID NO: 315536 - DNA, 186 bp, Artificial Sequence
  derived and/or modified sequence
atgagtgagatgtccggggctacgacaagcttagcgacagtggccttggatccacctagcgatagaacctcccatcctcaggatgtcattgaagacctatcgcaaaatagcataaccggagaacactcccagttgctcgatgatgggcacaagaaagcaagaaatgcttacctgaataactcctag

SEQ ID NO: 315537 - DNA, 459 bp, Artificial Sequence
  derived and/or modified sequence
atggcgtcagtgcggtttatggttactccaaccaagatcgacgacattccgggactgagcgacaccagtccagatctgtcctcaaggagctcgtctcgggtgcgtttttcatctcgcgaaagcgtcccagagacatctagaagcgaacccatgagcgaaatgtccggcgctacaacaagtcttgctaccgtcgcactcgaccctccctctgaccgaacatcccatccccaagacgttattgaagatttaagccagaatagcatcaccggcgagcacagccagctcctggatgacggacataaaaaggccaggaatgcttatttaaacaattccaactacgaagagggcgacgaatacttcgacaagaacctcgcactgttcgaagaggagatggacacccgccctaaggtcagctcactgctcaatagaatggctaattatacaaatttgactcagtag

SEQ ID NO: 315538 - DNA, 548 bp, Artificial Sequence
  derived and/or modified sequence
atcagctggcgccgggatactgcacctgcgacctccttctccctcaccctgctgcccagtcaggccagcctgcgtggccgtctcctcctctactgggaccctgaggaagaacgacgagggggtgacctgcgccggggcgggggtaggggagaacgcgcctccggcaaagggggtggctcgtcctgtcacacgcaggagaaacctagcgagcggaccgtggctcagtggactagctacgacttgccacgactctgagctgcagtccgaggtttgtcagacaccagtccggacctcagctctcgatctagttcccgagtaagatttagctcccgggaaagcgtgcctgaaacaagccggagtgagcctatgagtgagatgtctggggccaccacttcgctggcaactgttgcactggatccacccagtgaccggacttctcacccccaggatgtcatcgaggacctgagtcagaactccatcacaggggaacacagccaactgttagacgacggacataagaaagctcgaaatgcttatctcaataattc

SEQ ID NO: 315539 - DNA, 567 bp, Artificial Sequence
  derived and/or modified sequence
actcggtcaccgcgggctgcggcggctgggcggggctttcgggcgcccgcgggacggttccgccctctcactgcacccccgggcttctcttcgcaagaaaccaccaccaagatggcttcagttcggttcatggtgacaccgacaaagatcgatgacattccaggtttgtcagacaccagtccggacctcagctctcgatctagttcccgagtaagatttagctcccgggaaagcgtgcctgaaacaagccggagtgagcctatgagtgagatgtctggggccaccacttcgctggcaactgttgcactggatccacccagtgaccggacttctcacccccaggatgtcatcgaggacctgagtcagaactccatcacaggggaacacagccaactgttagacgacggacataagaaagctcgaaatgcttatctcaataattccaattatgaagaaggagatgaatattttgataaaaatttggcactctttgaggaagaaatggacaccagaccgaaggtgtcttccctcctcaaccgcatggccaattacactaatctgactcaa

SEQ ID NO: 315540 - DNA, 186 bp, Artificial Sequence
  derived and/or modified sequence
atgagcgagatgagcggcgccaccaccagcctggccaccgtggccctggacccccccagcgacagaaccagccacccccaggacgtgatcgaggacctgagccagaacagcatcaccggcgagcacagccagctgctggacgacggccacaagaaggccagaaacgcctacctgaacaacagctag

SEQ ID NO: 315541 - DNA, 459 bp, Artificial Sequence
  derived and/or modified sequence
atggccagcgtgagattcatggtgacccccaccaagatcgacgacatccccggcctgagcgacaccagccccgacctgagcagcagaagcagcagcagagtgagattcagcagcagagagagcgtgcccgagaccagcagaagcgagcccatgagcgagatgagcggcgccaccaccagcctggccaccgtggccctggacccccccagcgacagaaccagccacccccaggacgtgatcgaggacctgagccagaacagcatcaccggcgagcacagccagctgctggacgacggccacaagaaggccagaaacgcctacctgaacaacagcaactacgaggagggcgacgagtacttcgacaagaacctggccctgttcgaggaggagatggacaccagacccaaggtgagcagcctgctgaacagaatggccaactacaccaacctgacccagtag

SEQ ID NO: 315542 - DNA, 1016 bp, Artificial Sequence
  derived and/or modified sequence
actgcagccgcgagctcctggaggcggcgggatggaggcggcggccgagcctggaaacctggccggcgtcaggcacatcatcctggtcctctcaggaaaggggggcgttgggaaaagcaccatctccacggagctggccctggcactgcgccatgcaggcaagaagcgctgataaagcagtttgtgtccgacgtggcctggggggagctggactacctggtggtggacacgcccccggggacctccgatgagcacatggccaccatagaagccctgcgtccctaccagcccctgggggccctcgtggtcaccacgccccaggcggtgtccgtgggggacgtgaggcgcgagctgaccttctgtaggaagacgggcttgcgggtgatgggaatcgtggagaatatgagcggcttcacctgcccacactgcacggagtgcaccagcgtcttctccaggggcggcggagaggagctggcccagctcgccggggtgcccttcttaggctccgtgcccctggaccctgcgctcatgaggaccctggaggagggccacgacttcatccaggagttccctgggagccccgccttcgctgcactcacctccatagcccagaagattctggacgcgacgcccgcgtgcctcccctgactaaggccaccttgcagccgctttccagggccaccaagggctctgctccagcctctcagagaaacagaggcctgggctcggttcccgggccctgcaggggcaggcccaggcagcgtcagccggagagcttctccccgaccagcccagccccaggatgtgtcgcaccagcagctctgcctggttggcctgcagtgccgtggtctgcgtgctctgcagctgtgagacgggggcggcctgggctctcttcccatccatgttgcctacctgtgcccctggcagccgcgtgtccacacagttagcggagcgcgggacttctgcagtcctcaggtgaccccgggcctccagcaccctgggtcgctgtcatctgt

SEQ ID NO: 315543 - protein, 630 aa, Artificial Sequence
  derived and/or modified sequence
MALPTARPLLGSCGTPALGSLLFLLFSLGWVQPSRTLAGETGQEAAPLDGVLANPPNISSLSPRQLLGFPCAEVSGLSTERVRELAVALAQKNVKLSTEQLRCLAHRLSEPPEDLDALPLDLLLFLNPDAFSGPQACTRFFSRITKANVDLLPRGAPERQRLLPAALACWGVRGSLLSEADVRALGGLACDLPGRFVAESAEVLLPRLVSCPGPLDQDQQEAARAALQGGGPPYGPPSTWSVSTMDALRGLLPVLGQPIIRSIPQGIVAAWRQRSSRDPSWRQPERTILRPRFRREVEKTACPSGKKAREIDESLIFYKKWELEACVDAALLATQMDRVNAIPFTYEQLDVLKHKLDELYPQGYPESVIQHLGYLFLKMSPEDIRKWNVTSLETLKALLEVNKGHEMSPQAPRRPLPQVATLIDRFVKGRGQLDKDTLDTLTAFYPGYLCSLSPEELSSVPPSSIWAVRPQDLDTCDPRQLDVLYPKARLAFQNMNGSEYFVKIQSFLGGAPTEDLKALSQQNVSMDLATFMKLRTDAVLPLTVAEVQKLLGPHVEGLKAEERHRPVRDWILRQRQDDLDTLGLGLQGGIPNGYLVLDLSMQEALSGTPCLLGPGPVLTVLALLLASTLA

SEQ ID NO: 315544 - DNA, 1893 bp, Artificial Sequence
  derived and/or modified sequence
atggcccttcctactgcccggccactgctgggctcctgcggtaccccagcattgggttccctgctgttcctcctttttagcctcgggtgggtgcaaccttcaaggacgctggctggcgaaaccgggcaggaagcagctcccttagatggcgtccttgctaatcccccaaacattagctctcttagccctcgtcagctgctcggcttcccatgtgcggaagtcagcggcctgagcacagagcgggtgcgcgaactggccgtggcccttgctcaaaaaaatgtcaagctaagcactgaacagctacgctgtctcgcccatcggctttctgaacccccagaagatcttgatgccttgccactggacctgcttttgttcctgaacccggacgcattcagtggaccccaggcttgcacccggttcttttctcgtatcactaaagcgaacgtcgatctgttaccgcgtggtgcccctgaacgtcaaagactgctgcccgccgccttagcctgctggggtgtgcggggctccctgctgtccgaggccgatgtgagagccctgggaggacttgcctgtgacttgccaggcaggtttgttgctgagagcgcggaagtgctactgcctaggcttgtcagttgccctggtccccttgaccaggaccagcaggaagccgcccgcgctgccctgcagggaggaggccccccatacggccccccctcgacctggtccgtctctacaatggacgctttgcggggtcttctaccagtgcttggacagccgattattcgatcaatccctcagggtattgtcgctgcctggagacagcggtcctctcgggacccttcctggagacagcctgaacggacaatcctccgaccccggtttcgcagggaggtggaaaagactgcttgtccatctggtaagaaagcacgagaaattgatgaaagcctcatcttttacaaaaagtgggaactggaagcgtgcgtggacgccgcactgctcgcaacacagatggacagagtcaatgcgatacccttcacctatgagcaactggatgtgctgaagcataaactcgatgaattgtacccacagggatatcccgaaagcgtaattcagcacctgggctacttgtttctgaaaatgtctccggaagacattagaaaatggaacgtcacctccctggaaaccctgaaagccctactggaagtgaacaaaggtcatgagatgtctccccaggctcccagacgccctctaccccaggtagccactctgatcgataggtttgttaagggccgcggacagctcgacaaagacaccctggataccctgactgctttttacccaggatacctttgcagcctttcccccgaggaactctcgagtgtccctcctagctctatctgggcagtgaggcctcaagatttagacacctgtgacccgaggcagctggatgttctttacccaaaggcaaggttggcttttcaaaatatgaacggttccgagtattttgtgaagattcagagtttcctgggtggagctccgaccgaagacctcaaggctctgtcccagcagaatgtcagcatggatctcgccacttttatgaaactccggaccgatgccgtgctgcctctgactgtcgccgaagtccaaaaacttttgggaccccacgtcgagggtttaaaagcagaggagcgccaccggccagtgcgagattggatactccggcaacgacaagatgacctggacacgttggggttaggtttacagggaggcatccccaatgggtatctagtgcttgacctgagtatgcaggaggccttgtcaggaaccccttgtctgttagggccaggcccagtgctgaccgtgctggctctcctgctggcctcgacgctggcctag

SEQ ID NO: 315545 - DNA, 1893 bp, Artificial Sequence
  derived and/or modified sequence
atggccctcccaactgcccgccctctcctgggctcctgcgggactccagccctaggaagtctgctctttttgttgttcagtctgggctgggtgcaaccaagccggaccctcgccggcgagacaggacaggaagctgcacctctggacggtgtgctagccaacccgcctaacatctcgtccctgtcccctagacagcttctgggatttccatgcgctgaggtctctgggctcagcactgaacgggtgagggagctggccgtggcactcgctcagaagaacgtgaagcttagcaccgagcaactgaggtgcttggcccaccggctgagtgagcccccggaggatttagacgcgctccctcttgatctgctgctctttctcaatccagatgctttcagcgggccgcaggcttgcactagattcttctcacggatcaccaaggctaacgtggatctcctgccgagaggagctccagagagacagcggctcctgcctgccgcactggcctgctggggtgtgagggggtcactgttgtccgaggccgacgtgcgcgcactcggaggacttgcctgcgacctgcccggaagatttgtggctgaatcagccgaggtgctcctccctagactagtttcttgccccggacctctcgaccaggaccagcaggaagcagcccgcgctgcactccaagggggcggtccaccatacggccccccctcaacctggtccgtctccacgatggatgctctacgaggcctacttccagttctggggcaacctatcatcaggtcgattccacaaggtatcgtcgcagcctggcgccagagaagcagtagggatccgtcatggaggcagcccgagcgtaccatactgcgacccagattcaggagggaagtggagaagacagcctgtcccagcggaaagaaggcccgtgagattgacgaaagtctgattttttataagaagtgggaactggaggcttgcgtagatgccgccctcctggctacacaaatggatagggtcaacgcgattccatttacatacgagcagctggacgtgcttaagcacaagctcgacgagttgtatccccagggatatccggagtccgtaattcagcatttgggctatctgtttctgaagatgagtcctgaagacatccgaaagtggaacgtcacttcattggagactctcaaggcattactggaggtcaataaggggcatgagatgagccctcaggcgccacgccgccctttgcctcaggtagcgaccctgattgacaggttcgttaagggcagaggtcagctcgataaggataccctagatacattgacagcattctaccccgggtacctttgtagccttagtcccgaggaacttagcagcgttcctccttcctctatctgggccgtacggccacaggatttagacacctgcgacccaaggcagctagacgttctgtatcctaaggcgcggctggcgtttcagaatatgaatggttccgagtactttgtgaagatccagagctttctcggaggggctccaacggaggacctcaaagctctgagccagcagaatgtttctatggacctcgccactttcatgaagctgcgcactgacgctgtacttcctctcactgtagccgaggttcagaagctactgggcccccatgttgagggcctgaaggctgaagagcgacatcgcccagtgagggattggattctgcgccaaaggcaggatgatctggatactctcggcctcggactgcaaggaggcatccctaatgggtatctggtgctcgatctgtctatgcaggaggcactaagtggaacaccttgtttgctcggccctggacctgttttgacagtgctggccctactattggccagtaccctggcttag

SEQ ID NO: 315546 - DNA, 1893 bp, Artificial Sequence
  derived and/or modified sequence
atggccctgcccacagcccggcccctgctgggcagctgtggcaccccagccctgggcagcctgctcttcctgctcttcagcctgggctgggtgcagcccagcaggaccctggccggggagaccggccaggaggccgcccccctggatggagtgctggccaacccccccaacatcagcagcctgagcccccggcagctgctgggcttcccctgtgccgaggtgtctggcctgagcacagagcgggtgcgggagctggccgtggccctggcccagaagaatgtgaagctgagcacagagcagctgcgctgcctggcccaccggctgtctgagcccccagaggacctggatgccctgcccctggacctgctgctcttcctgaacccagatgccttcagcggcccccaggcctgcacccgcttcttcagccgcatcaccaaggccaacgtggacctgctgcccaggggggcccctgagcggcagaggctgctgcctgctgccctggcctgctggggcgtgcggggcagcctgctgtctgaggctgatgtgcgggccctgggcggcctggcctgtgacctgcccggccgctttgtggccgagagcgctgaggtgctgctgccccggctggtgtcctgccccggccccctggaccaggaccagcaggaggccgcccgggccgccctgcagggcggcggccccccctacggcccccccagcacctggagcgtgtccaccatggatgccctgcggggcctgctgcctgtgctgggccagcccatcatccgcagcatcccccagggcatcgtggccgcctggaggcagaggagcagccgggaccccagctggaggcagcctgagaggaccatcctgcggccccgcttccggcgggaggtggagaagacagcctgccccagcggcaagaaggcccgggagattgatgagagcctcatcttctacaagaagtgggagctggaggcctgtgtggatgctgccctgctggccacccagatggacagagtgaatgccatccccttcacctatgagcagctggatgtgctgaagcacaagctggatgagctgtacccccagggctacccagagagcgtcatccagcacctgggctacctgttcctgaagatgagccctgaggacatcaggaagtggaatgtgaccagcctggagaccctgaaggccctgctggaggtgaacaagggccacgagatgagcccccaggccccccggcggcccctgccccaggtggccaccctgattgacagatttgtgaagggccggggccagctggacaaggacaccctggacaccctgacagccttctacccaggctacctgtgcagcctgagccctgaggagctgagctctgtgccccccagcagcatctgggccgtgcggccccaggacctggacacctgtgacccccggcagctggatgtgctgtaccccaaggcccggctggccttccagaacatgaatggcagcgagtactttgtgaagatccagagcttcctgggcggggcccccacagaggacctgaaggccctgagccagcagaatgtgtccatggacctggccaccttcatgaagctgaggacagatgctgtgctgcccctgactgtggccgaggtgcagaagctgctgggcccccacgtggagggcctgaaggccgaggagcggcacaggcctgtgcgggactggatcctgcggcagaggcaggatgacctggacaccctgggcctgggcctgcagggcggcatccccaacggctacctggtgctggacctgtccatgcaggaggccctgagcggcaccccctgcctgctgggccctggccctgtgctgactgtgctggccctgctgctggccagcaccctggcctag

SEQ ID NO: 315547 - DNA, 2112 bp, Artificial Sequence
  derived and/or modified sequence
atgtggccccaggctggcccaggacagaggcgtggggtgggagcagggggtcccatcctgagtcactgccctccacagacacagaccatggccttgccaacggctcgacccctgttggggtcctgtgggacccccgccctcggcagcctcctgttcctgctcttcagcctcggatgggtgcagccctcgaggaccctggctggagagacagggcaggaggctgcgcccctggacggagtcctggccaacccacctaacatttccagcctctcccctcgccaactccttggcttcccgtgtgcggaggtgtccggcctgagcacggagcgtgtccgggagctggctgtggccttggcacagaagaatgtcaagctctcaacagagcagctgcgctgtctggctcaccggctctctgagccccccgaggacctggacgccctcccattggacctgctgctattcctcaacccagatgcgttctcggggccccaggcctgcacccgtttcttctcccgcatcacgaaggccaatgtggacctgctcccgaggggggctcccgagcgacagcggctgctgcctgcggctctggcctgctggggtgtgcgggggtctctgctgagcgaggctgatgtgcgggctctgggaggcctggcttgcgacctgcctgggcgctttgtggccgagtcggccgaagtgctgctaccccggctggtgagctgcccgggacccctggaccaggaccagcaggaggcagccagggcggctctgcagggcgggggacccccctacggccccccgtcgacatggtctgtctccacgatggacgctctgcggggcctgctgcccgtgctgggccagcccatcatccgcagcatcccgcagggcatcgtggccgcgtggcggcaacgctcctctcgggacccatcctggcggcagcctgaacggaccatcctccggccgcggttccggcgggaagtggagaagacagcctgtccttcaggcaagaaggcccgcgagatagacgagagcctcatcttctacaagaagtgggagctggaagcctgcgtggatgcggccctgctggccacccagatggaccgcgtgaacgccatccccttcacctacgagcagctggacgtcctaaagcataaactggatgagctctacccacaaggttaccccgagtctgtgatccagcacctgggctacctcttcctcaagatgagccctgaggacattcgcaagtggaatgtgacgtccctggagaccctgaaggctttgcttgaagtcaacaaagggcacgaaatgagtcctcaggctcctcggcggcccctcccacaggtggccaccctgatcgaccgctttgtgaagggaaggggccagctagacaaagacaccctagacaccctgaccgccttctaccctgggtacctgtgctccctcagccccgaggagctgagctccgtgccccccagcagcatctgggcggtcaggccccaggacctggacacgtgtgacccaaggcagctggacgtcctctatcccaaggcccgccttgctttccagaacatgaacgggtccgaatacttcgtgaagatccagtccttcctgggtggggcccccacggaggatttgaaggcgctcagtcagcagaatgtgagcatggacttggccacgttcatgaagctgcggacggatgcggtgctgccgttgactgtggctgaggtgcagaaacttctgggaccccacgtggagggcctgaaggcggaggagcggcaccgcccggtgcgggactggatcctacggcagcggcaggacgacctggacacgctggggctggggctacagggcggcatccccaacggctacctggtcctagacctcagcatgcaagaggccctctcggggacgccctgcctcctaggacctggacctgttctcaccgtcctggcactgctcctagcctccaccctggcctgagggccccactcccttgctggccccagccctgctggggatccccgcctggccaggagcaggcacgggtggtccccgttccaccccaagagaactcgcgctcagtaaacgggaacatgccccctgcagacacgt

SEQ ID NO: 315548 - DNA, 2116 bp, Artificial Sequence
  derived and/or modified sequence
ctctacttcccaggggaggaaaccgaggcacacctgtagccagggagcagggggtcccatcctgagtcactgccctccacagacacagaccatggccttgccaacggctcgacccctgttggggtcctgtgggacccccgccctcggcagcctcctgttcctgctcttcagcctcggatgggtgcagccctcgaggaccctggctggagagacagggcaggaggctgcgcccctggacggagtcctggccaacccacctaacatttccagcctctcccctcgccaactccttggcttcccgtgtgcggaggtgtccggcctgagcacggagcgtgtccgggagctggctgtggccttggcacagaagaatgtcaagctctcaacagagcagctgcgctgtctggctcaccggctctctgagccccccgaggacctggacgccctcccattggacctgctgctattcctcaacccagatgcgttctcggggccccaggcctgcacccgtttcttctcccgcatcacgaaggccaatgtggacctgctcccgaggggggctcccgagcgacagcggctgctgcctgcggctctggcctgctggggtgtgcgggggtctctgctgagcgaggctgatgtgcgggctctgggaggcctggcttgcgacctgcctgggcgctttgtggccgagtcggccgaagtgctgctaccccggctggtgagctgcccgggacccctggaccaggaccagcaggaggcagccagggcggctctgcagggcgggggacccccctacggccccccgtcgacatggtctgtctccacgatggacgctctgcggggcctgctgcccgtgctgggccagcccatcatccgcagcatcccgcagggcatcgtggccgcgtggcggcaacgctcctctcgggacccatcctggcggcagcctgaacggaccatcctccggccgcggttccggcgggaagtggagaagacagcctgtccttcaggcaagaaggcccgcgagatagacgagagcctcatcttctacaagaagtgggagctggaagcctgcgtggatgcggccctgctggccacccagatggaccgcgtgaacgccatccccttcacctacgagcagctggacgtcctaaagcataaactggatgagctctacccacaaggttaccccgagtctgtgatccagcacctgggctacctcttcctcaagatgagccctgaggacattcgcaagtggaatgtgacgtccctggagaccctgaaggctttgcttgaagtcaacaaagggcacgaaatgagtcctcaggctcctcggcggcccctcccacaggtggccaccctgatcgaccgctttgtgaagggaaggggccagctagacaaagacaccctagacaccctgaccgccttctaccctgggtacctgtgctccctcagccccgaggagctgagctccgtgccccccagcagcatctgggcggtcaggccccaggacctggacacgtgtgacccaaggcagctggacgtcctctatcccaaggcccgccttgctttccagaacatgaacgggtccgaatacttcgtgaagatccagtccttcctgggtggggcccccacggaggatttgaaggcgctcagtcagcagaatgtgagcatggacttggccacgttcatgaagctgcggacggatgcggtgctgccgttgactgtggctgaggtgcagaaacttctgggaccccacgtggagggcctgaaggcggaggagcggcaccgcccggtgcgggactggatcctacggcagcggcaggacgacctggacacgctggggctggggctacagggcggcatccccaacggctacctggtcctagacctcagcatgcaagaggccctctcggggacgccctgcctcctaggacctggacctgttctcaccgtcctggcactgctcctagcctccaccctggcctgagggccccactcccttgctggccccagccctgctggggatccccgcctggccaggagcaggcacgggtggtccccgttccaccccaagagaactcgcgctcagtaaacgggaacatgccccctgcagacacgt

SEQ ID NO: 315549 - DNA, 1893 bp, Artificial Sequence
  derived and/or modified sequence
atggccctgcccaccgcccggcccctgctgggcagctgcggcacccccgctttgggctcattgctcttcctgctgttctctctgggatgggtccagccctccaggacactcgctggggagacaggccaggaagccgcccccctggatggagtgctggcaaatcctccaaacatctcaagcctgtcaccccgtcagctgcttggatttccttgtgcagaggtgtccggcctcagtacagagagagtgagagagctggccgtggctctagcccagaaaaacgtgaagctgagcaccgagcagctccgctgtttagctcacagactgagtgagccacccgaagacctggatgccctgccgctcgatttattgttatttctgaaccccgacgctttttctggacctcaagcttgcactaggtttttcagccgaattactaaggccaatgtggacctgctgccccgcggtgcacccgagcgccaaagattgctcccggccgcactggcctgctggggcgttcgagggtccctgttaagcgaggctgatgtgcgggcattgggcgggttagcatgcgacctgcccggtcgattcgttgctgagagtgccgaggtactcttacctagattagtaagctgccccggtcccctggaccaggaccaacaggaagcagctagagctgcattgcaggggggtggccccccttacggtccgccaagcacatggtccgtgagcaccatggacgccctcaggggcctgctgcccgttctgggccaacctattattaggtcaataccccagggcatcgtcgccgcctggcggcagagaagttcacgtgatccatcttggcgacagccggaaagaacaatcttaagaccccgcttccgtcgtgaggtagagaagaccgcttgcccttctggaaaaaaggctcgcgagatagacgaaagtctgatcttctacaagaagtgggagctggaggcctgtgtggatgccgccttgctagcaacacagatggaccgcgtcaatgcaattccattcacatatgaacagctggatgtgctgaaacataagttggacgaactgtatcctcagggctacccggagtcagtgatccagcacctaggctacctgttcttgaaaatgtctccagaggatattagaaaatggaacgttacatccctggaaaccctcaaagcgctcctcgaggtgaataagggtcacgaaatgtctccccaagctcctagacggccgttacctcaggtagcgactctcatagaccgatttgtgaaaggacgcgggcagctggacaaagacacactagacacgctgacagcattttatccagggtatctgtgtagtctgtccccagaagagctatcttccgtccccccctcttctatatgggctgtgagaccccaggatcttgatacgtgtgacccccggcagctggatgtcttgtatccaaaggccagactcgccttccagaacatgaatggttccgaatacttcgtaaaaattcaatctttcctcggcggagctccaactgaggatttaaaggccctcagtcaacaaaatgtgagtatggatctcgctacatttatgaaactcagaacagacgccgtgctcccactgacagtggccgaagtgcagaaactgctgggccctcatgttgagggcttaaaagccgaggagagacaccgtcccgtgcgtgactggatcttacgccaacgccaggacgatttagatacacttggcctcggcctccagggggggattcctaatgggtacctggtcctggacctgagtatgcaagaggctctgtccgggactccctgtttgctcgggcccgggccggtgctgactgtgctggccctgttgctcgcgtcaaccttggcctag

SEQ ID NO: 315550 - DNA, 1893 bp, Artificial Sequence
  derived and/or modified sequence
atggccctgcccaccgcccggcccctgctgggcagctgcggcacccctgccctgggcagcctgctatttctgctgttttcactgggctgggtgcagccaagccgcactttagctggggagactgggcaggaggcagctcccctggacggagtgctggcaaacccgcctaacattagctccctgtctccccgacagctcctaggatttccttgcgcggaggtgtccggtctcagtacggagagggtgagagagctagccgtagccctggctcagaagaacgtgaagctgagcaccgaacagctaagatgcctggcgcacaggctcagcgaaccaccagaagacctggatgccttgccgttggatttattactgtttctgaaccctgacgccttctcaggtccccaggcctgtaccagatttttttcacggatcactaaggccaatgtcgatctgctgccccgcggtgccccagaacggcagagacttttgcctgcagccctagcttgttggggtgtaagaggcagcctcttgtctgaagccgacgtcagagccctgggggggctggcctgtgatctaccaggtcgattcgtagcagaatcagcagaagtcctgctgccccgcctggtctcttgtcccgggccattggaccaggatcaacaagaagccgcgcgagcagcgctgcagggcggcggacccccctatggcccaccttctacctggagtgtgtccaccatggacgccttaagaggtctgttacccgttttggggcagcctatcattcggtcaattccccaaggaatcgtcgctgcatggcgccaacgatcgtctcgtgatccgtcttggaggcagccagagcgcaccatactgcgtcctcgcttccggagggaggtagagaagactgcttgcccctctggcaaaaaggcgagggagatcgacgaatctttgattttttataaaaaatgggaactcgaggcttgcgtcgacgctgctctcctcgccacgcagatggacagagttaatgcaataccatttacctatgagcagctagacgtcctcaagcacaagctggatgaactgtacccccagggatacccagaatccgtgattcaacatctgggatacttgttcctgaaaatgagcccagaagatattcgcaaatggaatgtgaccagtctcgagactctaaaggcactccttgaggtgaataaaggccatgagatgtcaccacaggccccgagacgacccctgccacaagtagccactctcatagaccgattcgtgaagggcagaggtcagctggacaaggacacactcgataccctgacagccttctatcctggctacctctgttctctcagtcccgaggagctcagcagcgttcccccctcttccatatgggcggtgcgaccacaggaccttgatacttgtgacccccggcagttggacgttttgtacccaaaggcccgactggcgttccagaacatgaatggctccgaatatttcgtgaagatacagagcttcctcggtggcgcccccaccgaggacttaaaggctctcagtcagcaaaacgtgtcaatggatctcgccacatttatgaaattaaggaccgacgcggtgctcccccttacagtggccgaagttcagaaactgctcggaccgcatgttgagggcctgaaagccgaggaacgacacaggcccgttcgggactggattctccggcagcggcaagatgacctcgataccctcgggctcggcctccagggcggtattcctaacgggtacctggtgttggatcttagcatgcaggaagcattaagcggaactccctgcctgctgggccccggtcccgtcctcacagtccttgctctgcttttggcctccactctggcatag

SEQ ID NO: 315551 - DNA, 1893 bp, Artificial Sequence
  derived and/or modified sequence
atggctttaccgaccgctaggcccctcctgggtagctgtggtacgccagccctcgggtccctcttattcctcctgttcagcctgggttgggtccaaccctcccggacactcgcaggcgagaccggccaggaagccgctcccctggatggcgttctggcaaatccacccaatatctccagcctgagcccacggcagctgctgggttttccctgtgcagaggtgtctggcttaagtacagaaagagtccgcgaacttgctgtggctctcgctcaaaaaaatgttaaactctccacagagcagctacgatgcttggcgcatcgcctcagtgagcccccagaagatttggatgcgctaccccttgacctactgttattcttgaaccccgacgctttctccggtccccaagcctgcacgagattcttttccaggataaccaaagctaatgtggatctcctgcccagaggtgccccagaacggcagagactgctgcctgccgctttggcgtgttggggggtgcggggatccttgctcagcgaggcagacgttcgtgcacttggcggtcttgcttgtgaccttcccggtagatttgtggccgagtccgctgaggttctgttgccaagattggtgagctgcccaggacctcttgatcaggatcagcaagaggctgctcgcgcagctctccagggcggtggacccccatacggacctccttcaacttggagcgtgagcacaatggatgctcttcgtgggctcctgcccgtgctgggacagccaattatccgtagtatcccacaaggaatcgtcgctgcctggcgccaacgctctagtcgtgaccctagctggagacagcctgagcggacaatactgaggccgaggttccgcagggaggtagaaaagacagcctgtccctccgggaagaaagccagagaaatcgacgagtccctcatattctataaaaaatgggagttggaggcttgtgtggatgctgctttgttggccacccagatggatagagtcaacgcaatcccgttcacatatgagcagctggacgtgctgaaacacaagctagacgaattatatccacaggggtaccccgagtctgtaatccaacaccttgggtacctttttcttaaaatgtcccctgaagatatccggaagtggaacgttacgtcactggagacgctaaaagcgctcctggaggtgaataagggccacgagatgtccccccaggcccctcgacggcctttacctcaggttgcgacactgatcgaccggtttgtcaagggacggggacagttggataaagatacacttgataccctcacggccttttacccgggttacctctgctcccttagcccagaagagctgagttccgtccctcctagctccatctgggccgtaagaccccaggatttggacacatgtgatcccagacagctggacgtgctgtaccctaaggcacgactagccttccagaacatgaacggttctgagtacttcgtgaaaatacagtcattcctgggcggagcccctactgaggacttaaaagccctgtcacaacagaacgtctcaatggacctggcaacttttatgaaactgcgaacagacgcagtgcttcctctgactgtagctgaggtacagaaactccttggccctcatgtcgagggcctgaaggccgaagaaaggcatcgacccgtcagggactggatcctccggcagcgccaagacgaccttgacaccctcggcctcggattacagggcggtattcctaacggttatctcgtgctcgacttgtcaatgcaggaggccttatcaggcaccccgtgtttactgggacccggacctgttttgaccgttttggccttactgctggcaagcactctggcctag

SEQ ID NO: 315552 - DNA, 1893 bp, Artificial Sequence
  derived and/or modified sequence
atggctttacctacagcccgacctctgcttgggtcctgcggaaccccggctctggggagcctcctctttcttctgttttccctgggctgggtacagccttcaaggacccttgcaggagagaccggacaggaagctgcaccgctggatggcgtgctagccaatcctcccaatatttcatccctgtcacctcggcaacttttaggatttccgtgtgccgaagtctctggcctgagcacagaaagagtcagggagctcgcagtcgctctcgcccagaagaacgtaaaattatccacagagcagttgcgctgtttagcacatcggctttcagagcctccagaggacctcgatgcacttccactggatctgttactgtttttaaatccagacgctttttccggtccccaggcgtgcactagatttttctcaagaatcactaaggccaatgtcgatctgctaccaagaggagctcccgagaggcagagactgcttcctgcagctttggcctgctggggagtgcggggatctctgctaagcgaagctgacgtgcgtgccctggggggtttggcctgcgatctcccaggaaggtttgtggcagaaagcgccgaagtgctgttacccaggcttgtgtcctgcccaggtccccttgaccaggaccagcaggaggcagcgagggccgctttgcagggaggcggtcctccctatggaccaccctcaacttggtccgtctcaacgatggacgctttgagaggcctgcttcctgtcctcgggcagcctattattcgttccatccctcagggaatcgtcgccgcatggcgacagagaagcagtagggatccaagttggcgacagcctgagcgcactattctgagacctcggttccggagagaggtggagaagacagcctgtccttctggtaagaaggcaagagagattgacgaatccctcatcttttacaaaaaatgggaactcgaggcatgtgttgatgcagcgctcctcgccacccagatggatcgtgtcaacgccattcccttcacctatgaacagcttgacgtcctcaagcataagcttgatgaactgtatccccagggctacccggaaagcgtgatacagcaccttggatacctattcctcaagatgtcaccagaggacattcgtaaatggaatgtgacctccttggaaactctaaaggccctgctggaagtaaacaaaggtcacgagatgtccccgcaggcacctcgtcggccactgccccaggtggccactctgatagaccgattcgttaagggcagagggcagctggacaaagataccctcgacacacttaccgcattttaccccggttacttgtgcagcctgtcgcctgaggagctgtcaagtgtccccccaagctcaatttgggcagtaaggccccaggacttggatacctgtgatcccaggcagctcgatgtgctgtacccaaaagctcgcctcgccttccaaaacatgaacggatctgaatatttcgtgaaaatacagagcttccttggaggcgctcccacagaggatctgaaagcactgtcacagcagaatgtctccatggatttagccacctttatgaagttgcgaaccgatgccgtattacctctgaccgtggcagaggtacaaaaattgctgggtcctcacgtggaagggcttaaagctgaagaaaggcaccggcctgtgcgggactggatccttaggcagcgacaagacgatttggatacactcggactcggtttacagggcggaatccccaatggttatctggttttagacctgagtatgcaagaggccctgtccggtactccatgcctgctcggccctgggcctgtactgaccgtcctggccctgctgctggcgtccactctcgcatag

SEQ ID NO: 315553 - DNA, 1893 bp, Artificial Sequence
  derived and/or modified sequence
atggccctgcccaccgccagacccctgctgggcagctgcggcacccccgccctgggcagcctgctgttcctgctgttcagcctgggctgggtgcagcccagcagaaccctggccggcgagaccggccaggaggccgcccccctggacggcgtgctggccaacccccccaacatcagcagcctgagccccagacagctgctgggcttcccctgcgccgaggtgagcggcctgagcaccgagagagtgagagagctggccgtggccctggcccagaagaacgtgaagctgagcaccgagcagctgagatgcctggcccacagactgagcgagccccccgaggacctggacgccctgcccctggacctgctgctgttcctgaaccccgacgccttcagcggcccccaggcctgcaccagattcttcagcagaatcaccaaggccaacgtggacctgctgcccagaggcgcccccgagagacagagactgctgcccgccgccctggcctgctggggcgtgagaggcagcctgctgagcgaggccgacgtgagagccctgggcggcctggcctgcgacctgcccggcagattcgtggccgagagcgccgaggtgctgctgcccagactggtgagctgccccggccccctggaccaggaccagcaggaggccgccagagccgccctgcagggcggcggccccccctacggcccccccagcacctggagcgtgagcaccatggacgccctgagaggcctgctgcccgtgctgggccagcccatcatcagaagcatcccccagggcatcgtggccgcctggagacagagaagcagcagagaccccagctggagacagcccgagagaaccatcctgagacccagattcagaagagaggtggagaagaccgcctgccccagcggcaagaaggccagagagatcgacgagagcctgatcttctacaagaagtgggagctggaggcctgcgtggacgccgccctgctggccacccagatggacagagtgaacgccatccccttcacctacgagcagctggacgtgctgaagcacaagctggacgagctgtacccccagggctaccccgagagcgtgatccagcacctgggctacctgttcctgaagatgagccccgaggacatcagaaagtggaacgtgaccagcctggagaccctgaaggccctgctggaggtgaacaagggccacgagatgagcccccaggcccccagaagacccctgccccaggtggccaccctgatcgacagattcgtgaagggcagaggccagctggacaaggacaccctggacaccctgaccgccttctaccccggctacctgtgcagcctgagccccgaggagctgagcagcgtgccccccagcagcatctgggccgtgagaccccaggacctggacacctgcgaccccagacagctggacgtgctgtaccccaaggccagactggccttccagaacatgaacggcagcgagtacttcgtgaagatccagagcttcctgggcggcgcccccaccgaggacctgaaggccctgagccagcagaacgtgagcatggacctggccaccttcatgaagctgagaaccgacgccgtgctgcccctgaccgtggccgaggtgcagaagctgctgggcccccacgtggagggcctgaaggccgaggagagacacagacccgtgagagactggatcctgagacagagacaggacgacctggacaccctgggcctgggcctgcagggcggcatccccaacggctacctggtgctggacctgagcatgcaggaggccctgagcggcaccccctgcctgctgggccccggccccgtgctgaccgtgctggccctgctgctggccagcaccctggcctag

SEQ ID NO: 315554 - protein, 256 aa, Artificial Sequence
  derived and/or modified sequence
MPLHKYPVWLWKRLQLREGICSRLPGHYLRSLEEERTPTPVHYRPHGAKFKINPKNGQRERVEDVPIPIYFPPESQRGLWGGEGWILGQIYANNDKLSKRLKKVWKPQLFEREFYSEILDKKFTVTVTMRTLDLIDEAYGLDFYILKTPKEDLCSKFGMDLKRGMLLRLARQDPQLHPEDPERRAAIYDKYKEFAIPEEEAEWVGLTLEEAIEKQRLLEEKDPVPLFKIYVAELIQQLQQQALSEPAVVQKRASGQ

SEQ ID NO: 315555 - protein, 256 aa, Artificial Sequence
  derived and/or modified sequence
MPLHKYPVWLWKRLQLREGICSRLPGHYLRSLEEERTPTPVHYRPHGAKFKINPKNGQRERVEDVPIPIYFPPESQRGLWGGEGWILGQIYANNDKLSKRLKKVWKPQLFEREFYSEILDKKFTVTVTMRTLDLIDEAYGLDFYILKASGEDLCSKFGMDLKRGMLLRLARQDPQLHPEDPERRAAIYDKYKEFAIPEEEAEWVGLTLEEAIEKQRLLEEKDPVPLFKIYVAELIQQLQQQALSEPAVVQKRASGQ

SEQ ID NO: 315556 - protein, 240 aa, Artificial Sequence
  derived and/or modified sequence
MPLHKYPVWLWKRLQLREGICSRLPGHYLRSLEEERTPTPVHYRPHGAKFKINPKNGQRERVEDVPIPIYFPPESQRGLWGGEGWILGQIYANNDKLSKRLKKVWKPQLFEREFYSEILDKKFTVTVTMRTLDLIDEAYGLDFYILKTPKEDLCSKFGMDLKRGMLLRLARQDPQLHPEDPERRAAIYDKYKEFAIPEEEAEWVGLTLEEAIEKQRLLEEKDPVPLFKIYVAELIQQLQQ

SEQ ID NO: 315557 - protein, 218 aa, Artificial Sequence
  derived and/or modified sequence
MPLHKYPVWLWKRLQLREGICSRLPGHYLRSLEEERTPTPVHYRPHGAKFKINPKNGQRERVEDVPIPIYFPPESQRGLWGGEGWILGQIYANNDKLSKRLKKVWKPQLFEREFYSEILDKKFTVTVTMRTLDLIDEAYGLDFYILKTPKEDLCSKFGMDLKRGMLLRLARQDPQLHPEDPERRAAIYDKYKEFAIPEEEAEWVGLTLEEAIEKQRLL

SEQ ID NO: 315558 - protein, 194 aa, Artificial Sequence
  derived and/or modified sequence
MPLHKYPVWLWKRLQLREGICSRLPGHYLRSLEEERTPTPVHYRPHGAKFKINPKNGQRERVEDVPIPIYFPPESQRGLWGGEGWILGQIYANNDKLSKRLKKVWKPQLFEREFYSEILDKKFTVTVTMRTLDLIDEAYGLDFYILKTPKEDLCSKFGMDLKRGMLLRLARQDPQLHPEDPERRAAIYDKYKEF

SEQ ID NO: 315559 - DNA, 771 bp, Artificial Sequence
  derived and/or modified sequence
atgcccctgcataaatatccagtgtggctatggaaacgcctccagcttcgtgagggaatatgttcacgcttgccagggcattatctgcggtctctggaggaagaacggactccgaccccggtccactatcggccgcatggagcaaagttcaaaatcaaccccaaaaacggtcagagggagcgcgtagaggatgtgccaatccctatttattttccccctgaaagccagcggggcctgtgggggggcgagggctggattttgggtcagatttacgccaataacgacaaattaagcaagcggctcaaaaaagtgtggaaaccacaactgtttgagcgggagttttattctgaaatattggacaaaaaatttacagtgacggttacaatgcgcacactcgatctgattgatgaggcctatggcctcgacttttatatcctgaaaaccccgaaggaagatctgtgctctaagttcggcatggatctgaagcgcggtatgctgctccgcctggcccgacaggaccctcagctgcaccctgaagatcccgagaggcgggcagctatttatgacaagtacaaggagtttgccattccagaggaggaagcagagtgggtgggtcttactttagaggaggcaatcgagaaacagcgcctgctggaggaaaaggaccctgtacctctctttaagatctatgtagccgaacttatccagcagttacagcagcaggccctctccgagccagccgttgttcaaaaacgggccagcggacagtag

SEQ ID NO: 315560 - DNA, 771 bp, Artificial Sequence
  derived and/or modified sequence
atgccgctccataaatatccggtctggctgtggaaacggctgcagctcagggagggtatctgctcacgtcttccgggtcattaccttcggtccctcgaagaggaaaggacgcctacaccagtgcactataggcctcacggtgccaaattcaaaattaatcccaagaacggccaacgagagagagtagaggacgtgcccatcccgatttatttccccccagagagccagagggggttatggggtggggagggttggatactggggcagatatatgctaataacgataagctaagtaaaaggctgaaaaaagtgtggaagccacagttattcgaacgggaattctacagcgagatcctcgataaaaagtttaccgtgacagtgacgatgcggacccttgaccttattgatgaggcttacgggctggatttttacatccttaagacgcccaaggaggatctgtgttccaaattcggaatggacctgaagcgcggcatgttactgcggttagcaagacaggacccacagttacatcccgaggaccccgagaggagggccgctatttatgacaaatacaaagagttcgccatccctgaagaggaagctgagtgggttggcctaacgttggaggaggccatagagaaacagcgactactggaggaaaaggacccagtgccgctgtttaaaatatatgtcgccgagctcatccagcagttacagcagcaagcgctgagtgaacctgccgttgtgcagaagcgcgcctctgggcagtag

SEQ ID NO: 315561 - DNA, 771 bp, Artificial Sequence
  derived and/or modified sequence
atgccactgcataagtatcccgtgtggctgtggaaacgcttgcagttacgggagggaatttgcagcaggctccccggacattatctgcgcagcttggaagaagagagaacaccaaccccagtgcattaccggccccacggcgccaagtttaaaataaaccccaagaacgggcaaagagaaagagtggaggatgtccctattcccatctactttcctccggagagccaacgcggactgtggggcggagagggatggatactgggacagatttatgctaataatgataaattatcaaaacggctgaaaaaggtctggaaaccgcagttgttcgagagggagttctactccgagatacttgacaagaaattcacagtgaccgtcactatgcgcaccctcgacctcattgatgaagcttacggcctcgatttttatatcctaaaagcttcaggcgaggacctctgttccaaatttgggatggacctcaagcgcggaatgctgctacggcttgcacgccaggacccacagctgcacccagaggacccggagaggagggccgccatctatgacaagtataaagaatttgcaataccagaagaagaggcggagtgggtcgggctgactctggaggaggcaatcgagaagcagagacttctggaagaaaaggatcctgtccccctgttcaaaatttatgttgccgagctgatccagcaactgcaacagcaagccctttctgagcccgctgttgttcagaagagggcaagtggccagtag

SEQ ID NO: 315562 - DNA, 771 bp, Artificial Sequence
  derived and/or modified sequence
atgcctctgcacaagtatcccgtatggttgtggaaacgcctccaattaagagagggcatatgttctaggctaccagggcattacctgcgtagcctagaagaggaacgtactcccacgcccgtccactataggcctcacggggctaaattcaagattaatcctaaaaatggccaaagggagcgagtggaagatgttccgatccctatctactttccacccgagtcacagcgtggcctttggggtggagagggctggattctgggtcagatttatgccaataacgataagctgtcaaagaggctcaagaaggtatggaagccccagctgtttgagagagaattctacagcgaaatcctggataagaaattcaccgtcaccgttaccatgcgcaccctcgatcttattgacgaggcctacggcctggatttttatattctgaaggcaagtggagaagacctttgttctaaattcgggatggatctgaaacgcggaatgcttttgaggttagccaggcaggatcctcagctgcatcctgaagaccccgagaggagggctgctatctatgataagtataaggagttcgctatccctgaagaggaggcagaatgggtcgggctcactctggaagaagccatcgaaaagcagaggcttttagaagagaaggatccagtaccgctgttcaagatatacgtcgcagagttgattcagcaactgcagcagcaggccctgtcggaacctgcagtcgtgcaaaagagagcctcagggcaatag

SEQ ID NO: 315563 - DNA, 723 bp, Artificial Sequence
  derived and/or modified sequence
atgccactgcacaagtacccagtgtggctgtggaaacgcctccaactgcgggagggaatctgcagcagactgccgggccactacttgcgtagtctggaggaagagcgcacccctacccccgtacattataggcctcatggggccaagtttaaaattaatcctaaaaacggccagcgcgagagagtagaagacgtcccgatacccatctactttccccctgagagccagcgcggtctgtgggggggggaaggctggatcctgggacaaatctacgccaacaacgacaagctttcaaaacgacttaaaaaggtgtggaagccacaactcttcgagagggagttttacagcgagattctcgacaagaagtttacagtcactgtgacaatgcgcacactggatctaatcgatgaggcgtacggcctcgacttctacatcttgaagacacctaaggaagatctctgctccaaatttggaatggatttgaagaggggaatgctgttacgcctggccagacaggacccccaattgcaccccgaggatcccgagcgaagagctgccatctacgacaagtacaaagagttcgccatacccgaggaagaggccgaatgggtcgggctcaccctcgaagaggctattgaaaagcagaggctcctcgaagagaaggatcctgttcctctgtttaaaatctacgtggcagagctcatccagcaactccagcaatag

SEQ ID NO: 315564 - DNA, 657 bp, Artificial Sequence
  derived and/or modified sequence
atgcctttgcataagtatccggtttggttgtggaagaggctccaactgagagaggggatttgtagcaggctcccaggccattacttacgctccttagaagaggagcggacacccacacccgtccattatcgaccacacggcgccaaatttaagatcaaccctaagaatgggcaacgggaaagagtcgaggacgtgccaattcccatttattttccccccgagagccagagggggctctgggggggggaaggctggattttgggccagatttatgccaataatgataaactgagcaaaagacttaagaaagtctggaagccacagctgtttgagcgagagttctacagcgagattttagacaagaaatttactgtgacagtcacaatgcgcacactggacctcatcgatgaagcctacggactggatttctacattctcaagactccaaaggaggatttatgttctaagtttggaatggacttgaaacgcggaatgctgctgcgtttggccaggcaggacccgcagctccatcccgaagacccagaacgccgcgccgccatttacgataagtataaggaattcgccatcccagaggaggaggctgaatgggtaggtcttacgttggaagaggcgatagaaaagcagaggctgctgtag

SEQ ID NO: 315565 - DNA, 585 bp, Artificial Sequence
  derived and/or modified sequence
atgcccctacacaagtaccccgtttggttgtggaaaagattacagctccgcgaggggatatgttcccgactcccaggccattacctgcggtctctggaggaagagagaacaccaactccggtccactatcggccacacggggctaagtttaaaattaacccgaagaatggtcaacgggaaagagttgaggatgtaccaatccccatttacttccctccagagtctcagagaggcctgtggggaggtgaaggatggatcctgggtcaaatctacgctaacaacgacaagctctctaaaagactgaaaaaggtgtggaaaccgcaactgtttgagcgcgagttctactcggagatactcgacaagaagttcacagtcactgtcactatgagaacattagatctgatcgatgaagcctacggactcgacttttacatcctcaagacccccaaagaagacctctgttctaagttcgggatggaccttaagcgaggaatgttgctacggctcgcccggcaagatccccagctgcacccggaggatccggagagacgggctgccatatatgacaaatataaagagttttag

SEQ ID NO: 315566 - DNA, 771 bp, Artificial Sequence
  derived and/or modified sequence
atgcccctgcacaagtaccctgtgtggctgtggaagaggctgcagctgcgggagggcatctgcagccggctgcccggccactacctgcggagcctggaggaggagaggacccccacccctgtgcactaccggccccacggggccaagttcaagatcaaccccaagaatggccagcgggagcgggtggaggatgtgcccatccccatctacttccccccagagagccagaggggcctgtggggcggggagggctggatcctgggccagatctatgccaacaatgacaagctgagcaagaggctgaagaaggtgtggaagccccagctgtttgagcgggagttctacagcgagatcctggacaagaagttcaccgtgacagtgaccatgaggaccctggacctgattgatgaggcctacggcctggacttctacatcctgaagacccccaaggaggacctgtgcagcaagtttggcatggacctgaagaggggcatgctgctgcggctggcccggcaggacccccagctgcacccagaagatcctgagaggagagctgccatctatgacaagtacaaggagtttgccatccctgaggaggaggccgagtgggtgggcctgaccctggaggaggccatcgagaagcagaggctgctggaggagaaggaccctgtgcccctcttcaagatctacgtggccgagctgatccagcagctgcagcagcaggccctgtctgagcctgctgtggtgcagaagagggccagcggccagtag

SEQ ID NO: 315567 - DNA, 771 bp, Artificial Sequence
  derived and/or modified sequence
atgcccctgcacaagtaccctgtgtggctgtggaagaggctgcagctgcgggagggcatctgcagccggctgcccggccactacctgcggagcctggaggaggagaggacccccacccctgtgcactaccggccccacggggccaagttcaagatcaaccccaagaatggccagcgggagcgggtggaggatgtgcccatccccatctacttccccccagagagccagaggggcctgtggggcggggagggctggatcctgggccagatctatgccaacaatgacaagctgagcaagaggctgaagaaggtgtggaagccccagctgtttgagcgggagttctacagcgagatcctggacaagaagttcaccgtgacagtgaccatgaggaccctggacctgattgatgaggcctacggcctggacttctacatcctgaaggccagcggggaggacctgtgcagcaagtttggcatggacctgaagaggggcatgctgctgcggctggcccggcaggacccccagctgcacccagaagatcctgagaggagagctgccatctatgacaagtacaaggagtttgccatccctgaggaggaggccgagtgggtgggcctgaccctggaggaggccatcgagaagcagaggctgctggaggagaaggaccctgtgcccctcttcaagatctacgtggccgagctgatccagcagctgcagcagcaggccctgtctgagcctgctgtggtgcagaagagggccagcggccagtag

SEQ ID NO: 315568 - DNA, 723 bp, Artificial Sequence
  derived and/or modified sequence
atgcccctgcacaagtaccctgtgtggctgtggaagaggctgcagctgcgggagggcatctgcagccggctgcccggccactacctgcggagcctggaggaggagaggacccccacccctgtgcactaccggccccacggggccaagttcaagatcaaccccaagaatggccagcgggagcgggtggaggatgtgcccatccccatctacttccccccagagagccagaggggcctgtggggcggggagggctggatcctgggccagatctatgccaacaatgacaagctgagcaagaggctgaagaaggtgtggaagccccagctgtttgagcgggagttctacagcgagatcctggacaagaagttcaccgtgacagtgaccatgaggaccctggacctgattgatgaggcctacggcctggacttctacatcctgaagacccccaaggaggacctgtgcagcaagtttggcatggacctgaagaggggcatgctgctgcggctggcccggcaggacccccagctgcacccagaagatcctgagaggagagctgccatctatgacaagtacaaggagtttgccatccctgaggaggaggccgagtgggtgggcctgaccctggaggaggccatcgagaagcagaggctgctggaggagaaggaccctgtgcccctcttcaagatctacgtggccgagctgatccagcagctgcagcagtag

SEQ ID NO: 315569 - DNA, 657 bp, Artificial Sequence
  derived and/or modified sequence
atgcccctgcacaagtaccctgtgtggctgtggaagaggctgcagctgcgggagggcatctgcagccggctgcccggccactacctgcggagcctggaggaggagaggacccccacccctgtgcactaccggccccacggggccaagttcaagatcaaccccaagaatggccagcgggagcgggtggaggatgtgcccatccccatctacttccccccagagagccagaggggcctgtggggcggggagggctggatcctgggccagatctatgccaacaatgacaagctgagcaagaggctgaagaaggtgtggaagccccagctgtttgagcgggagttctacagcgagatcctggacaagaagttcaccgtgacagtgaccatgaggaccctggacctgattgatgaggcctacggcctggacttctacatcctgaagacccccaaggaggacctgtgcagcaagtttggcatggacctgaagaggggcatgctgctgcggctggcccggcaggacccccagctgcacccagaagatcctgagaggagagctgccatctatgacaagtacaaggagtttgccatccctgaggaggaggccgagtgggtgggcctgaccctggaggaggccatcgagaagcagaggctgctgtag

SEQ ID NO: 315570 - DNA, 585 bp, Artificial Sequence
  derived and/or modified sequence
atgcccctgcacaagtaccctgtgtggctgtggaagaggctgcagctgcgggagggcatctgcagccggctgcccggccactacctgcggagcctggaggaggagaggacccccacccctgtgcactaccggccccacggggccaagttcaagatcaaccccaagaatggccagcgggagcgggtggaggatgtgcccatccccatctacttccccccagagagccagaggggcctgtggggcggggagggctggatcctgggccagatctatgccaacaatgacaagctgagcaagaggctgaagaaggtgtggaagccccagctgtttgagcgggagttctacagcgagatcctggacaagaagttcaccgtgacagtgaccatgaggaccctggacctgattgatgaggcctacggcctggacttctacatcctgaagacccccaaggaggacctgtgcagcaagtttggcatggacctgaagaggggcatgctgctgcggctggcccggcaggacccccagctgcacccagaagatcctgagaggagagctgccatctatgacaagtacaaggagttctag

SEQ ID NO: 315571 - DNA, 1086 bp, Artificial Sequence
  derived and/or modified sequence
cggttccggtgggctctgaaccctgaaaggctcgcgatgcctctacacaagtatcccgtgtggctctggaagcggctgcagctgcgggagggcatctgttcccgcctgcccggccactacctgcgctccctggaggaggagcggacgcccactcccgtgcactataggcctcatggggccaagttcaagatcaaccccaagaacgggcagcgggagcgtgtggaggacgtgcccattcccatctactttccccccgaatcccagcgggggttgtggggcggcgagggctggatcctgggccaaatatatgccaacaacgacaagctctccaagaggctgaagaaagtgtggaagccacagctgtttgagcgagagttctacagtgagatcctggacaagaagttcacagtgactgtgaccatgcggaccctggacctcatcgatgaggcttatgggctcgacttttacatcctcaagaccccgaaggaggacctgtgctccaagtttgggatggacctgaagcgagggatgctgctgcggcttgcccggcaggacccccagctgcaccccgaggaccccgagcggcgggcagccatctacgacaagtacaaggaatttgccatcccagaggaggaggcagagtgggtgggcctcacgctggaggaggccattgagaagcagagacttttggaggagaaggaccctgtacccctgttcaagatctatgtggcggagctgatccagcagctgcagcagcaggcactgtcagagccggcggtggtgcagaagagagccagtggccagtgaccacacagctcctccatgcctgaccaacaggcccagctttccctgccaggccctttgcactgaggacacagatcccggggagctgtgagggccaccggtgggcagtgggtggatcctggtttcgtgtgctgcccatgcaccttccagcccggggccagcttggcagggatccccaggaggcctgggccgcccagaggctcctctcaggctgggccccgacgtttgcggcagtgttccttgtgcccgtggggccgggagcgagtaaagtctgggccaggc

SEQ ID NO: 315572 - DNA, 865 bp, Artificial Sequence
  derived and/or modified sequence
aaccctgaaaggtgggcgcgggcaggctcgcgatgcctctacacaagtatcccgtgtggctctggaagcggctgcagctgcgggagggcatctgttcccgcctgcccggccactacctgcgctccctggaggaggagcggacgcccactcccgtgcactataggcctcatggggccaagttcaagatcaaccccaagaacgggcagcgggagcgtgtggaggacgtgcccattcccatctactttccccccgaatcccagcgggggttgtggggcggcgagggctggatcctgggccaaatatatgccaacaacgacaagctctccaagaggctgaagaaagtgtggaagccacagctgtttgagcgagagttctacagtgagatcctggacaagaagttcacagtgactgtgaccatgcggaccctggacctcatcgatgaggcttatgggctcgacttttacatcctcaagaccccgaaggaggacctgtgctccaagtttgggatggacctgaagcgagggatgctgctgcggcttgcccggcaggacccccagctgcaccccgaggaccccgagcggcgggcagccatctacgacaagtacaaggaatttgccatcccagaggaggaggcagagtgggtgggcctcacgctggaggaggccattgagaagcagagacttttggaggagaaggaccctgtacccctgttcaagatctatgtggcggagctgatccagcagctgcagcagcaggcactgtcagagccggcggtggtgcagaagagagccagtggccagtgaccacacagctcctccatgcctgaccaacaggcccagctttccctgccaggccctttgcactg

SEQ ID NO: 315573 - DNA, 1053 bp, Artificial Sequence
  derived and/or modified sequence
tcccgccaggctcgcgatgcctctacacaagtatcccgtgtggctctggaagcggctgcagctgcgggagggcatctgttcccgcctgcccggccactacctgcgctccctggaggaggagcggacgcccactcccgtgcactataggcctcatggggccaagttcaagatcaaccccaagaacgggcagcgggagcgtgtggaggacgtgcccattcccatctactttccccccgaatcccagcgggggttgtggggcggcgagggctggatcctgggccaaatatatgccaacaacgacaagctctccaagaggctgaagaaagtgtggaagccacagctgtttgagcgagagttctacagtgagatcctggacaagaagttcacagtgactgtgaccatgcggaccctggacctcatcgatgaggcttatgggctcgacttttacatcctcaaggcaagcggggaggacctgtgctccaagtttgggatggacctgaagcgagggatgctgctgcggcttgcccggcaggacccccagctgcaccccgaggaccccgagcggcgggcagccatctacgacaagtacaaggaatttgccatcccagaggaggaggcagagtgggtgggcctcacgctggaggaggccattgagaagcagagacttttggaggagaaggaccctgtacccctgttcaagatctatgtggcggagctgatccagcagctgcagcagcaggcactgtcagagccggcggtggtgcagaagagagccagtggccagtgaccacacagctcctccatgcctgaccaacaggcccagctttccctgccaggccctttgcactgaggacacagatcccggggagctgtgagggccaccggtgggcagtgggtggatcctggtttcgtgtgctgcccatgcaccttccagcccggggccagcttggcagggatccccaggaggcctgggccgcccagaggctcctctcaggctgggccccgacgtttgcggcagtgttccttgtgcccgtggggccgggagcgagtaaa

SEQ ID NO: 315574 - DNA, 1596 bp, Artificial Sequence
  derived and/or modified sequence
gtcagcggtgggaggagggccaggcgcggcagatcggcttccggttccggtgggctctgaaccctgaaaggctcgcgatgcctctacacaagtatcccgtgtggctctggaagcggctgcagctgcgggagggcatctgttcccgcctgcccggccactacctgcgctccctggaggaggagcggacgcccactcccgtgcactataggcctcatggggccaagttcaagatcaaccccaagaacgggcagcgggagcgtgtggaggacgtgcccattcccatctactttccccccgaatcccagcgggggttgtggggcggcgagggctggatcctgggccaaatatatgccaacaacgacaagctctccaagaggctgaagaaagtgtggaagccacagctgtttgagcgagagttctacagtgagatcctggacaagaagttcacagtgactgtgaccatgcggaccctggacctcatcgatgaggcttatgggctcgacttttacatcctcaaggcaagcggggaggacctgtgctccaagtttgggatggacctgaagcgagggatgctgctgcggcttgcccggcaggacccccagctgcaccccgaggaccccgagcggcgggcagccatctacgacaagtacaaggaatttgccatcccagaggaggaggcagagtgggtgggcctcacgctggaggaggccattgagaagcagagacttttggaggagaaggaccctgtacccctgttcaagatctatgtggcggagctgatccagcagctgcagcagcaggcactgtcagagccggcggtggtgcagaagagagccagtggccagtgaccacacagctcctccatgcctgaccaacaggcccagctttccctgccaggccctttgcactgaggacacagatcccggggagctgtgagggccaccggtgggcagtgggtggatcctggtttcgtgtgctgcccatgcaccttccagcccggggccagcttggcagggatccccaggaggcctgggccgcccagaggctcctctcaggctgggccccgacgtttgcggcagtgttccttgtgcccgtggggccgggagcgagtaaagtctgggccaggctgtgtgtgtgtatctttgctttgaggactggtgttctctttggggatcctgatcctgtcacccctgcccttgctgcccctgagacctcggatgagccgtgggcattgactctggctgtgcccgtcccccggtgagctgcagagagcgaggttcaattctgtgttttgtgtttttttttcttttctttttttgagacggagtcttgctcagtcacccaggctggagtgcagtggcacgatctggactcactacaacctccacctccagagttcaagtgattgtcctgtctcagcctcctgagtagctgggattacaggcaccccgctatcatgtatggctaattgtattttagtagagaaggggtttcaccatgttggccaggctgggcttgaactcctgacctcaggtgacccacctgcctcaacctgccaaagtgttgggattacaggcgtgagccacctcccctggc

SEQ ID NO: 315575 - DNA, 800 bp, Artificial Sequence
  derived and/or modified sequence
acaggggccggagtgagaaccgggggccggggtagggggtagcgggtgagagccgggggccggggtagcgggctcgcgatgcctctacacaagtatcccgtgtggctctggaagcggctgcagctgcgggagggcatctgttcccgcctgcccggccactacctgcgctccctggaggaggagcggacgcccactcccgtgcactataggcctcatggggccaagttcaagatcaaccccaagaacgggcagcgggagcgtgtggaggacgtgcccattcccatctactttccccccgaatcccagcgggggttgtggggcggcgagggctggatcctgggccaaatatatgccaacaacgacaagctctccaagaggctgaagaaagtgtggaagccacagctgtttgagcgagagttctacagtgagatcctggacaagaagttcacagtgactgtgaccatgcggaccctggacctcatcgatgaggcttatgggctcgacttttacatcctcaagaccccgaaggaggacctgtgctccaagtttgggatggacctgaagcgagggatgctgctgcggcttgcccggcaggacccccagctgcaccccgaggaccccgagcggcgggcagccatctacgacaagtacaaggaatttgccatcccagaggaggaggcagagtgggtgggcctcacgctggaggaggccattgagaagcagagacttttggaggagaaggaccctgtacccctgttcaagatctatgtggcggagctgatccagcagctgcagcagca

SEQ ID NO: 315576 - DNA, 722 bp, Artificial Sequence
  derived and/or modified sequence
aaaggtgggcgcgggcaggtggggtgtgggggggcgccggggcagaaggggaggggcaggctcgcgatgcctctacacaagtatcccgtgtggctctggaagcggctgcagctgcgggagggcatctgttcccgcctgcccggccactacctgcgctccctggaggaggagcggacgcccactcccgtgcactataggcctcatggggccaagttcaagatcaaccccaagaacgggcagcgggagcgtgtggaggacgtgcccattcccatctactttccccccgaatcccagcgggggttgtggggcggcgagggctggatcctgggccaaatatatgccaacaacgacaagctctccaagaggctgaagaaagtgtggaagccacagctgtttgagcgagagttctacagtgagatcctggacaagaagttcacagtgactgtgaccatgcggaccctggacctcatcgatgaggcttatgggctcgacttttacatcctcaagaccccgaaggaggacctgtgctccaagtttgggatggacctgaagcgagggatgctgctgcggcttgcccggcaggacccccagctgcaccccgaggaccccgagcggcgggcagccatctacgacaagtacaaggaatttgccatcccagaggaggaggcagagtgggtgggcctcacgctggaggaggccattgagaagcagagacttttgga

SEQ ID NO: 315577 - DNA, 619 bp, Artificial Sequence
  derived and/or modified sequence
cgggtgagagccgggggccggggtagcgggctcgcgatgcctctacacaagtatcccgtgtggctctggaagcggctgcagctgcgggagggcatctgttcccgcctgcccggccactacctgcgctccctggaggaggagcggacgcccactcccgtgcactataggcctcatggggccaagttcaagatcaaccccaagaacgggcagcgggagcgtgtggaggacgtgcccattcccatctactttccccccgaatcccagcgggggttgtggggcggcgagggctggatcctgggccaaatatatgccaacaacgacaagctctccaagaggctgaagaaagtgtggaagccacagctgtttgagcgagagttctacagtgagatcctggacaagaagttcacagtgactgtgaccatgcggaccctggacctcatcgatgaggcttatgggctcgacttttacatcctcaagaccccgaaggaggacctgtgctccaagtttgggatggacctgaagcgagggatgctgctgcggcttgcccggcaggacccccagctgcaccccgaggaccccgagcggcgggcagccatctacgacaagtacaaggaatttg

SEQ ID NO: 315578 - DNA, 771 bp, Artificial Sequence
  derived and/or modified sequence
atgcccctgcacaagtaccccgtgtggctgtggaagcggctgcagctgcgtgaaggaatatgcagtagactcccaggacactacctccggtcacttgaggaggaacggaccccaacccctgtccactataggccccatggcgccaagtttaagatcaacccaaaaaacggccagagggagagggtagaggacgtgcctatcccaatctacttccctcctgagagtcagcgcgggttgtggggcggcgaaggctggattttggggcagatctacgcaaataacgataaactgtctaagcggctgaagaaagtttggaaacctcagttgttcgagagagaattctattcagagattcttgataaaaaattcacggtgaccgtgaccatgaggactttggacctgatcgacgaggcatacggattggacttctacatccttaaaacaccaaaggaggatctgtgctcaaaatttggtatggacctcaagcggggaatgctgctccgcctggcacgccaggacccccaactacatccggaggaccctgagagacgtgccgcaatctatgataaatacaaggagtttgctattcccgaggaagaggctgaatgggttggtctgacgctggaagaagccatcgaaaagcagagacttctggaggagaaagatcccgttccgctttttaagatctacgtggcagaactaattcaacaactgcagcagcaggccctctctgaacccgcagtagtgcagaagcgcgcgtcagggcagtag

SEQ ID NO: 315579 - DNA, 771 bp, Artificial Sequence
  derived and/or modified sequence
atgcccctgcacaagtaccccgtgtggctgtggaagcggctgcagctgagggaaggaatctgctcacgcctgcccggacactatctgcgatctctggaggaagaacggactcctacgcctgtccactacagaccacatggcgctaaattcaaaatcaacccaaaaaatgggcaaagagagagagtggaggacgtgcccatccctatttactttccccccgaaagccagaggggcctttggggaggcgagggctggatcctgggccaaatttacgccaataacgacaagctgtccaaacgcctgaagaaggtctggaagccgcaactgtttgagagagagttttacagcgagatattggataagaaatttacggttaccgttacgatgaggactttagacttgatcgacgaggcttatggcctggacttttatattctgaagacccctaaagaggatctgtgctcgaagtttggaatggacctgaaaagagggatgctcctgcgtctcgcccggcaggatccccagcttcaccccgaggatcccgaacggcgggctgctatctacgataagtacaaggagttcgctattcctgaagaagaagccgagtgggtgggactgaccttagaagaggccatcgaaaagcagcggctgttggaggagaaggacccagttccactgtttaagatctatgtagccgagcttatacagcagttgcagcagcaggcactcagtgaacccgccgtcgttcagaaaagagcaagcggccaatag

SEQ ID NO: 315580 - DNA, 771 bp, Artificial Sequence
  derived and/or modified sequence
atgcccctgcacaagtaccccgtgtggctgtggaagcggctgcagttgagggagggtatctgctcccgactgccaggccattatctccggagccttgaggaggagaggaccccaactcccgtgcactacaggccccatggtgctaaattcaagatcaacccaaaaaatggtcagagggaacgggtggaggacgtgccaataccaatctactttccacccgagtcccagagaggactgtggggcggagaaggctggatcttggggcaaatatatgcaaacaatgacaagctgtccaaaagactcaaaaaggtttggaagcctcagctcttcgagagggagttttactccgagatcctggacaaaaaattcacagtgactgtcactatgcgaacacttgacctgatcgacgaagcctatggtctggatttctatattttgaaggcgtccggtgaggatctgtgcagcaagttcggaatggatctaaaacgtggtatgcttctgaggttggccagacaggatccccagttacacccggaagatccagaaaggagggcagctatttatgacaagtataaggagtttgctatcccagaggaggaagccgaatgggtaggcttgacactcgaagaggcaatcgaaaaacagcggctgctagaagagaaggatccagtcccactcttcaagatctacgtggcggaactaatacagcaacttcaacagcaggcattgtctgaaccagctgtggtgcagaaacgtgccagcggacaatag

SEQ ID NO: 315581 - DNA, 771 bp, Artificial Sequence
  derived and/or modified sequence
atgcccctgcacaagtaccccgtgtggctgtggaagcggctgcagttaagggagggtatttgcagtcgcctgcccggccactaccttcgctcactagaggaagaacggaccccaacaccagttcattataggccacatggcgctaaatttaagataaatcctaagaatggccaaagagaacgggtcgaggatgtccctatccccatctacttcccacccgagtctcagcgcggcttgtggggaggtgagggctggattctgggacagatctatgctaacaacgacaagctaagcaaacgacttaagaaggtgtggaagccccaactgtttgaacgcgagttttactctgagatcttggacaaaaagtttaccgttacagtgaccatgcgcacgctcgacctaatcgacgaggcctacggcctagatttttacatcctgaaagcctcaggtgaggatttatgcagcaaattcggtatggacctcaagaggggaatgcttctgcggctagcgcggcaagacccacaactccaccctgaagatcctgagcggagagccgccatatacgacaaatacaaggaatttgcaataccggaggaggaagctgagtgggttggcctgacgctcgaagaagcaatcgaaaaacagaggctccttgaggagaaggacccggtgcctttatttaaaatttacgtggcggaacttattcagcagctgcaacagcaagccctgagcgagcccgccgttgtccagaagagggccagtggtcaatag

SEQ ID NO: 315582 - DNA, 723 bp, Artificial Sequence
  derived and/or modified sequence
atgcccctgcacaagtaccccgtgtggctgtggaagcggctgcagctacgcgaagggatatgcagtaggttgcccggacactacctcagatccctcgaagaggaaagaacgccaactcctgtgcattaccggccacacggcgctaaattcaaaatcaatcctaaaaacggccagcgagagcgtgttgaagatgtacccatccccatttactttcccccagaaagccagaggggactgtggggcggcgagggctggattctgggccagatatatgcaaataacgataaacttagtaagcgcctcaagaaagtgtggaaaccgcagctctttgaacgagagttttactcagagatacttgataagaaattcactgttacagtgaccatgagaaccttagacctgatagatgaagcttacggcctcgatttttacatcttgaagaccccgaaggaagatttgtgcagcaaattcggcatggatctcaagagagggatgctgctgcggttagctagacaggacccccagcttcacccagaggacccagagcgcagagctgcaatatacgataaatacaaggagtttgccatccccgaagaggaggccgaatgggtgggtctgacactggaggaagcaattgaaaaacagagattgctcgaggaaaaggaccccgtgcctttgtttaagatatacgttgccgagctgatccagcagctgcagcagtag

SEQ ID NO: 315583 - DNA, 657 bp, Artificial Sequence
  derived and/or modified sequence
atgcccctgcacaagtaccccgtgtggctgtggaagcggctgcagttgcgagagggcatctgcagccggctgcccgggcactatctgcgaagcctcgaagaggaacgcacacccacacccgtgcactacagacctcatggcgctaaattcaaaatcaaccccaaaaatggacagagagaaagagtcgaggacgtccccattcctatttactttccccctgagtcccagaggggattatggggcggcgaagggtggatcttgggacaaatctacgccaacaacgacaagctgtctaaacgcctcaaaaaagtgtggaagccccaactatttgaacgggagttttactccgagattctggacaagaaatttactgtgacagtaaccatgcggacattggatcttattgacgaagcttatggtctggatttctacatactgaagacccctaaggaggatctgtgtagtaaatttggaatggacctaaaaaggggaatgctgctccggctggccagacaagacccacagctgcacccagaagaccctgaaagacgagcagcaatttacgacaagtacaaagaatttgccatacccgaggaagaggccgagtgggtgggactgacactcgaagaggctatcgagaagcaacgccttctgtag

SEQ ID NO: 315584 - DNA, 585 bp, Artificial Sequence
  derived and/or modified sequence
atgcccctgcacaagtaccccgtgtggctgtggaagcggctgcagctgcgagagggcatctgcagcaggcttcctgggcactatctcaggtctcttgaagaggagaggacccctacccccgtgcactaccgaccacacggagccaagtttaagattaatccaaaaaacggtcagagggaacgtgttgaggatgtgcccatcccgatctattttccacccgaatcgcaacgaggcttatgggggggcgaaggttggattctgggtcagatttacgccaacaacgataagctgtcaaagcggctcaagaaggtctggaaaccgcagttattcgaacgggaattttattccgaaattctcgacaaaaagttcaccgtgaccgtgaccatgaggacgcttgacctgatcgacgaagcttacggtctcgacttctatatactgaagacccctaaggaggatctgtgttctaagttcggcatggacctgaaacgagggatgctcctacgtttggctcggcaggacccccagctccatcccgaggatccagaaagacgtgcagctatctatgataaatataaggaattttag

SEQ ID NO: 315585 - DNA, 771 bp, Artificial Sequence
  derived and/or modified sequence
atgcccctccataagtaccctgtttggttatggaagaggcttcaactgcgtgaaggcatctgcagcagactgcccggtcattatctccgcagcctggaggaggagcggacgcctacccccgttcactaccggcctcacggggctaaattcaagattaatcccaaaaatggacagagggagcgtgtggaagacgtgcccatccccatatactttccccctgagtcccaaaggggtctgtggggtggcgaaggttggattttgggacagatctacgctaacaacgataagctcagtaaacgtcttaagaaagtgtggaaaccccagctgttcgaacgcgagttttattcagagatcctcgacaagaagtttaccgtgactgtgacaatgcgaaccttggacctcatcgacgaggcttatggactggacttttatattttaaaaacccccaaggaagatttgtgctccaaattcgggatggatcttaagagaggaatgcttctccgtctagctagacaggatcctcaattgcatcctgaagaccccgagcgacgcgctgcaatttatgacaaatataaggaattcgccatacctgaagaggaggccgagtgggtcggtctcacactggaagaagcaatcgaaaagcagcggttgctcgaggaaaaagaccccgtccctctgttcaaaatctatgttgcggagctgattcaacagctccagcagcaggccctgagtgagcccgctgtggtccagaagagggcttcgggacagtag

SEQ ID NO: 315586 - DNA, 771 bp, Artificial Sequence
  derived and/or modified sequence
atgccactgcataagtatcctgtctggctgtggaaaaggcttcagcttcgagagggaatttgttctcgcctgcctggacattacctgaggagtttggaggaagaaaggaccccaactccggtgcactaccgccctcatggagcaaaatttaagatcaaccccaagaatgggcagcgagagagagtagaagatgtgccaatccctatctactttccccctgagagtcagcggggtctgtggggtggcgagggctggattctaggccagatatatgctaataacgacaagctgtcaaagaggctcaagaaggtatggaaaccccaactctttgaacgggaattctactctgagatcttagataaaaagttcacagtcacagtgacaatgcgcacacttgatctgatcgatgaagcctacggtctcgacttctacatcctgaagaccccgaaggaggacttatgtagcaaattcggaatggacctgaaaagaggcatgctgcttaggttggcacggcaggatccacagcttcatcctgaagatcccgaaagacgcgcagccatctatgacaagtataaggaatttgcaattcccgaggaggaggccgaatgggtaggtctgactctggaagaagccattgaaaagcaacgcctcttagaggagaaagatcctgtgccactgtttaagatctatgtcgcagaactcatccagcagcttcaacagcaggcgctcagtgagcctgccgttgttcaaaaaagagcaagcggtcagtag

SEQ ID NO: 315587 - DNA, 771 bp, Artificial Sequence
  derived and/or modified sequence
atgccacttcacaagtaccccgtctggctgtggaagagactgcagctgcgcgaagggatctgttctagactgcctgggcactacctgaggagtctggaagaggagagaaccccaacacccgtacactacaggcctcacggtgctaagttcaagataaatcctaagaacggacaaagggaaagagttgaagatgtcccaattccaatctattttccgcctgagtcacagcgaggactatgggggggagaaggttggattctggggcagatctacgccaacaatgacaagctgagcaaacgtctgaagaaggtttggaaaccacaactgttcgaaagagagttctatagcgagatcctcgataagaaatttacggtgacagtaacaatgaggacactggacttgatcgatgaagcatatgggctggacttctacatactcaaggcttcaggcgaagatctctgttccaagttcggtatggatctgaaaagaggaatgctcctgcgtttagccagacaggaccctcagttacaccccgaggacccggagcgacgtgccgcaatttatgataaatacaaggagttcgctatccctgaagaggaagccgagtgggttgggctgacactcgaggaagccatcgaaaaacagcgattgctggaggagaaagaccccgtccccctgttcaagatttacgtggcagagctgatccaacagttacaacagcaagccctgagtgaacccgctgtcgtccagaagcgggcaagcggtcaatag

SEQ ID NO: 315588 - DNA, 771 bp, Artificial Sequence
  derived and/or modified sequence
atgcctttacacaagtacccagtctggctgtggaagcggctgcaacttagggaaggcatctgttctcggctgcccggacattacctcaggtcacttgaagaagaaagaacacccacaccagtccactatcggcctcatggagctaaattcaaaatcaaccccaagaatggccaacgggaacgtgttgaggacgtcccaatcccaatctacttccccccagagtcacagagaggtctctggggcggagaagggtggattctgggtcagatctacgccaataatgataagcttagtaaaaggctcaagaaggtttggaaaccacagctcttcgagagggaattttattctgagattctggacaagaaattcaccgtaacggtgactatgagaactctcgacctcatcgacgaagcttacggattggatttttacattctgaaagcttccggcgaagatctctgctcaaaatttggcatggacctgaagaggggcatgctgctcaggctggctaggcaggacccgcagctccacccagaggacccagaacggcgagccgctatctatgataagtacaaggagtttgccattcccgaggaggaggctgagtgggttgggctgaccctggaggaggccatcgagaagcagagactgcttgaggagaaggacccagtacctctgtttaaaatttacgtagctgagctgatacagcagcttcagcagcaggcgctgtcggaacccgctgtggtacagaaaagggccagtggtcagtag

SEQ ID NO: 315589 - DNA, 723 bp, Artificial Sequence
  derived and/or modified sequence
atgccactgcataaatacccagtttggctctggaagaggctccaactgagagaaggcatctgctcccgactgccagggcactatcttaggtctttagaagaggagcggacgcccacacccgtccactatcgaccgcacggcgcaaagtttaaaataaatcctaagaatggtcagagagagcgcgtcgaagacgtaccaatccccatatattttccacctgaatctcagaggggtctgtggggaggagagggttggatcttaggccagatctacgcaaacaacgataaactgagcaagcgcttaaaaaaggtatggaagcctcagctcttcgagcgggaattctactctgagatactcgataaaaaatttacagtgaccgtgacgatgcgtacgcttgatcttatcgatgaagcatacgggttggatttttatatcttaaagaccccaaaggaggatctgtgttccaagtttggcatggatctgaaacgtggaatgctgttaaggcttgccaggcaggacccccagctgcaccccgaggatcccgaacgtcgggctgcaatatatgataagtacaaggagtttgccattcccgaagaagaagctgaatgggtgggtctcaccctagaagaggccatcgagaaacagagactccttgaggaaaaagatcccgttcccttatttaagatttacgtggctgaactgattcagcaactgcagcagtag

SEQ ID NO: 315590 - DNA, 657 bp, Artificial Sequence
  derived and/or modified sequence
atgccgttacataagtatcccgtgtggctgtggaaacgcttgcagctgcgggaggggatctgctctcgactgcccggacactatctcaggtctttggaagaggaacggaccccgaccccggtccactaccggccacatggagccaagttcaaaatcaatccgaagaacggccagcgtgaacgtgttgaagatgtcccaatccctatctatttcccccctgagtcccagagaggcctgtggggtggagagggctggatccttggtcagatatatgcaaataacgataagctgtctaaacgcctgaagaaagtgtggaagcctcagctttttgagagagaattctactctgagatcctggataagaagtttaccgtgacagtgacaatgcgcactcttgaccttattgatgaagcatatggactcgatttttacattttaaagacacccaaggaggacttgtgcagcaaatttggtatggatctcaagaggggaatgctgttgcgactggccaggcaagatccacagctccacccagaagaccccgagaggcgggcagcaatctacgataagtacaaggagttcgcaatacctgaggaggaggccgaatgggtgggtttaacgttggaggaggctatcgaaaagcagcgcttgctctag

SEQ ID NO: 315591 - DNA, 585 bp, Artificial Sequence
  derived and/or modified sequence
atgcccttacacaaataccctgtctggttatggaagcggctgcagctgagggaaggcatctgtagtcgtctacctgggcattatctgcgttctctggaggaagagcgaacccctacacctgtccactacaggccccacggcgcaaagttcaagatcaaccccaagaatggtcaacgcgagagggtcgaggatgtgccaattcccatctatttccctcccgagagccagcggggactttggggcggagagggttggatcctaggacagatctacgcaaacaacgataagctgagtaaacgtctgaaaaaggtgtggaaaccgcagctcttcgagcgtgagttttattcagaaatcttagataaaaagtttactgtgactgtgactatgcggactctggacctgatcgatgaggcctacggcttggacttctacatacttaagaccccgaaagaggatctgtgctccaagtttggaatggacttaaaaagggggatgctgctgagacttgccaggcaagatccacagctgcatcccgaagaccctgaaagacgagccgcaatatacgacaaatataaggaattctag

SEQ ID NO: 315592 - DNA, 771 bp, Artificial Sequence
  derived and/or modified sequence
atgcccctgcacaagtaccccgtgtggctgtggaagagactgcagctgagagagggcatctgcagcagactgcccggccactacctgagaagcctggaggaggagagaacccccacccccgtgcactacagaccccacggcgccaagttcaagatcaaccccaagaacggccagagagagagagtggaggacgtgcccatccccatctacttcccccccgagagccagagaggcctgtggggcggcgagggctggatcctgggccagatctacgccaacaacgacaagctgagcaagagactgaagaaggtgtggaagccccagctgttcgagagagagttctacagcgagatcctggacaagaagttcaccgtgaccgtgaccatgagaaccctggacctgatcgacgaggcctacggcctggacttctacatcctgaagacccccaaggaggacctgtgcagcaagttcggcatggacctgaagagaggcatgctgctgagactggccagacaggacccccagctgcaccccgaggaccccgagagaagagccgccatctacgacaagtacaaggagttcgccatccccgaggaggaggccgagtgggtgggcctgaccctggaggaggccatcgagaagcagagactgctggaggagaaggaccccgtgcccctgttcaagatctacgtggccgagctgatccagcagctgcagcagcaggccctgagcgagcccgccgtggtgcagaagagagccagcggccagtag

SEQ ID NO: 315593 - DNA, 771 bp, Artificial Sequence
  derived and/or modified sequence
atgcccctgcacaagtaccccgtgtggctgtggaagagactgcagctgagagagggcatctgcagcagactgcccggccactacctgagaagcctggaggaggagagaacccccacccccgtgcactacagaccccacggcgccaagttcaagatcaaccccaagaacggccagagagagagagtggaggacgtgcccatccccatctacttcccccccgagagccagagaggcctgtggggcggcgagggctggatcctgggccagatctacgccaacaacgacaagctgagcaagagactgaagaaggtgtggaagccccagctgttcgagagagagttctacagcgagatcctggacaagaagttcaccgtgaccgtgaccatgagaaccctggacctgatcgacgaggcctacggcctggacttctacatcctgaaggccagcggcgaggacctgtgcagcaagttcggcatggacctgaagagaggcatgctgctgagactggccagacaggacccccagctgcaccccgaggaccccgagagaagagccgccatctacgacaagtacaaggagttcgccatccccgaggaggaggccgagtgggtgggcctgaccctggaggaggccatcgagaagcagagactgctggaggagaaggaccccgtgcccctgttcaagatctacgtggccgagctgatccagcagctgcagcagcaggccctgagcgagcccgccgtggtgcagaagagagccagcggccagtag

SEQ ID NO: 315594 - DNA, 723 bp, Artificial Sequence
  derived and/or modified sequence
atgcccctgcacaagtaccccgtgtggctgtggaagagactgcagctgagagagggcatctgcagcagactgcccggccactacctgagaagcctggaggaggagagaacccccacccccgtgcactacagaccccacggcgccaagttcaagatcaaccccaagaacggccagagagagagagtggaggacgtgcccatccccatctacttcccccccgagagccagagaggcctgtggggcggcgagggctggatcctgggccagatctacgccaacaacgacaagctgagcaagagactgaagaaggtgtggaagccccagctgttcgagagagagttctacagcgagatcctggacaagaagttcaccgtgaccgtgaccatgagaaccctggacctgatcgacgaggcctacggcctggacttctacatcctgaagacccccaaggaggacctgtgcagcaagttcggcatggacctgaagagaggcatgctgctgagactggccagacaggacccccagctgcaccccgaggaccccgagagaagagccgccatctacgacaagtacaaggagttcgccatccccgaggaggaggccgagtgggtgggcctgaccctggaggaggccatcgagaagcagagactgctggaggagaaggaccccgtgcccctgttcaagatctacgtggccgagctgatccagcagctgcagcagtag

SEQ ID NO: 315595 - DNA, 657 bp, Artificial Sequence
  derived and/or modified sequence
atgcccctgcacaagtaccccgtgtggctgtggaagagactgcagctgagagagggcatctgcagcagactgcccggccactacctgagaagcctggaggaggagagaacccccacccccgtgcactacagaccccacggcgccaagttcaagatcaaccccaagaacggccagagagagagagtggaggacgtgcccatccccatctacttcccccccgagagccagagaggcctgtggggcggcgagggctggatcctgggccagatctacgccaacaacgacaagctgagcaagagactgaagaaggtgtggaagccccagctgttcgagagagagttctacagcgagatcctggacaagaagttcaccgtgaccgtgaccatgagaaccctggacctgatcgacgaggcctacggcctggacttctacatcctgaagacccccaaggaggacctgtgcagcaagttcggcatggacctgaagagaggcatgctgctgagactggccagacaggacccccagctgcaccccgaggaccccgagagaagagccgccatctacgacaagtacaaggagttcgccatccccgaggaggaggccgagtgggtgggcctgaccctggaggaggccatcgagaagcagagactgctgtag

SEQ ID NO: 315596 - DNA, 585 bp, Artificial Sequence
  derived and/or modified sequence
atgcccctgcacaagtaccccgtgtggctgtggaagagactgcagctgagagagggcatctgcagcagactgcccggccactacctgagaagcctggaggaggagagaacccccacccccgtgcactacagaccccacggcgccaagttcaagatcaaccccaagaacggccagagagagagagtggaggacgtgcccatccccatctacttcccccccgagagccagagaggcctgtggggcggcgagggctggatcctgggccagatctacgccaacaacgacaagctgagcaagagactgaagaaggtgtggaagccccagctgttcgagagagagttctacagcgagatcctggacaagaagttcaccgtgaccgtgaccatgagaaccctggacctgatcgacgaggcctacggcctggacttctacatcctgaagacccccaaggaggacctgtgcagcaagttcggcatggacctgaagagaggcatgctgctgagactggccagacaggacccccagctgcaccccgaggaccccgagagaagagccgccatctacgacaagtacaaggagttctag

SEQ ID NO: 315597 - protein, 747 aa, Artificial Sequence
  derived and/or modified sequence
MSSVELDDELLDPDMDPPHPFPKEIPHNEKLLSLKYESLDYDNSENQLFLEEERRINHTAFRTVEIKRWVICALIGILTGLVACFIDIVVENLAGLKYRVIKGNIDKFTEKGGLSFSLLLWATLNAAFVLVGSVIVAFIEPVAAGSGIPQIKCFLNGVKIPHVVRLKTLVIKVSGVILSVVGGLAVGKEGPMIHSGSVIAAGISQGRSTSLKRDFKIFEYFRRDTEKRDFVSAGAAAGVSAAFGAPVGGVLFSLEEGASFWNQFLTWRIFFASMISTFTLNFVLSIYHGNMWDLSSPGLINFGRFDSEKMAYTIHEIPVFIAMGVVGGVLGAVFNALNYWLTMFRIRYIHRPCLQVIEAVLVAAVTATVAFVLIYSSRDCQPLQGGSMSYPLQLFCADGEYNSMAAAFFNTPEKSVVSLFHDPPGSYNPLTLGLFTLVYFFLACWTYGLTVSAGVFIPSLLIGAAWGRLFGISLSYLTGAAIWADPGKYALMGAAAQLGGIVRMTLSLTVIMMEATSNVTYGFPIMLVLMTAKIVGDVFIEGLYDMHIQLQSVPFLHWEAPVTSHSLTAREVMSTPVTCLRRREKVGVIVDVLSDTASNHNGFPVVEHADDTQPARLQGLILRSQLIVLLKHKVFVERSNLGLVQRRLRLKDFRDAYPRFPPIQSIHVSQDERECTMDLSEFMNPSPYTVPQEASLPRVFKLFRALGLRHLVVVDNRNQVVGLVTRKDLARYRLGKRGLEELSLAQT

SEQ ID NO: 315598 - DNA, 2244 bp, Artificial Sequence
  derived and/or modified sequence
atgagcagtgtcgagcttgatgacgagttactcgatcccgatatggatcccccacacccattccccaaggaaattccccacaacgaaaaactactcagtcttaagtacgaaagcctggactatgacaacagtgagaaccagctatttctagaggaggagcgtaggataaaccacacagctttcaggacagtggagatcaagcgctgggtgatctgtgccttaataggcatcctgactgggctggtcgcttgcttcatagacatcgtggtggagaacctggccggcctgaagtaccgagtaatcaagggcaatatcgataaattcactgagaaagggggactgtcattttctctgttgctgtgggcgacgctgaatgccgccttcgtacttgttggttcagtcatcgtcgcctttatcgagcccgtggctgccggcagcggaatcccgcaaatcaagtgtttcctgaatggcgtgaagatcccacatgtcgtccgtctgaagaccttggtgatcaaggtttcgggggtgattctctcggtggtcggtggactggctgtcgggaaggagggacccatgattcattctggttccgtaattgccgctggaattagccaggggaggtctaccagcctaaagcgagattttaagatattcgagtactttagacgcgacacagagaaaagagacttcgtatccgcaggtgcggccgccggggtttcggcagctttcggggctcctgtgggaggagtgctttttagtctagaggagggagctagcttttggaaccaattcctcacctggaggatcttttttgccagcatgatatccactttcaccctcaatttcgtgttaagcatctaccatggcaatatgtgggacctgtcctctcctggtctcattaactttggtagatttgatagcgagaagatggcttacacaatccatgagatccccgtcttcatcgccatgggcgtggtgggaggcgtcttgggcgctgtgttcaatgctcttaattattggcttaccatgttcaggataaggtatatccacagaccttgcctccaggtgatagaagccgtgctggtggcagccgttactgcaactgtggctttcgtgctcatctattcaagccgagattgccagcccttacagggagggtctatgagttacccattgcaacttttctgcgctgacggcgaatataatagtatggccgcggcgttctttaatactcctgagaagtcagtggttagcctgttccacgatcccccaggctcttataatcccctgaccctgggactgtttaccttggtgtacttctttcttgcctgctggacctacgggttaaccgtgtcagccggtgtatttataccatcactgctgattggcgctgcatggggacgcctttttggaatctcactgtcatatctcaccggagcggccatctgggccgatccggggaaatacgccctgatgggtgctgccgctcagctgggtggcattgtcagaatgacactctcgctgacagtgattatgatggaggccacttcaaacgttacatatggatttccaatcatgctggtgctgatgactgcgaaaattgtcggcgacgtgttcatcgaaggtctgtacgacatgcacatacaacttcagagtgtacccttcctccactgggaagcaccggtgacatcgcatagcctgaccgcgcgtgaagtgatgtccactcccgtcacgtgtctgcgtagaagggagaaagtcggcgtgattgtggatgtgctctctgatacagcttccaatcacaacggctttccagtggttgagcatgccgatgacacacaacctgcccggcttcaaggactgattctgcggtctcaacttatcgtgttgctgaagcacaaggtgttcgtagagagatctaatttgggcctggttcagcgccggcttcgcttgaaagactttcgggacgcctatcctaggtttccccctatccagtctattcacgtttcacaggatgagcgagaatgcactatggatttatcggagttcatgaatccttccccttacactgtcccacaggaagccagtctcccaagggtcttcaagctgttccgagccctgggcttgaggcacttggtggtggttgataacagaaatcaggttgtgggtctcgtgacaagaaaggatttagcacggtacagactggggaagcgtggactcgaggaactcagtctggcccagacgtag

SEQ ID NO: 315599 - DNA, 2244 bp, Artificial Sequence
  derived and/or modified sequence
atgagctctgtggagctggatgatgagctgctggaccctgacatggaccccccccaccccttccccaaggagatcccccacaatgagaagctgctgagcctgaagtatgagagcctggactatgacaacagcgagaaccagctgttcctggaggaggagcggcgcatcaaccacacagccttcagaacagtggagatcaagcgctgggtgatctgtgccctgattggcatcctgaccggcctggtggcctgcttcatcgacatcgtggtggagaacctggccggcctgaagtacagagtcatcaagggcaacatcgacaagttcacagagaagggcggcctgtccttcagcctgctgctgtgggccaccctgaatgctgcctttgtgctggtgggctctgtgattgtggccttcatcgagcctgtggccgccggcagcggcatcccccagatcaagtgcttcctgaatggagtgaagatcccccacgtggtgcggctgaagaccctggtgatcaaggtgtctggagtcatcctgtctgtggtgggcggcctggccgtgggcaaggagggccccatgatccacagcggctctgtgattgctgctggcatcagccagggccgcagcaccagcctgaagagggacttcaagatctttgagtacttccggcgggacacagagaagagggactttgtgtctgctggagctgctgctggggtgtctgctgcctttggagcccctgtgggcggcgtgctcttcagcctggaggagggcgccagcttctggaaccagttcctgacctggaggatcttctttgcctccatgatcagcaccttcaccctgaactttgtgctgagcatctaccacggcaacatgtgggacctgagcagccctggcctcatcaactttggccgctttgattctgagaagatggcctacaccatccacgagatccctgtgttcatcgccatgggcgtggtgggcggcgtgctgggcgctgtgttcaatgccctgaactactggctgaccatgttccgcatccgctacatccaccggccctgcctgcaggtgattgaagctgtgctggtggccgctgtgacagccaccgtggcctttgtgctgatctacagcagccgggactgccagcccctgcagggcggctccatgagctaccccctgcagctgttctgtgctgatggagagtacaacagcatggccgccgccttcttcaacaccccagagaagtctgtggtgtccctcttccatgaccccccaggcagctacaaccccctgaccctgggcctcttcaccctggtgtacttcttcctggcctgctggacctacggcctgactgtgtctgctggggtcttcatccccagcctgctgattggagctgcctggggccgcctgtttggcatcagcctgagctacctgaccggggccgccatctgggccgaccccgggaagtatgccctgatgggcgctgctgcccagctgggcggcatcgtgaggatgaccctgagcctgaccgtcatcatgatggaggccaccagcaatgtgacctacggcttccccatcatgctggtgctgatgacagccaagatcgtgggagatgtgttcatcgagggcctgtatgacatgcacatccagctgcagagcgtgcccttcctgcactgggaggcccctgtgaccagccacagcctgacagcccgggaggtgatgagcacccctgtgacctgcctgcggcggcgggagaaggtgggcgtgattgtggatgtgctgagtgacacagccagcaaccacaacggcttccctgtggtggagcacgcagatgacacccagcctgcccggctgcagggcctcatcctgcggagccagctgattgtgctgctgaagcacaaggtgtttgtggagaggagcaacctgggcctggtgcagaggcggctgcggctgaaggacttcagagatgcctacccccgcttcccccccatccagagcatccacgtgtcccaggatgagcgggagtgcaccatggacctgtctgagttcatgaaccccagcccctacacagtgccccaggaggccagcctgcccagggtcttcaagctgttccgggccctgggcctgcggcacctggtggtggtggacaacagaaaccaggtggtgggcctggtgaccaggaaggacctggcccgctaccgcctgggcaagaggggcctggaggagctgagcctggcccagacctag

SEQ ID NO: 315600 - DNA, 2244 bp, Artificial Sequence
  derived and/or modified sequence
atgagcagcgtggagctggacgacgagctgctggaccccgacatggaccccccacacccttttcccaaggagattcctcacaatgagaagctccttagcctgaaatacgagagcctggattatgataattctgaaaatcagttgtttcttgaggaagagcgccgcattaatcacacagcattccgaacggtagaaatcaagcggtgggttatttgcgctttgatcggcatcttgaccggactggtggcgtgtttcatcgatatcgtagttgaaaacctggccggcctcaaatatcgggtaattaagggcaacattgataagttcaccgaaaaaggggggttgtcattttctctactgttatgggcgaccttgaatgcagcttttgtcctagttggaagtgttattgtcgcctttatcgaacccgtggcggccgggagcggtattccccagatcaaatgtttcctgaacggggttaaaatccctcacgtggtgcgcctcaaaactttggttatcaaagtcagtggagtcatcttaagtgtagtgggaggtttagcagtcggcaaggaggggcctatgattcactctgggagcgtgattgccgccggcatttcccagggcaggagcacatccttgaagcgggactttaaaattttcgagtacttcagacgcgacaccgagaagcgcgatttcgtgagcgctggggcagccgcaggagtctccgcagctttcggcgctcccgttggcggcgtgctattcagccttgaggaaggggcctctttttggaatcagtttctaacctggcgtatcttttttgcatctatgatcagtaccttcaccctcaactttgtgctatccatctatcatggtaatatgtgggacttgtcttctcccggactgatcaactttggaagattcgatagtgaaaagatggcttacacaatacatgaaattccagttttcatcgccatgggggtggtgggaggtgtgctgggggccgtgttcaatgctctgaactactggcttacaatgttccgtattagatatatacatagaccgtgtctgcaggtaatagaagcagtgctggttgcagcggttaccgccacagtagcgttcgtgctaatttactcgtcccgcgattgccaaccactgcagggcggctctatgtcttaccccctacaactgttttgcgccgacggagagtacaatagtatggcggcagcttttttcaatacacctgaaaagagcgtggttagtttatttcatgacccccccggttcttataatcctctaactctgggactgtttaccttggtgtacttctttctagcctgctggacctacggcttgactgtcagtgctggtgtgttcatcccgtccctgttaatcggggcagcttgggggcggctttttggtatatctctgtcctaccttactggcgcggccatctgggctgaccccggcaaatacgccctgatgggggcagccgctcaactcggtggaattgtccgcatgactctctccttgaccgtgattatgatggaggccacctctaatgtgacttacggttttccaattatgctggttctaatgactgctaaaatagtaggcgatgtgtttatagaagggctgtatgacatgcacatccagctgcagtccgttccctttctgcattgggaggctcctgtgacttcgcattcactgacagctcgcgaggtaatgtctaccccagtgacctgtctccgccgaagggaaaaggtgggcgtgatcgtcgatgtgctgagcgatactgcaagcaatcataacggcttccccgtagttgaacatgccgacgatacgcagcccgcccggctgcaggggctaatcctgagatcacaactgatagtactcctcaagcataaggtgtttgtggaaaggtcaaacttgggattagtccagcgtcgactgcgattaaaggacttccgcgatgcatacccgaggttcccccctatccaatcaatacatgtgagccaggacgagagagagtgcacaatggatctatctgaatttatgaacccaagcccttatacagtaccccaggaagccagtctaccccgggtgttcaaactgtttagagctctgggcctacgtcacctggtcgtagtagataatagaaaccaggtggtcggtctggttaccaggaaggacttggcgcgctataggttgggaaagaggggcttggaggagctctctcttgctcagacctag

SEQ ID NO: 315601 - DNA, 2244 bp, Artificial Sequence
  derived and/or modified sequence
atgtcctctgtagagttggacgacgaactattagacccagacatggacccgcctcatccatttccgaaggaaattcctcataacgagaagctactgtcactgaagtacgagtctctggattatgataacagcgaaaatcagctgtttctggaagaagaaagacgcattaatcacaccgcatttaggaccgtcgagattaagaggtgggtgatttgtgctttaatcggaatcctgactggcttagtggcctgctttattgacattgtagttgagaatctcgccggactcaaataccgggtgatcaaggggaatattgataagtttaccgagaaaggtggtctttccttcagtctcttgttatgggctaccctcaatgccgcttttgttctcgtggggtctgttatagtagcattcatcgaacctgtcgcagcaggctccggaattcctcagattaaatgtttcctgaacggcgtgaaaattccccacgtggtgagattgaaaacactggttataaaagtctccggcgttatcctctccgtggtgggagggctggccgtgggaaaggaaggccctatgatacactcggggtcagtcatcgctgctggaatctcccaggggagaagcacttctctgaagcgcgacttcaagattttcgaatattttcgacgcgacaccgagaagagggactttgtgtcggccggtgcggcagccggtgtatccgccgcttttggagcaccagtcggcggagtgctatttagtctggaggaaggagcctcgttctggaatcaatttctgacctggaggatatttttcgctagtatgattagcacttttacgttgaacttcgttttatccatctaccacgggaacatgtgggacctttcttcccccggattgatcaactttggtaggttcgactctgagaagatggcttatactatccatgagattcctgtgtttattgccatgggtgttgtggggggagtcctgggtgctgttttcaatgcactgaattattggctcaccatgttcaggattcgctatatccacaggccttgcctgcaggtgattgaagccgtactggtggctgctgtcaccgctacagtggccttcgttctgatctattcctctagagattgccaacctctgcagggcggatccatgtcttacccactccagctcttttgcgccgatggcgaatataactctatggctgccgcattcttcaacaccccagagaagtctgtggtgagcctgttccatgatcctcccggtagctacaatccacttacactcggcctctttaccctcgtgtatttctttttggcatgttggacatacggactcaccgtgagcgccggtgtgtttatccccagccttctgataggggctgcctggggtagactcttcggcatatcgctgtcttatcttacaggggcagctatctgggcagacccgggtaaatatgccctcatgggcgcagcagcacaactgggaggtatagtacggatgacactgtccctgaccgttatcatgatggaagctacaagcaatgtcacctacgggtttcccatcatgctggtcctgatgactgcgaagatcgtgggtgatgtgtttatcgagggactttacgatatgcacattcagctgcagtctgtgccctttctccactgggaggctccagttacctctcacagtttgaccgcacgggaagtcatgtcaaccccagtcacctgtctaagacggagggagaaggtgggagtcatcgtcgacgtcctctcagacaccgcgtcaaatcacaatgggtttcctgttgttgagcacgctgatgacacccaacccgctcgactgcagggacttatattacggtcacagctgatagtgttgttgaaacataaggtgtttgttgagcgctctaacttagggttagtacaaagaaggctccgcctgaaagacttccgggatgcctaccccagattcccgcctatccagtcaattcatgtttcgcaggatgaacgagagtgtactatggatctgtcagagtttatgaacccctcaccatatactgtgccgcaggaagcaagtctgccaagagtgttcaagctgttcagagccctggggcttcgccatttagtcgttgtagacaatcggaaccaggtggtaggactagttacccgaaaggaccttgctcggtaccggttaggtaagcgtgggctggaagagttgagtctggcacagacatag

SEQ ID NO: 315602 - DNA, 2244 bp, Artificial Sequence
  derived and/or modified sequence
atgagcagcgtggagctggacgacgagctgctggaccccgacatggaccccccccaccccttccccaaggagatcccccacaacgagaagctgctgagcctgaagtacgagagcctggactacgacaacagcgagaaccagctgttcctggaggaggagagaagaatcaaccacaccgccttcagaaccgtggagatcaagagatgggtgatctgcgccctgatcggcatcctgaccggcctggtggcctgcttcatcgacatcgtggtggagaacctggccggcctgaagtacagagtgatcaagggcaacatcgacaagttcaccgagaagggcggcctgagcttcagcctgctgctgtgggccaccctgaacgccgccttcgtgctggtgggcagcgtgatcgtggccttcatcgagcccgtggccgccggcagcggcatcccccagatcaagtgcttcctgaacggcgtgaagatcccccacgtggtgagactgaagaccctggtgatcaaggtgagcggcgtgatcctgagcgtggtgggcggcctggccgtgggcaaggagggccccatgatccacagcggcagcgtgatcgccgccggcatcagccagggcagaagcaccagcctgaagagagacttcaagatcttcgagtacttcagaagagacaccgagaagagagacttcgtgagcgccggcgccgccgccggcgtgagcgccgccttcggcgcccccgtgggcggcgtgctgttcagcctggaggagggcgccagcttctggaaccagttcctgacctggagaatcttcttcgccagcatgatcagcaccttcaccctgaacttcgtgctgagcatctaccacggcaacatgtgggacctgagcagccccggcctgatcaacttcggcagattcgacagcgagaagatggcctacaccatccacgagatccccgtgttcatcgccatgggcgtggtgggcggcgtgctgggcgccgtgttcaacgccctgaactactggctgaccatgttcagaatcagatacatccacagaccctgcctgcaggtgatcgaggccgtgctggtggccgccgtgaccgccaccgtggccttcgtgctgatctacagcagcagagactgccagcccctgcagggcggcagcatgagctaccccctgcagctgttctgcgccgacggcgagtacaacagcatggccgccgccttcttcaacacccccgagaagagcgtggtgagcctgttccacgacccccccggcagctacaaccccctgaccctgggcctgttcaccctggtgtacttcttcctggcctgctggacctacggcctgaccgtgagcgccggcgtgttcatccccagcctgctgatcggcgccgcctggggcagactgttcggcatcagcctgagctacctgaccggcgccgccatctgggccgaccccggcaagtacgccctgatgggcgccgccgcccagctgggcggcatcgtgagaatgaccctgagcctgaccgtgatcatgatggaggccaccagcaacgtgacctacggcttccccatcatgctggtgctgatgaccgccaagatcgtgggcgacgtgttcatcgagggcctgtacgacatgcacatccagctgcagagcgtgcccttcctgcactgggaggcccccgtgaccagccacagcctgaccgccagagaggtgatgagcacccccgtgacctgcctgagaagaagagagaaggtgggcgtgatcgtggacgtgctgagcgacaccgccagcaaccacaacggcttccccgtggtggagcacgccgacgacacccagcccgccagactgcagggcctgatcctgagaagccagctgatcgtgctgctgaagcacaaggtgttcgtggagagaagcaacctgggcctggtgcagagaagactgagactgaaggacttcagagacgcctaccccagattcccccccatccagagcatccacgtgagccaggacgagagagagtgcaccatggacctgagcgagttcatgaaccccagcccctacaccgtgccccaggaggccagcctgcccagagtgttcaagctgttcagagccctgggcctgagacacctggtggtggtggacaacagaaaccaggtggtgggcctggtgaccagaaaggacctggccagatacagactgggcaagagaggcctggaggagctgagcctggcccagacctag

SEQ ID NO: 315603 - DNA, 864 bp, Artificial Sequence
  derived and/or modified sequence
atgcacagcgtggcccacccccaccccggcgtgcccccctgggtgcccgccaccctgatcatcaccggcaagagaagaggcgccgccgccggcggcgccggcctggagcacggcggcagcggcagagcccacctgagagaggtgagcgccgagacctggagaaccagaggcgtgggcgccggcagactggtgaccggccccgccctggccagcggccccccctgcagccagctgtacaacggccagggcagccccagaaccatcagctggggcctgggccacaccagagtgggcgtggccagcctgctgatgctggagagcctgagcggcctggccctgtggttcagccccccccccgccgccagcagaccccccggccccggcctgagcctgtacaccgacggcagcaaggcctggggcgccccccaggagcacggcggcgcccacgccagcctgacccacagccaggtgagcccccccggcagcggcaacctgacccagcacggccacgtgtgcccctgcgtgaccatgcccgccctgaagaccaccccccccttcctgagcccccacagaggcctggacgccgccagctgggcccagatccaccagaagctgagagacttcagcagaagcacccaggtgggcggcaagggctggcccagacccatcctgaccccctgccccagcagctggctgaccagcccctgccaggccgagctggagagagagagagcccagctgctggtgagagccaccatggccgaggagcagctgagcgagctgcaggagtacgtggaccagcacctgggcagatgggccgagggcgccggctgcgaccccagagccctggtgtggctggagtag

SEQ ID NO: 315604 - DNA, 864 bp, Artificial Sequence
  derived and/or modified sequence
atgcacagtgtggcgcatccacatccaggggtcccaccatgggtacctgcgacactgattataacggggaagaggaggggggcggccgccggaggcgcaggtttagagcacgggggatccggaagagctcacctacgtgaggttagtgctgaaacttggcggacacgaggtgttggcgcaggccggttggtgaccggcccggccctggcctctggacctccctgcagccaactgtataacgggcagggcagccctcggaccatttcctgggggcttggccatacacgtgtgggagtggccagtctgctaatgttggaatcccttagcggcctagccctatggtttagcccacccccagccgctagtagacctcctggccctggcctctctctgtacaccgatggctctaaggcgtggggggctccccaggaacacggtggagcacatgcatccctgactcatagccaggtctcaccaccaggctccggtaatcttacacagcatggccacgtctgcccctgcgttactatgccagccctgaagacaacccccccctttttgagcccacacaggggattggatgctgcatcatgggcccagatccaccaaaagttgcgggacttttcaagatcaacccaagtaggaggaaagggctggccccgacccatcctgacaccgtgtcctagctcttggctgacgtcgccttgtcaggccgagctcgagcgggagcgcgcccaactgctcgttagggctactatggctgaggagcaattgtcggagcttcaagagtacgttgaccaacacctcggtcgatgggccgaaggagccggatgcgatcctcgggcactcgtgtggctggagtag

SEQ ID NO: 315605 - DNA, 864 bp, Artificial Sequence
  derived and/or modified sequence
atgcacagcgtggcccacccccaccctggggtgcccccctgggtgcctgccaccctcatcatcaccgggaagagaagaggagctgctgctgggggcgccggcctggagcacggcggcagcggccgggcccacctgcgggaggtgtctgctgagacctggaggacccggggcgtgggcgccggccgcctggtgactggacctgccctggccagcggccccccctgcagccagctgtacaacggccagggcagccccaggaccatctcctggggcctgggccacaccagggtgggcgtggccagcctgctgatgctggagagcctgagcggcctggccctgtggttcagccccccacctgctgccagccggcccccaggccctggcctgagcctgtacacagatggcagcaaggcctggggcgccccccaggagcacggcggggcccacgccagcctgacccacagccaggtgtccccacctggcagcggcaacctgacccagcacggccacgtgtgcccctgtgtgaccatgcctgccctgaagaccaccccacccttcctgagcccccaccggggcctggatgctgcctcctgggcccagatccaccagaagctgcgggacttcagccgcagcacccaggtgggcggcaagggctggccccggcccatcctgaccccctgccccagctcctggctgaccagcccctgccaggccgagctggagcgggagcgggcccagctgctggtgcgggccaccatggccgaggagcagctgtctgagctgcaggagtatgtggaccagcacctgggccgctgggccgagggcgccggctgtgacccccgggccctggtgtggctggagtag

SEQ ID NO: 315606 - DNA, 864 bp, Artificial Sequence
  derived and/or modified sequence
atgcacagcgtggcccacccccaccccggcgtgcccccctgggtgccagcaactctaataatcaccgggaagcggaggggagccgccgctgggggcgctggactcgagcacggtggatccggacgtgcacacctgagagaggtgtccgcagagacatggcgtactcgtggagtcggggccggacgcctggtgaccgggccagcattggcctcaggcccaccttgctctcagctgtacaatgggcagggcagcccccgaacgattagttggggtctcggccacacgcgggttggcgtggcaagcctgttaatgttagagtctctgtctggattggccctgtggtttagccccccacccgcagcatcccgtcccccagggcccggcctttccctctacacagacggctccaaggcttggggggcccctcaagaacacggcggagctcacgcgtccctgacccacagccaggtgtctcctccgggaagtggcaatctaactcagcacggccatgtgtgcccctgtgtcaccatgcccgctcttaaaaccactcctccgtttttgagcccacacagagggctggacgcggcgagctgggctcaaatccatcaaaaactgagagatttctctaggagcacccaggtaggcgggaaaggatggccacgacccattttaaccccctgcccctcatcttggctaacgtcaccttgccaagcagagctcgagcgggagagagcccaactgcttgtgagggccactatggcagaggaacagctcagtgagctgcaggagtacgttgaccaacacttgggaagatgggcagaaggcgctggatgcgacccccgcgcattggtgtggcttgagtag

SEQ ID NO: 315607 - DNA, 864 bp, Artificial Sequence
  derived and/or modified sequence
atgcattctgtcgcccacccccatcccggagtaccaccgtgggtgccggcaaccctcattataacaggaaaacgaagaggagcagcggcaggcggtgctggcctcgagcatggtggctcaggaagggcgcacctaagggaggtgtcagccgagacttggagaacccgcggagtgggtgccggaagattagtgactggccctgctctggcatccgggcctccctgttcccaactgtataacgggcagggctccccccgaacgatttcatggggtcttggccacacccgggttggtgtagcatcattgctgatgctggagtctctgagcggtctggcactatggttttccccccctcctgccgctagcagaccgccaggcccaggactgagtctttataccgatggatcaaaagcctggggggcacctcaagagcacggcggagctcatgcttccctgactcattctcaggtgagccctcctgggagcggaaatttgacccagcacggccacgtttgcccatgcgtgacaatgccagccctgaagacaacaccaccattcctctcacctcaccgcggactggatgccgcttcctgggcccaaatccaccagaaactgagagacttttcgcgtagtactcaggttggagggaaggggtggccacgacctatccttacaccttgccccagttcttggctgacatctccttgccaggccgaattggaaagagagcgggctcagttgcttgttagggcaaccatggcagaggaacaactctctgagctgcaggagtatgtagaccagcacctgggcagatgggccgagggggcaggctgtgatccgagagccttggtatggctcgaatag

SEQ ID NO: 315608 - DNA, 441 bp, Artificial Sequence
  derived and/or modified sequence
atgtggcccgccccctgcagcgtgggcagactgctgatcttcttcatgtgcagcagcagcggctacgtggtgcagggctgcggccccagccccggcgccagaaccaccctgggcagccccctgagcctgtggagcatcaagacccccagccacatcttctgcaccagaagagccatcaacctgggcttccccagcccccccctggtgcagctgatcttctggagcctgaacgccggcctggacctgtacctgtgcctgatcagcagctgcggcttcagccaggtgttctggcccgtggaggccttctgcagcttcagcctgagcttcttcgccctggccctgagccacaagttcgtgatctgcagactggaccagcacatcttcagcggcttcaccaagagcctgaagaacctgcccccctgccacagaaccgacatctag

SEQ ID NO: 315609 - DNA, 219 bp, Artificial Sequence
  derived and/or modified sequence
atgagctatcagcaacagcagtgcaagcaaccgtgtcagcccccaccagtatgtcctactcccaagtgcccagagccctgtccgcctccaaaatgccctgaaccttgcccatctccaaagtgtccgcaaccatgtcccccacagcagtgtcagcaaaagtaccccccagtgaccccatccccaccatgtcagcctaagtgcccacctaagagtaaatag

SEQ ID NO: 315610 - DNA, 2934 bp, Artificial Sequence
  derived and/or modified sequence
atgcatgtgcaggaatacggctctgattgtcccccgccaaacacaagacgcgtgtatatctcttaccttgactctattcacttcttcaggcccaggtgccttcgcactgccgtgtaccacgaaattttaatcggctatcttgaatacgtgaaaaagctaggctacgtcactggccacatctgggcttgtcccccctccgagggcgatgactatatcttccactgtcatcctccagaccagaaaatcccaaagccaaaaagactgcaggagtggtataaaaagatgctggacaaggcctttgctgaaagaatcatccatgattataaagatatcttcaaacaggccactgaggataggctgacatccgccaaggagctgccttacttcgaaggcgatttctggcctaatgtgctcgaagaaagtatcaaggaactcgagcaggaggaggaagagaggaagaaagaggaaagtacagcagcctctgagaccacagaagtgttcttcgttatacatttgcatgccggtccagtgattaatacactccccccaattgttgatccggaccctctgctatcttgtgacctgatggacggacgcgacgcttttctgaccctggcccgcgacaagcattgggagtttagcagtttaagaaggtctaagtggtcgaccctgtgtatgcttgtagagctgcatactcaaggccaagacagatttgtgtatacatgcaacgagtgtaagcatcatgtggaaacacgatggcactgcactgtttgtgaggattacgacctatgcattaactgctataacacaaaatcacacgcccacaagatggtcaagtggggactcggactagatgacgaggggtctagtcagggcgaacctcagtcgaagagtccacaggagagccgaagattatctattcaacggtgcattcagtccctagtgcatgcctgccagtgccgtaacgcaaattgttcactgccgtcctgccaaaagatgaaacgtgtcgtccaacacactaaaggctgtaaaaggaaaacaaacggcggatgcccggtctgcaaacagctgatagccttgtgttgctatcatgcaaagcactgccaagaaaacaaatgtcctgtgccgttctgcctgaatatcaaacacaagcttagacagcagcagattcaacacaggcttcaacaggcccagctgatgaggcgtcggatggctacgatgaatacccgcaacgtcccacagcagagcctgccttctcccacaagtgcacctcctggaacgcctacccaacagccttccacaccccaaacacctcagccccccgcccagcctcagccatctccagtgagcatgtcccctgccggcttccctagcgtggctagaacacagccccctacaacggtgagtacgggcaaaccgacgagccaggttcccgcccctccccccccagcccaacccccccccgctgctgtagaggctgctcggcagattgagcgggaggcgcagcagcagcagcatctgtacagggtgaatatcaacaactccatgcctcccggccgtaccggcatggggacccccggttcacaaatggcacctgtatcccttaacgtgcctaggcccaaccaggtgagcggccccgtgatgcctagtatgccaccaggccaatggcagcaggccccgctgcctcaacagcagccaatgcccggactaccacggcccgtgattagcatgcaggcacaggctgccgtcgccggcccccggatgccgtctgtgcaacccccgagatccatcagtccttccgccctgcaggatttgctcaggactctgaagtctccatcctcacctcaacaacagcagcaggtcctcaatattctgaaatccaatccacagcttatggcagcattcatcaagcagaggacagctaagtatgtggcgaatcagcctgggatgcagccacaaccaggactgcagtcccagccagggatgcagcctcagccgggcatgcaccagcagccctccttgcaaaacttgaacgccatgcaggccggcgtacccagacccggcgtacccccccagcagcaggcaatgggaggccttaaccctcaagggcaggccctcaacattatgaatcccgggcataaccctaacatggcgagcatgaacccacagtatagggaaatgcttagaagacagctgctccaacagcaacagcagcagcagcagcagcagcaacagcagcagcagcagcaacaaggaagcgcgggaatggccggaggaatggccgggcatggtcaattccaacagccccagggacctggtggctacccccctgcgatgcagcagcagcagaggatgcaacagcacctgccattacagggtagctcaatgggacaaatggcagcacagatgggccagttagggcaaatgggccagcccggtttgggtgccgacagcaccccaaatattcagcaggcactccagcagcggattctgcagcagcaacagatgaagcagcagattggatcccctggacaacctaaccctatgagtccccagcaacatatgctgagtggccagccccaggcgagccatctccctgggcagcaaattgctacaagcctatccaaccaggtaaggtccccagcacccgttcagtcaccccgcccacagagccagccaccgcactcctcccctagccctagaattcaacctcaaccaagtccgcatcacgtcagcccacagaccggtagcccacaccccggccttgccgtgactatggcaagctcaatcgatcagggtcacctcgggaacccggaacaaagtgccatgctgccacagctgaataccccttctagaagtgctttatcttcagagctaagcctcgtgggcgacactacaggcgacacactggaaaaattcgttgagggtttatag

SEQ ID NO: 315611 - DNA, 2934 bp, Artificial Sequence
  derived and/or modified sequence
atgcacgtgcaggagtatggcagtgactgccccccacccaacacccggcgggtgtacatctcctacctggacagcatccacttcttccggccccgctgcctgaggacagctgtgtaccacgagatcctgattggctacctggagtatgtgaagaagctgggctacgtgacaggccacatctgggcctgccccccatctgaaggagatgactacatcttccactgccaccccccagaccagaagatccccaagcccaagaggctgcaggagtggtacaagaagatgctggacaaggcctttgctgagcgcatcatccatgactacaaggacatcttcaagcaggccacagaagatcggctgaccagcgccaaggagctgccctactttgaaggagacttctggcccaacgtgctggaggagagcatcaaggagctggagcaggaggaggaggagaggaagaaggaggagagcacagctgccagcgagaccacagaggtgttcttcgtcatccacctgcacgccggccctgtgatcaacaccctgccccccatcgtggaccctgaccccctgctgagctgtgacctgatggatggaagagatgccttcctgaccctggcccgggacaagcactgggagttcagcagcctgcggcgcagcaagtggagcaccctgtgcatgctggtggagctgcacacccagggccaggacagatttgtgtacacctgcaatgaatgcaagcaccacgtggagacccgctggcactgcaccgtgtgtgaagattatgacctgtgcatcaactgctacaacaccaagagccacgcccacaagatggtgaagtggggcctgggcctggatgatgagggcagcagccagggcgagccccagagcaagagcccccaggagagccggcggctgagcatccagcgctgcatccagagcctggtgcacgcctgccagtgcagaaatgccaactgcagcctgcccagctgccagaagatgaagagggtggtgcagcacaccaagggctgcaagaggaagaccaacggcggctgccctgtgtgcaagcagctgattgccctgtgctgctaccacgccaagcactgccaggagaacaagtgccctgtgcccttctgcctgaacatcaagcacaagctgcggcagcagcagatccagcaccggctgcagcaggcccagctgatgagaagaaggatggccaccatgaacaccagaaatgtgccccagcagagcctgcccagccccaccagcgcccctcctggcacccccacccagcagcccagcaccccccagaccccccagcccccagcccagccccagcccagccctgtgtccatgagccctgctggcttccccagcgtggcccggacccagccccccaccaccgtgtccacaggcaagcccaccagccaggtgcctgcccctcctcctccagcccagcccccacctgctgctgtggaggccgcccggcagatcgagcgggaggcccagcagcagcagcacctgtacagagtgaacatcaacaacagcatgcctcctggccgcacaggcatgggcaccccaggcagccagatggcccctgtgtccctgaatgtgccccggcccaaccaggtgtctggccctgtgatgcccagcatgcctcctggccagtggcagcaggcccccctgccccagcagcagcccatgcctggcctgcccaggcctgtgatctccatgcaggcccaggccgctgtggccggccccaggatgcccagcgtgcagcccccaagaagcatcagccccagcgccctgcaggacctgctgcggaccctgaagagccccagcagcccccagcagcagcagcaggtgctgaacatcctgaagagcaacccccagctgatggccgccttcatcaagcagaggacagccaagtatgtggccaaccagcccggcatgcagccccagcccggcctgcagagccagcccggcatgcagccccagcccggcatgcaccagcagcccagcctgcagaacctgaatgccatgcaggccggcgtgcccaggcctggggtgcccccccagcagcaggccatgggcggcctgaacccccagggccaggccctgaacatcatgaaccctggccacaaccccaacatggcctccatgaacccccagtaccgggagatgctgcggcggcagctgctgcagcagcagcagcagcagcagcagcagcagcagcagcagcagcagcagcagcagggcagcgctggcatggccggcggcatggccggccacggccagttccagcagccccagggccctgggggctaccccccagccatgcagcagcagcagaggatgcagcagcacctgcccctgcagggcagctccatgggccagatggccgcccagatgggccagctgggccagatgggccagcccggcctgggcgctgacagcacccccaacatccagcaggccctgcagcagaggatcctgcagcagcagcagatgaagcagcagatcggcagccctggccagcccaaccccatgagcccccagcagcacatgctgagcggccagccccaggccagccacctgcccggccagcagatcgccaccagcctgagcaaccaggtgcgcagccctgcccctgtgcagagcccccggccccagagccagcccccccacagcagccccagcccccgcatccagccccagcccagcccccaccacgtgagcccccagacaggcagcccccaccctggcctggccgtgaccatggccagcagcattgaccagggccacctgggcaaccctgagcagagcgccatgctgccccagctgaacacccccagccgcagcgccctgagcagcgagctgagcctggtgggggacaccaccggggacaccctggagaagtttgtggagggcctgtag

SEQ ID NO: 315612 - DNA, 2934 bp, Artificial Sequence
  derived and/or modified sequence
atgcacgtgcaggagtacggcagcgactgccccccccccaacaccaggagggtatacatatcttacttggacagcatacattttttccggcctaggtgtctgagaacggctgtctatcacgagatccttattgggtacctcgagtatgttaagaagcttggctatgtgacaggacacatctgggcatgtcccccctctgagggagatgattacatttttcactgccaccctcctgatcagaagattcccaagcctaagagactgcaggaatggtacaagaagatgctggacaaggcattcgccgaacgaattatccatgactacaaggatatctttaagcaggctactgaggataggttgacatctgcgaaggagctcccgtattttgaaggggacttctggcccaacgttcttgaagagtcaataaaggagttagaacaagaggaggaggagaggaaaaaggaggagtccacagcagcttcagagacaactgaggtcttcttcgtcattcacctgcatgctggtccggtcattaacactttgccccccattgtggatcctgaccctctcctatcctgtgacctgatggacgggcgcgatgctttccttacgttggccagggataagcattgggagttttcttccctccgccggagtaaatggtccaccctgtgcatgctggttgaacttcatacacagggtcaggaccgctttgtgtatacgtgtaatgagtgcaaacaccacgttgaaaccaggtggcactgtactgtctgtgaagattatgatctgtgtattaattgctacaataccaaatcccacgcccataaaatggtgaaatggggcctgggtctcgacgatgagggtagcagccaaggagaaccacagtctaaatctccccaagagtccaggagactgagcatccaaagatgtatacaaagcctggtgcacgcctgccaatgccgaaacgccaattgctctctaccttcctgtcagaaaatgaagagggtggtccagcataccaaaggttgtaagaggaagaccaatggtggatgtccagtgtgcaagcagctgattgcgctatgctgttaccatgctaagcactgccaggagaacaaatgccctgtgccattctgcctcaacattaagcataagttgcgccagcaacagatccaacacagactgcaacaggctcagctgatgaggaggaggatggccactatgaatacccgcaatgtacctcagcagtccctgcctagtcccaccagcgccccgcccgggactcccacacaacagccctctacgccccagacaccacagcctcccgcccagcctcaaccctcgccagttagcatgtctcccgcggggtttcctagtgtggctagaacacagccacctactacggtctccaccggtaaacccaccagtcaggtgccagcccctccccctccagcacagccgccccctgccgctgtcgaagctgcgaggcagattgagagggaggcccagcagcaacaacacctgtatagggttaatattaataattctatgccacctgggcgcaccggtatggggacacccgggtctcagatggctccagtgtctctcaacgtgcctcgcccaaatcaggtgtctgggccagtgatgccctccatgccgcccggccagtggcagcaagctcccttgccccagcagcagccgatgcccggcttaccacgtcctgtgattagcatgcaggctcaagcggcagtggccggaccacgcatgccttctgtgcagcccccacggtcaatcagccccagtgccctacaggaccttctgcggaccctcaaatccccttcgtccccgcagcaacagcaacaggtgctgaatatactgaaaagcaatcctcaacttatggccgctttcattaaacagaggactgccaagtatgtggccaatcaacctggaatgcagccacagcctgggctgcaatctcagccggggatgcaacctcagccaggcatgcaccagcaaccaagtttacaaaatctgaatgcaatgcaggccggcgtgccaaggcccggcgtccccccccagcagcaggccatgggaggcctcaacccacaagggcaagcactgaacattatgaacccggggcataacccgaatatggcttccatgaacccacaataccgtgaaatgctgagaagacagctgttgcagcagcagcaacagcagcaacagcaacagcagcaacagcagcaacagcagcagggctcagcaggaatggcagggggcatggccggtcatggccaatttcagcagccccagggtcccgggggctacccacccgcaatgcagcaacagcagagaatgcagcagcacctgcctttgcagggttctagcatgggccagatggctgcccaaatgggccagcttggtcagatgggacaaccagggttaggggctgactctactccaaacatacagcaagctctccagcagcggattttgcaacagcagcagatgaagcagcagattggttccccgggtcagcccaaccccatgtcaccacagcagcacatgctctctggccagcctcaggcctctcatctgcctggccaacaaatcgccacatcgttatccaatcaggtgcggagtcccgcccccgtgcagtctccacgcccccagtctcagcccccccactccagcccgagtccccgaatccaaccacagcccagcccccaccacgtgtctcctcaaacagggagcccacaccctggtttagcagtgacaatggcttcatcaattgatcaggggcatctgggcaacccagagcagtccgctatgcttccccagctcaacaccccatcaaggtccgctctgtcttctgagcttagcctggtgggagacaccacgggagatacgttggagaagttcgtcgagggactttag

SEQ ID NO: 315613 - DNA, 2934 bp, Artificial Sequence
  derived and/or modified sequence
atgcatgtgcaagaatacggctctgattgcccacccccaaacacacggcgtgtgtacatctcttacctagactcaatccatttcttcagacctaggtgccttcgaaccgcggtgtaccacgagatccttataggctatctggagtacgttaagaaactcggctacgtgaccggacacatttgggcctgcccaccatccgaaggggatgattatatcttccattgtcacccgcctgaccagaaaatccctaagcctaagcgattgcaagaatggtacaagaagatgttggacaaagccttcgcggagagaatcatccatgattacaaagacatcttcaagcaggccacagaagaccgccttactagcgcaaaggaattaccttatttcgagggcgatttctggccaaatgtgttggaggaaagcatcaaggaactggagcaggaagaggaggaacgcaagaaggaagaaagtactgcagcttctgaaacaacagaggtgttttttgtgatacaccttcatgcgggaccagtcattaatactcttccgccaattgtagatccggatcccctattgtcttgcgatttaatggatgggagagacgccttccttaccctggcgagagataaacactgggaattctcaagtttgcggcgtagtaagtggagtaccctgtgcatgctcgtagagttacatactcagggtcaagacagatttgtgtatacttgcaacgaatgtaagcaccatgtggagactaggtggcactgtacagtctgcgaagactatgatctgtgcattaactgttacaatacaaaatcgcatgcccacaagatggtgaaatggggtcttggcttagatgacgaaggcagctctcagggtgaacctcaatctaagtccccacaggagagcaggaggctaagcatccagagatgtatacagtcccttgtccatgcttgtcagtgcagaaacgccaattgctcacttccttcatgccagaagatgaagcgggttgtccagcacactaaagggtgcaaacgaaagacaaacggaggctgtccagtatgtaaacagctgatcgccctgtgttgctatcacgccaaacactgccaggagaataagtgcccggtcccattctgcctgaacataaaacacaaactgaggcagcagcagatacagcacaggctccagcaggcgcagttgatgaggagacggatggccacaatgaacacccgtaatgtgccccagcaatctttgcccagccctacatctgcccctcccggaacaccaacccagcagcccagcacgcctcagactcctcagccacccgcacagcctcagccttcaccagtgtcaatgtcacccgcaggcttcccgtctgttgcacgcacccaaccacccaccaccgtctctactggaaagcccacctctcaggtaccggcacctccccctcctgcccagcctccaccggctgcggtggaagctgcgcgacagatcgaaagagaagcgcaacagcagcagcatctgtatagagtcaacatcaataatagcatgcctcccggacggacaggcatgggcacacctggatctcagatggcccctgtttcgctgaatgtacctcggcctaatcaagtgtcaggccctgtaatgccctccatgccccctgggcagtggcaacaggcaccgctgccacagcagcagcctatgccaggattaccgcgtccagttatctcaatgcaggcacaggcggctgtggctggaccacgtatgccctcagtgcagccacccaggagtataagtcccagtgctctccaagacctgctgagaacactgaagtctccttcctctcctcagcagcagcagcaggtactgaatatactgaagtctaaccctcaactcatggctgcattcatcaagcaacgcacagccaagtatgtggccaatcagcccggtatgcaaccacagccaggcctgcaatcccagccaggtatgcagccccagcccggtatgcaccagcagcccagcctgcaaaacctgaacgctatgcaggcaggtgtccccaggcctggcgtcccaccccagcaacaggcaatgggtggactgaacccacagggccaagcactcaacatcatgaatccaggccacaatccaaacatggcgtccatgaaccctcagtaccgcgagatgctgaggcgtcagctgctgcaacagcagcagcagcaacaacagcagcagcagcagcagcagcagcagcagcagggctccgcaggtatggcgggtggaatggcaggacatggccagttccagcagcctcaggggccaggaggatatcctcctgccatgcagcagcagcagcgtatgcagcaacatctgcccctacagggctcttccatgggccaaatggctgcccagatgggccagctgggccaaatgggtcaaccaggacttggagcagattccacaccaaacatacagcaggctctgcagcagaggatactgcaacaacagcagatgaaacagcagatcggctcaccagggcagcccaacccaatgagcccccagcagcacatgctgtctggccaacctcaggccagccacctccccggacagcagattgcaacttccctgtccaaccaggtgcggtcgcccgctcccgtgcaaagtccacggcctcagagtcagcccccacattccagccccagccccagaattcaacctcagccatcgccacaccacgtgtctccacagactggtagcccacatccaggactcgccgtcacgatggccagttctattgaccaggggcacctgggaaatccagaacaatcggccatgcttcctcagttgaacaccccatcccgttcagccctctcaagcgagctgagcctggtcggcgacacgactggcgacaccctggaaaaatttgtagaggggctttag

SEQ ID NO: 315614 - DNA, 698 bp, Artificial Sequence
  derived and/or modified sequence
agaggttctctgctgcccaactcctaaactcctggtactcgagcaccgatctgctttggagaaactgatcctgagactccagcaggatgtcttatcaacagcagcagtgcaagcagccctgccagccacctcctgtgtgccccacgccaaagtgcccagagccatgtccacccccgaagtgccctgagccctgcccaccaccaaagtgtccacagccctgcccacctcagcagtgccagcagaaatatcctcctgtgacaccttccccaccctgccagccaaagtatccaccgaagagcaagtaacagcttcaggattcatcaggagcatgagaggataaggataattggctcacctcgttccacagctccaccttcatcttctcatcaaagcttatcatggattcatagggagcttctttccccttagcctgtgatctgcccatgatgttccctgatagcaaaaggtttcctttctaaggctgccatactgccactgtccaggtggagactgagcaaaggaaccttggctttgtcagttcccagagcttcagcagaaagagctgcagctgtgtgcctgggaaccatcagagaattctgttgatgtgttctgtgtctgtctttcacctgggcatgagcttctaccacctgtgcaattgtcacttttctttcactccctgaataaagtatctatgcata

SEQ ID NO: 315615 - DNA, 2934 bp, Artificial Sequence
  derived and/or modified sequence
atgcacgtgcaggagtacggcagcgactgccccccccccaacaccagaagagtgtacatcagctacctggacagcatccacttcttcagacccagatgcctgagaaccgccgtgtaccacgagatcctgatcggctacctggagtacgtgaagaagctgggctacgtgaccggccacatctgggcctgcccccccagcgagggcgacgactacatcttccactgccacccccccgaccagaagatccccaagcccaagagactgcaggagtggtacaagaagatgctggacaaggccttcgccgagagaatcatccacgactacaaggacatcttcaagcaggccaccgaggacagactgaccagcgccaaggagctgccctacttcgagggcgacttctggcccaacgtgctggaggagagcatcaaggagctggagcaggaggaggaggagagaaagaaggaggagagcaccgccgccagcgagaccaccgaggtgttcttcgtgatccacctgcacgccggccccgtgatcaacaccctgccccccatcgtggaccccgaccccctgctgagctgcgacctgatggacggcagagacgccttcctgaccctggccagagacaagcactgggagttcagcagcctgagaagaagcaagtggagcaccctgtgcatgctggtggagctgcacacccagggccaggacagattcgtgtacacctgcaacgagtgcaagcaccacgtggagaccagatggcactgcaccgtgtgcgaggactacgacctgtgcatcaactgctacaacaccaagagccacgcccacaagatggtgaagtggggcctgggcctggacgacgagggcagcagccagggcgagccccagagcaagagcccccaggagagcagaagactgagcatccagagatgcatccagagcctggtgcacgcctgccagtgcagaaacgccaactgcagcctgcccagctgccagaagatgaagagagtggtgcagcacaccaagggctgcaagagaaagaccaacggcggctgccccgtgtgcaagcagctgatcgccctgtgctgctaccacgccaagcactgccaggagaacaagtgccccgtgcccttctgcctgaacatcaagcacaagctgagacagcagcagatccagcacagactgcagcaggcccagctgatgagaagaagaatggccaccatgaacaccagaaacgtgccccagcagagcctgcccagccccaccagcgccccccccggcacccccacccagcagcccagcaccccccagaccccccagccccccgcccagccccagcccagccccgtgagcatgagccccgccggcttccccagcgtggccagaacccagccccccaccaccgtgagcaccggcaagcccaccagccaggtgcccgccccccccccccccgcccagcccccccccgccgccgtggaggccgccagacagatcgagagagaggcccagcagcagcagcacctgtacagagtgaacatcaacaacagcatgccccccggcagaaccggcatgggcacccccggcagccagatggcccccgtgagcctgaacgtgcccagacccaaccaggtgagcggccccgtgatgcccagcatgccccccggccagtggcagcaggcccccctgccccagcagcagcccatgcccggcctgcccagacccgtgatcagcatgcaggcccaggccgccgtggccggccccagaatgcccagcgtgcagccccccagaagcatcagccccagcgccctgcaggacctgctgagaaccctgaagagccccagcagcccccagcagcagcagcaggtgctgaacatcctgaagagcaacccccagctgatggccgccttcatcaagcagagaaccgccaagtacgtggccaaccagcccggcatgcagccccagcccggcctgcagagccagcccggcatgcagccccagcccggcatgcaccagcagcccagcctgcagaacctgaacgccatgcaggccggcgtgcccagacccggcgtgcccccccagcagcaggccatgggcggcctgaacccccagggccaggccctgaacatcatgaaccccggccacaaccccaacatggccagcatgaacccccagtacagagagatgctgagaagacagctgctgcagcagcagcagcagcagcagcagcagcagcagcagcagcagcagcagcagcagggcagcgccggcatggccggcggcatggccggccacggccagttccagcagccccagggccccggcggctacccccccgccatgcagcagcagcagagaatgcagcagcacctgcccctgcagggcagcagcatgggccagatggccgcccagatgggccagctgggccagatgggccagcccggcctgggcgccgacagcacccccaacatccagcaggccctgcagcagagaatcctgcagcagcagcagatgaagcagcagatcggcagccccggccagcccaaccccatgagcccccagcagcacatgctgagcggccagccccaggccagccacctgcccggccagcagatcgccaccagcctgagcaaccaggtgagaagccccgcccccgtgcagagccccagaccccagagccagcccccccacagcagccccagccccagaatccagccccagcccagcccccaccacgtgagcccccagaccggcagcccccaccccggcctggccgtgaccatggccagcagcatcgaccagggccacctgggcaaccccgagcagagcgccatgctgccccagctgaacacccccagcagaagcgccctgagcagcgagctgagcctggtgggcgacaccaccggcgacaccctggagaagttcgtggagggcctgtag

SEQ ID NO: 315616 - DNA, 1354 bp, Artificial Sequence
  derived and/or modified sequence
ccacgcgctccggtactcgctgctcgcggctggccggctcgggattccgggctttcttcccgagaccgcgtcccccagctgggccgaaggtggacgctcaggggctggaggctcagcggaatcccctgcgttcagtagccccgctctcccctgtcccgaagatcagggatagcagaaatgaaagtataatggaagcagctggaggattccaggtccactttcacccaagtaatggagacggaaggttcatcgaaacttcttcagctgcagatctagaagtcattagctattctagcaaagtatctgtcacagaaaggtgcttcataaaggtctgcactgtgctcttttgacctgtgtcttcaagcatgtgctgtcataacagattaaagatgactgaaaattatctgccactcattgcgtgaaaggtgggatctgtagacctccctcttgaatttgggagggttctgtgactgctgtgaccaatgaatatggcagaagtgacgctttgccaacttctgggtccaggctatacgagacaggcagttccactcactgtctcttagatccatgtaaaaagttcatctaccctgctggaaaaaccatgtagagaggccctgagactacattgggtgggagaggggctcagctgcaccatcttccaactgtccccatcaagatgacagaaatataaatgaagccttcttgaactccagaccatccatgctacaagctaaatgccaccaagcgaccccagttaataccatgtggagcaaaaatatcacttaaccaagcactgcctgagtttctgaccccacagaattctgaccccatacaaataaaataatttttgtaattttttataattcgtcatgtaatagataaatggaacagccttcttccagtcttttaaatagctgcaagaaatcttattcaagcagaaggaagtttctactttgttcatacagtctcaagacatccctggagcctttcaagggaaatttgggcagaagtaggtagagaggtaaagctattatgtaacattacttaacatgattaaaaccaccttaatgtctcccatcctcaaaggctgccagtgaattggaaattaatggattaaatgaggacagagaaactagtatttgtgcatatgcactgtgccaggtatttaacgtatcttagctcatgtggtcttcgaaacaaccccatattgtagtatcaggctcacacgggtaactaactagtgcaaagacacaaggctcacaaactgctacttgaccctagagctctttgactccgattcccatgtacgtgccccaataccatgttgactcccaaggtgtaaatcttcaggtat

SEQ ID NO: 315617 - protein, 282 aa, Artificial Sequence [sequence omitted]

SEQ ID NO: 315618 - DNA, 846 bp, Artificial Sequence
  derived and/or modified sequence
atgcgcggaatgaaacttttgggagcccttctggctctcgccgcattactacagggggccgtatcccttaaaatagccgcctttaacatacagactttcggagaaacaaaaatgagtaatgccacactagtgtcatatatagttcagatactctcaaggtatgatatcgctctagtccaggaagtccgtgattcccatctgacagccgtcggaaaactgctggataatcttaatcaagatgcccccgatacatatcactatgtagtttcagagccactagggagaaacagttacaaagaacggtatctattcgtttatcgaccagatcaggttagtgccgtggatagttactactatgacgatgggtgtgaaccatgcggaaacgacactttcaatcgggaacctgctatcgtccgttttttttcacggtttacagaagtgcgggaatttgccatagtacccctgcacgctgctcccggagatgcagtagctgagatagatgccctttatgatgtgtatcttgatgtgcaggagaaatgggggctggaggatgtaatgttaatgggggatttcaacgcgggatgctcatacgtgaggccaagtcagtggtctagtattagactatggacttctcctacattccagtggttgataccagactctgctgatacaactgccacacccactcactgcgcctacgacaggatagtggttgcaggaatgctcctacgcggagccgtagtgcccgattctgctctgccatttaatttccaggctgcgtatgggctgagtgatcagcttgcccaggctatatctgatcattacccggtggaagtcatgctcaaa

SEQ ID NO: 315619 - DNA, 846 bp, Artificial Sequence
  derived and/or modified sequence
atgcggggaatgaagctgctgggggcgctgctggctctcgccgcgctactgcagggtgcagtgagcctgaagattgccgcattcaacattcaaaccttcggtgagacgaagatgtctaacgccacactggttagctatatcgtccagattttgtccagatatgacatagccctggttcaagaggtgcgagattcacatctgaccgccgtgggtaagttgctggacaacctgaaccaggacgcccctgacacctatcattatgttgtcagtgagccactcggtcgtaattcctacaaagagaggtacttatttgtatacaggcctgatcaagtctccgccgttgattcttactattacgacgatggttgtgagccgtgtgggaatgacacttttaacagagaacctgccattgttcgtttcttttcccgattcacggaggtacgcgagttcgcgatcgtgccactccacgccgcgccaggtgacgccgtggctgaaattgatgctctgtacgatgtgtacctggatgttcaagagaaatggggcctggaagacgttatgctgatgggtgatttcaatgccggctgttcgtacgttcgccccagccagtggagctctatccgcctgtggacgtccccgacttttcaatggctgattccagattcggccgatactaccgcaactccaacccactgcgcgtacgaccgtattgtagttgcaggtatgctgctgcgcggtgctgtcgtgccggacagcgcgctgcctttcaattttcaagcggcttatggcctgagtgatcagctggctcaggccatatccgatcactatccagttgaagttatgctgaaa

SEQ ID NO: 315620 - DNA, 846 bp, Artificial Sequence
  derived and/or modified sequence
atgcggggcatgaagctgctgggggcacttttggcactggcagcattgctccagggtgccgtgtccctcaagatcgcggctttcaatatccaaactttcggagaaaccaagatgtccaacgccactctggttagctacatcgtgcaaattctgtcgcggtacgatatcgcactggtgcaggaggtccgggattcgcacctgactgccgtgggcaagttgctggacaacctgaaccaggacgccccggacacctatcattacgtcgtcagcgaaccattgggaagaaactcctacaaggaacgatacctgttcgtctacagaccggaccaggtgagcgccgtcgatagctactactatgacgacggatgtgagccttgcgggaatgacactttcaaccgggagccggccatcgtgagattcttctcaaggtttacggaagtgcgggagttcgctatcgttcctctccacgccgcaccgggagatgccgtggctgaaatcgacgcattgtacgacgtttaccttgatgtgcaagagaagtggggactcgaggacgtgatgctgatgggggactttaatgccggctgctcctacgtgcgcccgagccagtggtcatctatccgcctttggacctcgcctacttttcagtggctcattccggatagcgcagacaccaccgctacccccacccactgcgcgtacgaccgtatcgtcgtggctggaatgctgctgaggggcgctgtggtgccggactccgcccttcctttcaatttccaagctgcgtacggcctgtcggatcagctcgctcaagccataagcgatcattaccccgtggaagtgatgctgaag

SEQ ID NO: 315621 - DNA, 846 bp, Artificial Sequence
  derived and/or modified sequence
atgaggggaatgaagctcctgggggcgctcctggcacttgcggcacttctgcaaggcgctgtgtccctcaagattgcagcgtttaacattcagacttttggagaaaccaaaatgtcgaacgcaaccctcgtgagctacatcgtccagattctctcgcgctacgacatagcactggtgcaagaagtgcgggactcacatctcaccgcggtcggaaaactccttgacaacctgaatcaagatgcccctgatacgtaccattacgtggtcagcgagccacttggcagaaacagctacaaggaaagatatctctttgtgtaccggcctgaccaggtatcagcagtcgattcatactactacgatgatggctgtgaaccttgcggtaacgatactttcaaccgtgagcccgccattgtccgcttcttctcgcgctttactgaagtgagggaatttgcaatcgtgccactgcacgccgcccccggcgacgccgtggcagaaattgacgcactgtacgatgtctacttggacgtgcaggaaaagtgggggcttgaggacgtcatgcttatgggagactttaacgcagggtgttcgtacgtccgcccctctcagtggtcatcaataagactgtggacctcccctacttttcagtggctcatcccagattctgccgacacgaccgcaactcctacgcattgcgcgtacgatagaatcgtggtggccggaatgcttctcagaggagcggtggtccccgattccgcactcccttttaacttccaagccgcatacggacttagcgatcaactggcacaagcgattagcgaccattacccggtggaggtcatgctcaag

SEQ ID NO: 315622 - DNA, 846 bp, Artificial Sequence
  derived and/or modified sequence
atgaggggaatgaagttgctcggtgcactgttggcactggcagcattgctgcaaggtgcagtttctttgaaaatcgcagccttcaacatccagacctttggagaaaccaagatgagtaacgcaactctggtgagctacattgtccagattctgtcgcgctacgatattgccctggtgcaagaggtcagggattcccacctgaccgcagtgggcaaattgcttgataacctgaaccaggatgcacctgacacgtaccactacgtggtcagcgagcctctcgggcgcaattcgtacaaggaacggtaccttttcgtctaccggccagatcaagtgtcagcggtggattcgtattactatgacgacggatgtgagccttgtggcaacgacacgtttaaccgcgaaccagccattgtccgatttttctcccgctttaccgaagtgcgagaattcgccatcgttccgcttcatgcggcaccaggtgacgcagtcgcggaaattgacgctctgtacgacgtttacctcgatgtgcaagaaaagtggggactcgaagatgtgatgctgatgggtgatttcaacgcaggatgctcgtatgtgcgtccatcccagtggtcctcaataagattgtggacctcgcctactttccaatggcttattcctgatagcgctgataccaccgcaactccgacccactgtgcatacgatcgcattgtggtggcaggcatgctcctgcggggagccgtcgtcccggattccgcacttccttttaactttcaagcagcctacggcctgtccgatcaactggctcaagcgattagcgaccactaccctgtggaagtgatgcttaag

SEQ ID NO: 315623 - DNA, 846 bp, Artificial Sequence
  derived and/or modified sequence
atgcgcggaatgaagctcctcggtgcccttctggctctggccgcactgctccaaggtgcggtgtcgctgaagatcgccgcctttaacatacagactttcggagaaaccaaaatgtcgaacgcaaccctggtcagctacattgtgcagatcctctcacgatacgacatcgccctggtgcaggaggtgagagactctcaccttactgcagtgggaaagttgctcgacaacctcaaccaggacgccccggatacttatcactacgtcgtctccgaaccgctgggccgcaactcttacaaagaacggtacctgttcgtgtacaggccagatcaggtttccgccgtcgatagctactactacgatgacggatgcgaaccatgtggcaatgatactttcaacagagagccggcgatcgtgcgctttttcagccgcttcacggaggtgagggagttcgcaatcgttccgctccacgctgctccgggcgacgctgtggcggaaatcgatgcgctgtacgacgtctacctggacgtgcaagagaagtgggggctggaagatgtcatgctgatgggagactttaacgcaggctgctcatacgtcagaccgtcgcaatggagctcaattcggctgtggacttccccaactttccagtggctcattccagattccgctgatactactgctactccaacgcattgcgcctacgaccggatcgtggtggccggaatgctgctcagaggcgctgtcgtgccggactctgccctgcccttcaactttcaggccgcgtacggactctcggaccagctggcccaggcgatctcggaccactaccctgtggaggtgatgctgaag

SEQ ID NO: 315624 - DNA, 846 bp, Artificial Sequence
  derived and/or modified sequence
atgaggggaatgaagctgcttggggctctgctggcactggcagcactgctccaaggagctgtgtcattgaaaattgcagctttcaacatccaaacttttggtgagactaagatgtcgaacgcaaccttggtcagctatattgtgcaaatcttgtccagatacgacatcgcacttgtccaggaagtccgtgattcgcatcttaccgccgtcggaaagctcctggacaatttgaatcaagacgcgcctgatacttaccactacgtggtgtcggaacctctcggacggaactcgtacaaggaacgctacctgttcgtgtaccgcccagaccaggtgtcagccgtcgactcgtactactatgatgacggatgcgagccctgtggaaacgacaccttcaacagagagccggcgattgtgcggttctttagcaggtttactgaagtccgagagttcgcaatcgtgcccctccatgcggcccctggtgacgccgtggccgaaattgatgccctttacgatgtgtaccttgacgtgcaggaaaagtggggtttggaggacgtgatgcttatgggcgatttcaatgcaggctgttcgtacgtcagaccctcgcagtggtcctcgattcgcctgtggacttcacctacgtttcaatggctgatacctgactcggcggatactactgcgactcctacccactgtgcctacgacagaattgtagtggcaggcatgctcttgaggggcgcggtggtgcctgactcggcactgccttttaacttccaagcagcatacggactgagcgatcagctcgcacaggctatttcggatcattatcccgtggaagtgatgctcaag

SEQ ID NO: 315625 - DNA, 846 bp, Artificial Sequence
  derived and/or modified sequence
atgcgcggaatgaagttgctgggagcccttctcgcactcgcagcgctcttgcaaggcgcagtctccctgaagatcgcagcctttaacattcagacttttggagaaaccaagatgtcgaatgcaaccctcgtatcctacattgtgcaaattctgtcgcggtacgatattgcgttggtccaagaggttagagatagtcacctcacggccgtgggaaagctgctcgataacctgaaccaggacgcaccagacacgtaccactatgtcgtgagcgaacctctgggaagaaactcgtacaaagaacgttacctttttgtgtaccgcccggatcaagtcagcgcagtcgattcgtattactacgacgatggttgcgaaccctgtggaaacgacacctttaacagggagcctgcgattgtgaggttcttttcccgattcactgaggtgcgagagtttgcaatcgtgcctctgcatgcggcccccggtgacgcagtggccgaaatcgacgctctgtacgacgtctacctggatgtgcaagaaaaatggggccttgaagatgtgatgctgatgggtgatttcaatgcggggtgttcgtacgtaagaccgagtcagtggtcaagcatcagactgtggacctcaccaacttttcagtggctgatccctgattcggctgacactactgccacgccaacccattgtgcatacgatcggattgtggtggcaggtatgttgctgcggggggcagtagtcccagatagcgctctgccattcaattttcaagcagcctacggcttgtccgatcagctggcacaggccatatctgatcattaccctgtcgaggtgatgcttaag

SEQ ID NO: 315626 - DNA, 846 bp, Artificial Sequence
  derived and/or modified sequence
atgagaggcatgaaattgctgggcgcgcttttggccctggcagcgcttctgcaaggcgcggtcagcctgaaaatagccgccttcaatatccaaacctttggcgaaaccaagatgtcaaatgcgaccctggtgtcatacattgtgcagattctgtcaaggtacgacattgctcttgtgcaggaagttcgggatagccacctgacagctgtgggcaagctccttgataacctcaaccaggatgccccggacacctaccactacgtcgtttcagagccactggggcgcaactcctacaaagaaagatacctgtttgtatacagacccgatcaggtgtcggcagtagactcctactattatgatgacggttgtgagccttgtgggaacgatacattcaatcgagaacccgccattgtcaggtttttcagccgatttactgaggtgcgggagttcgcgatcgtgccacttcatgccgccccaggtgatgcagtcgcggagattgacgccctgtacgacgtgtatctggatgtgcaggagaagtggggacttgaggacgtgatgctgatgggcgacttcaacgcagggtgctcctacgtccgtcctagccagtggtccagcattaggctgtggacaagcccaactttccagtggttgatccccgactcagctgataccactgcaacccctacgcactgtgcctacgataggatcgtggttgctggtatgctgctcaggggcgctgttgttcccgactccgccttacccttcaattttcaggcagcctacgggctatcagaccagctcgcacaggccattagcgaccactaccccgttgaggtgatgctgaag

SEQ ID NO: 315627 - DNA, 846 bp, Artificial Sequence
  derived and/or modified sequence
atgaggggaatgaaattattgggagctctattggctctcgctgctcttctacaaggagctgtaagtctcaagattgcagcattcaacattcaaaccttcggagagactaagatgagtaatgcaactctcgttagttatatagtccaaatactcagtagatatgacattgctcttgttcaggaagttcgcgactcacatctgacggctgtcggtaaactgttggataaccttaatcaggatgcacctgatacatatcattacgttgtctccgagcctctgggccgcaattcatacaaagaaagatatctctttgtgtataggccagatcaagtttcggctgtggattcgtattattatgatgacggatgcgaaccgtgtggtaacgatacttttaatcgtgaaccagcaattgtcagatttttctcccgattcactgaggtccgagagttcgccattgttccactccacgcggctccgggagatgctgtggcagagattgatgctttgtatgacgtgtatttggatgttcaggagaaatggggtctcgaggatgtgatgcttatgggtgatttcaatgctgggtgtagttatgtcagaccatctcagtggtcgagtattaggttatggacttcgccgacctttcaatggttgattcctgattctgccgacactacagccacgccaacccattgcgcatacgatagaatcgttgttgcgggaatgttgttgaggggtgctgttgtgccagattctgctctcccattcaattttcaagcggcctatggtttatcagatcaactcgcccaagccataagcgatcactatccagtagaagtcatgttgaag

SEQ ID NO: 315628 - DNA, 846 bp, Artificial Sequence
  derived and/or modified sequence
atgcggggcatgaaactccttggagcgcttcttgcactcgcagccctgcttcaaggggcggtttcattgaagatagcagcgttcaacatacagacatttggagaaacaaaaatgtcaaatgcgacgctggtttcatacattgtgcagattcttagtaggtatgacatcgcattagtgcaagaagtaagagattcacatctcacagcggtcggcaaattgctggacaacttaaaccaagatgcgcccgatacgtatcattacgtggtttcagaacctctgggccgtaacagctataaggagcgatacttatttgtgtatcgccctgaccaggtcagcgctgtagattcatattactatgacgatggttgtgagccttgcggaaatgatacatttaacagggaaccagcaattgtgagatttttttcaaggtttacggaagtaagagagtttgcgattgttccgttgcatgctgcccccggggacgctgtcgcggaaattgacgcactatatgatgtttacttggacgtgcaagaaaaatggggattggaagacgtaatgttgatgggtgacttcaacgctggttgttcttatgtgcgtccaagccagtggtcctctataaggctgtggactagtccaacctttcagtggctgatcccggattcagccgatacgacagcgacccctacgcactgtgcttacgacagaatcgtggtagcagggatgttattgcggggcgcggtagtgccggactcagcgctgccattcaactttcaagccgcctatggcctgagcgatcagctggcccaagcgatttcggatcactatccagttgaagtaatgttaaaa

SEQ ID NO: 315629 - DNA, 846 bp, Artificial Sequence
  derived and/or modified sequence
atgcgtggaatgaagctgctcggcgcacttctggcactcgccgctttattgcagggtgctgtcagtctgaaaatagcggccttcaatatccagacgtttggtgaaactaaaatgtccaacgctactttggtcagctatatcgtacagatccttagtaggtatgatattgccttggttcaggaggttcgagatagtcacctgacggcagtgggcaagctcctggacaatttaaaccaggacgctccagacacctatcactatgtagttagcgaaccccttggaagaaattcttacaaggagagatacttgttcgtctatcgacccgatcaggtaagtgccgtcgactcttactactatgacgacggttgcgagccctgcgggaacgatacatttaacagggaaccggccattgtgagattcttttctcgatttacagaggtgagagagtttgcaatagtgcccctgcacgccgcaccaggtgacgcggttgcggagatcgacgcactctatgacgtgtaccttgacgttcaggaaaaatggggactagaggacgtcatgttgatgggcgactttaatgccgggtgttcgtacgtgcgtccaagtcagtggagctccatcagactctggacatcaccaaccttccagtggcttatcccagacagcgcagacaccaccgcgactccaacacactgtgcctacgatagaattgtggtggcaggcatgctgctgcgaggcgcggtggttccagacagcgctctgcccttcaatttccaggccgcttacggactaagcgatcagctcgctcaggcgatatcagatcattatcccgtcgaggtgatgcttaag

SEQ ID NO: 315630 - DNA, 846 bp, Artificial Sequence
  derived and/or modified sequence
atgaggggtatgaagctgctgggcgccctcctggcactggccgcgttgctacaaggtgccgtgtctctaaaaattgcggccttcaacatccaaactttcggcgagaccaaaatgtctaacgccactctggtgtcttatattgtacagattctttcacggtatgacatcgctttggtgcaggaagtgcgcgattcccacttaacagccgtcggtaaactgctggacaacctgaaccaggatgcccctgatacttaccattatgtcgtttctgaaccgttaggaaggaactcttacaaggagaggtatctgtttgtatatcgacctgaccaggtcagcgccgtggattcttactattatgacgacggttgtgaaccctgtgggaacgatacctttaaccgggaaccagctattgtgcgcttcttctcaagattcacggaagtgagggagttcgctatcgtgccgctccacgctgccccaggggatgctgtggcagagatcgacgccctctacgacgtctacctggatgtccaggagaagtggggtctggaggacgtcatgctgatgggagactttaatgcggggtgctcatatgtaagacccagtcaatggtcctccataaggctatggacgagcccgacatttcagtggttgatacccgattcggctgatactacagcgacccctacacattgtgcctatgaccgcatcgttgttgcagggatgttgctccggggtgctgttgtcccggactctgcattgcccttcaacttccaggcagcgtacggactcagtgatcaactggctcaggccattagtgaccattatccagtagaggtcatgctgaag

SEQ ID NO: 315631 - DNA, 846 bp, Artificial Sequence
  derived and/or modified sequence
atgcgcggaatgaaactgctgggagccctccttgccctggccgcgctcctccagggagccgtctcgcttaagatcgccgctttcaacatccaaaccttcggggagactaagatgtcgaatgccaccctcgtgtcgtacatcgtgcagatcctgtcacggtacgacatcgcgctggtgcaagaagtaagagacagccacttgaccgccgtgggaaagctcctggacaatctcaaccaagacgcgccggatacctaccactacgttgtttccgaacctctgggacgcaactcctacaaggagcgataccttttcgtttatcgtccggatcaggtgtcggctgtggattcatactactacgacgacggatgcgaaccgtgcggcaatgatactttcaacagggaaccagcgatcgtccggttcttttcacggtttacggaagtgcgggagttcgcgatagtgccgctccacgcagcaccgggcgacgcggtggcagaaatcgatgccctttacgatgtctaccttgacgtgcaggagaaatgggggctggaggacgtgatgctgatgggagacttcaacgctggttgctcctacgtccgaccttcgcagtggtcctccatccggctctggacctcacccacgtttcaatggctcatcccagactccgcagacactacggcgaccccgactcactgtgcatacgatcgaatcgttgtcgcggggatgctgctcagaggggcagtggtgccagattcggccctgcctttcaactttcaggctgcctatggcctctccgaccaattggctcaggcgatttcagaccattacccggtcgaggtgatgctgaag

SEQ ID NO: 315632 - DNA, 846 bp, Artificial Sequence
  derived and/or modified sequence
atgcgcggcatgaaactccttggagctttgctcgctctcgccgcactgctgcaaggcgctgtctccctgaagatcgcagcgttcaatatccagacgttcggagagacgaaaatgtcgaatgcaactctggtgagctatatcgtccagatacttagtagatatgatatcgccttggtccaagaagtgcgagattctcatctgacagccgtaggtaagctactggacaacctaaaccaggacgcccccgacacatatcactatgttgtgagcgagcccctgggaagaaactcatacaaagagaggtatctgtttgtgtaccgtcccgatcaggtgtctgccgtggatagctattattacgacgatggatgtgaaccatgcggcaacgacacgttcaaccgggaacctgcaatagtgcggttcttttctcgcttcactgaagttcgcgaattcgccatcgtccccctccacgccgcccctggcgacgctgtggccgagatagatgctctatatgatgtgtaccttgatgtccaggagaaatgggggctggaggatgtgatgctgatgggagatttcaacgccggatgtagctatgtgaggccttcccagtggtcatccattagactctggacttctcccaccttccaatggctcatccctgactccgccgacacaaccgccactccgacacactgcgcttatgacaggattgtagtagccggaatgttgctgcgcggcgctgtcgtgcctgattctgcactgcccttcaacttccaggcagcatacggtttgtccgaccagttggcccaggcaatatccgaccattaccctgtggaagtcatgctgaag

SEQ ID NO: 315633 - DNA, 846 bp, Artificial Sequence
  derived and/or modified sequence
atgcggggtatgaagctcctgggtgcgctcctggcactggcagccctgctgcagggagcagtgtcgcttaagattgcggcgttcaacattcaaacgtttggcgaaactaaaatgagcaatgctacccttgtgtcgtacattgtccaaattcttagccgatacgatattgcgctcgtccaggaggtcagagattcgcatctcactgcggtcggcaagttgttggacaatctgaatcaggatgccccggacacctatcattacgtggtcagcgagcctcttggacgtaacagctacaaggagagatacctcttcgtgtaccgccccgaccaagtctctgcagtcgactcgtactactacgatgacggttgtgagccttgtggtaatgatacttttaaccgggaacctgccattgttcgtttcttttcccggtttaccgaagtcagagaatttgccattgtgccgcttcacgcagcaccaggagatgctgtggccgaaatcgatgcactgtacgatgtctacctggatgtgcaggaaaagtggggactcgaagatgtgatgcttatgggagactttaatgccggctgctcctacgtgcgaccaagccagtggagctctattagactgtggacttcgcctacctttcaatggcttattcctgactccgctgacaccaccgcaactcctactcactgcgcatacgaccgcatcgtggtcgccggaatgcttctgaggggggcagtggtgcccgacagcgctttgcccttcaattttcaagccgcatacggactgtccgatcaactggcacaagcaatctcagatcattaccctgtcgaggtgatgcttaag

SEQ ID NO: 315634 - DNA, 846 bp, Artificial Sequence
  derived and/or modified sequence
atgcgcggcatgaagctccttggcgcactgttggctctggccgccctcctccaaggtgcggtgtctctgaaaattgcggccttcaacatacaaaccttcggagaaaccaagatgtctaacgctactcttgtgtcgtatatcgtccaaattcttagccgctacgatatcgccctggtgcaagaagtgcgggacagccatctgacggctgtggggaagctgcttgataacctcaaccaggacgcaccagacacttatcattacgtcgtgagtgaacccctgggacgcaattcctacaaagaacggtaccttttcgtgtacaggccggaccaggtgtcggcggtggactcgtattactacgacgatggttgcgaaccatgcggaaacgatacgtttaatcgcgaaccggccatcgtgaggttcttctcccggttcactgaagtccgggaattcgcgatcgtcccactccatgccgcgcctggagatgcagtggccgaaatcgacgctctgtatgatgtgtacctggacgttcaggagaagtgggggctggaggacgtgatgcttatgggagacttcaatgcaggatgtagctacgtgcggccgtcacagtggtcgtcaatccgcctgtggacttcgcctaccttccaatggctgatcccggatagcgccgacaccaccgccactcccactcactgcgcctacgataggatcgtcgtggcgggaatgctcctgcggggtgccgtggtgccggacagcgctctgcccttcaatttccaggcggcgtacggcctgtcggatcagcttgcccaggccatctccgaccactacccggtcgaagtgatgctcaag

SEQ ID NO: 315635 - DNA, 846 bp, Artificial Sequence
  derived and/or modified sequence
atgcggggcatgaaactgttgggagccctgctcgcactggcggctctcctccagggagccgtctcgttgaagattgctgccttcaatatccagactttcggcgaaactaagatgagcaacgcgactctcgtgtcgtacatcgtccagatcctcagcaggtacgacattgcacttgtgcaagaggtacgcgactcgcacctgacggcagtggggaaactcctggacaacttgaaccaagatgctccagatacttaccactatgtcgtgtccgagccgcttggtagaaattcgtacaaggaacggtaccttttcgtgtaccgcccggatcaagtgtcggccgtggactcgtactattacgatgacggctgcgagccttgcggaaacgatacgtttaacagagagccggcaattgttcggttctttagccggttcactgaagtcagggaattcgcaatcgtgccgctgcatgcggcccccggcgacgcagttgcggaaatcgacgctctgtacgatgtgtacctggatgtccaggaaaagtggggactcgaagatgttatgctcatgggtgactttaatgccggatgcagctacgtgcggccaagtcagtggtcgagtatccgcctgtggacctccccgacctttcagtggctgatacctgacagcgcagacactaccgcgaccccaacccactgtgcctatgaccgtatcgtggtggccgggatgctgttgaggggagcagtggtccccgactccgcacttcctttcaacttccaggctgcctacggtctgtctgaccaacttgcccaggctatctccgaccattacccggtggaggtgatgctcaag

SEQ ID NO: 315636 - DNA, 846 bp, Artificial Sequence
  derived and/or modified sequence
atgagaggaatgaagcttttgggagccttgctggctttggcagccttgctacaaggtgccgtttctctcaagattgctgcctttaacattcaaacttttggcgagacgaagatgagcaacgcgactctggtttcttacatagttcagatcctgtcccgttatgacatcgcattggtgcaggaggtgcgtgattcacaccttaccgctgttggaaaacttctcgacaacctcaatcaggatgcacctgatacgtatcattacgttgtgtcagagccactcggtcgtaattcctacaaagagagatacctgtttgtgtatcgtcccgatcaggtatccgctgtcgactcttattattatgatgatgggtgtgagccatgtggcaacgatactttcaacagggagcctgcaatagtgaggtttttttcgagattcactgaagttcgggagttcgctatcgtgcctttgcacgccgctcctggggacgctgttgctgaaatagatgccctctatgatgtttatctagatgtacaagagaagtggggacttgaagacgtcatgttaatgggcgatttcaacgccggctgtagctatgtaaggccatcgcaatggtcatctatacgcctctggacctctccaacctttcagtggttgattccagatagcgcagatacaaccgccacgccaactcattgcgcatacgacaggattgttgtggcaggtatgctacttcgtggagcagttgttccagacagcgcgcttcccttcaactttcaggctgcctatggactttcggatcagctcgctcaggccatctctgatcactatccagtggaagtgatgttgaaa

SEQ ID NO: 315637 - DNA, 846 bp, Artificial Sequence
  derived and/or modified sequence
atgcggggaatgaagctgctgggcgcgcttctggccttagccgcgttgcttcagggggccgtgtctctgaaaatcgcggcattcaatattcagaccttcggggagacaaaaatgtctaatgccaccttggtcagttacatagtccagatcttgagtcgatacgacatcgccctcgtacaagaggtcagggatagccacctgaccgccgtgggaaagctgctcgacaatcttaatcaggacgcccctgatacttatcactatgtggtatctgagcccctgggaaggaattcatacaaagagaggtacttgttcgtttacagaccagaccaggtctccgctgtcgactcctactattacgacgacggttgcgaaccttgtgggaacgacaccttcaacagggagccagccatcgtgcgcttcttcagcagattcacagaagtacgtgagttcgccatcgttcccctgcacgccgcccccggcgacgcagtcgcggaaattgatgcactgtacgacgtgtacctggacgtgcaggagaaatggggtttagaggatgtcatgcttatgggcgatttcaatgcgggctgcagctacgtgagaccctcccagtggagcagcatccgcctctggacttcacctacgttccagtggctcataccagattccgccgataccaccgctaccccaactcattgcgcctacgaccggatagtggtcgccggcatgctgctgcgtggcgctgtggtgcctgactctgctctgccttttaatttccaggccgcctatggactgagcgaccagctggcccaggccatctccgaccactacccggtcgaggtcatgcttaag

SEQ ID NO: 315638 - DNA, 846 bp, Artificial Sequence
  derived and/or modified sequence
atgaggggcatgaagctgctaggggccttgctagcactggccgccttgttacaaggagccgtctccctgaagattgcagcattcaacatccagaccttcggcgagaccaagatgtcaaacgcgacattagtctcgtatatcgtccagatcctgtcaagatatgacattgctttggtgcaggaagtgagggactcccacctgactgctgtgggtaagttactggataacctaaaccaggacgcacctgatacgtaccattatgtcgtgtctgagccacttggccgaaacagctacaaggaaaggtatctgttcgtgtataggcccgaccaggtatctgccgtagacagctattattatgacgatggatgcgagccctgtggaaacgataccttcaacagggagcctgcaattgtgagattcttctctagatttaccgaggtgcgtgagttcgccatcgttcctcttcacgctgcccccggggatgcggtggctgagatcgatgcgctttatgacgtctacctggatgtccaggagaagtgggggctagaagacgtgatgcttatgggggacttcaacgctggttgctcttacgtgcgcccatcccagtggtcgtctatcaggttgtggacctctcctacattccagtggttgattccagactccgcagatactacggccacacctacccactgtgcttacgatagaatagtggtggcaggtatgcttttacgtggggccgtagtaccggatagcgccctccctttcaacttccaggcggcttatgggttgtccgatcagctagcccaggcaattagtgatcattacccggtggaagtaatgctgaaa

SEQ ID NO: 315639 - DNA, 846 bp, Artificial Sequence
  derived and/or modified sequence
atgcgagggatgaagttgctgggtgccttactggccttggctgcccttctccagggcgcagtttctctgaagattgcggcctttaatatccagacctttggcgagacgaagatgtccaacgccacactcgtctcctatatagttcagatcctgagcaggtacgacatcgccttggtgcaggaggtacgagactcccatttaacagccgtgggaaaattgttggataacctgaaccaagacgcccccgacacctaccattacgtggtgagcgagcctctcggcagaaactcatataaagagagatatctcttcgtatataggccggaccaggtttccgcagtggactcttactattatgatgacggctgtgaaccttgtggcaacgacacttttaacagggaacccgctatagtaagatttttctcaagattcacagaggtgagagagttcgcgatcgtccctcttcacgcggcccctggggacgccgtagcagaaatcgatgcgctttacgacgtgtacctcgacgttcaagaaaaatggggcctggaagatgtcatgctgatgggcgactttaatgcaggatgttcctacgtgagacctagccagtggtccagtataagactttggacaagcccaacctttcagtggctcattccagattcagcagacaccacggctacaccaacccactgcgcttatgataggatagtcgtggcaggaatgctcctccgaggcgcagtggttccggactcagcactgccattcaactttcaggctgcttatggcttgagcgatcagttggcacaggcgataagcgaccattaccctgtcgaggttatgctgaag

SEQ ID NO: 315640 - DNA, 846 bp, Artificial Sequence
  derived and/or modified sequence
atgcgcggcatgaagttgctcggcgctctgctggcgttggccgcattgttgcagggtgctgtgtctttaaagatcgctgcctttaacatccagacctttggggaaactaagatgtcgaatgcaactctggtgtcctatatcgtccagattttgtcgcgatacgatattgccctagtccaggaggttcgcgatagccatctcacagccgttggaaaactgctggataacctcaaccaggatgctccggatacctatcattatgttgtttctgagccccttggtcggaactcctacaaggagcgctatttattcgtctaccgcccggaccaggtctccgctgtcgatagctactactatgatgacggatgcgagccctgcggtaacgacaccttcaaccgcgagcccgcaatcgtccgcttcttctcccgatttaccgaggttcgcgaattcgcgatcgtccctcttcatgctgctccaggcgatgccgtcgccgagattgacgctctgtacgatgtatatttggatgtgcaggaaaagtggggcctcgaggatgtcatgctgatgggcgacttcaatgcgggttgttcttatgtccgtccctcgcagtggtcgtccattcgcctgtggacctccccgacgttccaatggctcattcctgatagcgccgatactaccgccacccccacccattgcgcgtatgataggatcgtcgtcgccggtatgcttctgcggggcgcggtcgtcccggactccgcgctacccttcaacttccaggcagcctacgggctcagcgatcaattggctcaggccatcagcgatcactatccagtcgaggttatgctcaag

SEQ ID NO: 315641 - DNA, 846 bp, Artificial Sequence
  derived and/or modified sequence
atgcgcggtatgaaactgcttggagctctcctggccctcgccgctctgctgcagggtgcagtgtctctgaaaatcgctgctttcaacatacagacattcggagagactaagatgtcaaatgccaccctcgtaagctacattgtgcagatccttagcaggtacgatattgcactcgtgcaagaggtaagagactcccaccttaccgcggtcggtaaactgctggacaacttgaatcaagatgcacccgatacctaccactacgtggtatccgaaccactgggaaggaattcctacaaggagcgctacctctttgtgtatagaccggatcaggtatcagcggtcgatagctactattatgatgacggttgcgaaccatgtggcaatgacaccttcaacagggaaccggcaattgtgaggttcttcagcaggtttacagaagtaagggagttcgctatcgtgcccctgcatgcagctcccggtgacgcagttgcagagatcgacgctctctacgatgtctacctggatgtccaagagaagtggggtctggaggatgttatgcttatgggtgacttcaacgctggatgctcttatgtgagaccctcacaatggtccagcattcgcttgtggacatcccctaccttccagtggctgatccctgacagcgcggacaccaccgcaaccccaactcactgtgcttacgacaggatcgtggtggccggcatgctgctcagaggcgctgtcgtgcccgattccgctttgccttttaattttcaagctgcatatggactgtccgatcagttggcacaggccatctccgaccactacccagtggaagtgatgctgaag

SEQ ID NO: 315642 - DNA, 846 bp, Artificial Sequence
  derived and/or modified sequence
atgcgcggtatgaagctcttgggagccctgctcgccctcgccgctctcctgcaaggcgcagttagcctcaagatagccgctttcaatattcagacctttggcgaaaccaaaatgtctaacgccacactcgtgtcttacatcgtgcagatcctgagcaggtacgacatagctctcgtacaggaagtacgcgactcacacctgactgccgtcggaaagctgttggataacctgaaccaggatgcccccgacacctatcactacgtcgtgtctgagcctctcggcaggaattcctacaaagaacgctatctctttgtgtaccgccccgaccaggtgagcgctgtcgacagctactactacgacgacggttgcgaaccgtgtggtaatgatactttcaaccgcgaacccgccatagtgagattcttctcccggtttaccgaagttcgggaatttgcgattgtgccgctgcacgcggcaccaggcgatgctgtagcagaaatcgatgccctttacgatgtgtatcttgacgtccaagagaaatggggactggaagatgtgatgctgatgggagattttaacgcggggtgcagctacgtccggccctcccagtggagttcaatccgattgtggacatcacctacatttcaatggctgatcccggattccgcagacaccactgcaacaccgacccattgcgcatacgataggatcgtcgttgcgggtatgctgctccgcggcgcagtggtgcccgattccgctctccctttcaattttcaggctgcctacggtctgtccgatcagttggcgcaggccatctcagaccattacccggttgaggttatgctgaaa

SEQ ID NO: 315643 - DNA, 846 bp, Artificial Sequence
  derived and/or modified sequence
atgagaggaatgaagctgctcggtgccttgcttgcactcgcagcacttctgcagggcgcagtgtctctgaagattgccgcatttaacatacagacttttggcgaaaccaagatgtcgaacgcaactctggtcagctacatcgttcaaatcctctccagatacgatatagcgctggtgcaagaagtccgtgattcccatcttaccgcggtcggaaaactgcttgacaatctcaatcaagatgcgcccgatacttaccactatgtggtgtcggagcctctgggacggaactcatacaaggagcgctacttgtttgtgtaccgaccagaccaagtgtcagcggtggacagctactactacgatgatggatgcgagccatgtggcaacgacacttttaacagagaacctgcgatagtgcgcttcttttctcgatttactgaagtgagagaatttgccattgtgccacttcatgcagcacccggagatgccgtcgcggaaatcgatgcgctctatgatgtgtacctggatgtccaggaaaaatgggggcttgaagatgtgatgcttatgggagatttcaacgcaggttgttcctacgtcagaccatcccagtggtcctcgataagactgtggacttccccaacctttcaatggctgatcccggatagcgcagacactacggcaactcctacccattgtgcgtacgatcgcattgtggtcgccggtatgctgctgcgtggtgccgtggtgccagattcggcccttccatttaactttcaagcagcttacggactgtcggatcagcttgcccaagccatttcggaccactaccctgtcgaggtgatgctgaag

SEQ ID NO: 315644 - DNA, 846 bp, Artificial Sequence
  derived and/or modified sequence
atgaggggtatgaagctgttaggggcactcctggcactcgctgctctgctccagggggctgtgtccttaaagatagccgcctttaatatccaaactttcggagagactaaaatgtcaaacgccactcttgtgtcctatattgtgcagatcctatcaagatacgacatagcactggtgcaagaagtgcgtgacagccatctcacggccgtggggaagctattggacaatttaaatcaggacgcgcctgacacgtaccactacgtagtctctgagcctttaggtcgcaacagctataaagagcggtatctgttcgtgtacaggccagaccaagtgtccgcagttgacagttattactacgatgatggctgtgaaccttgcggaaatgacactttcaaccgggaaccagccattgtcagatttttttctcgctttaccgaagtacgggaatttgctatcgtccccttgcacgctgccccgggggacgccgtagcggagattgacgccctttacgatgtctacctcgacgtccaggagaagtggggcctggaagatgtgatgcttatgggtgattttaatgccggctgtagctacgtccgtccgagccagtggagctccattagactgtggacatcccccacgttccagtggctgatcccggacagcgccgacacgaccgcaacaccaactcactgcgcctatgataggatcgtggtcgcaggaatgctgctgcgcggtgccgtagtcccggactccgccctgccgtttaattttcaggctgcctatgggctgtccgaccagctcgcccaggcaattagtgatcattatccggtcgaggtgatgctgaag

SEQ ID NO: 315645 - DNA, 846 bp, Artificial Sequence
  derived and/or modified sequence
atgcgtggtatgaaacttctgggagccctcctggcccttgcagcgcttctgcagggagcagtctcgctgaagattgctgcatttaacatccagacgttcggggaaactaagatgtctaatgcaacgctcgtcagctacattgtacagatattgtcccgatatgatattgcactcgtgcaagaagtcagagattcgcacttgactgcagtaggtaaacttctcgacaacctgaaccaggatgcgccagatacctaccactacgtggtgagcgagccacttggcaggaattcgtacaaggaaaggtacttgtttgtctacagaccggatcaagtctcagcagtcgacagttactattacgacgacggatgtgagccttgtggcaacgacaccttcaaccgtgaacccgcaatcgtgcgcttctttagcaggtttactgaggttcgagaatttgcaattgtgcctctgcatgcggctcctggtgatgccgtcgcagagatcgacgcactgtacgatgtgtaccttgacgtgcaagagaaatggggactggaagatgtgatgcttatgggagatttcaatgccggttgctcgtatgtccgaccctcccaatggtcatcaattcgcctttggacctcccctacctttcaatggctgatccccgattccgctgataccactgcaactcctacccattgtgcgtatgaccgtattgtggttgccggcatgctccttaggggagcagtggttcccgattcggcactccctttcaattttcaggccgcctacggcctttcagatcaactggcacaggccattagcgaccattaccctgtggaagtgatgcttaag

SEQ ID NO: 315646 - DNA, 846 bp, Artificial Sequence
  derived and/or modified sequence
atgcgcggtatgaagctcctgggagccctcttagcactggctgcactgctgcagggagccgttagtctcaaaatcgccgcttttaatatccagacctttggggagactaagatgagtaatgccaccctcgtctcatatattgttcagatactgtcgagatacgatatcgccctagtgcaggaggttcgcgactctcacctcactgccgtcgggaagcttctggacaacttgaaccaggacgcacctgacacgtaccattacgtcgtttcggaacctctgggacgcaatagttacaaagagcgatacctgtttgtgtatcggcctgaccaagtgagcgcggtagactcatactactacgacgacggctgtgaaccgtgtgggaacgacaccttcaacagggagcctgcaatagttagatttttttcaagatttaccgaagtgagagagtttgcaattgtgcctctgcacgccgctcctggtgacgccgtggcggaaatcgatgctctgtatgacgtgtatttggatgtccaagagaagtggggattggaggacgtaatgctaatgggcgacttcaacgcaggctgttcttacgtcaggccgagtcaatggtcttctatcagattatggacaagtcctacttttcaatggctcatacccgacagcgccgacaccactgccacccccacacattgtgcatatgacagaatagtggttgcaggaatgcttctgcgcggagccgtagttcctgacagcgccctgcccttcaattttcaggccgcttatggactgagcgaccaactagctcaggcaatcagtgaccactacccggtcgaggtcatgctcaaa

SEQ ID NO: 315647 - DNA, 846 bp, Artificial Sequence
  derived and/or modified sequence
atgcgcggcatgaagctgctgggcgcccttctcgccttggccgctctgttgcaaggagctgtgagcttgaagattgcagcgttcaatatccaaaccttcggagaaaccaagatgtcgaatgcaacgttggtcagttatatcgtgcaaatcctgagcagatacgacatcgccctcgtgcaggaggtccgggactctcatctgaccgcagtgggaaaactcctcgataatctcaaccaggacgcccctgacacttaccactacgtggtgtccgagccgttggggcggaactcgtacaaggagcggtacctttttgtgtaccggccagatcaagtgtccgcggtggattcgtactactatgatgacggctgcgaaccgtgcggaaatgacactttcaacagggaacctgccatcgtcaggttcttctcgcgattcacggaagtacgggagttcgcaatcgtgcctctgcatgcggcaccgggggacgctgtggcggagatcgatgccctctacgatgtctacctcgacgtgcaggagaagtggggcctggaggatgtgatgctcatgggagatttcaacgcaggatgctcatacgtgaggccatcccagtggtcgagcatccggctgtggacctctccgacctttcagtggctgattccagactccgcggacaccacggccaccccgacccattgcgcttacgatcggatcgtggtggccggaatgttgttgaggggtgccgtcgtgccagacagcgctcttccattcaacttccaggcagcgtacgggctttcagaccagctcgcccaggcgatctcggaccactaccccgtcgaagttatgctgaaa

SEQ ID NO: 315648 - DNA, 846 bp, Artificial Sequence
  derived and/or modified sequence
atgagaggaatgaaactactgggggccctgttggccctggccgctcttctgcaaggagccgtgagcctaaagattgccgcgttcaacatccaaacctttggagagacaaagatgtcaaacgccaccttggtgtcctatattgtgcagatactgagccgatacgatattgccctagtgcaggaagtgcgcgacagtcacctcaccgcggtgggcaaattacttgacaacctcaatcaggacgctcccgacacctatcactacgtggtgtccgagcccttagggaggaattcgtacaaggagcgctatcttttcgtgtatagacccgaccaggtgtctgcggtagactcgtactattatgacgatgggtgtgagccgtgtggaaacgacacctttaatcgagaaccagccatcgtgcggtttttctccagatttacggaggtgcgggagttcgcaatcgtcccactgcatgcagcccccggcgatgccgtcgccgagattgatgccctgtacgacgtgtatctggacgtgcaggagaagtggggtttagaggacgtgatgctgatgggagactttaatgcgggctgctcttatgttaggccttctcagtggtccagcatacggctgtggacgagtcccaccttccagtggctcataccagacagcgctgacacaaccgccacccccacacattgcgcttatgaccggattgtggtcgcaggtatgctactgcgcggggctgtcgttccagactcggccctgcccttcaacttccaggccgcctatgggctgagcgaccaacttgctcaggccatatccgatcactaccctgttgaagttatgcttaaa

SEQ ID NO: 315649 - DNA, 846 bp, Artificial Sequence
  derived and/or modified sequence
atgcggggaatgaaactcttgggagccctcttggctctggcagcgctgctgcagggcgcagtgtccctgaagatcgcagccttcaatattcagacttttggagagactaagatgtccaatgctaccctggtgtcatacatcgttcagatcctctccagatacgacatcgcgcttgtacaggaagtgagagattcgcacctcaccgccgtcggcaagttgctggacaacctgaaccaggacgcaccggatacttaccactacgtcgtgtctgagccgctcggacgcaactcgtacaaggagaggtaccttttcgtgtacagacctgaccaggtgtcagcagtggattcctactactacgatgacggatgcgagccctgcggtaacgatacctttaatcgcgagccggcgatcgtgcgctttttcagccgctttactgaagtcagagaatttgccatcgttccgttgcacgctgcccccggagatgccgtcgcggaaattgacgcactctacgacgtgtacctggatgtgcaagagaagtggggccttgaagatgtgatgttgatgggagatttcaacgccggatgcagctacgtgcggccgtcgcagtggtcctcaatccggttgtggacttcgccgactttccaatggctcatcccagactccgcagacactaccgcaaccccgactcactgcgcttacgatcgcattgtggttgccggaatgcttctgcgaggagcggtcgtgccagatagcgccctgccgttcaactttcaggcagcctacggactctcggatcaactggcacaagcgatcagcgaccattaccctgtggaggtcatgctgaag

SEQ ID NO: 315650 - DNA, 846 bp, Artificial Sequence
  derived and/or modified sequence
atgcggggcatgaaactccttggagcccttctggcattggcggctctgctgcagggagccgtcagcctgaaaatagccgcttttaatatccagacattcggggagactaaaatgtccaacgccactcttgtgagctacatcgtgcagatccttagcaggtacgacattgcgttggttcaggaagttcgcgatagtcacctaaccgctgtgggcaaactgttggataacctgaaccaagatgcaccggatacttaccattatgtggtttcagaacccctgggacgcaattcctacaaggagagatacctcttcgtgtaccggcccgaccaggtcagcgccgtggattcctactattatgacgacggctgcgaaccctgcggcaatgatacttttaaccgcgagcctgcaatagtacgattttttagccgattcacggaagttcgtgagttcgcaatcgtccctttgcacgctgcccccggagatgccgtcgccgagatagatgccttgtatgatgtgtaccttgacgttcaggagaaatggggcttagaggacgtgatgctgatgggggacttcaacgcaggctgtagctacgtccgccctagccaatggtcttccatacgcttatggacttctccgaccttccagtggttgatccctgattccgcggacacgacagccacccccacccattgcgcatatgataggattgtcgtagcgggcatgctcctgagaggcgcggtcgtgccggacagcgccctgccatttaactttcaagcagcttatggactgagcgatcagctcgctcaagccatatccgatcattaccctgtagaagtcatgcttaag

SEQ ID NO: 315651 - DNA, 846 bp, Artificial Sequence
  derived and/or modified sequence
atgcgcggtatgaagttgttaggggccctcctggctttggctgccctactgcagggcgctgtttccttgaaaatagctgcatttaacatccagaccttcggggaaacaaaaatgagcaatgccactctggtatcctacattgtgcaaatccttagcagatatgatatcgcgctcgtgcaagaagtccgcgattctcaccttactgcagtggggaagctcctcgacaatctcaatcaggacgctccagacacgtatcattatgtggtgtcagagcccttaggaaggaacagctacaaggagcgatacctcttcgtatacagaccagatcaagtctctgccgtcgactcttactattacgatgacgggtgtgaaccctgcgggaatgacacttttaatcgtgagccggctatcgtgcgtttcttctctcgtttcactgaggtgcgagagttcgcgattgtgccactacacgcagccccaggcgatgccgtggccgagatcgatgctttatatgatgtctacctcgacgtgcaggagaagtgggggctggaagacgtgatgcttatgggggactttaatgccggttgtagctatgtccgcccttcccaatggtcttctattcggttgtggacatcccccactttccaatggctgattcccgatagtgcagatactacggccacgcccacccactgtgcatatgataggatcgttgtagccgggatgctactgcgcggcgccgtagtgcccgattccgcgctgccgttcaacttccaagctgcctatgggctttccgaccagctcgctcaggccatttcagaccattaccccgtcgaggtgatgctgaag

SEQ ID NO: 315652 - DNA, 846 bp, Artificial Sequence
  derived and/or modified sequence
atgcgggggatgaagctccttggggcacttctcgccctggcagctctgctgcagggcgctgtctcgctgaagatcgcagcattcaatattcaaacttttggagaaaccaagatgagcaacgcaacgctggtgtcctacatcgtccagattttgtcccgctacgacattgctctggttcaagaagtgcgggattcgcatcttaccgcagtgggaaaactgctcgataacctgaatcaggatgcccctgacacctaccattacgtggtatcggaaccgctgggacgaaactcctataaggaaagataccttttcgtgtaccgtcccgaccaagtgtctgcagtagattcgtactactacgacgatggttgcgagccatgtggcaatgatacctttaacagagagccagcgatcgtgcgattctttagccgctttactgaggtccgggaattcgctattgtgcctttgcatgcggcaccaggagacgcagtcgccgaaattgatgcattgtatgacgtgtaccttgatgttcaggaaaagtggggactcgaggatgtgatgcttatgggagatttcaacgcaggttgtagctacgtgcggccctcacaatggagctcgatacgactgtggactagcccgactttccagtggcttatccccgactctgccgataccaccgcaactccaacgcactgtgcctacgatagaattgtcgtggcaggtatgctgctcaggggcgcagtggtgccagattcggcactcccgttcaattttcaagcggcgtatgggttgtccgaccaactcgcgcaagcgatatcagaccactacccagttgaagtgatgctgaaa

SEQ ID NO: 315653 - DNA, 846 bp, Artificial Sequence
  derived and/or modified sequence
atgagaggtatgaagctgctcggagcactcctggcgctggccgctctgctgcaaggcgcagtgtcgcttaagatcgcagcgttcaacatccagactttcggcgaaaccaaaatgtccaatgcaaccttggtgagctacatcgtgcagatccttagccgctacgatatcgcgttggttcaagaggtgagagacagccaccttactgccgtcggaaaactgttggacaacttgaaccaagacgcccctgacacttaccactacgtcgtgtcagagcctctcggacgcaactcatacaaggaaaggtacttgttcgtgtacagaccggatcaggtgtccgctgtggactcatactactacgacgacgggtgtgaaccctgtggaaacgataccttcaacagggaaccggcgatcgtccgcttctttagccggtttaccgaagtccgcgaatttgccatcgtccctctccatgccgcaccaggagacgccgtcgctgaaatcgatgccctgtacgacgtgtacctcgatgtgcaagaaaagtggggactggaagatgtgatgctgatgggggacttcaacgccggatgctcgtacgttcgcccgtcccagtggtcgtcaattagactctggacgtcacctactttccaatggctcatcccagactcggccgataccaccgcgaccccgacccattgcgcctacgatcgaatcgtggtggccggtatgctgcttcgaggagcggtggtcccagattccgcgctcccgttcaattttcaggcagcctacggcttgtcggatcagttggcacaagcaatcagcgatcactaccctgtggaagtgatgctcaag

SEQ ID NO: 315654 - DNA, 846 bp, Artificial Sequence
  derived and/or modified sequence
atgcgggggatgaagctccttggagcgcttcttgccctcgcagcattgctgcaaggagctgtgtcgcttaagatcgcagcattcaatattcagacctttggtgaaactaaaatgtccaatgctactctcgtgagctacattgttcagattctgagccgttacgatattgcacttgtgcaggaagtgagagactcccatctgaccgccgtgggaaagctgcttgataaccttaaccaggatgcaccagatacttaccattacgtggtgtcggaacctctcggaagaaatagctacaaggaaagatacctgtttgtctatcgtcctgatcaggtatcggcagtggattcgtactactacgatgacgggtgcgaaccatgtggcaacgataccttcaatcgcgaaccagccatagtccgcttcttttcgagatttaccgaagtgcgagaattcgcaattgttccactgcacgcagcacctggcgatgccgtcgccgaaatcgacgcactgtatgacgtgtacctggatgttcaggaaaaatggggtctggaggatgtcatgctgatgggtgactttaacgcaggttgttcttacgtccggccttcacaatggtcgtcaatccggctttggacctcccctacttttcagtggctgatccccgattcggcagatactaccgctacgcccacccactgtgcatacgaccgcatcgtggtggcaggaatgcttcttcgaggggcagtcgtgcctgattcggcactgccatttaactttcaggcagcttacggcctctcggatcaactcgcacaggctatctcggatcactatcctgtggaagtcatgctgaaa

SEQ ID NO: 315655 - DNA, 846 bp, Artificial Sequence
  derived and/or modified sequence
atgagagggatgaagctgttgggcgcacttctggcgctcgcagctctcttgcaaggggcagtttctctgaaaatcgcggcttttaacattcaaacgtttggtgaaaccaaaatgtctaatgcaaccttggtaagttacatcgtacagattctgtcgcggtatgatatcgcacttgtgcaagaagtgcgggactcccacctcactgcggtgggcaagctgctcgataatcttaatcaagacgccccagacacctaccattacgtggtgtccgagcccctcgggcgtaactcgtacaaggagcgctacctgttcgtctatagacctgaccaagtgagcgcagtcgattcgtactattacgacgacggttgtgagccttgtggtaacgacacttttaacagagaaccggccattgtgaggttcttttcgcgatttactgaggtgcgcgaatttgccattgtgccattgcacgcggcaccaggagacgcagtcgcagaaatcgatgccctttacgatgtgtaccttgatgtccaagagaagtggggcctggaggacgtgatgcttatgggagatttcaacgcaggttgttcgtacgtccgcccaagccagtggtcaagcataagactctggacttcccctaccttccagtggcttatccccgattccgcagacactactgcaaccccgacccactgcgcctacgatcgcatcgtggtcgctggtatgctccttaggggagctgtggtgcctgatagcgcactgccgttcaactttcaagctgcttatggactgtccgatcagcttgcacaggcgatttcggatcattaccctgtggaagtgatgctgaag

SEQ ID NO: 315656 - DNA, 846 bp, Artificial Sequence
  derived and/or modified sequence
atgcgtggaatgaaactcctcggagctctgcttgcactggcggcacttcttcaaggagcagtgagcttgaaaattgcagccttcaatatacaaacttttggagaaaccaaaatgtcgaatgccaccttggtgagctacattgtccaaattctctcaagatacgatattgcccttgtccaagaggtgagagattcgcatcttaccgcagtgggcaaactgctcgacaacctcaatcaagatgctcccgatacctaccattacgtcgtgtcggagcctctcggcagaaactcatacaaggaacggtatctttttgtgtaccgccccgatcaggtgtcggcagtggattcatactactatgatgacgggtgcgagccttgcgggaacgataccttcaaccgagaaccggccatcgttcgctttttcagccgtttcactgaagtgagggagttcgcaattgtgcccctgcacgcagcacctggagatgcagtggcagagatagacgccctctacgacgtctacctggacgtgcaagagaagtggggactggaggacgtgatgctgatgggggactttaatgccggttgttcctacgtgcggccttcccaatggtcctcgatcaggctttggacctcccctacctttcaatggctcatcccggactccgcggatactactgccactccaactcattgtgcctacgatcgaattgtggtcgccggaatgctcctgaggggagccgtggtgcctgattccgctcttccctttaactttcaggccgcatatggtctttcggatcaactggcccaagccatatccgaccattacccagtcgaagttatgcttaag

SEQ ID NO: 315657 - DNA, 846 bp, Artificial Sequence
  derived and/or modified sequence
atgcgaggaatgaaactccttggcgctctgctggcgttggcagcattgcttcaaggagccgtcagtctgaagatcgcagcgttcaacatccaaaccttcggagaaacgaagatgtcgaatgcaactttggtttcgtacatcgtccaaattctgagcagatacgatattgcacttgtgcaggaggtgcgtgactcccaccttaccgccgttggtaagctgcttgacaacctgaatcaagatgccccagatacttaccactacgtcgtgtcagagcctctgggcagaaatagctacaaagaaaggtatctcttcgtgtaccggccggatcaagtgtctgcagtggattcctactactacgatgacgggtgcgaaccttgcggaaacgatacctttaaccgggaaccagcgatcgtgagattcttttcaaggttcaccgaagtgcgcgaattcgctatcgtccctctccatgcagccccaggggatgcagtcgcggagatcgatgccctctacgatgtctacctggatgtgcaagagaagtggggtcttgaagatgtaatgctgatgggagatttcaatgcgggatgttcgtacgtccggccgtcacagtggtcgtctatacgtctttggacttcgccgacttttcagtggcttattcctgactcggcggatactaccgctaccccaactcattgcgcatacgatagaattgtggtggctggcatgctccttaggggcgcagtcgtgcccgattcagcgctcccttttaactttcaagctgcctacggactttccgatcagctcgcacaggcaatttcagaccactacccggtcgaagtcatgctcaag

SEQ ID NO: 315658 - DNA, 846 bp, Artificial Sequence
  derived and/or modified sequence
atgagaggaatgaagctgctcggagcacttctggcgctcgccgcgctgctgcaaggagcggtgtcgctgaaaatcgctgccttcaatatccaaacttttggagaaaccaagatgtcaaacgcaaccttggtgtcctacattgtccagatcctctcgcggtatgacatcgctctggtgcaagaagtcagggattcccacctgactgctgtgggaaagctgctcgacaacctcaatcaggacgctcctgatacttaccactatgttgtctcggagccgctcggccgcaactcgtacaaagaacgctacctgttcgtgtaccggcctgaccaggtgtccgcggtcgactcctactactacgatgacggctgcgagccgtgtggaaatgacaccttcaaccgtgagccggcgattgtgcggttcttctcaagattcactgaagtccgggagttcgcgattgtgccgctgcacgccgccccaggagacgcggttgcggaaatcgatgccctttacgacgtgtacctcgacgtgcaggaaaagtggggtttggaggatgtgatgctcatgggagacttcaatgcggggtgtagctacgttcggccgagccaatggtccagcattagactttggacgtcgcctactttccagtggctgatccctgactcggccgacacgaccgccactccgacccactgcgcctatgaccgcatcgtcgtggccggcatgctcttgagaggagcggttgttcccgatagcgctctgccattcaactttcaggccgcatacggcctctccgaccagctggcccaggccatttcggaccactacccagtggaggtgatgctcaag

SEQ ID NO: 315659 - DNA, 846 bp, Artificial Sequence
  derived and/or modified sequence
atgcgcgggatgaagctgcttggagccctgttggccctcgccgctttgctgcaaggtgcagtgtccctgaagattgcagctttcaatatccagacctttggagaaactaagatgagcaacgcaactcttgtgagctacatcgtgcagattcttagccgttacgacatagcgctggtgcaggaggtgagggattcccatctgactgcagttggaaaactgctggataacctgaatcaagacgcacctgacacgtaccattacgtggtgagcgaaccacttggaaggaactcgtacaaggagagatacttgtttgtgtaccggccagatcaagtctccgccgtggattcctactactacgatgacggctgtgaaccgtgcgggaacgataccttcaatcgcgaacccgcaattgtgaggtttttcagtagattcaccgaagtgagagagtttgcaattgtgcccctccacgcagcacccggtgatgccgtcgcagaaatcgatgcattgtacgacgtttacctggacgtgcaggagaaatggggtcttgaggacgtcatgctgatgggggatttcaatgccggctgtagctacgttagaccttcccagtggtcgtctatccgcctttggacctcccccacttttcaatggcttattcctgactcagcggataccactgctaccccaacgcactgtgcctatgatcgtattgttgtagccggaatgttgcttcgaggagcagtggttccagattcagcgcttccgtttaactttcaagccgcctatggtctttcagatcaacttgcccaagcaatttctgaccattaccctgtggaagtgatgcttaag

SEQ ID NO: 315660 - DNA, 846 bp, Artificial Sequence
  derived and/or modified sequence
atgagaggaatgaaacttttaggagcactgctcgccttggctgccctcctgcagggagcagtcagtctaaaaatcgccgcttttaatatacagacgtttggagaaactaaaatgagtaatgcaacattagtttcatacatagtccagatactttcacgctacgatatagccctcgttcaggaggtccgggattcccaccttactgctgtcgggaaattattagacaatctgaatcaggatgctcctgacacataccattatgtcgtttccgaaccactcgggagaaactcgtataaggaaaggtatctcttcgtgtatagacccgatcaggtctctgctgtggattcctactactatgacgatggatgtgaaccctgtgggaacgacacatttaatagggaacctgctatcgtgcgctttttttctagatttactgaagtgagggagtttgcaatagtacctcttcatgccgcaccaggagatgctgtggcagaaatagatgctctgtatgatgtgtatcttgatgtgcaggagaaatgggggctggaagatgtaatgcttatgggagatttcaacgcggggtgttcctacgtccggccctctcagtggtcctcaatcaggctatggacatcaccaactttccagtggctgatccctgattccgctgacacaactgccactccgactcattgtgcctacgatcggatagtagtggctggaatgttacttcgaggagcagtagtgcccgattctgctctgccattcaatttccaggcagcttacgggctgagtgatcagttagcacaggctatatcagaccattatcccgtggaggttatgctgaaa

SEQ ID NO: 315661 - DNA, 846 bp, Artificial Sequence
  derived and/or modified sequence
atgagagggatgaagctgctcggggcgctcctcgccctggccgcacttcttcagggagccgtgtcgttgaagatcgcggccttcaacatccagaccttcggcgagacgaagatgtcgaacgcaaccctcgtgtcgtacatcgtgcagatcctttctcgctacgacatcgcgttggtgcaggaggtccgcgactcgcatttgacggcggtgggaaagctgctggataacctcaatcaagatgcgccggacacctatcattatgtcgtgtcggaaccgcttggtcggaattcgtacaaggaacgctacctgttcgtgtaccggccggaccaagtgtcggccgttgattcgtactattacgatgacggctgcgagccatgtggtaacgacacctttaatcgggaaccagcaatcgtgcgcttcttttctcggttcaccgaagtccgggaatttgctatcgtccctctgcacgcagcaccgggcgacgccgtggccgagattgacgcgctgtacgatgtttatctggatgtgcaggaaaaatggggcctggaggacgtcatgcttatgggcgatttcaacgcaggatgctcgtacgtgaggccgagccagtggagttcaatccggctgtggacgtcaccaaccttccaatggctgattcccgatagcgccgacactactgccactccaactcactgcgcgtacgaccgcatcgtcgtggctggcatgctcctccgcggagccgtggtcccggattcagctctgccgttcaacttccaggctgcatacggtctgtcggatcaactggcccaggcaatttcggatcactacccagtggaggtgatgctgaaa

SEQ ID NO: 315662 - DNA, 846 bp, Artificial Sequence
  derived and/or modified sequence
atgagagggatgaaactgctcggcgcacttctcgccttggcggcgctgctgcagggagccgtgtccttgaaaatcgcagctttcaacattcaaacattcggagagacaaagatgagtaatgcaaccctggtctcatatatcgtgcaaattttgtcccgatacgatatagccctggtgcaagaagttcgggatagtcatctgaccgccgtcggtaagctgttggacaacctgaatcaggatgctcccgacacctatcactacgtcgtatccgagcctttgggaagaaacagctacaaggaaaggtacctcttcgtgtatcgccccgaccaggtgagcgcagtagattcctattactatgacgatggatgcgagccttgcggcaatgacactttcaatagagagcccgcaattgtcagattttttagcagattcacggaagtgcgggagttcgctatcgtaccgcttcatgctgccccaggcgacgctgtggccgagattgacgccctttacgatgtttacctcgacgtgcaggagaagtggggcctggaggacgtcatgctgatgggcgatttcaacgcaggctgttcctacgtgcgccctagccaatggtcatcaatccgactgtggactagtcctacgttccagtggctgatcccggattctgctgatactactgcgactccaacccactgcgcttatgacaggatcgtggtggcaggtatgctcctgcgaggggctgtagtccccgactccgcccttccatttaacttccaggcagcctatgggctgagcgatcaactggcgcaagctatttcagaccactacccagtggaagtgatgctgaag

SEQ ID NO: 315663 - DNA, 846 bp, Artificial Sequence
  derived and/or modified sequence
atgagaggcatgaagctgctgggcgcccttctcgcactggcagcactgctgcaaggtgcagtgtcccttaagatcgccgccttcaacattcaaaccttcggagagactaaaatgtcgaatgccactttggtgtcgtacatcgtccaaatactctcacgatacgatatcgcattggtgcaagaagtgagagattcccatcttactgcggtgggtaagctgctcgataacctgaaccaagacgcgccagacacctaccactacgtcgtgtcagaaccgctggggaggaacagctacaaggaaagatatctctttgtgtaccgtcctgaccaggtgagcgcagtggatagctattactacgatgacggatgtgagccttgcggaaatgacacctttaatcgtgaacccgcaatagtgcgatttttctccagattcactgaagtgcgtgaattcgccatagtccctctgcatgctgcaccaggagatgcagtcgcagaaattgacgcgctttatgacgtgtacctcgatgtgcaagagaagtggggacttgaggacgtcatgctgatgggtgatttcaacgcaggctgttcctacgtccggccgtctcaatggagcagcatcagactgtggacctcaccaaccttccaatggctcattcctgatagcgccgacactactgcaactcctactcattgtgcatacgaccgtattgtggttgcaggtatgcttctcagaggcgctgtggttcctgactccgcgctccctttcaactttcaggctgcatacggtctttccgaccagcttgcacaggcgatatcagatcactacccagtggaggtgatgctgaaa

SEQ ID NO: 315664 - DNA, 846 bp, Artificial Sequence
  derived and/or modified sequence
atgcgaggtatgaagctgcttggggcgctcctcgcactcgctgctttgcttcagggcgcggtgtctttgaaaatagctgcttttaatatacagacttttggggagacgaaaatgagtaatgcaaccctggtgtcctacatagtgcaaatcttgtccagatacgacatagctttggttcaggaggtccgcgacagccatctcacggccgtcggtaaattactggataatctaaatcaggatgcccccgacacatatcactacgtagtttccgagccacttgggcgcaactcatacaaagaacgctatttgttcgtgtatcgccccgatcaggtgtcagctgttgattcctactactacgatgatgggtgcgagccctgcggcaatgacactttcaaccgcgaacccgcaattgtccggttcttctcacgcttcacggaagtgcgagagtttgctattgtgcctctgcacgcagcccccggagatgctgtcgcagaaatcgatgctctatacgacgtctaccttgacgtccaagagaaatggggcctggaggatgtgatgctcatgggcgacttcaacgctgggtgctcgtatgtgagaccctcccagtggtccagtatcaggctgtggacttcaccaaccttccagtggctcattcctgattcagccgataccaccgcgactcctacgcattgcgcatacgaccggattgtggtggctggcatgctgctccgcggagctgttgtgccagactccgcgcttccctttaattttcaggccgcgtacgggctgtcggatcagctggcccaggccatcagtgatcactatcctgtcgaggtgatgttgaaa

SEQ ID NO: 315665 - DNA, 846 bp, Artificial Sequence
  derived and/or modified sequence
atgcgggggatgaaactgctcggtgccctccttgcacttgccgccctactccagggcgccgtctctttgaagatagctgcttttaatattcagacctttggggaaacgaagatgagtaacgctacgctggtctcctatattgtccagatcctctcccgttatgacatagctctggtacaagaagtcagggactcccacctgaccgcggtaggaaaactgctcgacaacctgaaccaggatgcacccgatacttatcactatgtggtgtccgagcccttggggcggaactcctacaaagaacggtatctcttcgtgtaccggcccgatcaggtgtctgccgttgactcctattattacgacgatggctgtgagccatgtggcaacgatacctttaatcgtgaacctgccattgtgaggtttttttctcgtttcacggaggtccgagagttcgctatagttccccttcacgctgcccctggagatgccgtggctgagatagatgctctttacgatgtgtatctggatgtacaggaaaagtggggcctggaagacgtcatgctgatgggggacttcaacgccggctgttcctatgtgcggcccagtcagtggagtagtatcagactgtggactagtcctactttccagtggttgatccctgactctgcggatacgacggctacacctacccactgcgcctacgatcggatcgttgtcgctggaatgctgttgagaggagccgttgtccccgactccgcattaccattcaatttccaagcagcctatgggctaagtgaccaactcgcacaggctatcagcgaccattatccggtggaagtcatgttgaag

SEQ ID NO: 315666 - DNA, 846 bp, Artificial Sequence
  derived and/or modified sequence
atgagaggtatgaaattacttggagctttacttgcattagcagcacttcttcaaggagccgtaagtttaaaaatagcagcttttaatattcaaacatttggtgaaacaaaaatgtctaatgcaactttagtctcatatatcgttcagattttatcaagatatgatattgcattagttcaagaagttagagattcacatcttacggctgttggtaaacttcttgataatcttaatcaagacgctcctgatacatatcactatgttgtcagtgaaccacttggaagaaatagttataaggagcgttatttatttgtttacagaccagatcaagtaagtgctgtggattcttattactatgatgatggttgtgaaccatgtggaaatgatacattcaatagagaacctgctattgttagattcttttcacgttttacagaagtaagagaatttgctattgttccattacatgctgctccaggtgatgcagttgcagaaattgatgcactttatgatgtttatttggatgtacaagaaaaatggggattagaagatgttatgcttatgggtgattttaatgcaggatgttcctatgttcgaccaagtcaatggtcctcaattcgattatggacatcaccaacttttcaatggttaattccagattcagcagatacgacagcaactccaactcattgtgcatatgacagaatagttgttgctggaatgttacttcgtggagctgttgtccctgactcagcacttccttttaattttcaagcagcttatggactttctgatcaattagcacaagctatatctgatcattatcctgttgaagttatgttaaaa

SEQ ID NO: 315667 - DNA, 846 bp, Artificial Sequence
  derived and/or modified sequence
atgcgaggaatgaagctactgggggcacttcttgctctggcagcgcttctgcagggcgctgtgagcttgaagatcgccgcattcaatatccagacatttggcgagaccaaaatgtcaaatgcaaccctggtgtcgtacattgtacaaattttgagccggtacgatattgccctcgtacaggaggtgcgggactcacacttaacggctgtgggcaagctcctggacaatctcaatcaagacgctcctgatacataccattacgtggtttccgagcccctgggcaggaacagctacaaggaacgctatctgttcgtttataggcccgatcaagtatctgcagtggactcttattattatgatgatggctgtgagccatgtgggaacgatacctttaatcgcgagcctgccatagtgcgcttcttttcacgctttacagaagtgagggagtttgccatcgtgccgctgcacgccgcacctggagatgcggtcgctgaaatcgacgcactttacgatgtgtacctggatgtgcaggagaagtggggactggaagatgtgatgcttatgggagactttaatgcaggctgttcctatgtacgcccttcccaatggtcctccattcgactttggacttcacccacgtttcagtggctgattccagactcagcagacaccaccgccacccctacacattgcgcctacgacagaattgtggttgcaggtatgctgttgcggggcgcggtggtgcccgactccgccctccccttcaacttccaggccgcatatggcctgagtgaccaactcgcacaagccatttccgatcactacccggtcgaggtgatgctgaag

SEQ ID NO: 315668 - DNA, 846 bp, Artificial Sequence
  derived and/or modified sequence
atgaggggtatgaaattactgggggccctcctcgcattagctgcactgctgcagggggcggtctctctgaagatcgcggccttcaacatccagacatttggcgaaaccaaaatgtctaacgctactctggtcagttatattgtgcagatcctctccagatacgatattgccctggtgcaagaagtcagagattcacatttgaccgcagtaggcaagctgctggacaacctgaatcaggacgctccagatacataccattacgtggtaagcgaacctctgggccgaaactcctataaggagcgatacctgtttgtctatcgtcctgaccaggtttctgcggtggactcttattactacgacgatggctgcgagccttgtggtaatgacacatttaatcgagaacctgccattgtgcgattttttagcagattcactgaggtccgagagttcgcaatcgtgcctttacacgccgctcctggcgacgcagttgcagaaatcgacgccctgtatgatgtgtatctcgacgtgcaggaaaagtggggtctagaggatgtgatgttaatgggcgacttcaacgcaggctgcagctacgtgagaccctctcagtggtcctctatcaggctgtggacctccccgacctttcagtggctgatccccgattcagcggacaccacggccactcctactcattgtgcctacgatagaattgtagtggccggaatgctgctgcgaggcgctgttgtgccagattcagctttgcccttcaacttccaggctgcctacggactcagtgatcaattggcgcaggccatcagcgaccactatcccgttgaagtgatgttgaag

SEQ ID NO: 315669 - DNA, 846 bp, Artificial Sequence
  derived and/or modified sequence
atgaggggcatgaaactgctgggcgctttgctggcgctggccgcattactacagggtgcggtcagtctgaagatcgcagccttcaacatccagacctttggcgagactaagatgagtaacgctaccctggtgtcgtacatcgttcagattttatctcgctacgacatagcccttgttcaggaagtgagagattctcacctgactgccgtcggcaagctgcttgacaatctaaaccaggacgcacctgacacctaccattatgtggtgagtgaaccactgggcagaaatagttacaaggaacggtatctgtttgtgtacagacccgaccaagtgagcgccgtcgatagctactactacgatgatgggtgtgaaccgtgtggcaacgataccttcaaccgggagcctgctattgtgcgcttctttagccgtttcaccgaggtccgggaattcgctatcgtgcctctccacgcagcacctggagatgctgtggcagaaatcgacgcactctatgacgtgtatctagacgtgcaggaaaaatgggggttagaggacgtaatgttaatgggcgatttcaatgctggctgctcatatgtgaggccctcccagtggtcttcaatccggctgtggacatctcccacattccagtggttaatccccgactccgctgacactacggcgactcctactcactgtgcttatgaccgcatcgtggttgcgggtatgctgctcagaggtgctgtggttcctgacagtgccttaccctttaacttccaggccgcctatgggttatctgaccagctcgctcaggccatctctgatcattaccctgtcgaagtgatgctgaaa

SEQ ID NO: 315670 - DNA, 846 bp, Artificial Sequence
  derived and/or modified sequence
atgcgtggaatgaagctcttgggagcacttctcgcccttgctgcacttcttcagggcgcagtcagcctgaagatagcagcattcaacatccaaacctttggtgagactaaaatgtcgaacgcaaccctggtatcctacatagtgcaaatactttcccgctacgacatcgcacttgtccaggaggtgagagatagccacttgaccgcggtgggaaaactgctcgacaacctcaatcaagacgcacctgatacttaccattacgtggtgtcggagccccttgggcgcaactcctacaaagaacgttatcttttcgtctaccggcctgaccaagtgtccgcggtggattcgtactactacgacgacgggtgtgaaccatgtggaaatgacacctttaaccgagagcccgcaattgtgcgctttttctcgcgttttaccgaggtgcgagaatttgccattgtgccccttcacgccgctcctggtgacgccgtcgcagaaattgacgcactctacgacgtgtacctcgatgtccaagaaaagtggggtttggaggacgtgatgctgatgggagatttcaacgcagggtgctcctacgtgcgcccaagccagtggagcagcatccgactttggacttcaccaacgtttcaatggctgatcccagattcagcagatactacggctactccgactcattgcgcctacgatcgtatcgtggtcgccggaatgctgcttagaggggccgtggtgccggattcggccctgccctttaacttccaggccgcctacggtctgtccgatcaactggcccaagccatctccgatcattatcctgtggaagtgatgcttaag

SEQ ID NO: 315671 - DNA, 846 bp, Artificial Sequence
  derived and/or modified sequence
atgcgggggatgaagttgttaggggctctcctggctctggccgcgctccttcagggtgcggtcagcctgaaaatcgctgctttcaacattcaaacgtttggggagaccaagatgtcaaacgccaccctcgtgagctatatagtacagattctgtcgcggtacgatatagccctggtgcaggaggtgagggactctcatttaacagcagtgggtaaactgctggacaacctgaaccaggacgcccctgatacctatcattacgtggttagtgagcccctcggaaggaactcctacaaggagagatacctgttcgtgtacagacccgatcaggtcagcgccgtcgatagttactattacgatgacggatgcgagccatgtggcaacgacacctttaaccgcgagccagcgatcgtgcgcttcttctcgcgcttcacagaagtgagggagttcgccatagtgcctttgcacgctgcccccggtgacgccgtggccgagatcgatgccctgtacgatgtttacctggacgtccaggagaaatggggcctggaggatgttatgctgatgggtgactttaatgcgggctgtagttacgtacgcccgagccaatggtcgtcgattcggttgtggacctctccaacctttcagtggctcatccctgactccgccgataccacggcgactcctacgcattgcgcatacgaccgaatagtcgtggcaggaatgctcctgagaggtgcagtcgtgccagactccgctctgcccttcaactttcaggcagcctatggcctgagcgaccagctggcgcaggcaatttccgatcactaccccgtggaggtgatgttaaaa

SEQ ID NO: 315672 - DNA, 846 bp, Artificial Sequence
  derived and/or modified sequence
atgcggggcatgaagctgctcggcgcactccttgccctggctgcgctgctccaaggagctgtgtcactcaaaatcgcagcattcaatatccagactttcggagaaaccaagatgtccaatgccactctggtgtcatacattgtccagattttgtcccgttatgacatcgcgctggtccaagaggtgcgcgactcccacctgacggccgtgggtaaacttctggataacctcaaccaggacgcaccggatacctaccactacgtcgtctcggaacccctgggacgtaactcatacaaggaacgctacctgttcgtctaccggcctgaccaagtctccgctgtggactcgtactattacgatgacgggtgcgaaccctgcggcaacgacactttcaatcgggaacctgcaatagtgcgctttttctcacggttcaccgaagttagggagttcgccatcgtgccgttgcacgcggcaccgggagatgccgtggcagagatcgatgcgctgtacgatgtgtatctcgatgtgcaggagaagtggggactggaggacgtcatgttgatgggcgatttcaacgcgggctgttcatatgtccgcccttcccagtggtcatcgatccgactctggacctccccgactttccagtggctgatcccagacagcgcagatactaccgcgaccccaactcattgcgcttacgaccgcatcgtcgtcgctggtatgctgctgcggggagccgtcgtgccggactcggcgctccctttcaactttcaagcggcctacgggctgtccgaccaactggcccaggcgatcagcgatcattacccggtggaagtcatgctcaag

SEQ ID NO: 315673 - DNA, 846 bp, Artificial Sequence
  derived and/or modified sequence
atgcgcggcatgaagttgttgggcgcacttctggcccttgccgcgctgctgcagggggcagtgagtttgaagattgctgcctttaacatccagacctttggcgagactaaaatgtccaatgctaccttagtgtcctatatcgtgcagattctgagccgctacgatatcgctctggtgcaggaagttagggattcgcatctaacggctgtcggcaaattactcgataacttgaaccaggacgcccctgacacataccattacgttgtttcagaacccctcggccgcaactcatataaggaacggtatctgtttgtttatcgacctgatcaggtgagcgcggttgatagctactactacgacgacgggtgtgagccttgcggtaacgacacatttaacagggaacccgccatcgtccgattcttttctcgcttcaccgaggtgagagagttcgctattgtacctttgcacgccgccccgggcgatgccgtggctgaaatagacgcgctttacgatgtttacctggatgttcaagaaaagtggggcctggaagatgtgatgctgatgggggatttcaacgcaggatgtagttatgtgagaccatcccaatggagttccattcggttgtggactagccctaccttccagtggttgattccagattccgcagataccacagccacccctacgcattgcgcgtatgaccgtatagtcgtggccggcatgcttctgcgaggcgcagttgtgccagacagcgccctcccctttaatttccaggctgcttacggcctgagcgaccagctagcccaagccattagcgaccattaccctgtcgaggtgatgttaaaa

SEQ ID NO: 315674 - DNA, 846 bp, Artificial Sequence
  derived and/or modified sequence
atgcgcggtatgaaactcctgggcgccctcctggcgctcgccgcgcttctgcaaggcgcggtttccctgaagatcgccgcctttaacatacaaacctttggggagactaaaatgtcgaacgcgaccctggtgtcatacatcgttcaaattctgtcccggtacgacattgcgctcgtccaggaagtgcgcgattcgcacctgactgcagtcggaaaactcctcgacaacctcaaccaggacgcacctgacacttatcactacgtggtcagcgaacccctgggccggaactcgtacaaagaaaggtacctcttcgtctaccggccggaccaggtgtccgccgtggattcgtattactacgatgatggatgcgagccctgcggaaatgataccttcaaccgggaacctgcaattgtgagattcttcagccggttcactgaagtccgggagtttgcgatagtgccacttcatgccgctcctggggatgccgtggcagagatcgatgccctgtacgacgtctacctggatgtgcaagaaaagtggggcctggaggacgtcatgctcatgggagacttcaacgcaggatgttcatacgttcggccgtcccagtggtcctccattcgcctgtggacctcgcctactttccagtggctgatcccagacagcgccgatacgactgctacccccacccattgcgcttacgacaggatcgtggtggcaggaatgcttctgagaggagcagtcgtccctgactcagcactgccgttcaacttccaggcagcctacggcctgagcgaccagctcgcccaggccatctcagaccactacccagtcgaggtcatgctgaaa

SEQ ID NO: 315675 - DNA, 846 bp, Artificial Sequence
  derived and/or modified sequence
atgagaggcatgaagctcctaggggcactcctcgcgctcgccgcactgctccagggggcagttagtctgaagatcgccgcatttaacatccagacatttggggagacaaagatgagcaacgcgactctagtctcatacatcgtgcagatcctcagccggtatgatattgccctggtgcaagaagtcagagatagccacctgacagcagtgggaaaactactcgacaacctgaaccaggacgctccagacacctatcattatgtggtctcagagccactcgggaggaacagttacaaggaaagatacctcttcgtctacaggcccgaccaggtctcagcagtagacagctactattacgatgacggatgcgagccgtgcggtaacgatactttcaacagggaaccagcgatcgttaggttcttttctcgcttcaccgaagtcagagaatttgccatagtccctcttcatgcagcccctggcgatgctgttgccgaaattgacgccctctacgacgtctaccttgacgttcaagagaagtggggcctcgaagacgtcatgctcatgggagatttcaacgctggctgctcctacgttaggcccagtcagtggtcgtctataagattgtggaccagccccacattccagtggctgattcccgacagcgcagatacaaccgccactcctacccattgcgcttacgataggatagttgtggccgggatgctcttgcggggcgctgtggtgccagacagcgctctgccttttaattttcaggcagcctatggcctgagcgatcaactcgcgcaagcaatcagtgatcactaccccgttgaagtcatgctgaag

SEQ ID NO: 315676 - DNA, 846 bp, Artificial Sequence
  derived and/or modified sequence
atgagagggatgaaactcctcggcgcattgctggccctcgctgctctactacagggtgcagtaagccttaagatagccgcctttaacatccaaactttcggtgagacaaaaatgtctaacgcaaccctggttagctacattgttcaaatcctgtcacgttacgatatcgccttagtccaggaggtcagagatagccatctcacagcagttggaaagctccttgataatcttaatcaggacgcaccggatacttatcattatgtcgtcagtgaacccctagggcggaactcatacaaggagcgatacctatttgtgtatcgacctgatcaagtgagcgccgtggattcttactactatgacgacggctgtgagccttgcgggaacgatacttttaacagagaacccgcaatcgtgcgcttcttcagccgctttactgaggtgcgggaatttgctattgtgcctttgcatgccgcccccggagacgccgtcgcagagattgatgctctgtatgacgtctatctcgacgtgcaggagaaatggggtctggaggacgtgatgttgatgggagattttaatgctggctgctcctatgtgcgcccttcacaatggagttcaattaggctgtggacatcgccaacgtttcagtggctgatccccgacagtgctgataccactgccacaccgacccactgcgcctacgatcggatcgtggtcgctgggatgttgttgcggggagctgtggtgccagactcagccctgccattcaatttccaggctgcctatggcctgagcgaccaattggctcaggctatctccgaccactaccccgttgaagtcatgctgaag

SEQ ID NO: 315677 - DNA, 846 bp, Artificial Sequence
  derived and/or modified sequence
atgcgggggatgaagttgttgggtgcccttctcgcgctcgctgccctgcttcagggggcagtgagcctgaaaatcgccgcgtttaatatccagactttcggcgagactaagatgtcaaacgccaccctcgtctcctatatcgtacagatcctgagcaggtatgatattgctctggtccaggaggtgcgggattcccatctgacagccgtgggcaagttacttgataacctcaaccaggacgcccctgacacataccactacgtcgtttctgagccactgggacgcaattcatacaaggagagatacctgttcgtgtatcgaccagaccaggtcagcgcggttgatagttactactacgatgacgggtgcgaaccttgtggaaacgatactttcaacagggagcccgccatcgtgaggttctttagcagattcaccgaggtacgagaattcgccatcgtgccgctccatgcagcccctggagatgccgtcgctgaaatcgacgctctctatgacgtctacctggacgttcaggaaaagtggggcttggaggacgttatgttaatgggagactttaacgctgggtgctcctacgtgagaccttcccagtggagctcaattagattgtggacttcacctactttccagtggttaataccagacagcgctgacacgactgctacccctacacattgcgcatacgaccgtatcgtggtggcggggatgttattgaggggagccgtagtccctgactccgccctgccgtttaatttccaggccgcatatggcctttctgaccaactcgcacaggcaatctctgatcattatcctgtggaggtgatgctaaag

SEQ ID NO: 315678 - DNA, 846 bp, Artificial Sequence
  derived and/or modified sequence
atgcggggaatgaaactgctcggggcgctgttggcactggcggccctcctgcaaggagccgtgtccctgaagatcgcagctttcaacatccaaaccttcggcgaaacgaagatgtccaacgccaccctggtgtcctacatagtgcagatcctgtcccgctacgacatcgcacttgtgcaagaagtgcgcgactcgcatctgactgccgtcggtaaactcctggacaaccttaaccaggacgctccggacacctatcactacgtggtgtccgaaccactcggacggaacagttacaaggagcgctacctctttgtgtaccgccctgaccaggtgagcgcggtggactcgtactactacgacgacggctgcgagccttgcggaaatgatactttcaaccgcgaaccggccattgtgcggttcttttcccgcttcactgaagtgagggagttcgccattgtgcctctccatgccgcgccgggagatgctgtggcagagatcgacgccctctacgatgtgtacctggacgtgcaagaaaagtggggacttgaagatgtgatgctgatgggggactttaatgccggatgcagctacgtcaggccgtcgcaatggtcatcaatccggctctggacctctcctactttccaatggctgatcccggattccgcagatactaccgcgaccccaacccactgcgcatacgatcgaattgtcgtggccggaatgctccttcgcggagcagtcgtgccggatagcgccctgccgtttaacttccaggcggcgtacggactgtcggaccaactggcgcaggccatctctgatcactatccggtggaagtgatgctcaaa

SEQ ID NO: 315679 - DNA, 846 bp, Artificial Sequence
  derived and/or modified sequence
atgcgcggtatgaagctgttaggagcgctattggctttagccgccttgttgcagggcgctgtgagtctgaagatcgcggcattcaatattcagaccttcggcgaaaccaagatgagtaacgcgacgctggtctcttatattgtccaaattctctctaggtacgatatagctctcgtgcaagaagtgcgtgattcgcacttgacggctgtgggcaagctattagataatcttaatcaggatgcgccggatacatatcactacgtcgtgtccgagccgctgggaaggaactcgtacaaagagcgctacctttttgtttatcgcccagaccaggtctccgcagtggattcgtactattatgacgacggatgcgaaccatgcgggaatgataccttcaaccgtgaaccggccatcgtgcgattcttctcccggttcactgaagttagagagtttgccatcgtcccgttgcatgctgctccgggcgatgccgttgcagagattgatgcgctgtacgatgtgtatctagacgttcaggagaagtgggggttggaggacgtgatgctgatgggagacttcaacgctggctgctcgtatgtgcgcccgagccagtggagttctatccgactgtggaccagcccaacgttccagtggctgatacccgacagtgcggacacaactgccactccgacgcattgtgcctacgatcggattgtggtcgcaggtatgctgctccggggagccgtggtgcccgatagcgcactgcccttcaatttccaggcagcatatggcctaagcgaccaactggcacaggcgatctccgaccactatcccgtggaagtgatgttgaag

SEQ ID NO: 315680 - DNA, 846 bp, Artificial Sequence
  derived and/or modified sequence
atgagaggaatgaaacttctcggagcgctgctcgcattggcagctctgttacagggcgcggtctccctaaagatcgcggcctttaacatccaaacctttggcgagacaaagatgtcaaacgcgactttggtaagttacatcgtccagattctgtcccgttatgatattgccttggtgcaggaagtgcgcgacagtcatctaacagccgtcggcaagcttttggacaacctgaaccaggacgctccggacacttaccattatgtcgtaagtgagccgctgggccgcaactcttataaagagcggtatctgtttgtgtatagaccagaccaagtctctgctgtggatagttattactatgatgatggatgcgagccgtgcggcaatgacactttcaatcgggagccagcgattgtgcgcttcttttctcgtttcaccgaggtccgggagttcgcgatcgtcccgcttcacgcagctcctggagacgcagtggccgagatcgacgcgttatacgacgtctaccttgacgtccaggagaagtgggggctggaggacgtgatgctgatgggggactttaatgccgggtgcagctatgtcaggcctagccaatggtcctctatcagactgtggacatctcccacattccagtggttgatcccagacagcgccgatactacggctacacctactcattgcgcctatgatcgcattgtggtggctgggatgttattgcgaggggcggtagtacctgattccgcactacccttcaacttccaggcagcctacggtctctcggaccagctcgcacaggcgatatccgaccactatcccgtcgaagtgatgctgaaa

SEQ ID NO: 315681 - DNA, 846 bp, Artificial Sequence
  derived and/or modified sequence
atgcgcggcatgaaacttctgggtgctcttctcgccctcgccgccctgctgcaaggagctgtctctctgaagatcgcggccttcaatatccagacctttggagagactaagatgtctaacgccaccctcgtctcctacatagtgcagatcctctcccgctacgatattgcccttgtgcaggaggtgcgggacagccacttgactgcggtcggaaagctgctggataacctgaatcaggatgcccctgacacgtatcactacgtggtgagcgaaccgctggggcgcaactcctacaaagaaagatacctttttgtctacagaccggaccaggtgtctgctgtggactcatactactacgacgatggttgtgagccgtgcggaaacgacacctttaatcgtgagcccgctattgtcagattcttctcgcggttcactgaagttcgagagttcgcgatcgtgccattgcacgccgcaccgggagatgcagtagcagaaatcgacgcgttgtacgacgtgtacctcgacgtccaagaaaagtggggcctggaggacgtgatgctgatgggagactttaacgcaggatgcagctacgtaaggccatcccagtggagctccatccgcctctggaccagccctactttccaatggctgatcccagactcggctgatactaccgctacccccactcattgcgcctacgatcgcatcgtggtggctggcatgctgctcaggggggcagttgtgcctgattccgccctccctttcaacttccaggccgcctatggtctgtcggaccaacttgcacaggcaatctcggatcattacccagtggaagtgatgcttaag

SEQ ID NO: 315682 - DNA, 846 bp, Artificial Sequence
  derived and/or modified sequence
atgaggggcatgaagttgctgggggccctgctcgcactggctgcccttcttcaaggggccgtgtcccttaagatagctgcctttaatattcagacattcggtgaaactaagatgtctaatgcaaccttagtatcttacattgtgcaaatcctctcacggtatgacatcgctctggtccaggaggtgagagatagtcacctgacagccgtcggcaaactgttggacaacctcaaccaggacgccccagacacttatcattatgtggtgagcgagcctttaggtcgcaacagttacaaagaacgttacctatttgtatacaggccagatcaagtgtcagccgtggattcttactactacgatgacggctgtgagccatgtggtaacgacacatttaatcgagaacctgccattgtgcggttcttttcccgattcactgaagtccgtgagtttgccatcgtgcccttgcacgcagcccccggcgacgccgtggccgagattgacgccctgtatgacgtgtacctcgacgtccaggaaaaatggggcctcgaggatgtgatgctcatgggagactttaacgctggctgttcatatgttcggccaagtcagtggagcagtatccggctctggacctccccaacctttcagtggttgatacctgattctgcagacaccactgcgacacccacacattgcgcttacgaccgcatcgtggtcgctggaatgctccttaggggcgcggtggtgccggattcagctctcccttttaattttcaggccgcatatggactgtccgaccagctggctcaggctattagcgaccattatccagttgaagtaatgctgaag

SEQ ID NO: 315683 - DNA, 846 bp, Artificial Sequence
  derived and/or modified sequence
atgagagggatgaagctgctgggggcattactggcattggcagccctcttgcagggagccgtctccctcaagatcgcagctttcaacattcaaacattcggagagaccaagatgtccaatgcaacgctggtgagttacattgtgcaaatcctgagccggtatgatatagccctggtgcaagaagtgcgggactctcatctcacagccgttggtaaattgctagataatctgaatcaggatgccccagacacgtatcattatgtggtaagcgaaccgctgggtaggaattcatacaaggagcgctatctctttgtgtaccgcccagaccaggtcagtgcagtggattcctactattacgacgacggatgcgagccttgtggaaacgacacattcaatagggaacctgccatcgtgaggtttttctctcggttcaccgaagtgcgggaatttgccatcgtaccactacacgccgccccaggagatgccgtggctgaaatcgacgccctgtatgatgtatacttagatgtgcaggaaaagtggggtctggaagatgtgatgttaatgggagattttaacgctgggtgcagctatgtacggccctcgcagtggtcatcgatccgactgtggacctcacccacttttcagtggctaattcccgactccgccgacacaacagctaccccgactcactgcgcctatgaccgaatcgtggtggccgggatgctgctgcggggagcagtagttccagactcagccctgccttttaattttcaggcagcatatggactaagtgatcagctggcccaggcaataagcgatcactatccggtggaagtgatgctgaag

SEQ ID NO: 315684 - DNA, 846 bp, Artificial Sequence
  derived and/or modified sequence
atgagaggaatgaagttgctcggagcgcttcttgctcttgcggctctgctccagggcgcggtgagtctaaagattgctgcctttaacatccagactttcggggagactaaaatgagcaacgccactctggtgagctatattgtacaaattctttcacggtacgatatcgcgttggtccaagaggtgcgcgactctcaccttaccgcagtcggcaagctcctggacaacctgaaccaagacgcacccgatacttatcactatgtggtttccgaacctttgggccggaattcctacaaagagagatacctgtttgtctatcgcccggatcaggtgtctgcggttgactcttactactacgacgatggctgtgaaccttgtggcaacgataccttcaaccgagaacctgccattgtgaggtttttttcccgtttcactgaggtaagggagttcgccatcgttccactgcacgcagctcctggcgacgccgtcgccgaaatcgatgcactatatgatgtatatctcgatgtacaggaaaagtggggcctcgaggatgtgatgctaatgggcgatttcaacgccggttgctcgtacgtccgtcctagtcagtggtcctctattcgtctgtggactagtccgacttttcagtggctgatccctgactctgctgataccacggccacacccacgcactgtgcttacgatcggatcgtcgtagctggcatgctgcttagaggtgctgtggtgcccgacagcgctttacctttcaacttccaagctgcctatggtctgtcagaccagttggcacaggcaatctccgatcactaccccgtggaggtgatgctcaag

SEQ ID NO: 315685 - DNA, 846 bp, Artificial Sequence
  derived and/or modified sequence
atgagaggcatgaaactgctcggagcactgctggccctcgcggcgctgctgcaaggcgcagtgtcactcaagatcgccgccttcaacatccagactttcggtgagacgaagatgtcaaacgcaactttggtgagctacattgtccagatcctcagcagatacgatatcgccctggtgcaggaagtcagggatagccacctgactgcagtcggaaaactgctggacaacctgaatcaggacgcccctgacacgtaccattacgtggtttcggaacctctcggaagaaactcctacaaggagcgatacctcttcgtgtaccggcccgatcaagtctcggccgttgactcgtactactacgatgatggatgcgaaccctgcgggaacgatactttcaaccgggaaccagcaatcgtgcgcttcttctcccggttcactgaggtgcgcgaatttgccattgtgccgttgcacgcggcgccgggagacgccgtggccgaaatcgatgcgctgtacgatgtgtaccttgatgtgcaggaaaagtggggtctggaggacgtcatgctgatgggagatttcaatgccggatgcagctacgtccgcccgtcgcagtggtcctccattcgcctgtggactagcccgaccttccagtggctcatcccggactccgccgacaccaccgcaactccaacccattgtgcttacgaccggatcgtggttgcggggatgctcctgcgaggagcagtcgttccagattctgctctgccattcaacttccaagcagcctacggcttgtccgaccaactggcacaggctatctcggatcactacccggtggaggtcatgttgaaa

SEQ ID NO: 315686 - DNA, 846 bp, Artificial Sequence
  derived and/or modified sequence
atgcgcggtatgaaattgctaggggccctgctggcgctagccgctctgctccagggagcagtcagcctgaagattgccgcttttaacattcaaacttttggtgagactaaaatgtccaacgctaccctcgtctcttatatagtccaaatcctctcccgctacgacatcgctctggtccaagaggtaagagatagccatctgacagccgtgggcaaactgctcgacaatctgaaccaggacgcaccagacacttaccactatgttgtgtccgagccactgggccgaaattcgtacaaggaaaggtacttgtttgtttatcggccagatcaagtgagtgccgtagatagctattactatgatgacggatgcgagccctgcggaaacgataccttcaacagggagcccgccattgtgaggttcttcagccgattcacagaggtgcgtgagtttgccatagttccattacatgcagctcccggcgacgctgtcgcagagatcgatgcgctgtacgatgtgtacttggatgtgcaggaaaagtggggcttggaggatgtgatgctgatgggtgacttcaacgcaggatgctcctacgtccgaccttcacagtggtcatccattcgcctgtggacttcgccgacctttcaatggctcatccccgatagcgcagatacaacagcaacccctactcactgcgcttatgatcgcatagtagtcgccgggatgctactgagaggagctgtcgttccagactctgccttgccattcaattttcaggccgcgtatggattgtctgatcagcttgctcaggcaattagcgatcattacccagttgaagtcatgctcaaa

SEQ ID NO: 315687 - DNA, 846 bp, Artificial Sequence
  derived and/or modified sequence
atgcgaggtatgaaactattaggtgcgttactagcgttagcggcgctattacaaggtgcggtatcgttaaaaatagcggcgtttaatatacaaacgtttggtgaaacgaaaatgtcgaatgcgacgttagtatcgtatatagttcaaatactatcgcgatatgatatagcgctagttcaagaagtacgagattcgcatctaacggcggtaggtaaattattagataatctaaatcaagatgcgccggatacgtatcattatgtagtatcggaaccgttaggtcgaaattcgtataaagaacgatatttatttgtatatcgtccggatcaagtatcggcggtagattcgtattattatgatgatggttgtgaaccgtgtggtaatgatacgtttaatcgagaaccggcgatagtacgttttttttcgcgttttacggaagttcgtgaatttgcgatagttccgttacatgcggcgccgggtgatgcggtagcggaaatagatgcgctatatgatgtttatttagatgtacaagaaaaatggggtttagaagatgttatgctaatgggtgattttaatgcgggttgttcgtatgtacgaccgtcgcaatggtcgtcgatacgactatggacgtcgccgacgtttcaatggttaataccggattcggcggatacgacggcgacgccgacgcattgtgcgtatgatcgaatagtagtagcgggtatgttattacgtggtgcggtagtaccggattcggcgctaccgtttaattttcaagcggcgtatggtttatcggatcaactagcgcaagcgatatcggatcattatccggttgaagtaatgctaaaa

SEQ ID NO: 315688 - DNA, 846 bp, Artificial Sequence
  derived and/or modified sequence
atgcgaggaatgaagctgcttggcgctctgctcgccctcgctgctctgctccagggtgccgtttctctaaaaatagccgcatttaatatccagacatttggcgagacaaagatgagtaatgcaaccctggtgtcttatattgttcagattttatctcggtatgacattgctctcgtacaggaggttagggactctcatctcactgctgtgggaaagttattggataacctgaatcaggatgcaccagatacatatcactatgtggtgtccgagcctctggggagaaattcctacaaggaaagatacctgtttgtctatcgcccagaccaggtgtccgccgtcgactcatattactacgacgacgggtgcgagccttgcggcaatgatacattcaatagggaacctgccatagtgcgtttcttctctcgctttaccgaggtccgagagtttgcaatcgtgccactccatgccgctcctggcgatgctgtcgctgaaatagacgccctgtacgatgtgtacttagacgtgcaggagaagtggggcctggaggacgtgatgctgatgggtgatttcaatgcaggctgtagttacgtgcgtcctagccagtggtcttcaattagactatggacctccccaacttttcagtggctgatccccgattctgcagacactaccgcaacaccaacccactgcgcctacgatcgcattgttgtggcaggaatgcttctgaggggcgctgtggttcccgattccgcattaccctttaacttccaggccgcttacgggttgtctgatcagctggcccaggccatctccgatcactaccctgtggaagtgatgctcaag

SEQ ID NO: 315689 - DNA, 846 bp, Artificial Sequence
  derived and/or modified sequence
atgcgtgggatgaagcttcttggggctctgctggctttggcagccctgctacaaggggcagtatctctcaagatcgcagcattcaacatccagacatttggagagactaaaatgtcaaacgcaaccttggtgagttacatcgtgcaaatcttgagccgctacgatatcgcgctcgtgcaggaagtaagggacagccaccttactgctgtcgggaaactgctggacaacctgaatcaggacgcccccgacacgtatcattatgttgttagcgagccccttggacgtaactcttacaaggaaaggtatttgttcgtatacaggcccgaccaggtgtccgcagtcgattcatattactacgacgacgggtgcgagccatgtggcaatgatacttttaatcgagagcctgctatcgtcaggttcttctcccgcttcacggaagttcgggaatttgccatcgtgcctctgcacgccgcacccggcgatgcggttgccgagattgatgccctgtacgatgtgtacttagacgtgcaggagaaatgggggctcgaagacgtcatgctgatgggagacttcaacgctggctgtagctatgtgaggccctcgcagtggtcttccatccggttatggacctcacccacattccaatggctcatccccgacagcgcggatacaaccgccacccctacccattgcgcttacgacaggattgtggttgcagggatgcttctcaggggcgccgtcgtgcctgattctgccctgcctttcaatttccaggcggcatatgggttgtccgaccagctggcgcaggccatttccgatcactaccctgtagaagtgatgttgaag

SEQ ID NO: 315690 - DNA, 846 bp, Artificial Sequence
  derived and/or modified sequence
atgcgaggcatgaaattgctgggagcgctgctcgccctggccgctctcctacaaggcgcagtgtcgctgaaaattgcggcattcaatattcagaccttcggcgagaccaagatgtcgaatgccaccctggtgagttatattgtgcaaatcctgagccggtacgatattgctctggtgcaggaggttcgggattcccatttaaccgccgtgggcaagctgttggataacctcaaccaagatgcccctgatacttatcattacgtggtttccgagcccctgggcagaaactcttataaggaacggtacctgtttgtgtatcgcccagaccaagtgtcagcagtcgactcctactactacgatgatggctgtgagccctgcgggaacgataccttcaaccgcgaaccagccatagtgcgcttcttttcacgattcaccgaggtaagggagttcgccattgtgccccttcatgccgcaccaggtgacgcggtcgccgagatagacgctctgtacgatgtctacctggatgtccaggagaaatggggactggaggatgtgatgctgatgggggatttcaacgccggctgttcatacgtcaggccgagccagtggtcctccatacgactctggacttcccctacatttcaatggctcatccctgacagcgcggacaccacggctacacccacccactgcgcatatgacagaattgtggtagccggcatgctcctccgcggcgcagttgtgccagacagcgccctaccattcaacttccaggcggcgtacgggctctctgaccagttggcacaggccatatccgatcattatcccgtggaggtgatgctgaag

SEQ ID NO: 315691 - DNA, 846 bp, Artificial Sequence
  derived and/or modified sequence
atgagaggtatgaaactgctgggcgccctgctggccttggcagccctgttgcagggtgccgtcagcctcaagattgcggccttcaacatccaaaccttcggtgaaactaagatgtccaatgccactctggtgtcctacatcgttcagattctgagtaggtatgatattgcccttgtccaagaggtccgggatagtcacctgacggctgtcggcaaactgttggacaacttgaatcaggatgcaccggatacttaccactacgtggtttctgagcctctcggaaggaactcctataaggagagatacctgttcgtctaccggcccgatcaggtgagcgccgtggacagttactattatgacgacgggtgcgaaccctgcggcaacgatacttttaatcgggagcctgccattgtacgatttttttcacggtttaccgaggtgcgggaattcgccatcgttcccctccacgcagcccccggggacgcagtcgccgaaatcgatgccttgtacgacgtgtatctggacgtgcaggagaagtggggcctcgaggatgtcatgctgatgggagatttcaacgcagggtgcagctacgtccgcccaagccagtggtcatcaattagactgtggaccagtccaaccttccaatggctgattcccgactcagcggataccactgccactccaacacattgcgcctacgacaggattgttgtagcggggatgttgctgcggggggctgtggtgcccgattctgccctgccctttaacttccaggccgcctacgggttgagtgaccaactcgcacaggctatttccgatcattatcccgtggaagtaatgttgaaa

SEQ ID NO: 315692 - DNA, 846 bp, Artificial Sequence
  derived and/or modified sequence
atgagaggcatgaagctcctgggtgctcttctggcactcgcggcactgcttcagggagctgtctcgctcaagattgcggctttcaatatccaaacctttggagagactaaaatgtccaacgctaccctggtgtcgtacatagttcaaatactttcgagatatgacattgcattggttcaggaggtcagagattctcaccttactgccgttggaaagctgttggacaatctgaatcaagacgctccagacacttatcattacgtcgtctccgaacctctgggtcgcaatagctacaaagagcgatacttgtttgtgtaccggcctgatcaggtgtcagcagtggactcgtactactacgatgatggctgcgaaccgtgtggaaacgataccttcaacagggaacctgcaatcgttcgctttttcagcaggttcaccgaggtcagggaatttgctatcgtgccattgcacgcagccccaggagatgccgtcgctgaaatcgatgcactttacgatgtgtaccttgatgtgcaagaaaagtgggggcttgaagatgtgatgctgatgggggactttaacgcaggttgttcatacgtgcgaccgtcacagtggtcgagcatccgcttgtggaccagccctacttttcagtggcttattcctgattcggcagatactacggcgaccccaactcattgcgcctacgatagaattgtggtcgcaggtatgcttcttcgcggcgcagtggtgcctgactcggcactgcccttcaacttccaagcagcatacggtcttagcgatcagctcgcacaagcaatttcggatcattaccccgtggaggtgatgcttaag

SEQ ID NO: 315693 - DNA, 846 bp, Artificial Sequence
  derived and/or modified sequence
atgcgaggaatgaagctcctgggcgcacttctggcgctcgcggcacttctgcaaggagcagtgtctttgaaaattgctgccttcaatatacagacctttggggaaactaagatgtcgaatgctacccttgtctcatatatcgttcaaatcctcagtagatacgatatcgcgctcgtgcaggaagtgcgcgactcacaccttaccgccgtgggaaagctgctcgacaacctcaaccaggacgcaccggatacctaccattatgtggtgagcgaaccacttgggaggaattcctacaaggaaagatacctttttgtgtacagaccagatcaggtgtcggccgtggattcgtactactacgacgatggttgcgaaccctgtggaaacgatacgtttaacagagaacctgcaattgtgcggtttttctcgcgttttaccgaggtgcgggagtttgccattgtgccacttcacgcagcgcctggagatgccgtggcagaaatcgatgccctttacgatgtgtacctcgacgtccaggaaaagtgggggctggaagatgtgatgcttatgggcgacttcaacgccgggtgttcttacgtcagaccttcccagtggagctccatcagactttggacttcaccaacgttccagtggctgatcccagattcagcagatactactgcaactcctacccattgcgcgtacgatcgtatagtggtggccgggatgttgcttaggggagcagtggtcccagactcggctctgccatttaactttcaggcagcatacgggttgtccgatcagctggctcaagccatttcggatcattacccggtggaagtgatgctgaag

SEQ ID NO: 315694 - DNA, 846 bp, Artificial Sequence
  derived and/or modified sequence
atgcgcggtatgaaactgctgggggcactgctcgcactcgctgccctgctgcagggtgccgtgagcctgaagatcgccgctttcaacatccagactttcggcgaaactaagatgtcgaacgcaaccttggtcagttacattgtgcaaatcctctcgcggtacgatatcgcactggtgcaggaagtgcgggactcacatctcacggccgtgggaaagctcttggacaatctcaaccaggacgcccccgacacttaccattacgtggtgtccgaaccgctcggaaggaattcgtacaaagaacggtacctgttcgtgtatcgcccagaccaggtgtcagcggtggattcctactattacgacgacggatgcgaaccatgcggaaacgatactttcaatcgggagccagccatcgtgcgcttcttctccagattcactgaggtgagggaattcgccatcgtgccactgcatgccgcaccaggagacgcggtggctgaaattgacgctctgtacgacgtgtacctcgacgtgcaagagaagtggggacttgaggatgtgatgttgatgggcgacttcaatgccggttgcagctacgtgcggccgtcgcagtggtcgtccatccgcctgtggactagcccgaccttccagtggctgattccggacagcgccgacaccaccgctaccccgacccactgcgcatacgacagaatcgtggtggccgggatgcttcttaggggcgcggtggtgcccgactcggccctgccattcaacttccaagcggcctacggattgtcggatcaactggcgcaggcgatctcagaccactacccggtggaggttatgctcaag

SEQ ID NO: 315695 - DNA, 846 bp, Artificial Sequence
  derived and/or modified sequence
atgagaggaatgaagctccttggcgccctccttgccctcgctgctcttctgcagggagccgtaagcctgaagatcgccgccttcaatatccaaacattcggtgagaccaagatgtccaacgctacattggtttcatacattgtacagatcctgtcaaggtacgacatcgccttggtgcaggaagtgcgtgacagtcaccttacagcagttggaaaactcttggataatctgaaccaggacgcccctgacacatatcactatgtggtctccgaaccacttggtcgtaattcatacaaggagaggtatctgttcgtctacagaccagatcaagtatcagcagttgattcttactattacgatgacggctgtgaaccttgcggtaacgatacctttaaccgcgagcctgctattgtgaggttcttctccagattcactgaagtccgtgaattcgcaatcgtccccctccatgccgccccaggcgatgccgtagcagagattgatgccctttatgatgtttacctcgatgttcaggaaaaatggggtctcgaggacgtcatgcttatgggtgacttcaacgctggctgttcttacgtccgcccaagccaatggtcttctatccgtctgtggacttctcccacttttcagtggctgatacctgacagcgctgataccaccgctaccccaacccactgcgcatatgacagaattgtagtagccggcatgctgctgcgtggtgctgtagtcccagactcagcactccccttcaattttcaggcagcttacggactgtcagaccagctggcccaggctatctccgatcactacccagtcgaagtaatgcttaag

SEQ ID NO: 315696 - DNA, 846 bp, Artificial Sequence
  derived and/or modified sequence
atgaggggaatgaagctgcttggtgcgctcctggcactggcagccctcctgcaaggagccgtgtccctgaaaattgcggcctttaacatccaaacctttggtgaaactaagatgagcaacgccacgctcgtgtcgtacatcgtccagattctttcccgctatgacatcgccctcgtgcaggaagtgagagattcgcatctgaccgctgtcggaaaactgctggacaatcttaaccaggatgcgccggacacttaccattacgttgtgtcagagcctctgggccgcaactcgtacaaggaacgatacttgtttgtttatagaccggatcaagtcagcgcagtggactcctactactacgacgacggatgcgaaccttgtggaaatgataccttcaatagggagcctgcgatcgtccggttcttctcacgcttcactgaggtgcgggaattcgcaatcgtgcccctccacgcagctccaggcgacgcagtggctgaaatcgacgcgctgtacgacgtgtacctggatgtccaggagaagtggggactggaggacgtgatgctgatgggggatttcaacgctgggtgcagctacgtccggccatcccagtggagttcaattcgcctctggacctcgccgactttccagtggttgatcccggacagcgccgacactaccgcgacgcccacccactgcgcctacgatagaatcgtggtggccggcatgttgctgcggggcgccgtggtgccggattctgccctcccattcaacttccaggctgcgtacggattgtcggatcagctggcccaagccatctccgaccactacccggtggaagtcatgctcaag

SEQ ID NO: 315697 - DNA, 846 bp, Artificial Sequence
  derived and/or modified sequence
atgcgagggatgaagctcctcggggccttgctggccctggccgccctcctgcagggcgcggtgagcctcaaaatcgccgcattcaacattcagaccttcggagaaactaagatgtcgaacgcgaccctcgtgtcatacatcgtgcagatactgtcacggtacgatatcgccctggtccaggaggtgagagattctcatctgaccgccgtgggcaagttgcttgataacctgaatcaggacgccccagatacctaccactacgtagtctcagagcccctgggaagaaacagctacaaagaacgctacttgttcgtgtacagacctgaccaagtgtccgcagttgattcatattactacgacgatggatgtgaaccttgcggtaatgacacgttcaatcgagaaccggcaatcgttcggttcttcagccgctttactgaggtgcgggagtttgctatcgtcccgcttcacgcagctccaggagacgcggtggcagaaatcgacgcgctgtatgacgtctatctggacgtgcaggaaaagtggggactggaggacgtcatgttgatgggtgacttcaacgctggatgcagttacgtccgcccctcccaatggtccagcatccgcttgtggacgtcaccaactttccaatggctgattccggattcggctgacactacggccacccctacccactgcgcttacgacaggattgtagttgcggggatgctcttgaggggcgccgtggtgccagattccgcgttgccgtttaactttcaagcggcttacggactttcggatcaactggcgcaagcgatcagcgatcattacccggtcgaggtgatgcttaag

SEQ ID NO: 315698 - DNA, 846 bp, Artificial Sequence
  derived and/or modified sequence
atgcgggggatgaaactgctgggagcgcttttggcactggccgccctccttcaaggagccgtctcactcaagatcgccgccttcaacattcaaacgttcggagagacgaagatgtccaacgcgactctggtcagctacattgtgcaaattcttagcagatacgatatcgcgctcgtgcaggaagtcagggactcacacctgactgctgtgggaaaacttctcgataatcttaaccaagacgccccagatacctaccactacgtggtgtcggaaccgctcgggagaaacagctacaaggaacggtacctcttcgtgtaccggccggatcaggtcagcgcggtggactcgtactactacgacgatggctgcgagccatgtggaaatgacacctttaaccgggagccggctatcgtgcgattcttctccagatttacggaggtccgcgaattcgctatcgttcccctgcacgccgccccgggtgacgcggtggccgagatcgacgccctgtacgatgtgtatctcgatgtccaggaaaagtggggacttgaggacgtgatgctcatgggtgacttcaatgcgggctgctcatatgtgcggccctcgcagtggtcctcgatccgactctggactagcccgaccttccagtggcttatcccggactccgcggacactaccgccacccctactcattgcgcatatgatcgcatcgttgtggccggaatgttgctgcgcggcgcagtggtgccggactcagctctgcccttcaatttccaagcggcgtatgggttgtcggatcagctggcccaggcaatcagcgatcattacccggtggaagtgatgctgaag

SEQ ID NO: 315699 - DNA, 846 bp, Artificial Sequence
  derived and/or modified sequence
atgcgagggatgaagctgttaggcgcactgttagctctggccgcattgttgcaaggcgcggtgagcctgaagattgccgccttcaatatacaaacctttggagagaccaaaatgagcaatgctacactcgtctcctacatagtccagattctgagcagatatgacatagccctagtccaggaggtgcgggactcccatctcaccgctgtggggaaattactggataacctgaatcaagatgcacccgacacctaccactatgtggtctcagaaccattgggtcgcaactcatacaaggaaaggtatctatttgtctacaggccagaccaggtgtcagcagtagattcctattactatgacgatgggtgtgaaccatgtgggaatgatacctttaatcgcgaacctgccatcgtgcgtttcttctcacggttcacggaagtgcgagaatttgccatcgtaccactccatgcagctccaggggacgcagtggccgagatcgacgccttgtacgacgtgtacctggacgtacaggaaaagtggggacttgaggacgtgatgttgatgggcgactttaacgcaggatgctcgtatgtccgaccctcacagtggtcttccattcgtctgtggacgtcaccaactttccaatggctgatcccagatagcgctgataccacagccacccctactcactgcgcctatgatcggatagtcgtagctgggatgctactgagaggagctgtcgtccccgatagcgcccttccatttaatttccaggccgcctatggtctcagcgaccagttggcccaggctatatctgatcactatcctgttgaagtcatgttaaag

SEQ ID NO: 315700 - DNA, 846 bp, Artificial Sequence
  derived and/or modified sequence
atgcgggggatgaagctcttgggagctctgctggcacttgccgcactactgcagggggctgtgagcttgaagatcgctgcctttaatatccagacatttggcgaaacaaaaatgagtaatgccactctggtttcatatatagtccagattctcagtcggtacgatatcgctctggttcaggaagtgagagatagccacctaaccgctgtcggcaagctgctagacaaccttaaccaggacgctccggacacatatcactacgtcgtgagcgaacctctgggaagaaactcctataaagaacggtatctattcgtatatcgccccgaccaggtgtcagccgtagatagttattactatgatgacggctgcgaaccatgtggaaacgacactttcaaccgcgaacctgcaatcgtgcgctttttttcccgattcacagaggtccgagaattcgccatcgtgccgctccacgccgccccgggtgatgcagtagccgagatcgacgctttatatgacgtttacctggatgtgcaagagaaatggggactcgaagatgtcatgcttatgggcgactttaacgcagggtgttcctacgtgcgtccgagtcaatggtctagtatcagactctggacctcacctacatttcagtggcttatccctgatagcgcggacactacagccactcccacccactgcgcgtacgatcgcatagtcgtcgctggcatgctgctccgtggcgccgtggtgcctgacagcgccctgcccttcaatttccaagctgcttatggcctcagcgaccagttggcacaggccattagtgaccactaccccgtggaggtcatgctcaag

SEQ ID NO: 315701 - DNA, 846 bp, Artificial Sequence
  derived and/or modified sequence
atgcggggaatgaagcttctcggagccttattggcgctagcagctctattacaaggagctgttagcctgaagatcgctgccttcaatatacaaacgttcggagagaccaaaatgtcgaacgcaacattagtatcttatatcgttcagattcttagtcggtacgatatcgccctagttcaggaggtaagagattcacatcttaccgcggtggggaagctcctggataacctaaatcaggatgcacctgacacctatcattacgtcgtctcggaaccactgggcaggaattcttataaagagcgttacttgttcgtttacagaccagatcaggtcagcgcagtcgactcctattactatgatgacgggtgtgaaccgtgcggcaatgataccttcaaccgcgaacctgcgatagtccgattcttcagccgttttaccgaagtacgcgagttcgcgattgtgccgttgcacgcggccccgggtgatgcagttgcggagattgacgcattgtatgacgtatacctagacgtgcaagagaagtggggattagaggacgttatgttgatgggcgactttaacgctggatgttcatacgtacgcccctcccagtggtcctctatccgcttgtggactagtcccacgtttcaatggctgatccccgactccgcagacacgacggcgacgccaacacattgcgcatacgatagaatcgtcgtcgccggaatgctcctccgaggtgctgttgtcccagactcagccctgccattcaactttcaggccgcatacggactgtctgaccaactggcgcaggcaatttccgatcattatccagtcgaagttatgctgaaa

SEQ ID NO: 315702 - DNA, 846 bp, Artificial Sequence
  derived and/or modified sequence
atgcggggaatgaaactcttgggagcgttgctcgccctggccgcgctgctgcagggggccgttagtttgaagatcgccgcatttaatatccaaacctttggcgaaaccaaaatgagcaacgccacattagtctcctacatcgtccagattctgtctagatacgatattgccctcgtgcaggaggttcgcgactcgcaccttactgccgtgggcaaactcctcgacaaccttaaccaggacgcaccagacacttaccactatgttgtgagtgagcccctgggtcgaaacagctacaaggaacggtatttgtttgtgtacaggcccgatcaggtgtctgcggtggactcctattactacgatgatggctgtgaaccctgtggcaacgacacctttaacagagagcctgctatcgtgcgcttcttctctcggtttaccgaagttagagagttcgcaatagtccctctccacgccgcccctggggacgctgttgccgagatcgatgccctctatgacgtttatttagatgtgcaggaaaagtggggtctggaggacgtcatgctgatgggtgacttcaatgcgggatgttcttatgtccgtccttcccaatggtcatcaatacgcctctggacctcccctacttttcaatggttgataccagattctgcagataccacggcaacccctacccactgtgcctacgaccgcatcgttgtagccgggatgctgctgagaggcgccgtagttcctgattctgcacttcctttcaactttcaggctgcctatgggttgtcagaccagcttgcacaggccataagtgatcactacccggtggaggttatgttaaag

SEQ ID NO: 315703 - DNA, 846 bp, Artificial Sequence
  derived and/or modified sequence
atgaggggaatgaaactgctgggggccctcttagcacttgccgccctgttgcagggcgcggtaagtctaaagattgctgctttcaacatccagaccttcggggagacgaagatgtcaaacgctactttggtgtcctacattgtgcaaattttgagcaggtacgacattgccctggttcaggaggtgagagatagtcaccttacggccgttggcaaactgctcgataacctgaaccaggatgccccggatacctaccactacgtcgtgtcagagcccctgggtaggaatagttataaggagagatacttgttcgtctataggccagaccaagtgtctgccgtcgactcatactattacgacgatgggtgcgaaccttgcggcaatgatacgttcaatcgggaaccagccatagtgaggttcttttcaaggtttactgaggtccgggagtttgcaatcgtgcccctgcacgcagctccaggtgacgcagtagcagagatcgatgccctgtacgatgtatatctggacgttcaagagaagtggggcctagaagacgttatgctcatgggggattttaacgctggctgcagttacgtgcggccatcgcaatggtcttccattcgcttatggaccagcccaaccttccaatggttgatcccggatagtgccgacacaaccgccactcctactcattgcgcgtatgataggatcgttgtggctggcatgctgctccggggtgccgttgtgcctgactcagcacttccatttaactttcaggcagcgtatggcttaagtgaccaattagcgcaggccatctcggatcactatccagtggaggtgatgctgaag

SEQ ID NO: 315704 - DNA, 992 bp, Artificial Sequence
  derived and/or modified sequence
gggaaataagagagaaaagaagagtaagaagaaatataagagccaccatgcgagggatgaagcttctcggtgcgttgttggcgctcgcagccttgctgcagggagcggtgagcctcaaaattgccgctttcaacatccagacatttggcgagactaaaatgagcaatgcgacacttgtatcgtacatcgtacagattctgtcgagatacgacattgcgctcgtgcaagaagtgagagacagccacctgacggcagtgggaaaattgctcgataatctcaaccaggacgctcccgacacctaccactacgtcgtaagcgaacccttggggcgaaactcgtataaggagcgctacctgttcgtatacaggccggatcaagtctccgcggtggactcatattactatgacgatgggtgtgagccgtgcgggaacgacacctttaaccgggaacctgctatcgtcaggttcttctcgcgctttacggaagtccgcgagtttgccatcgtacccttgcacgccgcaccaggagatgcggtggccgagatcgatgccctctatgacgtctatctcgatgtccaagagaagtggggtcttgaagatgtgatgcttatgggagacttcaatgccggatgttcatatgtccggccctcacagtggtcctcgatcaggctgtggacgtcacccacatttcagtggctgattccggactccgcagacactacggcgacgcccacccattgcgcgtacgatcggatcgtagtggcagggatgctccttagaggcgcggtggtcccggattccgctcttcctttcaatttccaagcggcatacggtctttcagaccagttggcccaggcgatctcggatcattatcctgtcgaggtgatgttgaagtgataagctgccttctgcggggcttgccttctggccatgcccttcttctctcccttgcacctgtacctcttggtctttgaataaagcctgagtaggaag

SEQ ID NO: 315705 - DNA, 849 bp, Artificial Sequence
  derived and/or modified sequence
atgagaggcatgaagctgctgggcgccctgctggccctggccgccctgctgcagggcgccgtgagcctgaagatcgccgccttcaacatccagaccttcggcgagaccaagatgagcaacgccaccctggtgagctacatcgtgcagatcctgagcagatacgacatcgccctggtgcaggaggtgagagacagccacctgaccgccgtgggcaagctgctggacaacctgaaccaggacgcccccgacacctaccactacgtggtgagcgagcccctgggcagaaacagctacaaggagagatacctgttcgtgtacagacccgaccaggtgagcgccgtggacagctactactacgacgacggctgcgagccctgcggcaacgacaccttcaacagagagcccgccatcgtgagattcttcagcagattcaccgaggtgagagagttcgccatcgtgcccctgcacgccgcccccggcgacgccgtggccgagatcgacgccctgtacgacgtgtacctggacgtgcaggagaagtggggcctggaggacgtgatgctgatgggcgacttcaacgccggctgcagctacgtgagacccagccagtggagcagcatcagactgtggaccagccccaccttccagtggctgatccccgacagcgccgacaccaccgccacccccacccactgcgcctacgacagaatcgtggtggccggcatgctgctgagaggcgccgtggtgcccgacagcgccctgcccttcaacttccaggccgcctacggcctgagcgaccagctggcccaggccatcagcgaccactaccccgtggaggtgatgctgaagtag

SEQ ID NO: 315706 - DNA, 849 bp, Artificial Sequence
  derived and/or modified sequence
atgagaggcatgaagctgctcggcgcgctgctggcactggctgcattgttacagggggcagtgtccttaaaaattgccgcttttaacattcaaacattcggagaaaccaagatgtctaacgctacactggtttcatatattgtgcagatcttgagccggtacgacattgccctggtgcaagaggtgcgcgactcccatctcacggcggtgggcaaactgctggacaacctgaaccaggacgcccccgacacctaccattatgtcgtgtccgaacccctcggaaggaattcatataaggagcgctacctctttgtgtaccgcccggaccaggtatccgcggtggattcctactactacgacgatggctgtgaaccttgcggcaacgatacttttaatagagagcccgctatcgtcagatttttctctcgtttcacggaggtgcgtgagttcgcgattgttccattacatgccgccccgggagacgccgtggctgaaatcgacgccctttacgacgtgtatctggacgtccaagaaaagtggggcctggaggacgtcatgctaatgggagacttcaacgctggatgctcctatgtgcgtccatcccaatggtcatccatccgactgtggaccagtcccacatttcagtggcttatcccagattcggctgatacgacagccacccccacacattgtgcctacgaccgcatagtggtggcgggaatgctcctgaggggcgcagtggtaccggatagtgctctacccttcaattttcaggctgcctacggcctgtctgaccagcttgcccaagccatcagcgatcactaccctgtcgaagtcatgcttaaatag

SEQ ID NO: 315707 - DNA, 849 bp, Artificial Sequence
  derived and/or modified sequence
atgaggggaatgaagttgctcggagcgctcctggccctggctgccctacttcagggagctgtgtcgttgaaaatagccgccttcaatattcagactttcggggagacaaaaatgtccaacgctaccctcgtgtcctatatcgtgcaaattctgagcaggtacgatattgcgttggtgcaggaggtgcgggatagccacctaactgccgtgggcaagctactggacaatctgaatcaggacgcgccggacacttaccattatgtggtgtccgagcccttgggcaggaatagttataaggagcgctatctgttcgtttacaggccagaccaggtgagcgccgtcgactcctattactacgacgacggctgcgaaccttgcgggaatgacacttttaatcgtgagcccgccattgtccggtttttctcacggtttaccgaagtgcgagagttcgcaatcgttccactgcacgccgcgccaggagatgctgtggccgagattgacgcactctatgacgtgtacctcgacgtgcaagaaaagtggggcctagaggatgttatgttgatgggagatttcaacgccggctgcagttacgtacggccgtctcagtggtcctctattcgcctctggaccagccctacatttcagtggttgattcccgattctgccgacaccacagctactcctacccattgcgcatacgacagaattgttgtcgccgggatgctgctgcggggtgctgtggtgccagacagcgccttgccctttaacttccaggcagcttacgggctcagtgaccagctggctcaggccatctctgaccactatcccgttgaagttatgttaaaatag

SEQ ID NO: 315708 - DNA, 849 bp, Artificial Sequence
  derived and/or modified sequence
atgaggggcatgaagctgctgggcgccctgctggccctggccgccctgctgcagggcgctgtgtccctgaagattgctgccttcaacatccagacctttggagagaccaagatgagcaatgccaccctggtgtcctacatcgtgcagatcctgagccgctatgacatcgccctggtgcaggaggtgcgggacagccacctgacagctgtgggcaagctgctggacaacctgaaccaggatgccccagacacctaccactacgtggtgtctgagcccctgggcagaaattcctacaaggagcgctacctgtttgtgtacagaccagaccaggtgtctgctgtggacagctactactatgatgatggctgtgagccctgtggaaatgacaccttcaaccgggagcccgccatcgtgcgcttcttcagccgcttcacagaggtgcgggagtttgccatcgtgcccctgcatgctgcccctggagatgctgtggccgagattgatgccctgtatgatgtgtacctggatgtgcaggagaagtggggcctggaggatgtgatgctgatgggagacttcaatgccggctgcagctatgtgcggcccagccagtggagcagcatccggctgtggaccagccccaccttccagtggctgatcccagattctgctgacaccacagccacccccacccactgtgcctatgaccgcatcgtggtggccggcatgctgctgcggggagctgtggtgcctgattctgccctgcccttcaacttccaggccgcctacggcctgagtgaccagctggcccaggccatcagtgaccactaccctgtggaggtgatgctgaagtag

SEQ ID NO: 315709 - DNA, 2053 bp, Artificial Sequence
  derived and/or modified sequence
ccatagtcttagctactcaggaggctgaggagggaggattatctgagccctggcggttgaggctataatgagccatgattgtgccactgcactccagccttggcaacacagtgtgagaccctgtctcaaaaacaataaaaacccaaaacaaaagaaccaagaaattactggacctgaggcctggcctttagctgctgccctgcccttgtgacctggtcactcgggatcccctgggcctaaacacacagcctattgtctacctcaagaaggctccccactgcttggctggcaattggggtgggctttgcaggccccacctgtcctggccccacggcgctggtgctgcaggcccccaccactgcttgttccgagctccccagcctcctgcagagttgcctgcacctgatggcgatgaatcaggaaggcaggcgtgtcctgggccacagagcagtcatggctgtcagccaccagggggctccatttgcaactttggatgtggctttggcctctttgtccaaagtgaccttggggcccccagacaagagacagggagactggagcccagccccaccctcccgcacatacctggcccatccctgccctatcctggaagatgggggccaccacacgtgcaagggacacgggataggaacctttggccttgttatcagacattttaaaactaagtgcaaacgtgattatcaggtgcagtttttacagcagcaagaaacctgtgcttacagaaagaaacacgtgctagcaacccacctatgcggaaagccacacagagccattgttttctgcactctcaggtgacggctcacatttgccccagggaaggtcacagctgcctgaacttttaaaactcccagacacgcactgcctgtgcaggatccggagcccagcagcactgccagggccttgaagtgcttcttcagagacctttcttcatagactacttttttttctttaagcagcaaaaggagaaaattgtcatcaaaggatattccagattcttgacagcattctcgtcatctctgaggacatcaccatcatctcaggatgaggggcatgaagctgctgggggcgctgctggcactggcggccctactgcagggggccgtgtccctgaagatcgcagccttcaacatccagacatttggggagaccaagatgtccaatgccaccctcgtcagctacattgtgcagatcctgagccgctatgacatcgccctggtccaggaggtcagagacagccacctgactgccgtggggaagctgctggacaacctcaatcaggatgcaccagacacctatcactacgtggtcagtgagccactgggacggaacagctataaggagcgctacctgttcgtgtacaggcctgaccaggtgtctgcggtggacagctactactacgatgatggctgcgagccctgcgggaacgacaccttcaaccgagagccagccattgtcaggttcttctcccggttcacagaggtcagggagtttgccattgttcccctgcatgcggccccgggggacgcagtagccgagatcgacgctctctatgacgtctacctggatgtccaagagaaatggggcttggaggacgtcatgttgatgggcgacttcaatgcgggctgcagctatgtgagaccctcccagtggtcatccatccgcctgtggacaagccccaccttccagtggctgatccccgacagcgctgacaccacagctacacccacgcactgtgcctatgacaggatcgtggttgcagggatgctgctccgaggcgccgttgttcccgactcggctcttccctttaacttccaggctgcctatggcctgagtgaccaactggcccaagccatcagtgaccactatccagtggaggtgatgctgaagtgagcagcccctccccacaccagttgaactgcaggaagagaggacccatcctgccacaggacccagaaaaaaagcccaacacacactcgggttaagaaatacctttaaatttaggtaaataaagctcaaggaggtggggctgtca

SEQ ID NO: 315710 - DNA, 1174 bp, Artificial Sequence
  derived and/or modified sequence
ctcctgcccaggacccgaggagccggccaccgttcagaaggccccagcttgaaggcctggagagccgcccagcagcacaacacagggaagcttggggagcaaaaggagaaaattgtcatcaaaggatattccagattcttgacagcattctcgtcatctctgaggacatcaccatcatctcaggatgaggggcatgaagctgctgggggcgctgctggcactggcggccctactgcagggggccgtgtccctgaagatcgcagccttcaacatccagacatttggggagaccaagatgtccaatgccaccctcgtcagctacattgtgcagatcctgagccgctatgacatcgccctggtccaggaggtcagagacagccacctgactgccgtggggaagctgctggacaacctcaatcaggatgcaccagacacctatcactacgtggtcagtgagccactgggacggaacagctataaggagcgctacctgttcgtgtacaggcctgaccaggtgtctgcggtggacagctactactacgatgatggctgcgagccctgcgggaacgacaccttcaaccgagagccagccattgtcaggttcttctcccggttcacagaggtcagggagtttgccattgttcccctgcatgcggccccgggggacgcagtagccgagatcgacgctctctatgacgtctacctggatgtccaagagaaatggggcttggaggacgtcatgttgatgggcgacttcaatgcgggctgcagctatgtgagaccctcccagtggtcatccatccgcctgtggacaagccccaccttccagtggctgatccccgacagcgctgacaccacagctacacccacgcactgtgcctatgacaggatcgtggttgcagggatgctgctccgaggcgccgttgttcccgactcggctcttccctttaacttccaggctgcctatggcctgagtgaccaactggcccaagccatcagtgaccactatccagtggaggtgatgctgaagtgagcagcccctccccacaccagttgaactgcaggaagagaggacccatcctgccacaggacccagaaaaaaagcccaacacacactcgggttaagaaatacctttaaatttaggtaaataaagctcaaggaggtggggctgtc

SEQ ID NO: 315711 - DNA, 849 bp, Artificial Sequence
  derived and/or modified sequence
atgcggggcatgaagctgctgggcgccctgctggccctggccgccctgctacagggggctgtcagcctcaagattgcggcgtttaatatacaaacattcggtgaaactaagatgtcaaacgcaacactggtgtcctacattgtgcagattctgtcaagatatgatatagcgctagtgcaggaggttagagactctcacctcacagccgtggggaaactcctagataacctcaatcaggatgctcccgacacttaccactacgtggtgtctgagccccttgggagaaattcttataaagaacgttacctatttgtttaccggccggaccaggtgtccgccgtagacagctactactacgacgacggatgtgaaccatgcggtaacgacacttttaatcgcgagccagccatcgttaggttttttagccgcttcacagaggtaagggagttcgcgattgtcccgctgcacgctgccccgggagacgcagtggcagagattgacgctctttatgatgtgtatcttgatgtccaggaaaaatggggcctggaggacgtaatgctcatgggggactttaatgccggatgcagctatgtcagaccttcacaatggagcagcattaggctgtggacttcaccgactttccagtggctcatccccgacagcgcagacactaccgcaactccaacacattgcgcatacgatcggattgttgtggcaggcatgctgttacgaggggcagtagtgcccgattccgcgctgcccttcaactttcaggccgcatatggcctgagtgatcagctggctcaggcaatttccgatcactacccagtagaggtaatgctgaaatag

SEQ ID NO: 315712 - DNA, 849 bp, Artificial Sequence
  derived and/or modified sequence
atgcggggcatgaagctgctgggcgccctgctggccctggccgccttgcttcagggcgccgtgtccctcaagatagctgctttcaatattcaaacctttggcgaaacaaaaatgagtaatgctaccctggtgtcgtacatcgtccagattctctcccggtacgatatagcattagttcaggaggtacgggactcccacttaaccgccgttggaaagctcctagataatctgaatcaggacgctccagatacatatcattacgtcgtgtcggaaccactaggcaggaattcatataaagaaagatatctatttgtgtatcggccagaccaggtctcggcagtggactcatactattacgacgacggatgcgagccctgcggaaatgacaccttcaatagagaacctgccatcgtacgtttcttttcccgttttaccgaagtacgcgagttcgccatcgtgcctctgcatgcggccccaggagacgccgtcgctgagatcgacgcgctgtacgatgtgtacctggacgtgcaggagaagtgggggcttgaggatgtcatgttaatgggagacttcaatgcagggtgcagctacgtccgccccagtcagtggtcgtccattcgtctgtggacatctcctaccttccagtggctgatacctgattccgccgacactacggcaacccccacacattgtgcatatgatcggatcgttgtagcagggatgcttttgcgcggggctgtggtgccggactctgcacttcctttcaatttccaggccgcatacggtctgtccgaccaactggcacaggcaataagtgatcactaccctgtggaggttatgctgaagtag

SEQ ID NO: 315713 - DNA, 849 bp, Artificial Sequence
  derived and/or modified sequence
atgcgcggtatgaagttactgggcgctctcctagccctggccgctttactgcagggagctgtttccctgaagatagcggctttcaatattcaaacatttggagagactaaaatgtcaaatgcaacacttgtaagttatattgtgcagatcctgtcaaggtacgacattgccttagtccaagaggtccgagactcacatctgactgcagttggaaagctgctggataacctgaaccaagatgccccagatacctaccactacgtggtcagcgaaccccttgggaggaatagctataaggagaggtatttatttgtgtacaggcccgatcaggtaagcgcagtggatagttattattacgatgacggctgcgagccttgcggtaatgacaccttcaacagggaaccggcaatcgttcgattcttctcaagatttactgaggtccgcgaatttgcaatagtgccccttcatgccgctcccggtgacgccgttgcggaaatcgacgccctgtacgacgtgtacctggatgtgcaggagaagtgggggctggaggatgtgatgttaatgggggactttaacgcgggatgcagttacgtacggccttcccagtggagttcgattagactgtggacttctccaacgttccaatggctcatcccggattcagctgataccaccgctacacccactcactgcgcttatgatcgtatcgtggtggccggaatgttgttacgcggtgccgtggtgcctgacagcgccctgccatttaacttccaagctgcatacgggctatctgatcagttagctcaggctattagcgatcattacccagtagaggtgatgctaaagtag

SEQ ID NO: 315714 - DNA, 849 bp, Artificial Sequence
  derived and/or modified sequence
atgcgtggaatgaaactgttaggtgctctgctagctctggcagcactgctgcaaggggctgttagcctgaagattgcagctttcaacattcagacatttggggaaacaaagatgagtaatgcaaccctggtctcatatattgtccagatcctgtcacgatatgatatcgccctcgtccaggaagtccgcgattctcatctcactgcagttggcaagctgctcgataatttgaaccaggatgcgcctgacacatatcattacgtagtgtccgaaccactcgggcgaaattcctataaagagcgctatttgttcgtttacaggcctgatcaggtctcggccgtcgattcctactactacgacgatggatgtgaaccctgtggcaacgacacatttaaccgggaacctgcaattgttcgatttttttcaaggttcaccgaggtgagggaatttgctatcgttccattgcacgcagccccaggtgacgccgtagccgaaattgatgctctttacgatgtctatctcgatgtgcaagaaaagtgggggctcgaagatgtcatgttgatgggggatttcaacgccggatgctcctatgttcggccatcccagtggagttccatacgactctggacatcaccaacatttcagtggttaattcccgattccgccgacaccaccgctacacccacccactgtgcctatgataggatcgtggttgcgggtatgctcctacgcggagctgtagttcctgacagtgcgctgccgttcaactttcaagcagcatacggtcttagtgatcagttggctcaggccatttccgatcactatccagttgaggttatgctgaagtag

SEQ ID NO: 315715 - DNA, 849 bp, Artificial Sequence
  derived and/or modified sequence
atgaggggcatgaagttgctaggggccctcctcgcacttgctgcgctgctccaaggagctgtatccctgaagattgcggcctttaacatccagacttttggggagaccaagatgagcaacgctacattggtgtcatacattgtccagatcttgtcgcgctacgatatagctttggttcaagaagttcgcgatagccaccttacagcagtcgggaagctgcttgacaacctcaatcaggatgcccccgacacttatcattacgtagtgtccgaacctcttggcagaaactcctataaggaacggtatctgttcgtctaccggcccgatcaggtatccgccgtcgacagttattattatgacgatggatgtgagccctgtggtaacgacaccttcaatagagaacccgcaatcgtgagattcttcagtcggtttacagaagttcgggaatttgctattgtacctctgcacgctgcccccggagatgcagtcgctgaaatcgacgcactgtacgacgtttatttagatgtccaggagaagtggggcctcgaagatgtgatgttgatgggcgacttcaacgcaggttgctcctatgtgagacctagccagtggagttctattcgactgtggacatccccaacatttcagtggctcatcccagattctgccgatacaacagctaccccaactcactgcgcatacgacagaatcgtggttgcagggatgcttcttaggggggctgtcgtgccagactcggccctccctttcaacttccaggcagcttacggactaagtgatcagctcgctcaggccataagtgaccattacccagtggaagtgatgctaaaatag

SEQ ID NO: 315716 - DNA, 849 bp, Artificial Sequence
  derived and/or modified sequence
atgcggggcatgaaactgctgggggcccttttagctcttgccgccctgctgcagggagccgtgtccctgaagatcgcagcctttaacatacagacgtttggagagactaagatgtctaatgccacactcgtgtcttacattgtacaaattctcagtcgttatgatatcgctttggttcaggaagtgagagacagtcatcttacagctgtgggaaaactgctggacaatttgaaccaagacgctcccgacacctaccactatgtggtctctgaacctctgggcagaaattcatacaaagaaagatatttatttgtgtaccgccccgaccaggtgagcgccgtagattcctattattatgatgatggctgcgagccttgtggtaatgacacgttcaacagagagcccgccatcgtccgctttttctcaagattcaccgaagtgcgggaattcgctatcgtgcctttacatgctgcaccaggcgacgcggtcgctgagattgacgccctatatgatgtgtatctcgacgttcaggagaagtggggtcttgaagacgtgatgctgatgggtgactttaatgccggatgctcttacgtccgtccgtcccagtggtcttcgattcgactgtggaccagtcccacttttcaatggctgattcctgactctgccgatactacagctacgccaacacactgtgcttatgaccggatagtggtcgccggtatgttactgcgcggagcagttgtgccagatagcgctttgccctttaactttcaagcagcatatggcttgtcagaccaactggcacaagccatctccgatcattaccctgtggaagtgatgcttaagtag

SEQ ID NO: 315717 - DNA, 849 bp, Artificial Sequence
  derived and/or modified sequence
atgaggggaatgaaactgctgggggcactccttgctctcgcagctctgctccagggagcggtcagtctgaaaattgctgcttttaatatccagacttttggggaaacgaaaatgagcaacgccaccctcgtatcttatatcgttcagatcctttccagatacgacattgctctggtccaagaggttagggattcgcatttaacagctgtaggcaaactcctggacaatttaaatcaagacgctcccgatacatatcactacgtcgtctcggaaccactcgggagaaactcttataaagaacgctacttatttgtgtacaggcccgatcaagtctcagccgtggactcttattattatgatgacggctgcgagccatgcggaaatgatacctttaacagagagccggccattgtcagatttttctcgcgattcacagaagtgcgtgagtttgctatcgtccctctccatgcggccccaggtgatgcagtggccgaaatcgacgcactttacgatgtgtatttggacgttcaggagaagtggggactcgaggacgttatgttgatgggtgacttcaacgcagggtgcagttacgtaagaccatctcagtggtccagcatacgcctttggacaagtcccactttccaatggttaatcccagattccgccgatactactgccacacctacgcactgcgcatacgatcgtatcgttgtagccggcatgctgttgcgtggagccgtcgtccccgactcagcactcccgtttaacttccaggctgcatacggtttatccgaccaactcgcccaggctatttccgaccattacccagtcgaggtgatgctcaaatag

SEQ ID NO: 315718 - DNA, 849 bp, Artificial Sequence
  derived and/or modified sequence
atgcggggcatgaagctgctaggagccctattggctcttgccgccctgcttcagggggcagtctcactgaaaatagctgcttttaacatccagacttttggagaaacgaagatgtcaaacgccaccctagtgtcttatattgttcagatcttatccaggtatgatatagcactcgtgcaggaggtcagagatagtcacctaaccgccgtgggcaaactcctcgataatctcaatcaggatgctccagacacttaccactacgtcgtcagtgagccacttggtagaaacagttataaagagcgctacctttttgtgtatcggccagatcaggtttctgcagttgacagttactattacgacgacgggtgcgaaccttgcggaaatgacacttttaacagggaacccgccatagttcgcttcttttccagattcactgaagtgagagagttcgctatagttcccctccatgccgctcctggggatgctgttgcagaaatcgatgccttgtatgatgtgtatctcgatgttcaggaaaaatggggtctggaagacgttatgctcatgggagacttcaatgctggatgtagttatgttcgcccctctcaatggagttccattagactgtggacatcaccaacttttcaatggctgattcccgactctgccgacacaaccgccaccccaactcactgtgcctacgaccgcattgttgtggccggaatgctattacggggggccgtggttcctgactcagcgttaccatttaacttccaagccgcatacgggctctctgaccaacttgctcaagcaatttccgaccactatcctgtggaggtaatgctcaagtag

SEQ ID NO: 315719 - RNA, 992 nt, Artificial Sequence
  derived and/or modified sequence
gggaaauaagagagaaaagaagaguaagaagaaauauaagagccaccaugcgagggaugaagcuucucggugcguuguuggcgcucgcagccuugcugcagggagcggugagccucaaaauugccgcuuucaacauccagacauuuggcgagacuaaaaugagcaaugcgacacuuguaucguacaucguacagauucugucgagauacgacauugcgcucgugcaagaagugagagacagccaccugacggcagugggaaaauugcucgauaaucucaaccaggacgcucccgacaccuaccacuacgucguaagcgaacccuuggggcgaaacucguauaaggagcgcuaccuguucguauacaggccggaucaagucuccgcgguggacucauauuacuaugacgaugggugugagccgugcgggaacgacaccuuuaaccgggaaccugcuaucgucagguucuucucgcgcuuuacggaaguccgcgaguuugccaucguacccuugcacgccgcaccaggagaugcgguggccgagaucgaugcccucuaugacgucuaucucgauguccaagagaaguggggucuugaagaugugaugcuuaugggagacuucaaugccggauguucauauguccggcccucacagugguccucgaucaggcuguggacgucacccacauuucaguggcugauuccggacuccgcagacacuacggcgacgcccacccauugcgcguacgaucggaucguaguggcagggaugcuccuuagaggcgcgguggucccggauuccgcucuuccuuucaauuuccaagcggcauacggucuuucagaccaguuggcccaggcgaucucggaucauuauccugucgaggugauguugaagugauaagcugccuucugcggggcuugccuucuggccaugcccuucuucucucccuugcaccuguaccucuuggucuuugaauaaagccugaguaggaag

SEQ ID NO: 315720 - RNA, 849 nt, Artificial Sequence
  derived and/or modified sequence
augaggggcaugaaguugcuaggggcccuccucgcacuugcugcgcugcuccaaggagcuguaucccugaagauugcggccuuuaacauccagacuuuuggggagaccaagaugagcaacgcuacauuggugucauacauuguccagaucuugucgcgcuacgauauagcuuugguucaagaaguucgcgauagccaccuuacagcagucgggaagcugcuugacaaccucaaucaggaugcccccgacacuuaucauuacguaguguccgaaccucuuggcagaaacuccuauaaggaacgguaucuguucgucuaccggcccgaucagguauccgccgucgacaguuauuauuaugacgauggaugugagcccugugguaacgacaccuucaauagagaacccgcaaucgugagauucuucagucgguuuacagaaguucgggaauuugcuauuguaccucugcacgcugcccccggagaugcagucgcugaaaucgacgcacuguacgacguuuauuuagauguccaggagaaguggggccucgaagaugugauguugaugggcgacuucaacgcagguugcuccuaugugagaccuagccaguggaguucuauucgacuguggacauccccaacauuucaguggcucaucccagauucugccgauacaacagcuaccccaacucacugcgcauacgacagaaucgugguugcagggaugcuucuuaggggggcugucgugccagacucggcccucccuuucaacuuccaggcagcuuacggacuaagugaucagcucgcucaggccauaagugaccauuacccaguggaagugaugcuaaaauag

SEQ ID NO: 315721 - RNA, 849 nt, Artificial Sequence
  derived and/or modified sequence
augcggggcaugaaacugcugggggcccuuuuagcucuugccgcccugcugcagggagccgugucccugaagaucgcagccuuuaacauacagacguuuggagagacuaagaugucuaaugccacacucgugucuuacauuguacaaauucucagucguuaugauaucgcuuugguucaggaagugagagacagucaucuuacagcugugggaaaacugcuggacaauuugaaccaagacgcucccgacaccuaccacuauguggucucugaaccucugggcagaaauucauacaaagaaagauauuuauuuguguaccgccccgaccaggugagcgccguagauuccuauuauuaugaugauggcugcgagccuugugguaaugacacguucaacagagagcccgccaucguccgcuuuuucucaagauucaccgaagugcgggaauucgcuaucgugccuuuacaugcugcaccaggcgacgcggucgcugagauugacgcccuauaugauguguaucucgacguucaggagaaguggggucuugaagacgugaugcugaugggugacuuuaaugccggaugcucuuacguccguccgucccaguggucuucgauucgacuguggaccagucccacuuuucaauggcugauuccugacucugccgauacuacagcuacgccaacacacugugcuuaugaccggauaguggucgccgguauguuacugcgcggagcaguugugccagauagcgcuuugcccuuuaacuuucaagcagcauauggcuugucagaccaacuggcacaagccaucuccgaucauuacccuguggaagugaugcuuaaguag

SEQ ID NO: 315722 - RNA, 849 nt, Artificial Sequence
  derived and/or modified sequence
augaggggaaugaaacugcugggggcacuccuugcucucgcagcucugcuccagggagcggucagucugaaaauugcugcuuuuaauauccagacuuuuggggaaacgaaaaugagcaacgccacccucguaucuuauaucguucagauccuuuccagauacgacauugcucugguccaagagguuagggauucgcauuuaacagcuguaggcaaacuccuggacaauuuaaaucaagacgcucccgauacauaucacuacgucgucucggaaccacucgggagaaacucuuauaaagaacgcuacuuauuuguguacaggcccgaucaagucucagccguggacucuuauuauuaugaugacggcugcgagccaugcggaaaugauaccuuuaacagagagccggccauugucagauuuuucucgcgauucacagaagugcgugaguuugcuaucgucccucuccaugcggccccaggugaugcaguggccgaaaucgacgcacuuuacgauguguauuuggacguucaggagaaguggggacucgaggacguuauguugaugggugacuucaacgcagggugcaguuacguaagaccaucucagugguccagcauacgccuuuggacaagucccacuuuccaaugguuaaucccagauuccgccgauacuacugccacaccuacgcacugcgcauacgaucguaucguuguagccggcaugcuguugcguggagccgucguccccgacucagcacucccguuuaacuuccaggcugcauacgguuuauccgaccaacucgcccaggcuauuuccgaccauuacccagucgaggugaugcucaaauag

SEQ ID NO: 315723 - RNA, 849 nt, Artificial Sequence
  derived and/or modified sequence
augcggggcaugaagcugcuaggagcccuauuggcucuugccgcccugcuucagggggcagucucacugaaaauagcugcuuuuaacauccagacuuuuggagaaacgaagaugucaaacgccacccuagugucuuauauuguucagaucuuauccagguaugauauagcacucgugcaggaggucagagauagucaccuaaccgccgugggcaaacuccucgauaaucucaaucaggaugcuccagacacuuaccacuacgucgucagugagccacuugguagaaacaguuauaaagagcgcuaccuuuuuguguaucggccagaucagguuucugcaguugacaguuacuauuacgacgacgggugcgaaccuugcggaaaugacacuuuuaacagggaacccgccauaguucgcuucuuuuccagauucacugaagugagagaguucgcuauaguuccccuccaugccgcuccuggggaugcuguugcagaaaucgaugccuuguaugauguguaucucgauguucaggaaaaauggggucuggaagacguuaugcucaugggagacuucaaugcuggauguaguuauguucgccccucucaauggaguuccauuagacuguggacaucaccaacuuuucaauggcugauucccgacucugccgacacaaccgccaccccaacucacugugccuacgaccgcauuguuguggccggaaugcuauuacggggggccgugguuccugacucagcguuaccauuuaacuuccaagccgcauacgggcucucugaccaacuugcucaagcaauuuccgaccacuauccuguggagguaaugcucaaguag

SEQ ID NO: 315724 - protein, 187 aa, Artificial Sequence
  derived and/or modified sequence
MHQTPITTWSVSHWDGTAIRSATCSCTGLTRCLRWTATTTMMAASPAGTTPSTESQPLSGSSPGSQDVMLMGDFNAGCSYVRPSQWSSIRLWTSPTFQWLIPDSADTTATPTHCAYDRIVVAGMLLRGAVVPDSALPFNFQAAYGLSDQLFSVHTCSGAGLGERHGLPASAALPSNTCRAGTHRVST

SEQ ID NO: 315725 - DNA, 1209 bp, Artificial Sequence
  derived and/or modified sequence
ctgaacttttaaaactcccagacacgcactgcctgtgcaggatccggagcccagcagcactgccagggccttgaagtgcttcttcagagacctttcttcatagactacttttttttctttaagcagcaaaaggagaaaattgtcatcaaaggatattccagattcttgacagcattctcgtcatctctgaggacatcaccatcatctcaggatgaggggcatgaagctgctgggggcgctgctggcactggcggccctactgcagggggccgtgtccctgaagatcgcagccttcaacatccagacatttggggagaccaagatgtccaatgccaccctcgtcagctacattgtgcagggatgcaccagacacctatcactacgtggtcagtgagccactgggacggaacagctataaggagcgctacctgttcgtgtacaggcctgaccaggtgtctgcggtggacagctactactacgatgatggctgcgagccctgcgggaacgacaccttcaaccgagagccagccattgtcaggttcttctcccggttcacaggacgtcatgttgatgggcgacttcaatgcgggctgcagctatgtgagaccctcccagtggtcatccatccgcctgtggacaagccccaccttccagtggctgatccccgacagcgctgacaccacagctacacccacgcactgtgcctatgacaggatcgtggttgcagggatgctgctccgaggcgccgttgttcccgactcggctcttccctttaacttccaggctgcctatggcctgagtgaccaactgttctcagttcacacctgctctggagcagggctgggagaaagacacggccttcctgcctcagcggcactcccgagcaacacgtgccgagcagggacccacagggtctccacctgacaccaagggcttctgctgctgctggaaggacacccaacgggccagagatcagcttcttcttgtcaaactcacgaaggtgcagcagggtgagctcatcaaactgctcaaagcagaagagaacctgcaggtggccaagagcagctccatcagaccccgggggcctccagccaccacagaagaaaggatgagggcggcaggagggctgggggagccaagcgggccacactggggaacaccggggcagttggggttcctaggcctgcatgacagttactacgacacctg

SEQ ID NO: 315726 - DNA, 564 bp, Artificial Sequence
  derived and/or modified sequence
atgcaccagacccccatcaccacctggagcgtgagccactgggacggcaccgccatcagaagcgccacctgcagctgcaccggcctgaccagatgcctgagatggaccgccaccaccaccatgatggccgccagccccgccggcaccacccccagcaccgagagccagcccctgagcggcagcagccccggcagccaggacgtgatgctgatgggcgacttcaacgccggctgcagctacgtgagacccagccagtggagcagcatcagactgtggaccagccccaccttccagtggctgatccccgacagcgccgacaccaccgccacccccacccactgcgcctacgacagaatcgtggtggccggcatgctgctgagaggcgccgtggtgcccgacagcgccctgcccttcaacttccaggccgcctacggcctgagcgaccagctgttcagcgtgcacacctgcagcggcgccggcctgggcgagagacacggcctgcccgccagcgccgccctgcccagcaacacctgcagagccggcacccacagagtgagcacctag

SEQ ID NO: 315727 - DNA, 564 bp, Artificial Sequence
  derived and/or modified sequence
atgcaccaaacacccatcactacctggagtgtgtctcattgggatggcacggctattagatctgcaacatgtagctgtacgggcctgacacgatgcctgagatggacagccacgaccaccatgatggcagcctcccccgccggcactaccccttccaccgagtcacagcccctgagcggcagctcccctggttctcaagacgtaatgctcatgggcgacttcaacgctggatgtagctacgtacgaccatcccaatggtcttcaattagactgtggaccagtcccacctttcagtggcttattcccgactccgccgatactacagccacaccaacacattgtgcctacgatagaatcgtcgtagctggcatgcttctgcgcggggctgtagtccccgattccgcactgccctttaacttccaagccgcttatgggttgtccgaccaattattctctgtgcacacatgttccggtgcagggctcggcgaaagacacgggttgccagcaagcgcggccttgccctccaatacctgtcgtgcaggcacgcacagagtcagcacgtag

SEQ ID NO: 315728 - DNA, 564 bp, Artificial Sequence
  derived and/or modified sequence
atgcaccagacccccatcaccacctggagcgtgagccactgggatggaacagccatccgcagcgccacctgcagctgcaccggcctgacccgctgcctgcgctggacagccaccaccaccatgatggccgccagccctgctggcaccacccccagcacagagagccagcccctgagcggcagcagccctggcagccaggatgtgatgctgatgggagacttcaatgccggctgcagctatgtgcggcccagccagtggagcagcatccggctgtggaccagccccaccttccagtggctgatcccagacagcgctgacaccacagccacccccacccactgtgcctatgacagaattgtggtggccggcatgctgctgcggggagctgtggtgcctgacagcgccctgcccttcaacttccaggccgcctacggcctgagtgaccagctgttctctgtgcacacctgcagcggggccggcctgggggagagacatggcctgcctgccagcgctgccctgcccagcaacacctgccgggccggcacccaccgggtgtccacctag

SEQ ID NO: 315729 - DNA, 564 bp, Artificial Sequence
  derived and/or modified sequence
atgcaccagacccccatcaccacctggagcgtgagccactgggacggtacagcaattaggagcgccacatgctcatgcacaggactgacacgttgcttgagatggaccgctacaactaccatgatggctgcctctcccgccggtactaccccttcaactgaaagtcagccccttagtggaagctccccagggagccaggatgtcatgctaatgggcgacttcaacgccgggtgcagctacgttcgacccagtcaatggtccagtattcgcttgtggacaagccccaccttccagtggctcattcccgactccgcggacacaaccgccacccctacacattgcgcgtacgacaggatagtggtcgcaggcatgttgctgcgcggcgctgtggttccagattcagccttaccatttaacttccaagccgcctacggcctgagtgaccagttatttagcgttcacacatgttccggcgccggactgggcgagaggcacggtttacccgcatcggctgccctgccatctaacacttgtcgggccggtacacaccgcgtcagcacatag

SEQ ID NO: 315730 - DNA, 564 bp, Artificial Sequence
  derived and/or modified sequence
atgcaccagacaccaataacgacctggagtgtaagccattgggacggcacagccatccgatccgccacctgtagttgtaccggccttacgcgttgtctcaggtggactgccaccaccacaatgatggccgctagcccagcgggtacaaccccttctacagaatctcagcctctttccggatccagtcctggatctcaggacgtgatgttgatgggcgactttaatgcaggctgctcatacgtgaggccttcacagtggtcatcaatcaggttgtggacatccccaacttttcaatggctgattccagattcggccgacacgactgctacgccgacacactgtgcttatgatcgaattgttgtagcaggcatgttactgagaggcgctgtcgtcccagatagtgctctaccatttaatttccaggccgcatacggcctgtccgaccagctgttttccgtgcacacttgctcaggcgctgggctgggagagcggcatggtttgccagcatccgcggctctcccctcaaatacctgcagggcgggaacacaccgtgtgtctacctag

SEQ ID NO: 315731 - DNA, 564 bp, Artificial Sequence
  derived and/or modified sequence
atgcatcaaactcctatcaccacatggtctgtaagccactgggacggcactgcaattcggagcgccacctgctcctgcacaggtcttactcgctgtttgcggtggaccgctacaaccaccatgatggctgcatctcctgccggaactaccccaagtacggaatctcagccactctctggctcaagccctggatcacaagacgtcatgctgatgggtgattttaatgccggttgctcttacgtaaggccttcgcagtggagctcaattcgtctctggacaagccctaccttccagtggctgattccagattctgcggatacaacagctacaccaactcactgcgcatacgatcgtattgtggttgccggaatgctcctccgcggcgcagttgtgccagactccgctctgccatttaacttccaggctgcctacggtctgtcggatcagctgttctccgtacacacatgttccggcgctggtcttggagaaagacacggcctgcccgcttccgcagccctcccatctaatacctgtcgcgctggcacgcatagagtgtccacctag

SEQ ID NO: 315732 - DNA, 564 bp, Artificial Sequence
  derived and/or modified sequence
atgcaccagacacctattaccacttggtctgtgagtcattgggatggcaccgcaatcagaagcgctacatgttcttgcactggcttgactaggtgcttgcgttggaccgcaacgaccacaatgatggccgcatcaccagcaggaaccactccatcaacagagtcccagccactctctggcagttcacccggaagtcaggatgttatgctgatgggagatttcaacgccggttgctcttacgttcgcccctcgcagtggtccagtattcgtctgtggaccagtcctacttttcaatggctgattccagattctgcggatacaacagctacaccaactcactgcgcatacgatcgtattgtggttgccggaatgctcctccgcggcgcagttgtgccagactccgctctgccatttaacttccaggctgcctacggtctgtcggatcagctgttctccgtacacacatgttccggcgctggtcttggagaaagacacggcctgcccgcttccgcagccctcccatctaatacctgtcgcgctggcacgcatagagtgtccacctag

SEQ ID NO: 315733 - RNA, 564 nt, Artificial Sequence
  derived and/or modified sequence
augcaucaaacuccuaucaccacauggucuguaagccacugggacggcacugcaauucggagcgccaccugcuccugcacaggucuuacucgcuguuugcgguggaccgcuacaaccaccaugauggcugcaucuccugccggaacuaccccaaguacggaaucucagccacucucuggcucaagcccuggaucacaagacgucaugcugaugggugauuuuaaugccgguugcucuuacguaaggccuucgcaguggagcucaauucgucucuggacaagcccuaccuuccaguggcugauuccagauucugcggauacaacagcuacaccaacucacugcgcauacgaucguauugugguugccggaaugcuccuccgcggcgcaguugugccagacuccgcucugccauuuaacuuccaggcugccuacggucugucggaucagcuguucuccguacacacauguuccggcgcuggucuuggagaaagacacggccugcccgcuuccgcagcccucccaucuaauaccugucgcgcuggcacgcauagaguguccaccuag

SEQ ID NO: 315734 - RNA, 564 nt, Artificial Sequence
  derived and/or modified sequence
augcaccagacaccuauuaccacuuggucugugagucauugggauggcaccgcaaucagaagcgcuacauguucuugcacuggcuugacuaggugcuugcguuggaccgcaacgaccacaaugauggccgcaucaccagcaggaaccacuccaucaacagagucccagccacucucuggcaguucacccggaagucaggauguuaugcugaugggagauuucaacgccgguugcucuuacguucgccccucgcagugguccaguauucgucuguggaccaguccuacuuuucaauggcugauuccagauucugcggauacaacagcuacaccaacucacugcgcauacgaucguauugugguugccggaaugcuccuccgcggcgcaguugugccagacuccgcucugccauuuaacuuccaggcugccuacggucugucggaucagcuguucuccguacacacauguuccggcgcuggucuuggagaaagacacggccugcccgcuuccgcagcccucccaucuaauaccugucgcgcuggcacgcauagaguguccaccuag

SEQ ID NO: 315735 - protein, 299 aa, Artificial Sequence
  derived and/or modified sequence
MGGPRALLAALWALEAAGTAALRIGAFNIQSFGDSKVSDPACGSIIAKILAGYDLALVQEVRDPDLSAVSALMEQINSVSEHEYSFVSSQPLGRDQYKEMYLFVYRKDAVSVVDTYLYPDPEDVFSREPFVVKFSAPGTGERAPPLPSRRALTPPPLPAAAQNLVLIPLHAAPHQAVAEIDALYDVYLDVIDKWGTDDMLFLGDFNADCSYVRAQDWAAIRLRSSEVFKWLIPDSADTTVGNSDCAYDRIVACGARLRRSLKPQSATVHDFQEEFGLDQTQALAISDHFPVEVTLKFHR

SEQ ID NO: 315736 - protein, 278 aa, Artificial Sequence
  derived and/or modified sequence
MGGPRALLAALWALEAAGTAALRIGAFNIQSFGDSKVSDPACGSIIAKILAGYDLALVQEVRDPDLSAVSALMEQINSVSEHEYSFVSSQPLGRDQYKEMYLFVYRKDAVSVVDTYLYPDPEDVFSREPFVVKFSAPGTAQNLVLIPLHAAPHQAVAEIDALYDVYLDVIDKWGTDDMLFLGDFNADCSYVRAQDWAAIRLRSSEVFKWLIPDSADTTVGNSDCAYDRIVACGARLRRSLKPQSATVHDFQEEFGLDQTQALAISDHFPVEVTLKFHR

SEQ ID NO: 315737 - DNA, 2162 bp, Artificial Sequence
  derived and/or modified sequence
ctgcctcccaggccactcctagactcacgtgcctggccgccccacccaggggcttctgccagccctggcggcgccttggtgctgtgtgggtgtcattggcatgttgaccaacagcctcctgccctgcccagctggagctgtgcccccagctgcgctgcctgaggcctgtgggtgggtgggaggaccagggacggggacagggagatctgggagcctcggcctccaccgcagggtgagcaggtggagcagcagcaggagatgctgggtagggagtgtggctggtcctacctgcgctgccttgctttccctgaagggattctgctcagggaggcagagtctaggcgacctaatttctaggggcgaggacaagaacacagccgcaccgggatgtggctgaccgtctacctccctcctagggggctggcaggggcttctgggacggttttgggacaggtctggggcaccagaaccggctcaggcaggtctcccaccccttaccctgggggtctccatgggaatgaaagccaggagttcatcaggcacccagctgagtcgagggggcgggacccagtgcagcccggcccctgccttggtgccagagctactgccagagggagtcagtgcagtcctgtgtcggacacgcccgcagcctggacccgggatccccatccccctaggatctctgagcctcgggcctctgcacccacatccaaggtgagtctctcggctgccctgagctggggctggatgggccggaccctccattccggctgcagcttcccgcgcagtgagaaggcagcggtccctgagagcccagcagtgccctgggagcctgcagaacgcaggggcggattccgcgtcgcactggccgtcaaggggcggccgcggagggaaggggtgggtcggtgggtctgacagcgggtctgcgtaggcggcagcgtctgtccctcccagcctctcgctccgcgccatgggcgggccccgggctctgctggccgcactctgggcgctggaagccgccgggaccgccgcgcttcgcatcggagccttcaacattcagagcttcggtgacagcaaagtgtcggaccccgcttgcggcagcatcatcgcgaagatcctggctggctatgacctcgcgctggtgcaggaggtgcgagacccagacctcagcgccgtgtccgcgctcatggagcagatcaacagcgtgtccgagcacgagtacagctttgtgagcagccagcccctgggccgggaccagtacaaggagatgtacctgttcgtgtacaggaaagacgcggtgtcggtcgtggacacctacctgtacccagaccccgaggacgtcttcagccgcgagcccttcgtggtcaagttctcggcccccggcaccggtgagcgggccccgcccctcccctcccgccgagctctgacgcccccaccccttcccgcagcagcacagaacctggtgctgatcccgctgcacgcggcgccgcatcaagccgtggcggagatcgacgcgctctacgacgtgtacctggacgtgatcgacaagtggggcaccgacgacatgctgttcctgggcgacttcaacgccgactgcagctatgtgcgggcgcaggactgggccgccatccgtctgaggagcagtgaggtcttcaagtggctcatccctgacagcgccgacaccacggtgggcaactcagactgcgcctacgaccgcattgtggcctgtggcgcccgcctgcgccggagcctgaagccccagtcggccaccgtgcacgacttccaggaggaattcggcctggaccagactcaggctcttgccatcagcgaccactttccagtggaggtgaccctcaagttccaccgatgactcgaggcctggctggggcatgccacctgcagaccctggctctgaggaatggcccaacagtggccccttcagggtggcagccacccttcagtgaggccccaaggcagagtcggctgggcgtggaccaggggccatggacacgtgatgtgctgctctgtacctccgttccccatctgtgggacgggctgcatccagcgacctcatggggtgttgtgagccccatgaggggtgcagggggcactgcccggcagatgtctgctcaataaatgagctgctcccggtcgggccccac

SEQ ID NO: 315738 - DNA, 1323 bp, Artificial Sequence
  derived and/or modified sequence
gtgcagtcctgtgtcggacacgcccgcagcctggacccgggatccccatccccctaggatctctgagcctcgggcctctgcacccacatccaaggcggcagcgtctgtccctcccagcctctcgctccgcgccatgggcgggccccgggctctgctggccgcactctgggcgctggaagccgccgggaccgccgcgcttcgcatcggagccttcaacattcagagcttcggtgacagcaaagtgtcggaccccgcttgcggcagcatcatcgcgaagatcctggctggctatgacctcgcgctggtgcaggaggtgcgagacccagacctcagcgccgtgtccgcgctcatggagcagatcaacagcgtgtccgagcacgagtacagctttgtgagcagccagcccctgggccgggaccagtacaaggagatgtacctgttcgtgtacaggaaagacgcggtgtcggtcgtggacacctacctgtacccagaccccgaggacgtcttcagccgcgagcccttcgtggtcaagttctcggcccccggcaccggtgagcgggccccgcccctcccctcccgccgagctctgacgcccccaccccttcccgcagcagcacagaacctggtgctgatcccgctgcacgcggcgccgcatcaagccgtggcggagatcgacgcgctctacgacgtgtacctggacgtgatcgacaagtggggcaccgacgacatgctgttcctgggcgacttcaacgccgactgcagctatgtgcgggcgcaggactgggccgccatccgtctgaggagcagtgaggtcttcaagtggctcatccctgacagcgccgacaccacggtgggcaactcagactgcgcctacgaccgcattgtggcctgtggcgcccgcctgcgccggagcctgaagccccagtcggccaccgtgcacgacttccaggaggaattcggcctggaccagactcaggctcttgccatcagcgaccactttccagtggaggtgaccctcaagttccaccgatgactcgaggcctggctggggcatgccacctgcagaccctggctctgaggaatggcccaacagtggccccttcagggtggcagccacccttcagtgaggccccaaggcagagtcggctgggcgtggaccaggggccatggacacgtgatgtgctgctctgtacctccgttccccatctgtgggacgggctgcatccagcgacctcatggggtgttgtgagccccatgaggggtgcagggggcactgcccggcagatgtctgctcaataaatgagctgctcccggtcgggcccc

SEQ ID NO: 315739 - DNA, 1219 bp, Artificial Sequence
  derived and/or modified sequence
gcggccgcggagggaaggggtgggtcggtgggtctgacagcgggtctgcgtaggcggcagcgtctgtccctcccagcctctcgctccgcgccatgggcgggccccgggctctgctggccgcactctgggcgctggaagccgccgggaccgccgcgcttcgcatcggagccttcaacattcagagcttcggtgacagcaaagtgtcggaccccgcttgcggcagcatcatcgcgaagatcctggctggctatgacctcgcgctggtgcaggaggtgcgagacccagacctcagcgccgtgtccgcgctcatggagcagatcaacagcgtgtccgagcacgagtacagctttgtgagcagccagcccctgggccgggaccagtacaaggagatgtacctgttcgtgtacaggaaagacgcggtgtcggtcgtggacacctacctgtacccagaccccgaggacgtcttcagccgcgagcccttcgtggtcaagttctcggcccccggcaccgcacagaacctggtgctgatcccgctgcacgcggcgccgcatcaagccgtggcggagatcgacgcgctctacgacgtgtacctggacgtgatcgacaagtggggcaccgacgacatgctgttcctgggcgacttcaacgccgactgcagctatgtgcgggcgcaggactgggccgccatccgtctgaggagcagtgaggtcttcaagtggctcatccctgacagcgccgacaccacggtgggcaactcagactgcgcctacgaccgcattgtggcctgtggcgcccgcctgcgccggagcctgaagccccagtcggccaccgtgcacgacttccaggaggaattcggcctggaccagactcaggctcttgccatcagcgaccactttccagtggaggtgaccctcaagttccaccgatgactcgaggcctggctggggcatgccacctgcagaccctggctctgaggaatggcccaacagtggccccttcagggtggcagccacccttcagtgaggccccaaggcagagtcggctgggcgtggaccaggggccatggacacgtgatgtgctgctctgtacctccgttccccatctgtgggacgggctgcatccagcgacctcatggggtgttgtgagccccatgaggggtgcagggggcactgcccggcagatgtctgctcaataaatgagctgctcccggtcgggcccc

SEQ ID NO: 315740 - protein, 500 aa, Artificial Sequence
  derived and/or modified sequence
MASMLLAQRLACSFQHSYRLLVPGSRHISQAAAKVDVEFDYDGPLMKTEVPGPRSQELMKQLNIIQNAEAVHFFCNYEESRGNYLVDVDGNRMLDLYSQISSVPIGYSHPALLKLIQQPQNASMFVNRPALGILPPENFVEKLRQSLLSVAPKGMSQLITMACGSCSNENALKTIFMWYRSKERGQRGFSQEELETCMINQAPGCPDYSILSFMGAFHGRTMGCLATTHSKAIHKIDIPSFDWPIAPFPRLKYPLEEFVKENQQEEARCLEEVEDLIVKYRKKKKTVAGIIVEPIQSEGGDNHASDDFFRKLRDIARKHGCAFLVDEVQTGGGCTGKFWAHEHWGLDDPADVMTFSKKMMTGGFFHKEEFRPNAPYRIFNTWLGDPSKNLLLAEVINIIKREDLLNNAAHAGKALLTGLLDLQARYPQFISRVRGRGTFCSFDTPDDSIRNKLILIARNKGVVLGGCGDKSIRFRPTLVFRDHHAHLFLNIFSDILADFK

SEQ ID NO: 315741 - DNA, 1503 bp, Artificial Sequence
  derived and/or modified sequence
atggcaagcatgctgctggctcagagactggcctgttctttccagcatagctatcgcctgctggtgccagggagtcgccacatctcacaggccgccgcaaaagtggacgttgaatttgattacgacggccccctaatgaaaaccgaggtgccaggtcctaggtctcaggagttgatgaaacagctgaatattatccaaaatgccgaagccgtacacttcttttgcaactacgaggagtctaggggaaactatttggttgacgttgatgggaacaggatgcttgacctttacagccagatttcttcggtgccaatcggctattcacaccccgccctgttgaagctcatacagcagccccagaatgcctctatgtttgtcaacaggccggcactagggattctcccccccgagaattttgttgaaaaattgcgccaatccctgctgtcagtggcaccgaagggaatgtcccagctcataacaatggcttgcggttcttgcagtaacgaaaatgccctgaagactatcttcatgtggtaccgatccaaggaaaggggccagcgggggttttctcaggaggaactggagacatgtatgattaaccaggccccgggatgtccagattattctatcttgagctttatgggcgcctttcatggcaggacaatgggatgcctagcaactacccactccaaagcaatccataagatcgatattccatccttcgattggcccattgcaccatttcctcggctgaaataccctctggaggaattcgtaaaggaaaaccaacaggaggaagcaagatgtcttgaggaggttgaggacctgatagtgaagtatcgcaagaagaagaagaccgttgcaggaattattgtcgagcccatacagagtgaagggggagacaaccacgccagtgatgatttcttccggaagttgcgagacatcgcacggaagcatggttgtgccttcctggttgatgaagtgcagactgggggcggatgtactggcaaattttgggctcatgagcactggggcttagatgatcctgctgatgtgatgacgttttcaaagaagatgatgactggtggcttcttccacaaggaggaatttcgccccaatgccccttacagaatcttcaatacctggctgggtgatccctctaaaaacctgctacttgcagaggtgattaatatcattaaacgcgaagatctcttgaacaatgcagcccacgccggcaaggccctactcaccggcttactggacctgcaggcgcggtatcctcaatttatcagccgcgtgaggggcagaggcacattctgttcctttgacacccctgacgactctattcgcaacaaactgattctcatcgccagaaataaaggcgtggttcttggagggtgtggggataaaagtatcagatttagacctactctggtgttccgcgaccaccacgcccacttgtttctgaacatcttctctgatatccttgcggatttcaagtag

SEQ ID NO: 315742 - DNA, 1503 bp, Artificial Sequence
  derived and/or modified sequence
atggccagcatgctgcttgcccagcgtcttgcctgctccttccagcactcttaccggttgctcgtgcctgggtctaggcacatctcacaagctgccgctaaagtggacgtggaatttgattacgatgggccgctgatgaagaccgaggtgcctgggccacggtcgcaggaactcatgaaacagctcaatatcatccagaatgccgaagcagtgcacttcttttgcaattacgaggagagtcgaggaaactacctggtggatgtggatggcaatcggatgctggatctctattcccagattagctccgtccccattggatattctcaccccgctcttctgaaactgatccagcagccgcagaatgcaagcatgttcgtaaaccgccccgctctcgggattctgccacctgaaaattttgtcgaaaagctgcgtcagtcattattgagcgtggctcctaagggtatgtcccagctgataacaatggcatgcgggtcatgcagcaacgaaaatgcgcttaagactattttcatgtggtatcgaagtaaggagcgcggacaaagagggttctctcaagaagagctggagacttgtatgatcaaccaagctccaggttgtcccgattacagcatcttgtccttcatgggtgctttccacgggcgtacaatgggttgtctggcaacaactcactccaaggcaatccataaaatcgatattcctagttttgattggcccatagctccattccctaggcttaagtatcctctggaggaattcgtgaaagagaatcagcaagaagaagctcgctgtctggaggaagtagaagacctgatcgtgaagtataggaaaaagaaaaaaacggtcgcgggaataatcgtcgagcccattcaaagcgaaggaggagataaccacgcatcagatgacttcttccggaagttgcgcgatatcgctagaaaacacggatgtgccttcctggttgatgaagtgcaaacaggtggcgggtgcacgggaaagttctgggcacatgaacactgggggttggatgatccagcagacgtgatgacattcagcaagaagatgatgacgggtgggtttttccataaagaggagtttaggcccaacgctccctaccgaatctttaatacctggttgggcgatcccagcaagaatctgttgttggctgaagtgatcaatattataaaacgagaggacctcttgaacaatgcagctcacgctgggaaggctctgttaacagggttgctcgacctgcaagcccgatacccccagtttattagtagagtgcgcgggcgaggcacattctgcagctttgatacacccgatgatagtatcaggaacaagctaattctcatagcccgcaataagggcgtggtgcttgggggatgcggggataagtctattaggttccggcccaccctggtgttccgtgatcatcacgctcacctgttccttaacatcttttccgatattttagcagacttcaaatag

SEQ ID NO: 315743 - DNA, 1503 bp, Artificial Sequence
  derived and/or modified sequence
atggcttcaatgctgttggctcagcgcctggcctgctcattccagcactcttatagattactcgtccccggatccagacacatctcccaagccgccgccaaagtggatgtcgagtttgattatgacggccccctcatgaagactgaagtgcccgggccccgcagccaggaactgatgaagcagttgaatatcatacagaatgccgaggctgttcactttttctgcaattacgaagagtccagaggcaattatctcgttgatgtggatggcaaccggatgctggacctgtacagccagatctcctcagttcctattggctatagtcacccagctctgcttaagcttattcaacagccccagaacgcctccatgtttgttaatagacccgcgctgggcattttgcctcctgaaaacttcgttgaaaaacttcggcaaagcctactgtccgttgccccgaagggaatgagccagctcataacgatggcctgcgggagctgctccaatgaaaacgctctaaagactatattcatgtggtacagatcaaaggagagaggacagcgtggctttagtcaggaggagctggaaacttgcatgatcaatcaggccccgggctgccccgattactcaatcttatcctttatgggggcattccatggaaggacaatggggtgcctggccacaacacactccaaagcaattcacaagatcgatattccctcctttgactggccaattgctcccttcccgcgcctgaaatatcccctagaagagttcgtcaaagagaaccagcaggaagaggccagatgcttggaggaggtcgaggatttaatcgtgaagtatcgcaagaagaaaaaaactgtcgcagggatcatagtcgaacccatccagagtgagggaggcgacaaccacgcgtccgacgacttctttcgtaaactgagagatattgcacgcaagcatgggtgcgcatttctggttgatgaggttcagaccggcggagggtgcactggtaagttctgggcacacgaacattgggggcttgatgaccctgccgacgttatgacctttagcaagaaaatgatgaccggaggctttttccacaaagaggagttccggcccaatgcaccatacagaatttttaatacctggcttggagatccaagcaaaaacctgctgctggccgaagttatcaacattatcaaacgggaagacttacttaacaatgctgcccacgctggaaaggcgcttctcacaggattactcgacctccaggcccggtatccacagttcatctccagggtccgcggcagaggcaccttttgttcttttgacacccctgatgactccataagaaacaagctcattctcattgccagaaacaaaggcgtggtgctgggtgggtgcggagacaaaagcattcgtttcaggcctactctggtgtttagagatcaccacgcccacctgttcctaaatatcttctcggacatcctcgccgacttcaaatag

SEQ ID NO: 315744 - DNA, 1503 bp, Artificial Sequence
  derived and/or modified sequence
atggcctccatgctgctggcccagaggctggcctgcagcttccagcacagctaccgcctgctggtgcccggcagccgccacatcagccaggccgccgccaaggtggatgtggagtttgattatgatggccccctgatgaagacagaggtgcccggccccaggagccaggagctgatgaagcagctgaacatcatccagaatgctgaggccgtgcacttcttctgcaactatgaggagagccggggcaactacctggtggatgtggatggcaacaggatgctggacctgtacagccagatcagctctgtgcccatcggctacagccacccagccctgctgaagctgatccagcagccccagaatgcctccatgtttgtgaacagacctgccctgggcatcctgcccccagaaaattttgtggagaagctgcggcagagcctgctgtctgtggcccccaagggcatgagccagctgatcaccatggcctgtggcagctgcagcaatgaaaatgccctgaagaccatcttcatgtggtaccgcagcaaggagcggggccagaggggcttcagccaggaggagctggagacctgcatgatcaaccaggcccctggctgcccagactacagcatcctgtccttcatgggcgccttccacggccgcaccatgggctgcctggccaccacccacagcaaggccatccacaagattgacatccccagctttgactggcccatcgcccccttcccccggctgaagtaccccctggaggagtttgtgaaggagaaccagcaggaggaggcccgctgcctggaggaggtggaggacctgattgtgaagtacaggaagaagaagaagacagtggccggcatcatcgtggagcccatccagagcgagggcggggacaaccacgccagtgatgacttcttcaggaagctgcgggacatcgccaggaagcacggctgtgccttcctggtggatgaggtgcagacaggaggcggctgcaccgggaagttctgggcccacgagcactggggcctggatgatcctgcagatgtgatgaccttcagcaagaagatgatgactggaggcttcttccacaaggaggagttccggcccaatgccccctaccgcatcttcaacacctggctgggggaccccagcaagaacctgctgctggccgaggtgatcaacatcatcaagcgggaggacctgctgaacaatgctgcccatgctgggaaggccctgctgaccggcctgctggacctgcaggcccgctacccccagttcatcagccgggtgcggggccggggcaccttctgcagctttgacaccccagatgacagcatccggaacaagctgatcctgattgccaggaacaagggcgtggtgctgggcggctgtggggacaagagcatccgcttccggcccaccctggtgttccgggaccaccacgcccacctgttcctgaacatcttcagtgacatcctggccgacttcaagtag

SEQ ID NO: 315745 - DNA, 1503 bp, Artificial Sequence
  derived and/or modified sequence
atggccagcatgctgctggcccagcggctggcctgcagcttccagcacagctatcggctgctcgtgcccggttctaggcacatctcccaggctgctgccaaggtggacgtcgagtttgattacgacggcccgctgatgaaaaccgaagtaccaggcccgagaagccaagaactgatgaaacagctcaatatcatccagaatgctgaggcagtgcactttttttgtaactacgaggagtccagaggcaactatttggtagatgtcgatggaaaccgaatgttagatctttatagccagatcagttccgtccccattggttattcgcaccccgctttactcaaactgatccagcaaccacaaaatgccagtatgtttgtgaacaggccagctctgggcatactacctcctgaaaacttcgttgagaagcttagacaatccctgctttctgtggcacccaagggcatgtcacagctaattacaatggcctgtggaagttgctccaatgaaaatgcactgaaaacgatttttatgtggtatagatcgaaggagagaggtcagcggggattctcacaggaagaactggagacctgcatgattaaccaggcccctggatgtccggattattctatcctgagctttatgggcgcctttcacgggaggactatgggatgtctcgcaaccacgcattctaaggcgatccataaaatcgatattccatcgttcgactggcccattgctccgtttcctcgcttgaagtatcctctcgaagaattcgtgaaggaaaaccagcaggaagaagcacggtgtttggaggaagtggaagatctcattgtcaaatatagaaaaaaaaagaaaaccgtggctgggattattgtcgagcccatccagagcgaaggcggagacaaccatgctagcgatgatttttttaggaagctgcgcgatatcgcccggaaacacggctgcgccttcttggtggatgaagttcagactggcggcggatgtaccggcaagttttgggcacacgagcattggggactggatgatcccgctgatgtcatgaccttttctaagaagatgatgactgggggcttttttcataaagaagaattccgccccaatgccccttatcggatttttaacacatggcttggcgaccccagtaaaaacctgttgctggctgaagtgattaatataatcaaaagggaggacctgctcaacaacgcggcccacgccggcaaggccctacttacaggcctcctggatttgcaggcaaggtacccgcagtttatcagcagagtaagagggagaggtactttctgttccttcgacactcccgacgactcgataagaaataagctcatcctgattgccagaaacaagggcgtggttctgggtgggtgcggcgataaatctattagatttagacccacactcgtatttagggaccatcacgcacacctctttctgaacatctttagtgatattcttgcagactttaagtag

SEQ ID NO: 315746 - DNA, 1503 bp, Artificial Sequence
  derived and/or modified sequence
atggccagcatgctgctggcccagcggctggcctgcagcttccagcactcataccgtctgctggtccccggctcgcgtcacatctcccaggccgccgctaaggtggacgtggaattcgattacgacggtccactgatgaagactgaagtgccgggaccacgttcccaagaacttatgaagcagctcaacataatacagaatgccgaagcagtgcattttttttgcaattatgaggaaagtaggggaaattacctcgtcgatgtggatgggaatcgcatgcttgacctgtatagccagatctcttccgtgccaatcggatattcacatccagccctcctcaagttgatccaacagccccagaacgcttccatgtttgtgaaccgcccagctctcggaatcctgccccccgagaattttgttgagaaactccgccaatctttactgagtgtggcaccgaaaggcatgtcgcagttaattacaatggcctgtggatcgtgctcaaacgagaacgctctgaagactatcttcatgtggtataggtctaaggagcgaggccagcggggtttcagtcaggaggagctggaaacttgtatgataaatcaggcgcctggttgcccagattactccattctatcctttatgggagctttccacggccgcaccatgggttgcctggcgaccacgcatagcaaagctattcataaaatagatattcctagtttcgattggccaattgccccctttccaagacttaaatacccactggaagagttcgttaaggaaaaccaacaagaagaggctaggtgtctggaggaggttgaagatttaattgtgaaatataggaaaaagaaaaagactgtagctgggataatcgtggaacctatccagtcggaaggaggcgataatcacgcctctgatgattttttccggaagctgcgggacatcgctagaaaacatggctgcgccttcctggtcgatgaagtgcaaaccgggggggggtgtactggaaagttttgggctcatgagcactggggactggatgatcccgccgacgtcatgacattctctaaaaaaatgatgaccggtggtttcttccacaaggaggagttccgccccaacgcaccatacagaatctttaacacatggctaggggacccctcaaagaacctcctcctggccgaggttattaatattatcaagagagaggatctgctgaataatgccgcccacgccggtaaggcactcctaaccggtttgctagatttgcaggcacgttacccccaatttatatcaagagtgcgaggtaggggtactttctgtagttttgacaccccagacgactccattaggaacaaactcattctgatcgccaggaataaaggcgtggtgctgggtggatgcggcgacaaaagcatccgttttaggcctacattggtgtttcgggaccaccacgcgcatctgtttctgaacatcttctctgacattttagcagacttcaagtag

SEQ ID NO: 315747 - DNA, 1503 bp, Artificial Sequence
  derived and/or modified sequence
atggccagcatgctgctggcccagcggctggcctgcagcttccagcactcctaccggctgctagttccagggtcacggcacatcagccaggcagcggctaaagtggacgttgagttcgattatgatggccctctcatgaagaccgaggtacctggcccccggagccaggaactgatgaaacaacttaatatcatacagaacgcggaggccgtccactttttttgtaactatgaggaaagcagaggtaattaccttgtggacgttgacggcaacagaatgctagatctttacagtcagatctcctcagttcctattggctattcacatcccgcgctcctcaagttgatccagcagccccagaatgccagtatgtttgtgaacagacctgccctgggcatccttccaccggagaattttgtcgagaaactgagacagagcttgctgtcagtagcgcccaaaggcatgagccaactgattaccatggcttgtggctcctgctctaatgagaatgcgctaaaaactatatttatgtggtacaggtccaaagaacgcggccagcggggtttttctcaggaggagttagaaacctgcatgatcaaccaggcccccggatgtcccgactattccatcctatcctttatgggtgcctttcacgggcggaccatgggctgtcttgccaccacacattcaaaggctatccacaaaattgacataccaagttttgattggcctatagcccccttcccacgcctgaaatatccactggaagaatttgtgaaggagaatcagcaggaggaagcccgatgcctggaagaagtcgaagacctgattgtaaaatatagaaaaaagaaaaagactgtggccggaatcatcgtagagccaattcagtccgagggcggggataaccatgcctctgatgatttcttccgaaagctacgcgacattgcccgcaagcacggctgcgcctttcttgtcgatgaagttcagacaggtggaggatgcaccggaaaattctgggcacacgagcactggggccttgacgatcctgccgatgtcatgacgttctcaaagaaaatgatgacaggtggattcttccacaaggaagagtttaggcccaatgccccctaccggatattcaatacttggctcggcgatcctagcaagaatctgctgctggctgaggtgattaacatcattaaacgagaggatctattgaataacgccgcacacgcaggcaaagctttgttgacaggattgctggaccttcaggcacggtatccacagttcatctccagagtgaggggaagagggaccttttgttccttcgatacccccgacgactccattcgaaataaactgatattgattgctaggaacaagggagttgtcctgggtgggtgcggggacaagagtatccgatttaggccgacactggtgttccgggatcatcacgcacatctcttcctgaatatcttttccgacattctggccgacttcaagtag

SEQ ID NO: 315748 - DNA, 1503 bp, Artificial Sequence
  derived and/or modified sequence
atggctagtatgctgctggcccaaaggctggcctgttcctttcagcactcttaccgcttgctcgttcctggctcccggcatattagccaggcggctgcaaaggtggatgtggagtttgactacgacgggcctctgatgaagaccgaggtgcctgggccaaggagccaggaactgatgaaacagctcaatataatacagaacgccgaggcagtgcattttttctgcaactatgaagagagtcgcggtaattacctggtggacgtggatggcaatcgcatgctcgacctctattcccagatatcgtctgtgcccatcgggtacagccaccctgcattgctgaaacttatccagcaacctcaaaatgcctcaatgtttgtgaatcgacccgcactcggaattctccctccagagaactttgttgagaagctgcgacaatctctcttatctgtggctccaaagggaatgtctcagctcattacaatggcctgcggttcctgtagcaacgagaacgccctcaaaactatctttatgtggtatcgctcaaaagaacggggtcagcgcggattctctcaagaggagctagaaacgtgcatgatcaatcaagcacctgggtgtccagactacagcatcctgtcctttatgggcgcattccacgggcgaacaatgggatgtctggcaaccactcattcaaaggctatacacaagattgatataccctcctttgactggcctatcgctccttttcctcgtcttaaataccccctcgaagaattcgtgaaggagaatcaacaggaagaagctaggtgcctggaagaggttgaagacctcatcgtgaaatacagaaagaagaagaagaccgtggctggcattatagtcgagcctatccagtccgaggggggagacaatcatgcgagcgacgactttttcagaaaattacgggatatcgcccgaaagcacggatgtgcgtttctcgtagacgaggttcaaaccggtgggggttgcacagggaaattctgggcacacgagcattggggcctggatgacccggctgacgtgatgacctttagcaagaaaatgatgacgggagggttctttcacaaggaggaattcaggccaaacgccccttacaggatttttaacacttggctgggggaccctagcaagaacctgctcctggcagaggtgattaatattatcaagcgggaagaccttctcaacaacgcagcccatgcaggcaaagccctgttaaccgggctgcttgatcttcaagctaggtatccacagtttatttctcgggtcagaggtcgaggcacattctgtagtttcgatacacccgacgattcaataagaaacaagttaatccttatcgcgagaaataaaggagtggtcctcggcggttgcggcgataaaagcattcgcttccggcctaccttggtattccgagatcatcacgctcacctgttcctcaatatcttctctgacattctggctgactttaaatag

SEQ ID NO: 315749 - DNA, 1503 bp, Artificial Sequence
  derived and/or modified sequence
atggctagtatgcttctggctcagaggctggcatgttcttttcagcacagctatagactcctggtgccaggtagtaggcacatcagccaggcagctgccaaggtggatgtggagttcgactacgatggtccgctcatgaaaactgaggtgcctggtccaagaagccaggagttgatgaagcagctgaacattatacagaacgcagaggccgttcattttttttgtaactatgaggaatctcgcggtaactatctggtggatgttgatggcaatcgaatgctggatctgtatagtcaaattagtagcgtcccaataggatactctcaccccgctctgctcaagctgattcagcagccccagaacgcctcaatgttcgtcaacagacccgcactgggaattctgcctccggagaactttgttgaaaagttaagacagagcctgttaagcgtagccccaaaaggcatgagtcagctcataacgatggcatgcggctcctgctccaacgaaaatgccctcaaaacaatcttcatgtggtacaggtccaaagaaagaggtcagcgcggttttagccaggaagaattggaaacatgtatgatcaaccaggccccaggctgtcccgactatagcatattgagctttatgggcgcatttcatggtaggaccatgggttgcctcgccacaacgcattccaaggccattcataagatcgatatccccagttttgattggccaattgcaccattcccccgtttgaagtaccccctggaagaatttgtcaaagagaatcagcaggaagaggctagatgccttgaggaagttgaggatctgattgtgaaataccgaaaaaagaagaaaacagttgccggtattatcgtcgaacccatccaaagtgaaggaggggataatcacgcttccgatgatttcttccggaagcttagagacatcgcccgtaaacacggatgcgcgttcctggtcgacgaggtgcagacaggaggtggttgtactggcaaattctgggcgcatgaacattggggactcgacgatccagcagatgtgatgacatttagtaagaagatgatgactgggggtttttttcacaaggaggagtttcgtcccaatgcgccatatcgcatttttaacacttggctgggcgatccatccaagaatcttctgctggccgaagtgattaacataattaagcgcgaggacctcctcaacaatgccgcacacgctggaaaagcacttctgacgggcctcttggatctccaggcacgctatccacagtttatttcgcgggtgcgtggtcggggaacattttgctcgtttgatacccctgacgattcgatccggaataagctgatcttgattgctaggaataaaggtgttgttctgggcggatgtggagacaaatccatacggtttcgcccaacgcttgtctttcgtgaccaccatgcccatctgttccttaacatcttttctgacatcttagctgatttcaagtag

SEQ ID NO: 315750 - DNA, 1503 bp, Artificial Sequence
  derived and/or modified sequence
atggcctctatgctcttggctcaacgactggcttgtagtttccagcactcttatagacttctggtacctggcagccgtcacatctcccaagctgctgctaaggtggacgtggaattcgattatgacggcccactgatgaagaccgaggtgccgggtcctagatcacaagagcttatgaagcagttgaatattatacagaatgctgaagccgtgcattttttctgcaactatgaagagagcaggggaaattacttagtggatgtggacgggaaccgaatgttggatctgtattcgcagatcagctccgtgcccattgggtactctcaccccgcacttctcaagttaattcagcagcctcagaacgcttccatgttcgtgaacagaccagcacttgggatcttgccccctgaaaacttcgtagaaaagcttcggcagtcactgctgagtgtggctccgaagggaatgtcacagctcataaccatggcttgtggctcatgtagcaacgagaacgctttaaaaactatctttatgtggtatagatcaaaagagaggggacagcggggattttctcaggaggaactcgagacatgcatgataaatcaggcacccggttgccccgattattccatcttgagtttcatgggcgcttttcatggccgaactatgggttgcctggcgactacccattccaaggcaattcacaagatcgacattccttccttcgattggcctatagcgcctttcccaaggctaaagtacccattagaggagtttgtgaaagagaaccagcaggaagaagcaaggtgtctggaagaagtagaagacttgattgttaagtaccggaagaaaaaaaaaactgtcgcagggattattgtggaacctatccagagcgaagggggtgataatcatgcgtcggatgactttttccggaagcttagggatatcgcacgaaagcacgggtgcgcatttctggtggacgaggtgcagacgggcggtggctgcaccggcaaattctgggcccatgaacattggggactcgacgatccagctgatgtcatgactttctcgaagaagatgatgacaggcggatttttccacaaggaggagttcagaccaaacgcaccctatagaatatttaatacatggctgggcgacccatcaaagaacctactgctcgcagaggtgattaatatcataaaaagagaggatttgcttaacaatgccgctcacgctgggaaagccctcctgaccggcctgcttgatctacaggcacggtatccccaattcattagtcgcgtgagggggagagggaccttttgtagtttcgacacaccagatgattctatccgcaacaaactgatacttatcgcccgtaacaagggcgtggttctggggggatgcggcgataagagcattcgattccgtccaactttggtattcagggaccaccacgcacacctgtttcttaatattttctccgacattctggctgacttcaaatag

SEQ ID NO: 315751 - DNA, 4836 bp, Artificial Sequence
  derived and/or modified sequence
ggccgggacgctcggcggagccagggagtccggcgagtcgctgggggaagtcgagcagacacccagcgctgccggaactcggggcgcgcatcccgcaagtcggaacccggcggatcggatcccgcagatcggagacggggcctggagggtggcagcacgcaaagggtgtccctgtccctcaaggggtcatggcctccatgttgctcgcccagcgcctggcctgcagcttccagcacagctaccgcctgctggtgcctggatccagacacattagtcaagctgcagccaaagtcgacgttgaatttgattatgatgggcctctgatgaagacggaagtcccagggcctagatctcaggagttaatgaaacagctgaatataattcagaatgcagaggctgtgcattttttctgcaattacgaagagagccgaggcaattacctggttgatgtggacggcaaccgaatgctggatctttattcccagatctcctctgtccccataggttacagccaccccgccctgctgaaactcatccaacagcctcaaaatgcgagcatgtttgtcaacagacccgccctcggaatcctgcctccggagaactttgtggagaagctccggcagtccttgctctcggtggctcccaaagggatgtcccagctcatcaccatggcctgcggctcctgctccaatgaaaacgccttaaagaccatcttcatgtggtaccggagcaaggaaagagggcagaggggcttctcccaggaggagctggagacgtgcatgattaaccaggcccctggctgccccgactacagcatcctctccttcatgggcgcgttccatgggaggaccatgggttgcttagcgaccacgcactctaaagccattcacaagatcgacatcccttcctttgactggcccatcgcaccgttcccacggctgaaataccctctggaagagtttgtgaaagagaaccaacaggaggaggcccgctgtctggaagaggtggaggatctgattgtgaaatatcggaaaaagaagaagacggtggccgggatcatcgtggagcccatccagtccgagggtggagacaaccacgcatccgatgacttctttcggaagctgagagacatcgccaggaagcatggctgcgccttcttggtggacgaggtccagaccggaggaggctgcacgggcaagttctgggcccatgagcactggggcctggatgacccagcagacgtgatgaccttcagcaagaagatgatgactgggggcttcttccacaaggaggagttcaggcctaatgctccctaccggatcttcaacacctggctgggggacccgtccaagaacctgttgctggctgaggtcatcaacatcatcaagcgggaggacctgctaaataatgcagcccatgccgggaaggccctgctcacaggactgctggacctccaggcccggtacccccagttcatcagcagggtgagaggacgaggcaccttttgctccttcgatactcccgatgattccatacggaataagctcattttaattgccagaaacaaaggtgtggtgttgggtggctgtggtgacaaatccattcgtttccgtcccacgctggtcttcagggatcaccacgctcacctgttcctcaatattttcagtgacatcttagcagacttcaagtaaagaagccatttccactacagtgagaaagcccggatcccaacagttgtcaaattgattagtttgcctaattcatgttttcacttaaaagtatcagaggtgaatgcacagtgaagggtgatttgtggggagggagcatttttggtggtcttgggggaggggaggggagggaagggctggtgttgattttcctccctgcagagccaatggtgcacattggtttaagcccagagatcctgcttgagccctggactcatcttgggaagggccatgggaggtcctggctagagttctgcccaaccttgaccaaccccagcaatttttccaaaagccagtcaagggcattacatttgttcctgggactggcagctgggcctcctgggtgccagtccatctcaagtgccatattctgtgatcacggatgttggctccccctcgccctatgcaagcaaacacactctcacctcctctcccagcctcccggagctctgagcacgccccacgcatggtgcaggagggactggacagatctgaggaaggccgtaaaatggggacaggaggattcagctcaggagtaagggaagaggtcctctggccccctgaagatgagaatcacccctctcagtgcacctggggatccccctaaactgtgaattctgccctggacagggctttgcccttggaggatccccaggtggccttacccgtgattcttactcggcatcctccattccccaaactccctcctccctgttaaatgtcaacctagacctggacctgggtgggaggaaactgtagcctgagtgtccacagggacacacgtgagccacagggctagaagcacaggcccgtcaccccaggaggaaaagcccagggtctggggcagcagagccatcgcatcatgtttcccagggcaacttgaggtctgacttttggctccctcgccctaagaggctcttcctctcttttgctcatccaccttcacaccacttgtgagctgacccccaggaacagcttggctgttccaccagagcagagggaatcattgctggactggatttcttctggagggaagcaccatgaattaaaggtgccagagctccatgcatggaaaagtggcctgttggttcaacgtggtttccttgtacttgatcctcctgaaatgagagattttcctgagatgactgagtatggagattaccaggcagatgataccgaaatgcttaaaggggctgtggctgaggctgtagcatctctgctggaggtgagacactctgggaactgatttgacctcgaatgctcctaaaagagaacttgatagcctgacagcagagaagtattatttggtggggagtctgagaaagcctggcttgtattatctgtccaaaaggaagcctcttcatctcccggtgccttggttgactattttggaaataggcatatcaaggttcctgattcagcactttgctcttttaataacaaatcgtccaaagatctcaaagtaagggtttttttttttagcttccactcttccgcagacttggtcatcgacctatttttgttgaagaatgaaaggcaatgacaagtttaacatatacaaattcgtgaattcttgttcattttgcattcctgcagtcagtgctaatccgtcgttcttaatcaggagttctgccaggtttaaggtcacctgcactcccagccaagtggtgatgtatgcctcccactctctgcaaggttttcctcatttttatattcatttattcatcattcattcattcacctaactttcattaaatagctgcaccatcccaggccctgtgcggagcatcgggaatacaaagatgagataaaacattgtccctgcccccgggggctcacatgccactggaaacaacagactcttaaactaacaattcaagcaggcgccaagtgctatgacagaggtgtgaataaaagcatcaggaaatcggatggagaaccaccattcacccaagggtcagaggaggtttcaaagaaaaggtgtcattggagcagtgttttgcagaatgagccagagttcaccaagcaggcaaggcaaggaagggtgttgcagagagggaacagcatatgcaaaggcgtatcagttcatggcatcacatctttcactggggaagccagtttccacaggcagcatcccaaggttcaataaggccttatttaacaagcaagcaaaatgcaaaccaaaccattattcatttattggcttaagtatgctttctcctgaaaactttagcattgggtgcaaatattcagtatggttctcggagtccaaagggttttaagccagggcacaaccagaaaagtggctctctttggtagggagaggggctccaatatttcgttctctccccatggggcactgacagagaaatgaaatagttttatctggaaaattccagagctattatttactccttaccaagggaagttacttcttgtaaaaacttttaagccatttatcaacaagttcttgttgactcagggcataatgagttcctgagacatgctcttttgggggctggggctttagctagaagaatttcaaggaaaagaattctcagcagagctcaagattgtagaaactcagcagaagctggtaaaaacatggggagcccggaggacaggctgctgtccagggcagaggccatgaagaagtgcttccgtggccgacagtctggaaatgaatccatcatacattagtgccatagagtttagtaaccgtccagcaagtgtcatcacttttacagaaaacaaggtccagtaatagcaagtcttagtacatcctcacttttattataaatgggtgttttttcataatttttactgacgctcagtaaccatgcaaaattgtgtatagcattaatgtatctacatacctacacctatctatatataagctcatggtagaaaaccatagctaagtagcatcgcagacttaagcgtacaaagtgatcttgttcacaagtaatctgttgacagtgccaataaatgataaaaaaaaaattaacatgtcacaatgtaacggatgaccatatgcacaattccatgaattaaatctgtttcctgtgttagtcagtattcttaaataaaatttataattgaaacatga

SEQ ID NO: 315752 - DNA, 5586 bp, Artificial Sequence
  derived and/or modified sequence
tcttgtgatcaccctcattacctcttctgggccccctgtggacctgcgttgacccagcatgggctacaatgggggagttgggtaatcgctcccggtaggttcctccccaacccccgaggcggggtcaggtggagcgtgggcgccagagcagcccctctgccttgggtgtcttggagatgacttggcgccccccggagccccgtcatggctgtggctgcgtccacaacactgcatcagcagagtcctggggaagccatttaggaatctgaagcccgggatttctgctttgtcccttcaggggttcctgagcctgttaaaaaaaaaaaaaaatctaggaagaggccctggaaggaaaaaggggagggagatagcctattttacaaggtctgaaatgatgtgtcttatccttctggcttaaaccaagctgggcttaaaacatcttttaaaaaaaatctgtattctatttttttctctctgtttatcgctctccttctgcctctgttaatctttgtttctgtgtagttgcatcctgtttctgtctgaaaacccttgtctttctgaatccatctttcagtctctcacattctgtctttcccctcctccttcaccttccctccgtccctctcccttgcgcacttgccgggtaccagctgagtgcatccttttcccaaacctgctctgcttccaaggggcccttttctgtctcctccacctgtccccatgttttggggactgcctggaaatccgggacaccctcctgaggagggagctggtgcccaacggcacctcttaggatgaacccagccagctgcgttcctggcctctgcagaatggcatacagaaggcattttaagcaagcgagctgagctcgccgcaggactccgactaccaggcaccggtggcagcacgcaaagggtgtccctgtccctcaaggggtcatggcctccatgttgctcgcccagcgcctggcctgcagcttccagcacagctaccgcctgctggtgcctggatccagacacattagtcaagctgcagccaaagtcgacgttgaatttgattatgatgggcctctgatgaagacggaagtcccagggcctagatctcaggagttaatgaaacagctgaatataattcagaatgcagaggctgtgcattttttctgcaattacgaagagagccgaggcaattacctggttgatgtggacggcaaccgaatgctggatctttattcccagatctcctctgtccccataggttacagccaccccgccctgctgaaactcatccaacagcctcaaaatgcgagcatgtttgtcaacagacccgccctcggaatcctgcctccggagaactttgtggagaagctccggcagtccttgctctcggtggctcccaaagggatgtcccagctcatcaccatggcctgcggctcctgctccaatgaaaacgccttaaagaccatcttcatgtggtaccggagcaaggaaagagggcagaggggcttctcccaggaggagctggagacgtgcatgattaaccaggcccctggctgccccgactacagcatcctctccttcatgggcgcgttccatgggaggaccatgggttgcttagcgaccacgcactctaaagccattcacaagatcgacatcccttcctttgactggcccatcgcaccgttcccacggctgaaataccctctggaagagtttgtgaaagagaaccaacaggaggaggcccgctgtctggaagaggtggaggatctgattgtgaaatatcggaaaaagaagaagacggtggccgggatcatcgtggagcccatccagtccgagggtggagacaaccacgcatccgatgacttctttcggaagctgagagacatcgccaggaagcatggctgcgccttcttggtggacgaggtccagaccggaggaggctgcacgggcaagttctgggcccatgagcactggggcctggatgacccagcagacgtgatgaccttcagcaagaagatgatgactgggggcttcttccacaaggaggagttcaggcctaatgctccctaccggatcttcaacacctggctgggggacccgtccaagaacctgttgctggctgaggtcatcaacatcatcaagcgggaggacctgctaaataatgcagcccatgccgggaaggccctgctcacaggactgctggacctccaggcccggtacccccagttcatcagcagggtgagaggacgaggcaccttttgctccttcgatactcccgatgattccatacggaataagctcattttaattgccagaaacaaaggtgtggtgttgggtggctgtggtgacaaatccattcgtttccgtcccacgctggtcttcagggatcaccacgctcacctgttcctcaatattttcagtgacatcttagcagacttcaagtaaagaagccatttccactacagtgagaaagcccggatcccaacagttgtcaaattgattagtttgcctaattcatgttttcacttaaaagtatcagaggtgaatgcacagtgaagggtgatttgtggggagggagcatttttggtggtcttgggggaggggaggggagggaagggctggtgttgattttcctccctgcagagccaatggtgcacattggtttaagcccagagatcctgcttgagccctggactcatcttgggaagggccatgggaggtcctggctagagttctgcccaaccttgaccaaccccagcaatttttccaaaagccagtcaagggcattacatttgttcctgggactggcagctgggcctcctgggtgccagtccatctcaagtgccatattctgtgatcacggatgttggctccccctcgccctatgcaagcaaacacactctcacctcctctcccagcctcccggagctctgagcacgccccacgcatggtgcaggagggactggacagatctgaggaaggccgtaaaatggggacaggaggattcagctcaggagtaagggaagaggtcctctggccccctgaagatgagaatcacccctctcagtgcacctggggatccccctaaactgtgaattctgccctggacagggctttgcccttggaggatccccaggtggccttacccgtgattcttactcggcatcctccattccccaaactccctcctccctgttaaatgtcaacctagacctggacctgggtgggaggaaactgtagcctgagtgtccacagggacacacgtgagccacagggctagaagcacaggcccgtcaccccaggaggaaaagcccagggtctggggcagcagagccatcgcatcatgtttcccagggcaacttgaggtctgacttttggctccctcgccctaagaggctcttcctctcttttgctcatccaccttcacaccacttgtgagctgacccccaggaacagcttggctgttccaccagagcagagggaatcattgctggactggatttcttctggagggaagcaccatgaattaaaggtgccagagctccatgcatggaaaagtggcctgttggttcaacgtggtttccttgtacttgatcctcctgaaatgagagattttcctgagatgactgagtatggagattaccaggcagatgataccgaaatgcttaaaggggctgtggctgaggctgtagcatctctgctggaggtgagacactctgggaactgatttgacctcgaatgctcctaaaagagaacttgatagcctgacagcagagaagtattatttggtggggagtctgagaaagcctggcttgtattatctgtccaaaaggaagcctcttcatctcccggtgccttggttgactattttggaaataggcatatcaaggttcctgattcagcactttgctcttttaataacaaatcgtccaaagatctcaaagtaagggtttttttttttagcttccactcttccgcagacttggtcatcgacctatttttgttgaagaatgaaaggcaatgacaagtttaacatatacaaattcgtgaattcttgttcattttgcattcctgcagtcagtgctaatccgtcgttcttaatcaggagttctgccaggtttaaggtcacctgcactcccagccaagtggtgatgtatgcctcccactctctgcaaggttttcctcatttttatattcatttattcatcattcattcattcacctaactttcattaaatagctgcaccatcccaggccctgtgcggagcatcgggaatacaaagatgagataaaacattgtccctgcccccgggggctcacatgccactggaaacaacagactcttaaactaacaattcaagcaggcgccaagtgctatgacagaggtgtgaataaaagcatcaggaaatcggatggagaaccaccattcacccaagggtcagaggaggtttcaaagaaaaggtgtcattggagcagtgttttgcagaatgagccagagttcaccaagcaggcaaggcaaggaagggtgttgcagagagggaacagcatatgcaaaggcgtatcagttcatggcatcacatctttcactggggaagccagtttccacaggcagcatcccaaggttcaataaggccttatttaacaagcaagcaaaatgcaaaccaaaccattattcatttattggcttaagtatgctttctcctgaaaactttagcattgggtgcaaatattcagtatggttctcggagtccaaagggttttaagccagggcacaaccagaaaagtggctctctttggtagggagaggggctccaatatttcgttctctccccatggggcactgacagagaaatgaaatagttttatctggaaaattccagagctattatttactccttaccaagggaagttacttcttgtaaaaacttttaagccatttatcaacaagttcttgttgactcagggcataatgagttcctgagacatgctcttttgggggctggggctttagctagaagaatttcaaggaaaagaattctcagcagagctcaagattgtagaaactcagcagaagctggtaaaaacatggggagcccggaggacaggctgctgtccagggcagaggccatgaagaagtgcttccgtggccgacagtctggaaatgaatccatcatacattagtgccatagagtttagtaaccgtccagcaagtgtcatcacttttacagaaaacaaggtccagtaatagcaagtcttagtacatcctcacttttattataaatgggtgttttttcataatttttactgacgctcagtaaccatgcaaaattgtgtatagcattaatgtatctacatacctacacctatctatatataagctcatggtagaaaaccatagctaagtagcatcgcagacttaagcgtacaaagtgatcttgttcacaagtaatctgttgacagtgccaataaatgataaaaaaaaaattaacatgtcacaatgtaacggatgaccatatgcacaattccatgaattaaatctgtttcctgtgttagtcagtattcttaaataaaatttataattgaaacatga

SEQ ID NO: 315753 - DNA, 4908 bp, Artificial Sequence
  derived and/or modified sequence
tttgtgtccctttgagtctgcagagaagccagcagctggggctgcagacgggaaaggaatgtcctcagcgtctgccagcacttttgtcttggtcccaacggctgataggaaaatgagaggcagggtcttttctagagagatctggggggtccatttctagccgatgatgcatgcaaagagttcgtgttcacaggacctgggaagcagcggagtagaaagggtggcagcacgcaaagggtgtccctgtccctcaaggggtcatggcctccatgttgctcgcccagcgcctggcctgcagcttccagcacagctaccgcctgctggtgcctggatccagacacattagtcaagctgcagccaaagtcgacgttgaatttgattatgatgggcctctgatgaagacggaagtcccagggcctagatctcaggagttaatgaaacagctgaatataattcagaatgcagaggctgtgcattttttctgcaattacgaagagagccgaggcaattacctggttgatgtggacggcaaccgaatgctggatctttattcccagatctcctctgtccccataggttacagccaccccgccctgctgaaactcatccaacagcctcaaaatgcgagcatgtttgtcaacagacccgccctcggaatcctgcctccggagaactttgtggagaagctccggcagtccttgctctcggtggctcccaaagggatgtcccagctcatcaccatggcctgcggctcctgctccaatgaaaacgccttaaagaccatcttcatgtggtaccggagcaaggaaagagggcagaggggcttctcccaggaggagctggagacgtgcatgattaaccaggcccctggctgccccgactacagcatcctctccttcatgggcgcgttccatgggaggaccatgggttgcttagcgaccacgcactctaaagccattcacaagatcgacatcccttcctttgactggcccatcgcaccgttcccacggctgaaataccctctggaagagtttgtgaaagagaaccaacaggaggaggcccgctgtctggaagaggtggaggatctgattgtgaaatatcggaaaaagaagaagacggtggccgggatcatcgtggagcccatccagtccgagggtggagacaaccacgcatccgatgacttctttcggaagctgagagacatcgccaggaagcatggctgcgccttcttggtggacgaggtccagaccggaggaggctgcacgggcaagttctgggcccatgagcactggggcctggatgacccagcagacgtgatgaccttcagcaagaagatgatgactgggggcttcttccacaaggaggagttcaggcctaatgctccctaccggatcttcaacacctggctgggggacccgtccaagaacctgttgctggctgaggtcatcaacatcatcaagcgggaggacctgctaaataatgcagcccatgccgggaaggccctgctcacaggactgctggacctccaggcccggtacccccagttcatcagcagggtgagaggacgaggcaccttttgctccttcgatactcccgatgattccatacggaataagctcattttaattgccagaaacaaaggtgtggtgttgggtggctgtggtgacaaatccattcgtttccgtcccacgctggtcttcagggatcaccacgctcacctgttcctcaatattttcagtgacatcttagcagacttcaagtaaagaagccatttccactacagtgagaaagcccggatcccaacagttgtcaaattgattagtttgcctaattcatgttttcacttaaaagtatcagaggtgaatgcacagtgaagggtgatttgtggggagggagcatttttggtggtcttgggggaggggaggggagggaagggctggtgttgattttcctccctgcagagccaatggtgcacattggtttaagcccagagatcctgcttgagccctggactcatcttgggaagggccatgggaggtcctggctagagttctgcccaaccttgaccaaccccagcaatttttccaaaagccagtcaagggcattacatttgttcctgggactggcagctgggcctcctgggtgccagtccatctcaagtgccatattctgtgatcacggatgttggctccccctcgccctatgcaagcaaacacactctcacctcctctcccagcctcccggagctctgagcacgccccacgcatggtgcaggagggactggacagatctgaggaaggccgtaaaatggggacaggaggattcagctcaggagtaagggaagaggtcctctggccccctgaagatgagaatcacccctctcagtgcacctggggatccccctaaactgtgaattctgccctggacagggctttgcccttggaggatccccaggtggccttacccgtgattcttactcggcatcctccattccccaaactccctcctccctgttaaatgtcaacctagacctggacctgggtgggaggaaactgtagcctgagtgtccacagggacacacgtgagccacagggctagaagcacaggcccgtcaccccaggaggaaaagcccagggtctggggcagcagagccatcgcatcatgtttcccagggcaacttgaggtctgacttttggctccctcgccctaagaggctcttcctctcttttgctcatccaccttcacaccacttgtgagctgacccccaggaacagcttggctgttccaccagagcagagggaatcattgctggactggatttcttctggagggaagcaccatgaattaaaggtgccagagctccatgcatggaaaagtggcctgttggttcaacgtggtttccttgtacttgatcctcctgaaatgagagattttcctgagatgactgagtatggagattaccaggcagatgataccgaaatgcttaaaggggctgtggctgaggctgtagcatctctgctggaggtgagacactctgggaactgatttgacctcgaatgctcctaaaagagaacttgatagcctgacagcagagaagtattatttggtggggagtctgagaaagcctggcttgtattatctgtccaaaaggaagcctcttcatctcccggtgccttggttgactattttggaaataggcatatcaaggttcctgattcagcactttgctcttttaataacaaatcgtccaaagatctcaaagtaagggtttttttttttagcttccactcttccgcagacttggtcatcgacctatttttgttgaagaatgaaaggcaatgacaagtttaacatatacaaattcgtgaattcttgttcattttgcattcctgcagtcagtgctaatccgtcgttcttaatcaggagttctgccaggtttaaggtcacctgcactcccagccaagtggtgatgtatgcctcccactctctgcaaggttttcctcatttttatattcatttattcatcattcattcattcacctaactttcattaaatagctgcaccatcccaggccctgtgcggagcatcgggaatacaaagatgagataaaacattgtccctgcccccgggggctcacatgccactggaaacaacagactcttaaactaacaattcaagcaggcgccaagtgctatgacagaggtgtgaataaaagcatcaggaaatcggatggagaaccaccattcacccaagggtcagaggaggtttcaaagaaaaggtgtcattggagcagtgttttgcagaatgagccagagttcaccaagcaggcaaggcaaggaagggtgttgcagagagggaacagcatatgcaaaggcgtatcagttcatggcatcacatctttcactggggaagccagtttccacaggcagcatcccaaggttcaataaggccttatttaacaagcaagcaaaatgcaaaccaaaccattattcatttattggcttaagtatgctttctcctgaaaactttagcattgggtgcaaatattcagtatggttctcggagtccaaagggttttaagccagggcacaaccagaaaagtggctctctttggtagggagaggggctccaatatttcgttctctccccatggggcactgacagagaaatgaaatagttttatctggaaaattccagagctattatttactccttaccaagggaagttacttcttgtaaaaacttttaagccatttatcaacaagttcttgttgactcagggcataatgagttcctgagacatgctcttttgggggctggggctttagctagaagaatttcaaggaaaagaattctcagcagagctcaagattgtagaaactcagcagaagctggtaaaaacatggggagcccggaggacaggctgctgtccagggcagaggccatgaagaagtgcttccgtggccgacagtctggaaatgaatccatcatacattagtgccatagagtttagtaaccgtccagcaagtgtcatcacttttacagaaaacaaggtccagtaatagcaagtcttagtacatcctcacttttattataaatgggtgttttttcataatttttactgacgctcagtaaccatgcaaaattgtgtatagcattaatgtatctacatacctacacctatctatatataagctcatggtagaaaaccatagctaagtagcatcgcagacttaagcgtacaaagtgatcttgttcacaagtaatctgttgacagtgccaataaatgataaaaaaaaaattaacatgtcacaatgtaacggatgaccatatgcacaattccatgaattaaatctgtttcctgtgttagtcagtattcttaaataaaatttataattgaaacatga

SEQ ID NO: 315754 - DNA, 1503 bp, Artificial Sequence
  derived and/or modified sequence
atggccagcatgctgctggcccagagactggcctgcagcttccagcacagctacagactgctggtgcccggcagcagacacatcagccaggccgccgccaaggtggacgtggagttcgactacgacggccccctgatgaagaccgaggtgcccggccccagaagccaggagctgatgaagcagctgaacatcatccagaacgccgaggccgtgcacttcttctgcaactacgaggagagcagaggcaactacctggtggacgtggacggcaacagaatgctggacctgtacagccagatcagcagcgtgcccatcggctacagccaccccgccctgctgaagctgatccagcagccccagaacgccagcatgttcgtgaacagacccgccctgggcatcctgccccccgagaacttcgtggagaagctgagacagagcctgctgagcgtggcccccaagggcatgagccagctgatcaccatggcctgcggcagctgcagcaacgagaacgccctgaagaccatcttcatgtggtacagaagcaaggagagaggccagagaggcttcagccaggaggagctggagacctgcatgatcaaccaggcccccggctgccccgactacagcatcctgagcttcatgggcgccttccacggcagaaccatgggctgcctggccaccacccacagcaaggccatccacaagatcgacatccccagcttcgactggcccatcgcccccttccccagactgaagtaccccctggaggagttcgtgaaggagaaccagcaggaggaggccagatgcctggaggaggtggaggacctgatcgtgaagtacagaaagaagaagaagaccgtggccggcatcatcgtggagcccatccagagcgagggcggcgacaaccacgccagcgacgacttcttcagaaagctgagagacatcgccagaaagcacggctgcgccttcctggtggacgaggtgcagaccggcggcggctgcaccggcaagttctgggcccacgagcactggggcctggacgaccccgccgacgtgatgaccttcagcaagaagatgatgaccggcggcttcttccacaaggaggagttcagacccaacgccccctacagaatcttcaacacctggctgggcgaccccagcaagaacctgctgctggccgaggtgatcaacatcatcaagagagaggacctgctgaacaacgccgcccacgccggcaaggccctgctgaccggcctgctggacctgcaggccagatacccccagttcatcagcagagtgagaggcagaggcaccttctgcagcttcgacacccccgacgacagcatcagaaacaagctgatcctgatcgccagaaacaagggcgtggtgctgggcggctgcggcgacaagagcatcagattcagacccaccctggtgttcagagaccaccacgcccacctgttcctgaacatcttcagcgacatcctggccgacttcaagtag

SEQ ID NO: 315755 - protein, 140 aa, Artificial Sequence
  derived and/or modified sequence
MAATGFSAPNGSCHGTSRTVNSDAPMSPELPKPHLPDQLVIVNETEADSKPSKNVARSAAVETASLSPSLVPARQPTISLLCEDTADTLSVESLTLVPPVDPHSLRSLTGMPPLSTPAAACTEPVGEEAACAEPVGTAED

SEQ ID NO: 315756 - DNA, 423 bp, Artificial Sequence
  derived and/or modified sequence
atggcggcaacgggtttttccgctcctaacgggtcttgccatggcacatcaaggactgtgaattctgatgcacctatgtctccagagctgccgaagcctcatctgcccgaccagttggtgatcgtaaacgaaacagaagccgatagcaaaccgtcaaagaacgtcgcaaggtcggcggccgtcgaaaccgcctccctgtcccctagcctggtccccgcccgtcagcccaccatttcactgctatgcgaagacaccgcagatacacttagcgtggaatctttgacccttgtaccacctgtcgatccccactcgctgagaagcctaacgggcatgcccccattgtcaactcctgccgctgcctgtactgagcctgttggcgaagaggctgcctgcgctgagcccgtagggacggcagaagactag

SEQ ID NO: 315757 - DNA, 423 bp, Artificial Sequence
  derived and/or modified sequence
atggccgccaccggcttcagcgcccccaacggcagctgccacggcaccagcaggacagtgaacagtgatgcccccatgagccctgagctgcccaagccccacctgcctgaccagctggtgattgtgaatgaaacagaagctgacagcaagcccagcaagaatgtggcccggtctgctgctgtggagacagccagcctgagccccagcctggtgcctgcccggcagcccaccatcagcctgctgtgtgaggacacagctgacaccctgtctgtggagagcctgaccctggtgccccctgtggacccccacagcctgcggagcctgaccggcatgccacccctgagcaccccagctgctgcctgcacagagcctgtgggggaggaggccgcctgtgccgagcctgtgggcacagcagaagattag

SEQ ID NO: 315758 - DNA, 423 bp, Artificial Sequence
  derived and/or modified sequence
atggccgccaccggcttcagcgcccccaacggcagctgccacggcacatccaggacagtgaatagcgatgcccctatgtcccccgagctccccaaaccccacctgcccgaccaattggtgattgtcaacgaaactgaggccgactcaaaaccaagcaaaaacgtagcaaggagcgctgccgtcgaaactgcttcccttagcccctccctcgtccctgccaggcaaccgacgattagcttactctgtgaggatactgcagataccctgagcgttgagtctcttactctagtgccacccgtggatccccacagtctccgatcactcaccgggatgccacctctgagtacaccagctgcagcatgcactgaacctgttggtgaggaagctgcctgcgctgagccagtggggaccgctgaggactag

SEQ ID NO: 315759 - DNA, 423 bp, Artificial Sequence
  derived and/or modified sequence
atggcagcaaccggattcagcgcaccaaatggatcttgtcacggaacgagcaggacagtgaattctgacgcaccgatgtctcccgaattgccaaaaccgcacttacccgatcagctcgtcattgtgaacgagactgaggccgatagcaaaccgagtaaaaatgtggccagaagcgcagcagtcgagacagcttccctgagcccttccctggtaccagctcgccaaccgacaatttccctgttatgcgaggacacggctgacactcttagtgtggaaagtctaacgctggttcctccggtcgacccccatagtttacggtcactcaccgggatgccccctctttctacaccagctgctgcctgtaccgagccagttggggaggaagctgcctgtgcggaacccgttggcactgcagaggattag

SEQ ID NO: 315760 - DNA, 4203 bp, Artificial Sequence
  derived and/or modified sequence
ttctacgaccaggggcgccggggcagcagcgaccccacagtgcagcgctccgtgtttgcatcggtggacaaggtgccaggcttcgccgtggcccagtgcataaaccagcacagctccccgtccctgtcctcacagtcgccaccctccgccagcgggagccccagcggcagcgggagcaccagccactgcgactctggaggcaccagctcgtcctccaccccctccacagcccagagtccagcagtcaggagtggcaggaaaggacgccgacgagtgttcagcctgtcggaggccgacagtcatggcggccactgggtttagtgctccgaacggcagctgccacggcacctcacgcacagtcaattcagatgcccccatgagtccagaactgcctaagcctcaccttcctgaccagttggtaatcgtcaacgaaacggaagcagactctaagcccagcaagaacgtggccaggagcgcagccgtggagacagccagcctgtcccccagcctcgtccctgcccggcagcccaccatttccctgctctgcgaggacacggctgacacgctgagcgtcgaatcgctgacccttgtccccccagttgacccccacagcctccgcagcctcaccggcatgcccccgctgtccacgccggctgccgcctgcacagagcccgtgggcgaagaggctgcatgtgctgagcctgtgggcaccgctgaggactgagtcagtgccggggcctccctttgtgtgtgtggccccgctggtagggaccccagtgccgctgactggcaagacacactgggagcacccaccattctgtgcggcccccagcagccatctcaaccacctatccctgcgctcccttgaatgggaagaagccccacgttgtccttgaattcctttttcactttgcatctcttcacgtgcaggctgggaccagcggagacaccgcggcgaatgcagatgactgcaccggccactcagggagctgcctgggctccgtgtctctgagccccgggtggcaggacccaccggcacctctttcttcctctgtcatatggctcctctgtcaccagccccagtgtgcacagaagaattggaccaggtcactgtacgtagaaatttgtagaaaagcagacttagataaacatctcctttggatatttatttccgcttttggcagcaggtgaacatttatttttaaaacttctatttaaaagaagtccaaaaacatcaacactaaggtttgatgtcatgtgaaaagtgtaataataacagttaagatttcatgatcattttcactggacctttcctgatattttgtttcagagttcttagtgtggctttttccatttatttaagtgattctttgttactcactaactctgcaagcctgtggaataatgaagtaccttcctggaaagtttggattattttttaaacaaaaacaagggagatacatgtattctcaggtacacacagagctgagagggctgaatggttttctgctatagcagccgagaggcctcccatcatggaaagatttctccaggaaaaggaggaatgtagccagctccccactcaggacgcttcctcatttctcttcaccaaaaccaaacagagacagcttccagcaccttcttcagtgttaccatctctaagaaggaaccagttgggaccgtgaagactcccgaccctgtggccatgatggaaatcaaaggaagacaccctctacgtcacctgccctcgactgtgtgtgcccacatgtgccgagagatggcccagagccagttcccctccagctgcaagggcatggtgtccccagagctctgagtctgtcactctccctctgctactgctgctgatctgaatatggaaaccccatggttcccttccccattcggactgggtgtgtacaagcaaggacccagatgcatcagacacagcccccaagatgttcctttctactcggccagctcgggagccagacacagcactcacagcccaggccgtgatccaccctccccaagtccaccagggccagcggcccctcacctctctggtcactggtgagaccttccacaactttcctccagacctgccagcagatgtgcccaccaggggcattaggtatccgccggagcctggccatagggtagtctcgggagccgcgctgagatcttttgccacctgcattttagaagaacatggtctctgtctcctcggcccagccagctgtcccggcaaggcctgccgagggcagttttcaacctcatgaaggaaacacagtcctgccaaggagggggagtggcgcccatggggacaggcctcagtccttagaagccctctgggtagctgtgcccacccagccttcatggctgcaggtacaaggacctttgcttccatagagaaaacgcacagctcagaaagggggccacatgggcagaaacccaaaggaaggacaaaccacgaccaccgtggccatctgcagaatccctggaagagaaggaaggcagggtggagcggggggaagaccatcatggagagaaggaccacagcatcaggagacgggacacgccacacccagcaggcagcctgtgtgttgcttaattttttaagagcaagaggggtagagaggatcaagctggccctggctggagatggctagcccctgagacatgcacttctggttttgaaatgactctgtctgtggggcagcagaaactagagaaggcaagtggctgccccaccccaaggcgtgaccaggaggaacagcctgcagctcactccatgccacacgggtgggccaccagcctgctgtcagaagtctctgggctccaactggtcttgtaaccactgagcactgaaggagagaggtcttggtcagggctggacagcatgcccgggaggaccagcagaggattaaaggtgactgggaggaccagcggaggataaaagacactgctcagggcagggcttctaccctgcatccctggccaagaaaagggcagtccccatgtgggcttgcagggtcactctcaggggcctctttcagctggggctggcaacttgcgtctgggggacacctccaggtgtgtggggtgaggatttcctataaccagggctcccagaagctttgcttatgtaaggaggtctgggagccagcccattggaggccaccagccattttggcttcaaaggaccccacctcacccaggtctcagcggcagtgggcacagctatgtcttcaggagctcccgtcaaacctcatagctggggcgctcccagacaggccagtccagacaggacacgctgggcccctggcatccagaggaagagccaggagtgtgggaaggcccacagtgggggctgtggcttctgacactcaggtcatagcctcagaggtctgaggtcagcccccacagacccatccggcccgccccccaagtccctgcagagagcacttagagttatggcccaggccctggtccacccttcccctgtgcacctccggctgggtttgccaagtcagggagcagggctggccgcaggaactcccaaaccttggctttgaatattgttgtggaggtgtgctcgtccctttctggacgtgcaaggtacctgtcccagcaggtcagatggggccagctgaggcgctcccccaggcaggaagggccagccttcaccatcgcgtgggattgggaggaggggcctccgtgagcagcccctcctctgccgctgtcccagcccagtccctctcccggagccttggcagcctcccacaacccagacacttgcgttcacaagcaacctaaggggcaggtgaagaagcgcagccctgccagacgcgctagattcctctaaggtctctgagatgcaccgttttttaaaaaggcgtggggtgaactgattttgatcttcttgtctagatgcaataaataaatctgaagcatttaatgtagtcatcttgacattgggcctacactgtacgagttccttatgtttccttgagctaaaaatatgtaaataatttttgtcccagtgagaaccgagggttagaaaacctcgatgcctctgagcctcgggaccgctctagggaagtacctgctttcgccagcatgactcatgcttcgtgggtactgaacacgagggtggaaatgaaaactggaacttccttgtaaatttaaacttggcaataaaag

SEQ ID NO: 315761 - DNA, 423 bp, Artificial Sequence
  derived and/or modified sequence
atggccgccaccggcttcagcgcccccaacggcagctgccacggcaccagcagaaccgtgaacagcgacgcccccatgagccccgagctgcccaagccccacctgcccgaccagctggtgatcgtgaacgagaccgaggccgacagcaagcccagcaagaacgtggccagaagcgccgccgtggagaccgccagcctgagccccagcctggtgcccgccagacagcccaccatcagcctgctgtgcgaggacaccgccgacaccctgagcgtggagagcctgaccctggtgccccccgtggacccccacagcctgagaagcctgaccggcatgccccccctgagcacccccgccgccgcctgcaccgagcccgtgggcgaggaggccgcctgcgccgagcccgtgggcaccgccgaggactag

SEQ ID NO: 315762 - DNA, 1773 bp, Artificial Sequence
  derived and/or modified sequence
agaatgctctgcatcgacagcgggagacgagacgcgctcgggcgtcgctttgctgccgctaggccctgtgctcctccccgcagcggaaggcctacgaatacgcggtgtcttacgtcgcttcctccgttcttcgttgcactggccaacgggacgcttagtctttcggcaacggggtgaaaccttccttgtgcctgaaaaaacggtacttcgcggtgtggcttcggcgcctgcgcaaaaggccgcggggcgcactccagttcccggcaggccccgcgacgcgcgtttgcgtgctgacgcacgcagttagtcgtgctgacgtgcagcgcggcccaggcggggtgcgagtggcgcagttggagcccgttgcggcccctgaggaagcgaggaggcgtcggcgtcggctgaggcgggcggaccggcgaggcgaggcggcggccccaggcccgagggactcgggagctcgagcagcggcggcggcaagacctctccccctcggaggcggcgggcggaggcggcgggagcggtggtgccccccccgggcacggggccatgtacaacgggatcgggctgccgacgccccggggcagcggcaccaacggctacgtccagcgcaacctgtccctggtgcggggccgccggggtgagcggcctgactacaagggagaggaggaactgcggcgcctggaggctgccctggtgaagcggcctaatcctgacatcctggaccacgagcgcaagcggcgcgtcgagctgcgatgcctcgagctggaggagatgatggaagagcaggggtacgaggaacagcaaattcaggaaaaagtggcgacctttcgactcatgttgctggagaaggatgtgaaccctgggggcaaggaggagaccccagggcagaggccagcggtcacggagactcaccagttggcagaattaaatgagaagaagaatgaaagactccgtgctgcctttggcatcagtgattcttacgtagatggcagctcttttgatcctcagcgtcgtgcccgagaagctaaacaaccagctcctgagcctcccaaaccttacagccttgttcgggagtctagcagttctcgctcaccaaccccaaagcagaagaagaagaaaaagaagaaagatagaggacgcaggtcagagagcagctctcctcgacgggagagaaagaaaagctcaaagaagaagaagcacaggtcagaatctgagtccaagaaacgtaagcataggtctcccactccaaagagcaaacgtaaatctaaggacaaaaagcgaaagcggtctcgaagtacaacaccagcccccaagagccgccgggcccaccgttcaacttctgctgactctgcttcctcctccgatacttcccgcagtcggtctcgaagtgctgcagctaaaactcatacaactgccttggctgggcgaagtccttcccctgcttcagggcgacgcggggagggagatgcgcctttcagtgaaccaggtactaccagcacacaacggcctagtagcccggagactgctacgaaacagcctagcagcccttatgaagacaaagataaagacaagaaggagaaatctgcaactcgacctagcccctctccggaaaggagcagcacaggcccagaaccacctgctcccactccgctccttgctgagcgacatggcggctccccacaaccccttgcaaccacccccttaagccaggagccagtgaacccctccccccaacttttcatgtttcttaaaggcattttggttttttaa

SEQ ID NO: 315763 - DNA, 267 bp, Artificial Sequence
  derived and/or modified sequence
atggccagctgcaccaaccggggcggcctgcccgagaagcacagctcatccaaggtgagttcccatgcccagatgattcagaaagcagtggatttcctggacttgctgatcggccatctgtctaaattttcccccgtgcttatagtttttcagttttcaccacttggctttttggtccggcagagctctgccgacaacgtgcagtttctgtcattcgcgccctccctcatactgccgtcagggaccggaaactggctggtttggtag

SEQ ID NO: 315764 - DNA, 1561 bp, Artificial Sequence
  derived and/or modified sequence
ccgggagggctacgcggcggccgcagccatgggtgctgggcctgcgggggcgcggggggtgcgcgaggacctgcggggcggggcgggagagaaggctgccgggaccggccctagacactgagccgcggtgggatccccaccggctctgcgaggccctgcgagcgccagggaggcgccacgagggagccgggcagccgcgggccacttcaggggggcccgcctcgccgcccgggcggtcgagagatccttgggggcacatctcggggtgcggtgacccgcccggcgcatttcgggggtcggggcgcaattgccaggggacatctggagcccggccctgcttctgtcgggctccagggtacccctggatggctgcgctgtgccctcgccggccgcccgggcgccgcagcggctgagttcgccgggatcgccgggccgccgcccttgccacccgctgcatgctcggcgcccgggtcgcggcccacctggacgcactgggccccctggtcccctacgtgccgccgccgctgctgccctctatgttctacgtgggcctgttcttcgtcaatgtgctgatcctgtactacgccttcctcatggagtacatcgtcctcaacgtgggcctcgtcttcctgcccgaggacatggaccaggcgctcgtggacctcggcgtgctctccgaccccggctcgggcctttacgatgctgactcggagctcgacgtctttgatgcgtacttggagtagggtctcgactgctgttcccctcttccctacacgatccgcaacccatgccctggaccagccgcccagatcatgccgccgcagctggttgggggcaccatctggacggggatggttccccaggaggagaccctcccctgcctccgaggcctacctgctcccctcaaaagcttcgtgccaacagagaggttcctgtttgaacccaggagagtggaagagagattgggactgagtgctgaggttgggaaggcacctgctcccacagaagggggaacgcaagaggcatcccaagacctcatctgcctgcagtgtcaaatcgatggcctggccttggcttctgattatttgcagctgcgatggatgtttacaggaacccagccagagtttgcctccctgcacttcatcccggagcgcacctgcttcccccacttcaccttcggagaggacacttcaaactgcggacacacgcaaaagcgactcccagctccgtttgatgtgagttgagccttcaggccagctgggtttagcccgaggctggtcttagatgcagcgactgtttcaggggtgactcagaagaaaaagaagctgaggaagctgttggggggctgagggtgggattctcgctccttcatttcaggttactcgttcttcagcaagttggcaaaacagacatcatgctggtgagtgccacgttactcccctggctggaaatgcttttctgaaagtatgagtgttgtgcctacttaattctgataaacctgtctaagcaatacttaggaggcttacttctttggattaaaaaaaaatgtatgcaactccaa

SEQ ID NO: 315765 - protein, 1281 aa, Artificial Sequence
  derived and/or modified sequence
MGRVGYWTLLVLPALLVWRGPAPSAAAEKGPPALNIAVMLGHSHDVTERELRTLWGPEQAAGLPLDVNVVALLMNRTDPKSLITHVCDLMSGARIHGLVFGDDTDQEAVAQMLDFISSHTFVPILGIHGGASMIMADKDPTSTFFQFGASIQQQATVMLKIMQDYDWHVFSLVTTIFPGYREFISFVKTTVDNSFVGWDMQNVITLDTSFEDAKTQVQLKKIHSSVILLYCSKDEAVLILSEARSLGLTGYDFFWIVPSLVSGNTELIPKEFPSGLISVSYDDWDYSLEARVRDGIGILTTAASSMLEKFSYIPEAKASCYGQMERPEVPMHTLHPFMVNVTWDGKDLSFTEEGYQVHPRLVVIVLNKDREWEKVGKWENHTLSLRHAVWPRYKSFSDCEPDDNHLSIVTLEEAPFVIVEDIDPLTETCVRNTVPCRKFVKINNSTNEGMNVKKCCKGFCIDILKKLSRTVKFTYDLYLVTNGKHGKKVNNVWNGMIGEVVYQRAVMAVGSLTINEERSEVVDFSVPFVETGISVMVSRSNGTVSPSAFLEPFSASVWVMMFVMLLIVSAIAVFVFEYFSPVGYNRNLAKGKAPHGPSFTIGKAIWLLWGLVFNNSVPVQNPKGTTSKIMVSVWAFFAVIFLASYTANLAAFMIQEEFVDQVTGLSDKKFQRPHDYSPPFRFGTVPNGSTERNIRNNYPYMHQYMTKFNQKGVEDALVSLKTGKLDAFIYDAAVLNYKAGRDEGCKLVTIGSGYIFATTGYGIALQKGSPWKRQIDLALLQFVGDGEMEELETLWLTGICHNEKNEVMSSQLDIDNMAGVFYMLAAAMALSLITFIWEHLFYWKLRFCFTGVCSDRPGLLFSISRGIYSCIHGVHIEEKKKSPDFNLTGSQSNMLKLLRSAKNISSMSNMNSSRMDSPKRAADFIQRGSLIMDMVSDKGNLMYSDNRSFQGKESIFGDNMNELQTFVANRQKDNLNNYVFQGQHPLTLNESNPNTVEVAVSTESKANSRPRQLWKKSVDSIRQDSLSQNPVSQRDEATAENRTHSLKSPRYLPEEMAHSDISETSNRATCHREPDNSKNHKTKDNFKRSVASKYPKDCSEVERTYLKTKSSSPRDKIYTIDGEKEPGFHLDPPQFVENVTLPENVDFPDPYQDPSENFRKGDSTLPMNRNPLHNEEGLSNNDQYKLYSKHFTLKDKGSPHSETSERYRQNSTHCRSCLSNMPTYSGHFTMRSPFKCDACLRMGNLYDIDEDQMLQETGMTNAWLLGDAPRTLTNTRCHPRR

SEQ ID NO: 315766 - protein, 1124 aa, Artificial Sequence
  derived and/or modified sequence
MLKIMQDYDWHVFSLVTTIFPGYREFISFVKTTVDNSFVGWDMQNVITLDTSFEDAKTQVQLKKIHSSVILLYCSKDEAVLILSEARSLGLTGYDFFWIVPSLVSGNTELIPKEFPSGLISVSYDDWDYSLEARVRDGIGILTTAASSMLEKFSYIPEAKASCYGQMERPEVPMHTLHPFMVNVTWDGKDLSFTEEGYQVHPRLVVIVLNKDREWEKVGKWENHTLSLRHAVWPRYKSFSDCEPDDNHLSIVTLEEAPFVIVEDIDPLTETCVRNTVPCRKFVKINNSTNEGMNVKKCCKGFCIDILKKLSRTVKFTYDLYLVTNGKHGKKVNNVWNGMIGEVVYQRAVMAVGSLTINEERSEVVDFSVPFVETGISVMVSRSNGTVSPSAFLEPFSASVWVMMFVMLLIVSAIAVFVFEYFSPVGYNRNLAKGKAPHGPSFTIGKAIWLLWGLVFNNSVPVQNPKGTTSKIMVSVWAFFAVIFLASYTANLAAFMIQEEFVDQVTGLSDKKFQRPHDYSPPFRFGTVPNGSTERNIRNNYPYMHQYMTKFNQKGVEDALVSLKTGKLDAFIYDAAVLNYKAGRDEGCKLVTIGSGYIFATTGYGIALQKGSPWKRQIDLALLQFVGDGEMEELETLWLTGICHNEKNEVMSSQLDIDNMAGVFYMLAAAMALSLITFIWEHLFYWKLRFCFTGVCSDRPGLLFSISRGIYSCIHGVHIEEKKKSPDFNLTGSQSNMLKLLRSAKNISSMSNMNSSRMDSPKRAADFIQRGSLIMDMVSDKGNLMYSDNRSFQGKESIFGDNMNELQTFVANRQKDNLNNYVFQGQHPLTLNESNPNTVEVAVSTESKANSRPRQLWKKSVDSIRQDSLSQNPVSQRDEATAENRTHSLKSPRYLPEEMAHSDISETSNRATCHREPDNSKNHKTKDNFKRSVASKYPKDCSEVERTYLKTKSSSPRDKIYTIDGEKEPGFHLDPPQFVENVTLPENVDFPDPYQDPSENFRKGDSTLPMNRNPLHNEEGLSNNDQYKLYSKHFTLKDKGSPHSETSERYRQNSTHCRSCLSNMPTYSGHFTMRSPFKCDACLRMGNLYDIDEDQMLQETGMTNAWLLGDAPRTLTNTRCHPRR

SEQ ID NO: 315767 - DNA, 3846 bp, Artificial Sequence
  derived and/or modified sequence
atgggacgtgtgggttactggactctcttagtgctccccgcactgcttgtctggcgagggcctgccccatctgctgcagccgaaaaaggcccacctgctctcaacattgccgttatgcttggccatagtcacgacgtcaccgagagggagctgcgtactttgtggggtccagagcaggccgccgggctgcccttagacgtcaatgtcgtggccttgctaatgaatcggacagaccctaagagcttgataacccatgtctgcgatctaatgagcggagcccgaatccatggactggtgtttggtgacgatactgatcaggaagcagtagcacagatgctggatttcatttctagccatactttcgtgccgatactcgggatacacggcggcgcttccatgattatggcagataaggacccaacctccacattttttcagtttggggccagtattcagcagcaggctactgtgatgctgaaaatcatgcaagactacgattggcacgtcttctctctggtaactaccatcttcccaggctatcgggaatttatttcctttgtcaagacaaccgtagacaatagttttgttggctgggacatgcagaatgtgataaccctggatactagctttgaggacgcaaaaacccaagtccaactgaaaaagatccatagctctgtgatcctgctgtactgttctaaggacgaagcggtcctaatactcagcgaggctcggagtcttggcctgacaggctatgattttttctggatagtgccctcgctggtctcagggaatacagaacttatccctaaagaattccctagtggattgatttcagtctcctatgacgactgggattactctcttgaagcccgggtcagggatgggatagggattcttaccaccgcagcatctagcatgctggagaagttcagctacatccccgaggccaaggcatcatgttatggccaaatggagcgcccagaggtgcccatgcataccctccatccattcatggtgaacgtcacttgggacgggaaagatttatccttcactgaggaaggctaccaggtccaccctcgtctggtggtgatcgtgctaaataaagatcgagagtgggagaaagtgggaaagtgggagaaccatactttgagccttcggcatgcagtttggccacgatacaaaagtttcagcgactgtgagccagacgacaatcacctgtcgatcgtgacactagaagaagcgccttttgttatcgtcgaggacatcgaccctctgacagaaacctgtgttcggaacacagtaccatgccgtaaatttgttaagattaataactccaccaacgagggcatgaatgtgaagaaatgctgtaagggcttttgcatagacattctgaaaaagctgtcaaggaccgtgaagttcacctatgatctctatctagtgacgaacggcaaacacggtaaaaaggtgaacaacgtgtggaatgggatgattggcgaggtcgtttaccagcgggcggttatggctgtcggctccctgaccatcaacgaagagcggtctgaggtggtggatttctcagttccctttgtcgaaacgggcattagtgtaatggtatcccggagcaacggtaccgtatctcctagcgccttcttggagcctttcagtgctagcgtctgggtcatgatgttcgtgatgctgttaatcgtgagcgcaattgcagtgttcgttttcgaatactttagccctgtcggatacaaccgtaacctggcaaagggaaaggccccccatggaccctctttcacaattggaaaggctatctggttgctctgggggctggttttcaacaactctgtgccagtgcagaaccctaagggcaccaccagtaaaatcatggtgagcgtctgggccttttttgccgtgattttcttagcctcttacacagctaacctcgcagccttcatgatacaggaagaatttgtagatcaggtcaccggcctgagtgataaaaagtttcagcggcctcacgactattccccacccttcaggttcggcactgtgccaaacggctcaactgagcgcaacatccggaacaattacccctacatgcatcagtacatgactaagtttaatcaaaaaggtgtggaagacgccctggtctccctgaagaccggcaagctagatgctttcatttatgacgccgcggtactgaactataaagccggcagagacgaaggttgtaagctggtgacaatcggctccggctacattttcgcaactacgggttatggaatagcccttcagaagggaagcccgtggaagcgacaaatcgacctggcccttctccagttcgtgggagatggcgaaatggaggaactcgagaccctgtggctgaccggaatatgccacaacgagaagaacgaggtcatgagcagtcagctggacatagataatatggcgggcgtgttctatatgctggctgctgctatggctctgagtttgattaccttcatctgggaacatctcttttactggaaactccgtttctgtttcactggcgtgtgtagcgaccggccagggctgctgttctccatttctcgtggaatctattcttgcatccacggagttcatattgaggagaagaagaaaagtccagacttcaatctgacgggaagccaaagcaacatgctaaagttgctgcggtcagccaaaaatatctcttccatgtcgaacatgaattcaagcaggatggatagtcccaaacgagctgcagacttcattcagcggggctcactgataatggacatggtttccgataaggggaatctgatgtacagcgataaccggtcctttcagggtaaggagagcatctttggcgacaatatgaatgagcttcaaacattcgtggctaacagacagaaagacaatcttaataactacgtctttcaagggcagcaccccctcacacttaatgagtctaatccaaataccgtagaggtggctgtctcaactgaatcaaaggcaaacagccgcccaagacagctctggaagaaatccgtcgactccataaggcaggactccctgtctcagaacccagtgtctcagcgtgatgaggcaaccgccgagaaccgcacccactcgttgaagagccccagatacctgcccgaagagatggcccactcggatatatcagaaacctctaatagggctacctgtcacagagaacctgacaattccaagaaccacaagaccaaagataatttcaagcgatctgtggcaagcaagtaccccaaagactgctccgaggtagaaaggacctacttgaagaccaagtcttcgtctccacgggacaagatttacacaatagacggtgaaaaggaacccggctttcacctggatccgccacagtttgtggaaaacgtaacgctgccagaaaacgtggatttcccagacccctaccaggacccctcggagaactttcgcaaaggcgattctaccctgcccatgaacaggaatccgttgcacaacgaagaaggattatctaataatgaccaatacaaactgtactcaaagcactttacgttaaaggataaagggtctccacacagcgaaacgtccgagcgctatcgccagaactccactcactgcaggtcatgcctgtccaacatgccaacttacagcggccactttacaatgcgctccccctttaagtgcgacgcttgtctgagaatgggcaatctgtacgacatcgatgaggatcagatgctacaggaaacggggatgaccaatgcttggctgctgggagacgcccccaggaccctaaccaacaccaggtgccatcccaggcgctag

SEQ ID NO: 315768 - DNA, 3375 bp, Artificial Sequence
  derived and/or modified sequence
atgctgaagatcatgcaggattatgattggcacgtcttcagtctggtgactaccatttttcccggatacagagaattcatttccttcgtgaaaaccacagtcgacaactccttcgttggctgggatatgcagaatgtgatcacgctggatactagctttgaggacgccaagacacaggtgcaactcaaaaaaatccacagttccgtgatccttctgtactgttctaaagatgaggccgttcttatattgtcagaagcgcggagtctcggcctcacaggctatgattttttctggatcgtcccttctctggtgtcaggaaatactgaactgatacccaaagaatttccatctgggttgatctccgtctcatatgatgattgggactacagtctggaggccagagtgagggatggcatcggtattctgaccacggctgcgagctctatgctagagaagttctcctatattcccgaagctaaggccagctgttacggacagatggagcgcccagaagtgccaatgcacacactacacccctttatggtgaatgtgacatgggacggcaaggatctctctttcaccgaagagggttaccaggtgcaccctagacttgtggtaattgtgttgaataaggaccgagagtgggagaaagtcggcaaatgggaaaatcataccctaagtctgaggcacgctgtctggcctagatataaatctttctctgattgcgaacccgacgacaaccatctatccattgtcactcttgaggaagcaccatttgtgatcgttgaagacatcgacccgctgaccgaaacctgcgtgcgcaataccgtcccatgcagaaagtttgtgaagattaataattctaccaacgagggtatgaatgtgaaaaaatgttgtaaggggttttgtatagatattctgaaaaaactgtcccggactgtcaaattcacatatgacctttaccttgtgacaaacggcaagcatggcaagaaggtgaacaatgtgtggaacggcatgataggggaggtcgtgtaccagcgagccgttatggcagtgggctccctcacaattaatgaagaaagatctgaggtcgtggatttctccgttcctttcgtggagactggtatctctgtcatggtatcaaggagtaacggcacagtaagcccgagcgcctttcttgaaccattcagtgcgtctgtgtgggtgatgatgtttgtaatgctgctcatagtgagcgccatagctgtgttcgttttcgagtattttagtcctgtcggctataaccgcaacctggccaaggggaaagccccacacgggccaagcttcaccataggcaaggccatctggctcctttggggcctcgtcttcaataacagcgtcccggtgcagaatccgaaaggtaccacaagtaagatcatggtttctgtctgggcctttttcgccgtaatttttttggcctcctacacagctaacctggccgcattcatgatccaagaggaatttgtggaccaggtgaccggattgagtgacaagaagtttcagagaccgcatgactacagcccccctttccggtttgggacagtgccaaacggctccaccgaaaggaatataaggaacaattacccatacatgcaccagtacatgactaaatttaatcagaagggtgtcgaggatgcgctggttagcttaaaaactggcaaactcgacgcttttatttacgatgcagccgtactgaattacaaggctggcagagatgagggttgtaagttagttacgatcggctccgggtatattttcgcaactacgggctatggcattgctctccagaaagggagcccctggaaaaggcagatagacctggccctacttcaattcgtgggcgatggagaaatggaggaattggaaactctatggttgacagggatttgtcacaacgaaaaaaacgaggtgatgtcttcgcagctcgacatcgacaatatggctggcgtgttctacatgctggccgccgctatggccttgagcttgatcacctttatttgggagcacctgttctattggaaactgcgattttgttttacaggtgtttgttccgaccgacccggccttcttttcagcatctctagaggaatatacagctgcattcatggagtgcacattgaagaaaagaagaagtcaccagactttaatctgacagggtcccagtcaaatatgttgaagttgctaaggagtgcgaagaatatttcctcaatgtcgaatatgaattcaagtcggatggatagccctaagcgggctgctgatttcatccaaagaggtagcctcatcatggatatggtctcagacaaaggaaatttgatgtactctgataatcggtcctttcagggtaaggaaagtatctttggggataatatgaacgaactgcagacctttgtagccaatcggcaaaaagacaatttgaacaattatgtgttccaggggcagcatcccctgacattaaacgagtctaatcccaacacagtcgaagtcgcagtgtccaccgagtccaaggctaattctaggccccggcaactgtggaaaaaaagcgtagacagtatccggcaggatagcttgagtcagaatccagttagtcagcgagacgaagccaccgccgaaaacagaacacattccctgaagagtcccaggtacctgcctgaagagatggcccattcagacatctctgaaacttctaaccgagctacatgccacagagaaccggataattctaagaatcataaaacaaaagacaattttaagagatctgtggcatctaaatatccaaaagactgttctgaggttgagcgtacctatctcaagacgaaatcttcttcgccacgggacaaaatttataccattgatggggagaaagaaccgggatttcacctggatccgcctcaatttgttgaaaatgtcactctgccagaaaatgtggatttccccgacccttaccaggatccttccgagaatttcaggaagggcgacagtacacttccgatgaaccgcaatcctctccataacgaggagggactaagtaataacgatcagtacaaactctattcgaagcattttacactgaaagataaaggctccccacacagcgaaacaagcgaaaggtatcgtcagaactcaacccattgccggtcctgcctttccaacatgccaacatacagtgggcacttcaccatgcggtccccgtttaaatgcgacgcctgtctgcgcatgggcaatctttacgacatcgacgaggatcagatgctgcaggaaactggtatgactaacgcctggctccttggcgacgctcccagaacactgaccaacactaggtgtcatcccagacgctag

SEQ ID NO: 315769 - DNA, 4734 bp, Artificial Sequence
  derived and/or modified sequence
agccctgctgcagagcctccggctgggatagccgccccccgtgggggcgatgcggacagcgcgggacagccaggggagcgcgctggggccgcagcatgcgggaacccgctaaacccggtggctgctgaggcggccgagatgctcgtgcgcgcagcgcgccccactgcatcctcgaccttctcgggctacagggaccgtcagtggcgactatgggcagagtgggctattggaccctgctggtgctgccggcccttctggtctggcgcggtccggcgccgagcgcggcggcggagaagggtccccccgcgctaaatattgcggtgatgctgggtcacagccacgacgtgacagagcgcgaacttcgaacactgtggggccccgagcaggcggcggggctgcccctggacgtgaacgtggtagctctgctgatgaaccgcaccgaccccaagagcctcatcacgcacgtgtgcgacctcatgtccggggcacgcatccacggcctcgtgtttggggacgacacggaccaggaggccgtagcccagatgctggattttatctcctcccacaccttcgtccccatcttgggcattcatgggggcgcatctatgatcatggctgacaaggatccgacgtctaccttcttccagtttggagcgtccatccagcagcaagccacggtcatgctgaagatcatgcaggattatgactggcatgtcttctccctggtgaccactatcttccctggctacagggaattcatcagcttcgtcaagaccacagtggacaacagctttgtgggctgggacatgcagaatgtgatcacactggacacttcctttgaggatgcaaagacacaagtccagctgaagaagatccactcttctgtcatcttgctctactgttccaaagacgaggctgttctcattctgagtgaggcccgctcccttggcctcaccgggtatgatttcttctggattgtccccagcttggtctctgggaacacggagctcatcccaaaagagtttccatcgggactcatttctgtctcctacgatgactgggactacagcctggaggcgagagtgagggacggcattggcatcctaaccaccgctgcatcttctatgctggagaagttctcctacatccccgaggccaaggccagctgctacgggcagatggagaggccagaggtcccgatgcacaccttgcacccatttatggtcaatgttacatgggatggcaaagacttatccttcactgaggaaggctaccaggtgcaccccaggctggtggtgattgtgctgaacaaagaccgggaatgggaaaaggtgggcaagtgggagaaccatacgctgagcctgaggcacgccgtgtggcccaggtacaagtccttctccgactgtgagccggatgacaaccatctcagcatcgtcaccctggaggaggccccattcgtcatcgtggaagacatagaccccctgaccgagacgtgtgtgaggaacaccgtgccatgtcggaagttcgtcaaaatcaacaattcaaccaatgaggggatgaatgtgaagaaatgctgcaaggggttctgcattgatattctgaagaagctttccagaactgtgaagtttacttacgacctctatctggtgaccaatgggaagcatggcaagaaagttaacaatgtgtggaatggaatgatcggtgaagtggtctatcaacgggcagtcatggcagttggctcgctcaccatcaatgaggaacgttctgaagtggtggacttctctgtgccctttgtggaaacgggaatcagtgtcatggtttcaagaagtaatggcaccgtctcaccttctgcttttctagaaccattcagcgcctctgtctgggtgatgatgtttgtgatgctgctcattgtttctgccatagctgtttttgtctttgaatacttcagccctgttggatacaacagaaacttagccaaagggaaagcaccccatgggccttcttttacaattggaaaagctatatggcttctttggggcctggtgttcaataactccgtgcctgtccagaatcctaaagggaccaccagcaagatcatggtatctgtatgggccttcttcgctgtcatattcctggctagctacacagccaatctggctgccttcatgatccaagaggaatttgtggaccaagtgaccggcctcagtgacaaaaagtttcagagacctcatgactattccccaccttttcgatttgggacagtgcctaatggaagcacggagagaaacattcggaataactatccctacatgcatcagtacatgaccaaatttaatcagaaaggagtagaggacgccttggtcagcctgaaaacggggaagctggacgctttcatctacgatgccgcagtcttgaattacaaggctgggagggatgaaggctgcaagctggtgaccatcgggagtgggtacatctttgccaccaccggttatggaattgcccttcagaaaggctctccttggaagaggcagatcgacctggccttgcttcagtttgtgggtgatggtgagatggaggagctggagaccctgtggctcactgggatctgccacaacgagaagaacgaggtgatgagcagccagctggacattgacaacatggcgggcgtattctacatgctggctgccgccatggcccttagcctcatcaccttcatctgggagcacctcttctactggaagctgcgcttctgtttcacgggcgtgtgctccgaccggcctgggttgctcttctccatcagcaggggcatctacagctgcattcatggagtgcacattgaagaaaagaagaagtctccagacttcaatctgacgggatcccagagcaacatgttaaaactcctccggtcagccaaaaacatttccagcatgtccaacatgaactcctcaagaatggactcacccaaaagagctgctgacttcatccaaagaggttccctcatcatggacatggtttcagataaggggaatttgatgtactcagacaacaggtcctttcaggggaaagagagcatttttggagacaacatgaacgaactccaaacatttgtggccaaccggcagaaggataacctcaataactatgtattccagggacaacatcctcttactctcaatgagtccaaccctaacacggtggaggtggccgtgagcacagaatccaaagcgaactctagaccccggcagctgtggaagaaatccgtggattccatacgccaggattcactatcccagaatccagtctcccagagggatgaggcaacagcagagaataggacccactccctaaagagccctaggtatcttccagaagagatggcccactctgacatttcagaaacgtcaaatcgggccacgtgccacagggaacctgacaacagtaagaaccacaaaaccaaggacaactttaaaaggtcagtggcctccaaataccccaaggactgtagtgaggtcgagcgcacctacctgaaaaccaaatcaagctcccctagagacaagatctacactatagatggtgagaaggagcctggtttccacttagatccaccccagtttgttgaaaatgtgaccctgcccgagaacgtggacttcccggacccctaccaggatcccagtgaaaacttccgcaagggggactccacgctgccaatgaaccggaaccccttgcataatgaagaggggctttccaacaacgaccagtataaactctactccaagcacttcaccttgaaagacaagggttccccgcacagtgagaccagcgagcgataccggcagaactccacgcactgcagaagctgcctttccaacatgcccacctattcaggccacttcaccatgaggtcccccttcaagtgcgatgcctgcctgcggatggggaacctctatgacatcgatgaagaccagatgcttcaggagacagggatgaccaacgcttggttattgggagatgcccctcggacccttacaaacactcgttgccatcccaggcggtgaatgacagctatcttcggtcgtccttgaggtcaacggcatcgtactgttccagggacagtcggggccacaatgatgtgtatatttcggagcatgttatgccttatgctgcaaataagaataatatgtactctacccccagggttttaaattcctgcagcaatagacgcgtgtacaagaaaatgcctagtatcgaatctgatgtttaaaaatcttccattaatgttttatctatagggaaatatacgtaatggccaatgttctggagggtaaatgttggatgtccaatagtgccctgctaagaggaagaagatgtagggaggtattttgttgttgttgttgttggctcttttgcacacggcttcatgccataatcttccactcaaggaatcttgtgaggtgtgtgctgagcatggcagacaccagataggtgagtccttaaccaaaaataactaactacataagggcaagtctccgggacatgcctactgggtatgttggcaataatgatgcattggatgccaatggtgatgttatgatttcctatattccaaattccattaaggtcagcccaccatgtaattttctcatcagaaatgcctaatggtttctctaatacagaataagcaatatggtgtgcatgtaaacctgacacagacaaaataaaaacagttaagaatgc

SEQ ID NO: 315770 - DNA, 4164 bp, Artificial Sequence
  derived and/or modified sequence
atatatccaatatttctcctgttgagagtttaccagcctgtaattttcttaaggatccgacgtctaccttcttccagtttggagcgtccatccagcagcaagccacggtcatgctgaagatcatgcaggattatgactggcatgtcttctccctggtgaccactatcttccctggctacagggaattcatcagcttcgtcaagaccacagtggacaacagctttgtgggctgggacatgcagaatgtgatcacactggacacttcctttgaggatgcaaagacacaagtccagctgaagaagatccactcttctgtcatcttgctctactgttccaaagacgaggctgttctcattctgagtgaggcccgctcccttggcctcaccgggtatgatttcttctggattgtccccagcttggtctctgggaacacggagctcatcccaaaagagtttccatcgggactcatttctgtctcctacgatgactgggactacagcctggaggcgagagtgagggacggcattggcatcctaaccaccgctgcatcttctatgctggagaagttctcctacatccccgaggccaaggccagctgctacgggcagatggagaggccagaggtcccgatgcacaccttgcacccatttatggtcaatgttacatgggatggcaaagacttatccttcactgaggaaggctaccaggtgcaccccaggctggtggtgattgtgctgaacaaagaccgggaatgggaaaaggtgggcaagtgggagaaccatacgctgagcctgaggcacgccgtgtggcccaggtacaagtccttctccgactgtgagccggatgacaaccatctcagcatcgtcaccctggaggaggccccattcgtcatcgtggaagacatagaccccctgaccgagacgtgtgtgaggaacaccgtgccatgtcggaagttcgtcaaaatcaacaattcaaccaatgaggggatgaatgtgaagaaatgctgcaaggggttctgcattgatattctgaagaagctttccagaactgtgaagtttacttacgacctctatctggtgaccaatgggaagcatggcaagaaagttaacaatgtgtggaatggaatgatcggtgaagtggtctatcaacgggcagtcatggcagttggctcgctcaccatcaatgaggaacgttctgaagtggtggacttctctgtgccctttgtggaaacgggaatcagtgtcatggtttcaagaagtaatggcaccgtctcaccttctgcttttctagaaccattcagcgcctctgtctgggtgatgatgtttgtgatgctgctcattgtttctgccatagctgtttttgtctttgaatacttcagccctgttggatacaacagaaacttagccaaagggaaagcaccccatgggccttcttttacaattggaaaagctatatggcttctttggggcctggtgttcaataactccgtgcctgtccagaatcctaaagggaccaccagcaagatcatggtatctgtatgggccttcttcgctgtcatattcctggctagctacacagccaatctggctgccttcatgatccaagaggaatttgtggaccaagtgaccggcctcagtgacaaaaagtttcagagacctcatgactattccccaccttttcgatttgggacagtgcctaatggaagcacggagagaaacattcggaataactatccctacatgcatcagtacatgaccaaatttaatcagaaaggagtagaggacgccttggtcagcctgaaaacggggaagctggacgctttcatctacgatgccgcagtcttgaattacaaggctgggagggatgaaggctgcaagctggtgaccatcgggagtgggtacatctttgccaccaccggttatggaattgcccttcagaaaggctctccttggaagaggcagatcgacctggccttgcttcagtttgtgggtgatggtgagatggaggagctggagaccctgtggctcactgggatctgccacaacgagaagaacgaggtgatgagcagccagctggacattgacaacatggcgggcgtattctacatgctggctgccgccatggcccttagcctcatcaccttcatctgggagcacctcttctactggaagctgcgcttctgtttcacgggcgtgtgctccgaccggcctgggttgctcttctccatcagcaggggcatctacagctgcattcatggagtgcacattgaagaaaagaagaagtctccagacttcaatctgacgggatcccagagcaacatgttaaaactcctccggtcagccaaaaacatttccagcatgtccaacatgaactcctcaagaatggactcacccaaaagagctgctgacttcatccaaagaggttccctcatcatggacatggtttcagataaggggaatttgatgtactcagacaacaggtcctttcaggggaaagagagcatttttggagacaacatgaacgaactccaaacatttgtggccaaccggcagaaggataacctcaataactatgtattccagggacaacatcctcttactctcaatgagtccaaccctaacacggtggaggtggccgtgagcacagaatccaaagcgaactctagaccccggcagctgtggaagaaatccgtggattccatacgccaggattcactatcccagaatccagtctcccagagggatgaggcaacagcagagaataggacccactccctaaagagccctaggtatcttccagaagagatggcccactctgacatttcagaaacgtcaaatcgggccacgtgccacagggaacctgacaacagtaagaaccacaaaaccaaggacaactttaaaaggtcagtggcctccaaataccccaaggactgtagtgaggtcgagcgcacctacctgaaaaccaaatcaagctcccctagagacaagatctacactatagatggtgagaaggagcctggtttccacttagatccaccccagtttgttgaaaatgtgaccctgcccgagaacgtggacttcccggacccctaccaggatcccagtgaaaacttccgcaagggggactccacgctgccaatgaaccggaaccccttgcataatgaagaggggctttccaacaacgaccagtataaactctactccaagcacttcaccttgaaagacaagggttccccgcacagtgagaccagcgagcgataccggcagaactccacgcactgcagaagctgcctttccaacatgcccacctattcaggccacttcaccatgaggtcccccttcaagtgcgatgcctgcctgcggatggggaacctctatgacatcgatgaagaccagatgcttcaggagacagggatgaccaacgcttggttattgggagatgcccctcggacccttacaaacactcgttgccatcccaggcggtgaatgacagctatcttcggtcgtccttgaggtcaacggcatcgtactgttccagggacagtcggggccacaatgatgtgtatatttcggagcatgttatgccttatgctgcaaataagaataatatgtactctacccccagggttttaaattcctgcagcaatagacgcgtgtacaagaaaatgcctagtatcgaatctgatgtttaaaaatcttccattaatgttttatctatagggaaatatacgtaatggccaatgttctggagggtaaatgttggatgtccaatagtgccctgctaagaggaagaagatgtagggaggtattttgttgttgttgttgttggctcttttgcacacggcttcatgccataatcttccactcaaggaatcttgtgaggtgtgtgctgagcatggcagacaccagataggtgagtccttaaccaaaaataactaactacataagggcaagtctccgggacatgcctactgggtatgttggcaataatgatgcattggatgccaatggtgatgttatgatttcctatattccaaattccattaaggtcagcccaccatgtaattttctcatcagaaatgcctaatggtttctctaatacagaataagcaatatggtgtgcatgtaaacctgacacagacaaaataaaaacagttaagaatgc

SEQ ID NO: 315771 - DNA, 3846 bp, Artificial Sequence
  derived and/or modified sequence
atgggccgggtgggctactggaccctgctggtgctgcctgccctgctggtgtggaggggccctgcccccagcgctgctgctgagaagggccccccagccctgaacattgctgtgatgctgggccacagccatgatgtgacagagcgggagctgcggaccctgtggggccctgagcaggccgccggcctgcccctggatgtgaatgtggtggccctgctgatgaacagaacagaccccaagagcctcatcacccacgtgtgtgacctgatgtctggggcccgcatccacggcctggtgtttggagatgacacagaccaggaggccgtggcccagatgctggacttcatcagcagccacacctttgtgcccatcctgggcatccacggcggggcctccatgatcatggctgacaaggaccccaccagcaccttcttccagtttggagccagcatccagcagcaggccaccgtgatgctgaagatcatgcaggactatgactggcacgtgttcagcctggtgaccaccatcttccctggctaccgggagttcatcagctttgtgaagaccaccgtggacaacagctttgtgggctgggacatgcagaatgtcatcaccctggacaccagctttgaagatgccaagacccaggtgcagctgaagaagatccacagcagcgtcatcctgctgtactgcagcaaggatgaggccgtgctgatcctgtctgaggcccggagcctgggcctgaccggctatgacttcttctggatcgtgcccagcctggtgtctggcaacacagagctgatccccaaggagttccccagcggcctcatctctgtgtcctatgatgactgggactacagcctggaggcccgggtgagagatggcatcggcatcctgaccacagctgccagctccatgctggagaagttctcctacatccctgaggccaaggccagctgctacggccagatggagaggcctgaggtgcccatgcacaccctgcaccccttcatggtgaatgtgacctgggatggcaaggacctgtccttcacagaggagggctaccaggtgcacccccggctggtggtgattgtgctgaacaaggaccgggagtgggagaaggtgggcaagtgggagaaccacaccctgagcctgcggcatgctgtgtggccccgctacaagagcttcagtgactgtgagccagatgacaaccacctgagcatcgtgaccctggaggaggcccccttcgtcatcgtggaggacatcgaccccctgacagagacctgtgtgaggaacacagtgccctgcaggaagtttgtgaagatcaacaacagcaccaatgaaggcatgaatgtgaagaagtgctgcaagggcttctgcatcgacatcctgaagaagctgagcaggacagtgaagttcacctatgacctgtacctggtgaccaacgggaagcacggcaagaaggtgaacaacgtgtggaatggcatgattggagaggtggtgtaccagagagctgtgatggctgtgggcagcctgaccatcaatgaggagaggtctgaggtggtggacttctctgtgccctttgtggagaccggcatctctgtgatggtgagccgcagcaatggaacagtgagccccagcgccttcctggagcccttcagcgcctctgtgtgggtgatgatgtttgtgatgctgctgattgtgtctgccatcgctgtgtttgtgtttgagtacttcagccctgtgggctacaacagaaacctggccaagggcaaggcccctcatggccccagcttcaccatcggcaaggccatctggctgctgtggggcctggtgttcaacaacagcgtgcctgtgcagaaccccaagggcaccaccagcaagatcatggtgtctgtgtgggccttctttgctgtgatcttcctggccagctacacagccaacctggccgccttcatgatccaggaggagtttgtggaccaggtgacaggcctgagtgacaagaagttccagaggcctcatgactacagcccccccttccgcttcggcaccgtgcccaacggcagcacagagaggaacatccggaacaactacccctacatgcaccagtacatgaccaagttcaaccagaagggcgtggaggatgccctggtgtccctgaagacaggcaagctggatgccttcatctatgatgctgctgtgctgaactacaaggccggcagagatgagggctgcaagctggtgaccatcggcagcggctacatctttgccaccaccggctatggaattgccctgcagaagggcagcccctggaagaggcagattgacctggccctgctgcagtttgtgggagatggagagatggaggagctggagaccctgtggctgaccggcatctgccacaatgagaagaatgaggtgatgagcagccagctggacatcgacaacatggccggggtcttctacatgctggccgccgccatggccctgagcctcatcaccttcatctgggagcacctgttctactggaagctgcgcttctgcttcaccggggtgtgcagcgacaggcctggcctgctcttcagcatcagccggggcatctacagctgcatccacggcgtgcacatcgaggagaagaagaagagcccagacttcaacctgaccggcagccagagcaacatgctgaagctgctgcggagcgccaagaacatcagctccatgagcaacatgaacagcagcaggatggacagccccaagagagctgctgacttcatccagaggggcagcctcatcatggacatggtgtctgacaagggcaacctgatgtacagcgacaacagaagcttccagggcaaggagagcatctttggagacaacatgaatgagctgcagacctttgtggccaaccggcagaaggacaacctgaacaactacgtgttccagggccagcaccccctgaccctgaatgaaagcaaccccaacacagtggaggtggccgtgtccacagagagcaaggccaacagccggccccggcagctgtggaagaagtctgtggacagcatccggcaggacagcctgagccagaaccctgtgtcccagagagatgaggccacagctgagaacagaacccacagcctgaagagcccccgctacctgcctgaggagatggcccacagcgacatcagcgagaccagcaacagagccacctgccaccgggagccagacaacagcaagaaccacaagaccaaggacaacttcaagaggtctgtggccagcaagtaccccaaggactgcagcgaggtggagaggacctacctgaagaccaagagcagcagcccccgggacaagatctacaccattgatggagagaaggagcccggcttccacctggaccccccccagtttgtggagaatgtgaccctgcctgaaaatgtggacttcccagacccctaccaggaccccagcgagaacttcaggaagggggacagcaccctgcccatgaacagaaaccccctgcacaatgaggagggcctgagcaacaatgaccagtacaagctgtacagcaagcacttcaccctgaaggacaagggcagcccccacagcgagaccagcgagcgctaccggcagaacagcacccactgccgcagctgcctgagcaacatgcccacctacagcggccacttcaccatgaggagccccttcaagtgtgatgcctgcctgaggatgggcaacctgtatgacattgatgaggaccagatgctgcaggagaccggcatgaccaatgcctggctgctgggagatgcccccaggaccctgaccaacacccgctgccaccccaggaggtag

SEQ ID NO: 315772 - DNA, 3375 bp, Artificial Sequence
  derived and/or modified sequence
atgctgaagatcatgcaggactatgactggcacgtgttcagcctggtgaccaccatcttccctggctaccgggagttcatcagctttgtgaagaccaccgtggacaacagctttgtgggctgggacatgcagaatgtcatcaccctggacaccagctttgaagatgccaagacccaggtgcagctgaagaagatccacagcagcgtcatcctgctgtactgcagcaaggatgaagctgtgctgatcctgtctgaggcccggagcctgggcctgaccggctatgacttcttctggatcgtgcccagcctggtgtctggcaacacagagctgatccccaaggagttccccagcggcctcatctctgtgtcctatgatgactgggactacagcctggaggcccgggtgagagatggcatcggcatcctgaccacagctgccagctccatgctggagaagttctcctacatccctgaggccaaggccagctgctacggccagatggagaggcctgaggtgcccatgcacaccctgcaccccttcatggtgaatgtgacctgggatggcaaggacctgtccttcacagaggagggctaccaggtgcacccccggctggtggtgattgtgctgaacaaggaccgggagtgggagaaggtgggcaagtgggagaaccacaccctgagcctgcggcatgctgtgtggccccgctacaagagcttcagtgactgtgagccagatgacaaccacctgagcatcgtgaccctggaggaggccccctttgtgattgtggaggacatcgaccccctgacagagacctgtgtgaggaacacagtgccctgcaggaagtttgtgaagatcaacaacagcaccaatgaaggcatgaatgtgaagaagtgctgcaagggcttctgcatcgacatcctgaagaagctgagcaggacagtgaagttcacctatgacctgtacctggtgaccaacgggaagcacggcaagaaggtgaacaacgtgtggaatggcatgattggagaggtggtgtaccagagagctgtgatggctgtgggcagcctgaccatcaatgaggagaggtctgaggtggtggacttctctgtgccctttgtggagaccggcatctctgtgatggtgagccgcagcaatggcaccgtgagccccagcgccttcctggagcccttcagcgcctctgtgtgggtgatgatgtttgtgatgctgctgattgtgtctgccatcgctgtgtttgtgtttgagtacttcagccctgtgggctacaacagaaacctggccaagggcaaggccccccacggccccagcttcaccatcggcaaggccatctggctgctgtggggcctggtgttcaacaacagcgtgcctgtgcagaaccccaagggcaccaccagcaagatcatggtgtctgtgtgggccttctttgctgtgatcttcctggccagctacacagccaacctggccgccttcatgatccaggaggagtttgtggaccaggtgacaggcctgagtgacaagaagttccagaggcctcatgactacagcccccccttccgctttggaacagtgcccaacggcagcacagaaagaaacatccggaacaactacccctacatgcaccagtacatgaccaagttcaaccagaagggcgtggaggatgccctggtgtccctgaagacaggcaagctggatgccttcatctatgatgctgctgtgctgaactacaaggccggcagagatgagggctgcaagctggtgaccatcggcagcggctacatctttgccaccaccggctacggcatcgccctgcagaagggcagcccctggaagaggcagattgacctggccctgctgcagtttgtgggagatggagagatggaggagctggagaccctgtggctgaccggcatctgccacaatgagaagaatgaggtgatgagcagccagctggacatcgacaacatggccggggtcttctacatgctggccgccgccatggccctgagcctcatcaccttcatctgggagcacctgttctactggaagctgcgcttctgcttcaccggggtgtgcagcgaccggcccggcctgctcttcagcatcagccggggcatctacagctgcatccatggagtgcacatcgaggagaagaagaagagcccagacttcaacctgaccggcagccagagcaacatgctgaagctgctgcggagcgccaagaacatcagctccatgagcaacatgaacagcagcaggatggacagccccaagagagctgctgacttcatccagaggggcagcctcatcatggacatggtgtctgacaagggcaacctgatgtacagcgacaacagaagcttccagggcaaggagagcatctttggagacaacatgaatgagctgcagacctttgtggccaaccggcagaaggacaacctgaacaactacgtgttccagggccagcaccccctgaccctgaatgaaagcaaccccaacacagtggaggtggccgtgtccacagagagcaaggccaacagccggccccggcagctgtggaagaagtctgtggacagcatccggcaggacagcctgagccagaaccctgtgtcccagagagatgaggccacagcagaaaatagaacccacagcctgaagagcccccgctacctgcctgaggagatggcccacagcgacatcagcgagaccagcaacagagccacctgccaccgggagccagacaacagcaagaaccacaagaccaaggacaacttcaagaggtctgtggccagcaagtaccccaaggactgcagcgaggtggagaggacctacctgaagaccaagagcagcagcccccgggacaagatctacaccattgatggagagaaggagcccggcttccacctggaccccccccagtttgtggagaatgtgaccctgcctgaaaatgtggacttcccagacccctaccaggaccccagcgagaacttcagaaaaggagacagcaccctgcccatgaacagaaaccccctgcacaatgaggagggcctgagcaacaatgaccagtacaagctgtacagcaagcacttcaccctgaaggacaagggcagcccccacagcgagaccagcgagcgctaccggcagaacagcacccactgccgcagctgcctgagcaacatgcccacctacagcggccacttcaccatgaggagccccttcaagtgtgatgcctgcctgaggatgggcaacctgtatgacattgatgaggaccagatgctgcaggagaccggcatgaccaatgcctggctgctgggagatgcccccaggaccctgaccaacacccgctgccaccccaggaggtag

SEQ ID NO: 315773 - DNA, 3846 bp, Artificial Sequence
  derived and/or modified sequence
atgggccgggtgggctactggaccctgctggtgctgcccgccctgcttgtgtggaggggtcctgctccgtcagccgctgcagaaaaaggtccgcctgcacttaatatcgcagttatgttggggcactctcatgacgtcaccgaacgcgagctccggaccctgtgggggcctgaacaggcggcaggcctacctttggatgtcaacgtggtggcgctcctgatgaacaggaccgatccgaagagcttgataacccacgtttgcgatctcatgagtggggcaagaatacacgggcttgtctttggagacgatactgatcaggaagcagtagcacaaatgcttgattttatatcttctcataccttcgtaccaattctgggcatacacggtggcgcatccatgattatggccgataaggaccctacgtccaccttctttcagttcggcgcatccattcagcagcaggcaaccgtgatgctaaaaattatgcaggactatgattggcatgtgttttccctggttactaccatcttccctggatatcgtgagttcatttcctttgtgaagaccacggtcgacaattcatttgtgggctgggacatgcagaacgtcatcaccctggacacaagtttcgaggatgcaaagacgcaggttcagttgaaaaaaatccactcatcggttatcctcctgtattgttctaaggacgaggcagtgctgattctttcagaagctcgctcattgggactcaccgggtacgacttcttctggattgtaccatccttggtgtctggcaacaccgaacttattcctaaggagtttccttcaggtctgatcagcgtgtcttacgatgactgggattactccctggaggcaagagtccgagatggaatcgggatcctgacaacagccgcctcgtctatgctggaaaagttttcgtatatccctgaggctaaggcatcatgctacggtcaaatggagcgcccagaagtgccgatgcacacactgcacccctttatggtgaatgtaacatgggacgggaaagacctgtcattcactgaagaagggtaccaggtccatccgcgcttggtggtgattgtcctgaataaggaccgtgaatgggaaaaagtaggaaagtgggagaaccacacactgagccttaggcacgcagtgtggcctaggtacaaatccttctctgactgcgagccggatgataatcatctgtccatcgtaaccctcgaagaggccccctttgtcattgttgaggatatcgatcctctaaccgaaacgtgtgttcgaaacacagttccttgccgtaagttcgtcaagattaacaattccaccaatgagggaatgaacgttaaaaagtgttgtaaagggttttgcatcgacatactgaagaagctatctagaaccgtcaaattcacatacgacctctatctggttaccaacggtaaacatggcaaaaaagtgaacaatgtatggaatgggatgataggagaggtcgtatatcaacgggcagtcatggcggtgggctccctgacaattaacgaggaaaggagcgaggtagtggacttcagcgtgccattcgtcgagacgggcatttcggtgatggtgtccaggagtaacggaacagtctcgccatctgccttcctagaaccattctcagcttcagtctgggtaatgatgttcgtgatgctcttaatcgtatccgccatcgcagtatttgttttcgagtatttctcgccagttggctataaccggaaccttgccaagggtaaggctccccacgggccgtcatttaccatcggtaaggccatatggctgctttggggtctggttttcaacaactctgtgcctgtacaaaatcctaagggaaccactagcaaaattatggtatccgtttgggcctttttcgccgtaatttttctggcatcatacacggccaatcttgcagcctttatgatccaggaggaattcgttgaccaggtgacgggactcagtgacaagaagttccaaaggccacacgactactcccctcctttccgcttcgggacagttccaaacgggagcaccgagagaaacataagaaacaattacccgtatatgcaccagtatatgacgaagtttaaccagaaaggagtcgaggacgcccttgtaagtctaaagacaggcaaactcgacgcctttatttacgatgctgctgtactgaactataaagccgggagggacgaaggttgcaaactggtcaccatcggctcaggctatatatttgccactactggatatgggattgccttacaaaagggtagtccatggaagcgccagattgacctagccctcttacaatttgtgggcgatggagaaatggaggaactggagaccctgtggttgactggcatttgccacaatgagaaaaacgaggtgatgagcagccaactggacatagataatatggccggggtcttttatatgctggcagcagcgatggctttaagcctgattacctttatttgggaacacttgttttactggaaactgcgcttctgcttcacaggtgtctgtagtgataggcccggtctcctgttttctatctccagggggatttactcctgcattcacggcgtccatatcgaggaaaagaaaaagtcgcccgattttaacttaaccggatcacagtccaacatgctcaaattgcttaggtctgcgaagaatatcagttcaatgtcgaacatgaacagcagcagaatggatagccccaaacgcgctgcagatttcatacagcgggggtctctcatcatggacatggttagcgacaagggcaatttaatgtatagcgacaacagaagctttcagggcaaagagtccattttcggcgataacatgaatgagctccagactttcgttgccaaccgtcagaaggacaacctgaataattatgtgtttcaggggcaacacccgctgacactgaatgagtctaaccctaacactgtggaagtcgccgtttccactgagagcaaagccaacagcaggccccgccagctgtggaaaaaaagtgttgattctatccgtcaggactcccttagccaaaacccagtttcccaaagggatgaggccacagccgagaataggacccactccctgaagtctcctaggtacctcccggaagagatggcacactccgatatctctgaaacttcaaaccgagcgacctgccaccgtgaaccagataattcgaagaaccacaagactaaagacaacttcaagaggagtgtggcatctaagtatcctaaggattgctccgaagtagaacgaacatacctcaagactaaatcttcaagccccagggacaagatttataccatcgacggtgagaaggaaccaggttttcatttagatccaccccagttcgtcgagaacgtgacacttccggaaaatgttgacttcccggacccataccaggaccccagtgagaactttcgtaagggcgattcaacattacctatgaatagaaacccacttcacaacgaagaaggcctctctaataacgaccagtataagctctattcaaagcacttcacccttaaagataagggcagcccccactctgagaccagtgaaagatataggcagaatagtacacactgtagatcttgtttatccaatatgcccacttatagcgggcacttcaccatgaggtcaccatttaaatgtgatgcctgtcttaggatgggtaatctgtacgacattgacgaggaccaaatgttacaggaaacgggtatgaccaacgcatggctcctgggggacgccccaaggacactcaccaatactaggtgccaccctagacgatag

SEQ ID NO: 315774 - DNA, 3375 bp, Artificial Sequence
  derived and/or modified sequence
atgctgaagatcatgcaggactacgactggcacgtgttcagcctggtgacaactatcttccccggttaccgggagttcatttcctttgttaagacgactgtggataacagcttcgttggatgggacatgcaaaacgtaattacactggacacctcatttgaagacgctaagacacaggtgcagttgaaaaagatccattcgtcagtgattctactgtattgttcgaaggatgaagctgtgctaattctcagcgaagcccgttctctgggccttactgggtacgattttttttggatcgtgccctcactggtgagcggcaatacagaacttattcctaaggagtttccctccggtctcatcagcgttagctatgacgactgggattacagtctcgaagctcgagtgcgcgatgggatcgggattctcaccactgcagcaagttcaatgctggagaagtttagctacatccccgaggccaaggcctcttgctatggacagatggagcggcccgaggtaccaatgcatactctgcacccctttatggtgaatgtgacctgggacgggaaagacctgagctttacggaggagggctaccaggtgcaccccaggctggtggttatagttctcaacaaagaccgagagtgggaaaaggtgggaaagtgggagaaccataccctttcactgaggcacgctgtctggccacgatataagtctttcagtgactgtgaacctgatgataatcacttgtcgattgtcaccctagaagaggctccattcgtaattgtagaagacatcgacccgctgacagaaacctgtgtgcgaaataccgtgccctgtcgcaaattcgtgaagatcaataattccacaaacgaggggatgaatgtgaaaaaatgctgtaagggcttttgcattgatatcctgaaaaagctgagccgaaccgtcaaattcacgtacgacctctaccttgtcacgaacggcaagcacggtaaaaaagtgaataatgtttggaacggcatgattggagaggtggtgtaccagcgcgccgtaatggctgttgggtcgcttactattaatgaggagagatctgaggtggtggactttagtgtgcctttcgtcgagaccggaatttcagtgatggttagccgcagcaatggaactgtgtctccctccgccttcttggagccatttagtgcgtccgtttgggtgatgatgtttgtcatgctgctgattgtgagtgccatagcggtgtttgtgtttgagtactttagcccagtggggtacaaccggaaccttgcaaagggtaaggcaccacatggcccaagcttcacgatcggaaaggcaatatggctcctgtggggtctggtctttaacaattccgtgcccgtgcagaacccaaaaggcaccactagcaagattatggtgtcagtttgggcatttttcgctgttatatttcttgcctcttacactgcaaaccttgccgcttttatgatccaggaagagtttgttgatcaagtgacagggttaagcgacaaaaaatttcagagaccccatgactacagtcctccatttcggttcggaacagttccgaatggaagcacagagaggaatattcgtaacaattacccctacatgcaccagtatatgacaaaattcaaccagaagggcgttgaggatgcgcttgtttctttaaaaacaggtaaacttgacgcttttatttacgatgccgctgtcctcaactacaaggcagggcgcgatgagggctgtaagttggtgacgattggaagcggatacatttttgccaccaccggatatgggatagccctccaaaagggaagcccatggaagagacagatcgatctggccctgcttcaatttgtgggtgacggtgaaatggaggaactggaaacgttgtggctcaccggcatctgtcacaacgagaagaacgaagtgatgtcatcccaacttgatatcgacaatatggcaggagtcttttatatgctcgctgccgctatggctctttccctgataacttttatttgggagcaccttttctactggaagctgcggttctgctttaccggcgtgtgtagcgatcgcccaggccttttattttcaattagtcgggggatctactcctgcatccacggggtgcacatcgaggagaaaaaaaaaagtccagactttaatctaaccggatctcaatcaaacatgctgaaacttctgcgctcagcgaaaaacatttctagcatgtctaatatgaacagcagtcggatggactcccccaagcgcgccgcagacttcatccaaaggggctctcttatcatggacatggtttccgataaagggaatctgatgtactctgataatcgtagtttccaaggtaaggagtctatattcggcgacaacatgaatgaactgcaaacgttcgtggctaaccgtcagaaggataaccttaacaactacgtgtttcaaggccaacatcccctgactctgaacgagtctaaccccaatactgtagaagtcgccgtatcgaccgaatctaaagcgaacagcaggcctaggcagttgtggaagaaaagtgttgattctataaggcaggactctctgagccagaatccggtcagccaacgcgacgaggcaacagccgagaatcgaacgcattctctcaaatcgccaagatatctgcctgaagaaatggcacattctgatatctcagagacaagcaatcgggccacgtgtcaccgagagcctgacaatagcaagaaccacaaaactaaagacaactttaagcggtctgttgcatctaaatacccaaaagattgctctgaggtcgagcgaacctacctgaaaaccaagagcagtagcccacgggacaaaatttatactattgacggtgaaaaggagcccggtttccacttggatcccccacagttcgtcgaaaacgtaaccctgcctgagaatgtggacttcccagacccctaccaggatccatccgaaaattttcggaagggcgactctaccttacccatgaataggaaccccctgcataatgaagagggacttagcaacaacgatcagtacaaactctatagcaaacattttacactcaaagacaaggggtctcctcattccgagaccagtgagagataccgacagaactcaacacactgccggtcctgtcttagcaatatgcccacctacagcgggcacttcacgatgcgctcaccgttcaaatgcgatgcctgtctgagaatggggaacctgtatgatattgatgaggatcagatgttacaggaaaccggtatgaccaatgcgtggcttctgggggatgccccccgcacgttgaccaatactcgctgccaccctcgacgatag

SEQ ID NO: 315775 - DNA, 3846 bp, Artificial Sequence
  derived and/or modified sequence
atgggtcgtgttggatactggaccttgcttgtgctacccgctctcctggtgtggagagggcctgcgccttcagccgctgccgaaaaaggtcccccagctctcaatatcgccgtgatgctgggtcacagccacgatgttaccgagcgggagctgcgcacgctgtggggaccagagcaagccgctgggttgccactggatgttaacgtggttgcactgctgatgaaccgaaccgaccccaaaagcctcataacccacgtttgcgacctgatgagcggcgctagaatccacggcctcgtgttcggcgatgacacggaccaggaggcagtagcgcaaatgctggatttcatttcttcccatacctttgtccccatcctcggcatacacggcggagcctcgatgattatggctgacaaggatcctaccagtacattttttcagttcggagcttcaatccagcagcaagcgacggtgatgcttaaaatcatgcaggattatgattggcacgttttcagcctggttactacaatctttccaggttacagggagttcataagttttgtcaagacgacagtcgataacagttttgtggggtgggatatgcagaacgttatcacgctggacacaagcttcgaggacgccaaaacccaggtgcagctgaaaaaaattcattcaagcgttattttactctactgctccaaagatgaggcggtgctgattctgtctgaggctcggagtctaggcctgacagggtatgattttttctggattgtccccagcctcgtttctggtaacacggaactgatcccaaaggagttcccctctggacttatatccgtgagctacgacgattgggactactccctggaagccagggttagagacggcatcggcatactcacgactgcagcctcctccatgctggaaaagttctcatacattccggaggctaaagcttcctgctacggccaaatggaacgccctgaagtacccatgcacaccctgcatcctttcatggttaacgttacttgggatggaaaggacttatcctttaccgaagaaggctaccaggttcatccgaggctggttgtcatcgtgttgaacaaggacagagaatgggaaaaggtggggaaatgggaaaaccacaccctgagcttgcggcacgccgtgtggcctcgctataaaagcttcagcgattgcgaacccgatgacaatcacctgagtatcgtgacgctggaggaggcccctttcgtgatcgtggaggacatcgacccactgacagagacgtgtgtccgtaataccgtgccatgtcgtaaatttgtcaagattaataattcaaccaacgaaggcatgaacgtaaagaaatgttgcaaaggattttgcattgacattctgaagaagctgagtaggaccgtcaagtttacctatgacttgtacttagtaaccaatggtaagcacggcaaaaaggtcaataatgtgtggaacggcatgattggcgaagttgtctatcagcgcgcagtcatggctgtgggctccttgaccatcaacgaggagcgctcggaggtcgttgatttttccgttcctttcgtcgaaactgggatttccgtaatggtatcgcgtagtaacgggactgtgtcccctagtgcgttcctggagcccttctccgcgagcgtttgggtgatgatgttcgtgatgctcctaattgtatctgcaattgcagttttcgtttttgagtacttctcccctgtgggttataaccggaacctggcaaaggggaaggcgccacacggcccatctttcacaattggtaaagctatatggttgctttggggattagtgtttaacaactctgtgcccgtgcagaacccaaagggaacaacgagtaaaatcatggtcagcgtgtgggcctttttcgccgtcatatttctggcctcttataccgcaaacctggcagcttttatgatccaagaagagtttgtggaccaggtcaccggcctatccgataaaaaattccagaggcctcacgattacagccccccattcaggttcgggacagtgcctaatgggtcaacagagaggaacattagaaacaattatccttacatgcaccagtacatgacaaagttcaaccagaagggagtggaagacgccctggttagcctgaagacaggcaaactcgacgcattcatttatgacgcagcggtcctcaattataaggcaggcagagatgagggatgcaagttagtgacaatcgggtccgggtacattttcgctacaaccggatacgggattgcactgcagaaaggctcaccatggaaaaggcaaattgacctcgcccttctacaattcgtaggagacggcgagatggaggagctggaaaccctgtggctcacagggatttgtcacaatgagaaaaacgaggtgatgtcctcgcagctcgatattgataacatggccggagtattttacatgctggccgcagctatggctttgtcgctgattactttcatttgggagcaccttttttattggaaattgagattttgtttcactggagtatgtagtgatcggcctgggttgctgttcagtattagtcgcggaatctacagctgtatccacggcgtgcacatcgaggagaaaaaaaagtcaccggacttcaacctgacaggctcccaatctaacatgcttaagttgttacgcagcgccaagaatatcagcagtatgagcaacatgaatagtagccgtatggattcaccgaaaagagcggctgatttcatccagcggggtagtctgatcatggacatggtgagcgataaaggaaatctcatgtactccgataatcgcagtttccagggaaaggagagtatcttcggagataatatgaatgaattgcagacctttgtcgccaaccgccagaaagacaacctgaacaattatgtcttccagggtcagcaccctctgaccctaaatgagagcaatcccaataccgtagaagttgccgtgtccacagagtccaaagccaatagccggccacggcagctctggaaaaagtctgtcgacagcatccggcaggattcgttgtctcagaacccagtttctcagcgggacgaggccacagctgaaaacagaacacattcactgaagtctccgcgatacctgccagaagagatggcgcatagcgacatctctgaaactagcaatcgcgctacatgccacagagagcccgataacagcaaaaaccacaaaacgaaggacaactttaaacgaagcgtggctagcaaataccccaaagactgctcagaggtggagagaacatatctaaagaccaagtcctccagcccacgtgacaaaatctacaccatcgacggcgagaaagaacccggattccaccttgatcccccacaatttgtcgagaatgtaacacttcctgagaacgtggactttccagacccctatcaagatcctagcgagaactttcgtaagggtgactccactctgccgatgaaccgcaatcctctgcataacgaagaggggctatctaataacgaccagtataagttgtatagcaaacatttcactctgaaagacaaaggttccccccatagcgagacctctgagcggtacaggcaaaatagtactcattgtagatcgtgcctgagtaacatgccgacctactcaggacactttaccatgagatctcctttcaagtgcgacgcctgcctgagaatgggcaacctctatgacatagatgaggaccaaatgctgcaagaaactggaatgacaaacgcttggctgctcggcgatgctccgagaaccctgactaatacaagatgccaccctaggcggtag

SEQ ID NO: 315776 - DNA, 3375 bp, Artificial Sequence
  derived and/or modified sequence
atgctaaagattatgcaggactacgattggcacgtatttagcctcgtgacgacaatattccctggctacagggaatttatcagttttgtgaaaactacagtggacaattcctttgtgggctgggatatgcagaacgtcatcactctcgatacctctttcgaagacgccaaaacccaagtgcaactaaagaagattcattcctccgtgatccttctctactgttcaaaggacgaggccgtcctgatcctcagcgaggcccgtagcctgggcctcactgggtatgactttttttggattgtgccttcgctggtgtctggcaatacagaattgattccaaaagaattcccatccggactcataagtgtttcctatgacgactgggattactctctcgaggcaagggtcagagacgggatcgggatcctgaccaccgctgcttcgtctatgctggaaaaattttcctatattcccgaggcaaaagcatcctgttatggccaaatggagaggcccgaggtgccaatgcataccctgcatccatttatggtgaatgtgacctgggacggtaaagatttgtcctttacagaagagggctatcaggtccacccaaggctggttgtcattgtgctgaataaggaccgcgaatgggaaaaagtgggcaaatgggagaaccataccttgtctctgcggcacgctgtctggccgagatacaaaagctttagcgactgtgagcccgacgataaccatctgtcaatcgtgactctagaggaagctccattcgtaattgttgaggacattgatcccctgacagaaacatgcgttcggaacaccgtaccctgcagaaagtttgtcaagatcaacaactctaccaatgagggtatgaacgtgaaaaagtgctgcaagggattctgtattgatattctgaagaagttatccagaactgtcaagttcacttatgacttgtatctggtgacaaacggcaaacacggcaagaaggtcaataatgtgtggaatggtatgatcggtgaggtcgtataccagcgagcagttatggcggtgggtagcttgaccataaatgaggagagatctgaagtcgtggacttctcagtgccctttgtcgagaccgggatatcagtgatggtttcccgcagtaacggaacagtctccccctccgccttcttggaaccctttagtgcgagcgtttgggtgatgatgttcgtgatgctgctcatcgtgagcgcgatcgccgtgttcgttttcgaatactttagccccgtcggttataatcgtaatctggccaaaggtaaagcacctcacggtccatcttttacgattgggaaggcaatttggcttttatggggtcttgtatttaacaactccgtgcctgtgcagaatcctaagggcaccacaagtaagataatggtcagtgtgtgggcattctttgcggtcatatttctggcttcatataccgcaaacctggccgcatttatgattcaggaagagtttgtagaccaggtgactgggctgagcgacaaaaagttccagcgtccccatgactacagccctccctttagattcggaacggtgcctaacggatcaacagagcggaacattcggaacaactatccatacatgcaccagtacatgacaaagtttaatcaaaagggggtggaggatgcgctcgtgtctcttaagactggtaaactggatgccttcatctacgatgcagctgtgctcaattacaaggctgggcgtgacgaaggttgtaagcttgttactatcgggagcggttatatattcgccaccactggatatggaatagcactccaaaagggcagtccttggaaaagacagatcgacctcgccctgctccagttcgtgggggacggagaaatggaagagttggagacactatggctaacaggtatctgtcataacgagaaaaatgaggtcatgtcttctcagcttgatattgacaacatggccggagtcttctatatgctcgcagctgctatggctctcagcttgattacatttatctgggaacatctattttattggaagttgcgcttctgctttactggggtgtgcagtgaccggccaggactgctcttctctattagtcgaggtatatacagctgtattcacggagtgcacatagaggaaaaaaaaaaaagccctgattttaacctcactggaagccagtccaatatgctgaaattgcttcgctctgccaagaacatttcctcaatgtctaatatgaactcctcacgaatggattcccctaagcgcgctgccgacttcattcagaggggcagtctcattatggatatggtctctgataagggcaatctgatgtatagcgacaaccgtagtttccagggtaaggagtctatcttcggcgacaatatgaacgaacttcagacattcgtggcaaataggcagaaagacaacttaaataattacgtttttcaaggtcagcaccctctgaccttgaatgagtccaaccctaatactgttgaagtcgccgtcagcacggagtcaaaggccaacagccgaccgagacaactctggaagaagtcggttgatagcatccgtcaggatagcctttcacagaacccagtgagtcagcgcgacgaggctacggccgagaaccgtacacatagtctcaaatccccgaggtacttgcccgaagagatggctcactcagacatcagcgaaacctccaaccgcgcaacatgccatcgggaacctgacaatagcaagaaccacaaaacgaaggataacttcaagcgcagcgttgccagcaaatatcctaaggactgttctgaagttgagagaacttacctgaaaactaaaagcagcagccccagagacaagatttatacaattgacggagaaaaagaacccggattccatttagatccccctcagttcgtagaaaatgtcaccctgccagagaatgtggattttcctgacccttatcaggatccgtcggagaacttcagaaagggtgatagtacactccccatgaaccgcaacccacttcataacgaagaggggctctctaacaacgatcaatataaactgtatagcaaacactttacactgaaagacaagggctctcctcactctgaaacgtccgaacgttaccgccagaactccacacactgcaggtcttgtctctctaatatgccaacttactctggtcattttacgatgcgatctcctttcaaatgtgatgcctgcttgaggatgggaaatttgtacgacattgacgaagaccagatgcttcaagaaaccggcatgaccaatgcttggttattaggagacgctccaagaacccttaccaatactcggtgccaccctcgtaggtag

SEQ ID NO: 315777 - DNA, 3846 bp, Artificial Sequence
  derived and/or modified sequence
atgggcagagtgggctactggaccctgctggtgctgcccgccctgctggtgtggagaggccccgcccccagcgccgccgccgagaagggcccccccgccctgaacatcgccgtgatgctgggccacagccacgacgtgaccgagagagagctgagaaccctgtggggccccgagcaggccgccggcctgcccctggacgtgaacgtggtggccctgctgatgaacagaaccgaccccaagagcctgatcacccacgtgtgcgacctgatgagcggcgccagaatccacggcctggtgttcggcgacgacaccgaccaggaggccgtggcccagatgctggacttcatcagcagccacaccttcgtgcccatcctgggcatccacggcggcgccagcatgatcatggccgacaaggaccccaccagcaccttcttccagttcggcgccagcatccagcagcaggccaccgtgatgctgaagatcatgcaggactacgactggcacgtgttcagcctggtgaccaccatcttccccggctacagagagttcatcagcttcgtgaagaccaccgtggacaacagcttcgtgggctgggacatgcagaacgtgatcaccctggacaccagcttcgaggacgccaagacccaggtgcagctgaagaagatccacagcagcgtgatcctgctgtactgcagcaaggacgaggccgtgctgatcctgagcgaggccagaagcctgggcctgaccggctacgacttcttctggatcgtgcccagcctggtgagcggcaacaccgagctgatccccaaggagttccccagcggcctgatcagcgtgagctacgacgactgggactacagcctggaggccagagtgagagacggcatcggcatcctgaccaccgccgccagcagcatgctggagaagttcagctacatccccgaggccaaggccagctgctacggccagatggagagacccgaggtgcccatgcacaccctgcaccccttcatggtgaacgtgacctgggacggcaaggacctgagcttcaccgaggagggctaccaggtgcaccccagactggtggtgatcgtgctgaacaaggacagagagtgggagaaggtgggcaagtgggagaaccacaccctgagcctgagacacgccgtgtggcccagatacaagagcttcagcgactgcgagcccgacgacaaccacctgagcatcgtgaccctggaggaggcccccttcgtgatcgtggaggacatcgaccccctgaccgagacctgcgtgagaaacaccgtgccctgcagaaagttcgtgaagatcaacaacagcaccaacgagggcatgaacgtgaagaagtgctgcaagggcttctgcatcgacatcctgaagaagctgagcagaaccgtgaagttcacctacgacctgtacctggtgaccaacggcaagcacggcaagaaggtgaacaacgtgtggaacggcatgatcggcgaggtggtgtaccagagagccgtgatggccgtgggcagcctgaccatcaacgaggagagaagcgaggtggtggacttcagcgtgcccttcgtggagaccggcatcagcgtgatggtgagcagaagcaacggcaccgtgagccccagcgccttcctggagcccttcagcgccagcgtgtgggtgatgatgttcgtgatgctgctgatcgtgagcgccatcgccgtgttcgtgttcgagtacttcagccccgtgggctacaacagaaacctggccaagggcaaggccccccacggccccagcttcaccatcggcaaggccatctggctgctgtggggcctggtgttcaacaacagcgtgcccgtgcagaaccccaagggcaccaccagcaagatcatggtgagcgtgtgggccttcttcgccgtgatcttcctggccagctacaccgccaacctggccgccttcatgatccaggaggagttcgtggaccaggtgaccggcctgagcgacaagaagttccagagaccccacgactacagcccccccttcagattcggcaccgtgcccaacggcagcaccgagagaaacatcagaaacaactacccctacatgcaccagtacatgaccaagttcaaccagaagggcgtggaggacgccctggtgagcctgaagaccggcaagctggacgccttcatctacgacgccgccgtgctgaactacaaggccggcagagacgagggctgcaagctggtgaccatcggcagcggctacatcttcgccaccaccggctacggcatcgccctgcagaagggcagcccctggaagagacagatcgacctggccctgctgcagttcgtgggcgacggcgagatggaggagctggagaccctgtggctgaccggcatctgccacaacgagaagaacgaggtgatgagcagccagctggacatcgacaacatggccggcgtgttctacatgctggccgccgccatggccctgagcctgatcaccttcatctgggagcacctgttctactggaagctgagattctgcttcaccggcgtgtgcagcgacagacccggcctgctgttcagcatcagcagaggcatctacagctgcatccacggcgtgcacatcgaggagaagaagaagagccccgacttcaacctgaccggcagccagagcaacatgctgaagctgctgagaagcgccaagaacatcagcagcatgagcaacatgaacagcagcagaatggacagccccaagagagccgccgacttcatccagagaggcagcctgatcatggacatggtgagcgacaagggcaacctgatgtacagcgacaacagaagcttccagggcaaggagagcatcttcggcgacaacatgaacgagctgcagaccttcgtggccaacagacagaaggacaacctgaacaactacgtgttccagggccagcaccccctgaccctgaacgagagcaaccccaacaccgtggaggtggccgtgagcaccgagagcaaggccaacagcagacccagacagctgtggaagaagagcgtggacagcatcagacaggacagcctgagccagaaccccgtgagccagagagacgaggccaccgccgagaacagaacccacagcctgaagagccccagatacctgcccgaggagatggcccacagcgacatcagcgagaccagcaacagagccacctgccacagagagcccgacaacagcaagaaccacaagaccaaggacaacttcaagagaagcgtggccagcaagtaccccaaggactgcagcgaggtggagagaacctacctgaagaccaagagcagcagccccagagacaagatctacaccatcgacggcgagaaggagcccggcttccacctggaccccccccagttcgtggagaacgtgaccctgcccgagaacgtggacttccccgacccctaccaggaccccagcgagaacttcagaaagggcgacagcaccctgcccatgaacagaaaccccctgcacaacgaggagggcctgagcaacaacgaccagtacaagctgtacagcaagcacttcaccctgaaggacaagggcagcccccacagcgagaccagcgagagatacagacagaacagcacccactgcagaagctgcctgagcaacatgcccacctacagcggccacttcaccatgagaagccccttcaagtgcgacgcctgcctgagaatgggcaacctgtacgacatcgacgaggaccagatgctgcaggagaccggcatgaccaacgcctggctgctgggcgacgcccccagaaccctgaccaacaccagatgccaccccagaagatag

SEQ ID NO: 315778 - DNA, 3375 bp, Artificial Sequence
  derived and/or modified sequence
atgctgaagatcatgcaggactacgactggcacgtgttcagcctggtgaccaccatcttccccggctacagagagttcatcagcttcgtgaagaccaccgtggacaacagcttcgtgggctgggacatgcagaacgtgatcaccctggacaccagcttcgaggacgccaagacccaggtgcagctgaagaagatccacagcagcgtgatcctgctgtactgcagcaaggacgaggccgtgctgatcctgagcgaggccagaagcctgggcctgaccggctacgacttcttctggatcgtgcccagcctggtgagcggcaacaccgagctgatccccaaggagttccccagcggcctgatcagcgtgagctacgacgactgggactacagcctggaggccagagtgagagacggcatcggcatcctgaccaccgccgccagcagcatgctggagaagttcagctacatccccgaggccaaggccagctgctacggccagatggagagacccgaggtgcccatgcacaccctgcaccccttcatggtgaacgtgacctgggacggcaaggacctgagcttcaccgaggagggctaccaggtgcaccccagactggtggtgatcgtgctgaacaaggacagagagtgggagaaggtgggcaagtgggagaaccacaccctgagcctgagacacgccgtgtggcccagatacaagagcttcagcgactgcgagcccgacgacaaccacctgagcatcgtgaccctggaggaggcccccttcgtgatcgtggaggacatcgaccccctgaccgagacctgcgtgagaaacaccgtgccctgcagaaagttcgtgaagatcaacaacagcaccaacgagggcatgaacgtgaagaagtgctgcaagggcttctgcatcgacatcctgaagaagctgagcagaaccgtgaagttcacctacgacctgtacctggtgaccaacggcaagcacggcaagaaggtgaacaacgtgtggaacggcatgatcggcgaggtggtgtaccagagagccgtgatggccgtgggcagcctgaccatcaacgaggagagaagcgaggtggtggacttcagcgtgcccttcgtggagaccggcatcagcgtgatggtgagcagaagcaacggcaccgtgagccccagcgccttcctggagcccttcagcgccagcgtgtgggtgatgatgttcgtgatgctgctgatcgtgagcgccatcgccgtgttcgtgttcgagtacttcagccccgtgggctacaacagaaacctggccaagggcaaggccccccacggccccagcttcaccatcggcaaggccatctggctgctgtggggcctggtgttcaacaacagcgtgcccgtgcagaaccccaagggcaccaccagcaagatcatggtgagcgtgtgggccttcttcgccgtgatcttcctggccagctacaccgccaacctggccgccttcatgatccaggaggagttcgtggaccaggtgaccggcctgagcgacaagaagttccagagaccccacgactacagcccccccttcagattcggcaccgtgcccaacggcagcaccgagagaaacatcagaaacaactacccctacatgcaccagtacatgaccaagttcaaccagaagggcgtggaggacgccctggtgagcctgaagaccggcaagctggacgccttcatctacgacgccgccgtgctgaactacaaggccggcagagacgagggctgcaagctggtgaccatcggcagcggctacatcttcgccaccaccggctacggcatcgccctgcagaagggcagcccctggaagagacagatcgacctggccctgctgcagttcgtgggcgacggcgagatggaggagctggagaccctgtggctgaccggcatctgccacaacgagaagaacgaggtgatgagcagccagctggacatcgacaacatggccggcgtgttctacatgctggccgccgccatggccctgagcctgatcaccttcatctgggagcacctgttctactggaagctgagattctgcttcaccggcgtgtgcagcgacagacccggcctgctgttcagcatcagcagaggcatctacagctgcatccacggcgtgcacatcgaggagaagaagaagagccccgacttcaacctgaccggcagccagagcaacatgctgaagctgctgagaagcgccaagaacatcagcagcatgagcaacatgaacagcagcagaatggacagccccaagagagccgccgacttcatccagagaggcagcctgatcatggacatggtgagcgacaagggcaacctgatgtacagcgacaacagaagcttccagggcaaggagagcatcttcggcgacaacatgaacgagctgcagaccttcgtggccaacagacagaaggacaacctgaacaactacgtgttccagggccagcaccccctgaccctgaacgagagcaaccccaacaccgtggaggtggccgtgagcaccgagagcaaggccaacagcagacccagacagctgtggaagaagagcgtggacagcatcagacaggacagcctgagccagaaccccgtgagccagagagacgaggccaccgccgagaacagaacccacagcctgaagagccccagatacctgcccgaggagatggcccacagcgacatcagcgagaccagcaacagagccacctgccacagagagcccgacaacagcaagaaccacaagaccaaggacaacttcaagagaagcgtggccagcaagtaccccaaggactgcagcgaggtggagagaacctacctgaagaccaagagcagcagccccagagacaagatctacaccatcgacggcgagaaggagcccggcttccacctggaccccccccagttcgtggagaacgtgaccctgcccgagaacgtggacttccccgacccctaccaggaccccagcgagaacttcagaaagggcgacagcaccctgcccatgaacagaaaccccctgcacaacgaggagggcctgagcaacaacgaccagtacaagctgtacagcaagcacttcaccctgaaggacaagggcagcccccacagcgagaccagcgagagatacagacagaacagcacccactgcagaagctgcctgagcaacatgcccacctacagcggccacttcaccatgagaagccccttcaagtgcgacgcctgcctgagaatgggcaacctgtacgacatcgacgaggaccagatgctgcaggagaccggcatgaccaacgcctggctgctgggcgacgcccccagaaccctgaccaacaccagatgccaccccagaagatag

SEQ ID NO: 315779 - protein, 236 aa, Artificial Sequence
  derived and/or modified sequence
MVVGRGLLGRRSLAALGAACARRGLGPALLGVFCHTDLRKNLTVDEGTMKVEVLPALTDNYMYLVIDDETKEAAIVDPVQPQKVVDAARKHGVKLTTVLTTHHHWDHAGGNEKLVKLESGLKVYGGDDRIGALTHKITHLSTLQVTPCLWLAAGSSMKGLRMRCVKLCWRSWAGSPRTQESTVATSTPSTTSSLHATWSPAMPPSGRSWPGPRRSTASGSPQCHPPWQRSLPTTPS

SEQ ID NO: 315780 - DNA, 711 bp, Artificial Sequence
  derived and/or modified sequence
atggtagtgggaaggggacttctgggccgccgttctttagcagccctgggggcagcttgcgcccggagagggctcgggcccgctctgctaggagtcttctgccataccgatctgagaaaaaatctgacagtcgacgaggggaccatgaaagtggaggttctgccagctctcaccgataactatatgtacttggtcattgatgatgagaccaaagaggccgcaattgtcgatcctgttcaaccccagaaagtggtggacgctgcaagaaagcacggagtgaaactcaccactgtgctaacaactcaccatcattgggaccacgctggagggaacgaaaaattagtaaaactcgagagcggattgaaggtctacgggggtgatgacaggattggagcgttaacccacaagataacacatctgtcaaccctccaagtcacgccatgcctttggctcgccgcaggctcatctatgaaggggctcaggatgaggtgtgtcaaactttgctggaggtcttgggccggcagtccccgaacacaagaatccacagtggcgacctctaccccatccactacctcttccctccacgctacatggtccccagcgatgcctcctagcgggaggtcttggccaggacccagacggtccaccgctagcggcagcccacagtgccatccaccgtggcaacgtagcttaccgaccaccccaagttag

SEQ ID NO: 315781 - DNA, 711 bp, Artificial Sequence
  derived and/or modified sequence
atggtggtgggccggggcctgctgggccgccgcagcctggccgccctgggcgccgcctgtgcccggcggggcctgggccctgccctgctgggcgtcttctgccacacagacctgaggaagaacctgactgtggatgagggcaccatgaaggtggaggtgctgcctgccctgacagacaactacatgtacctggtgattgatgatgagaccaaggaggccgccatcgtggaccctgtgcagccccagaaggtggtggatgctgccaggaagcatggagtgaagctgaccaccgtgctgaccacccaccaccactgggaccacgccggcggcaatgagaagctggtgaagctggagagcggcctgaaggtgtatggaggagatgaccgcatcggggccctgacccacaagatcacccacctgagcaccctgcaggtgaccccctgcctgtggctggccgccggcagctccatgaagggcctgaggatgagatgtgtgaagctgtgctggaggtcctgggccggcagccccaggacccaggagagcacagtggccaccagcacccccagcaccaccagcagcctgcacgccacctggagccctgccatgcctccttctggccgctcctggccaggccccaggaggagcacagccagcggcagcccccagtgccaccccccctggcagaggagcctgcccaccacccccagctag

SEQ ID NO: 315782 - DNA, 711 bp, Artificial Sequence
  derived and/or modified sequence
atggtggtgggccggggcctgctgggccggcggagcctggccgccctaggcgccgcctgcgctcgtcgcggccttggcccagcactccttggggttttctgtcataccgatttacgcaagaacctcaccgtggatgaaggaaccatgaaggttgaggtcctgcccgccttgactgacaactatatgtacctggtgatagacgacgaaaccaaggaagcagccattgtcgatccagtgcaaccccaaaaggtggtggacgctgctaggaaacacggagtcaaattgaccacagtgcttactactcatcatcattgggatcatgctggagggaacgagaagctggtgaaactggaatctgggctgaaagtgtatgggggagacgataggatcggggccctaacccataagattactcacctttctacactccaggtcaccccgtgcctgtggttggccgcaggcagttccatgaagggactaaggatgaggtgcgtgaagctctgctggcgctcctgggccggaagcccccggacccaggagtccactgtcgcgaccagcaccccttctaccacatcctcactccatgccacgtggtcgcctgctatgccaccatctggccggtcgtggccgggacctcgtagatccaccgcatccggatctccccagtgtcatccaccatggcagcgatcccttcctacaacccccagctag

SEQ ID NO: 315783 - DNA, 711 bp, Artificial Sequence
  derived and/or modified sequence
atggtggtgggaaggggtttactcggacggagatcgctggctgctctgggcgctgcatgtgccagaaggggtctcgggcctgctctcttgggcgtcttttgtcatacggacttgcgaaaaaatctgaccgttgacgaaggcactatgaaagtggaagtcctccccgctctgactgataattatatgtatctggttatcgacgacgagaccaaagaagcagcaatagtcgaccccgttcagccccagaaagtggttgacgccgcaagaaagcacggagtgaagttaactacagtcctgacaacacaccatcattgggaccacgctggaggtaacgagaagctggtcaaattggagtctggactcaaggtatatggtggggacgataggattggggctttaactcacaagataacccatctctcaactttacaagtgacaccctgtctgtggctggctgctgggtctagtatgaaaggccttcggatgcgatgcgtcaagctgtgctggcgaagctgggctggctcccctcgtacccaggaatcaactgttgccacttccacgccgtctaccacgagctcactgcacgctacctggagccctgcaatgccacctagcgggaggtcatggcctggccctcggagatcaactgccagcggcagcccccagtgccaccctccatggcagcgctcactcccaactacaccctcctag

SEQ ID NO: 315784 - DNA, 711 bp, Artificial Sequence
  derived and/or modified sequence
atggtggtgggcagaggcctgctgggcagaagaagcctggccgccctgggcgccgcctgcgccagaagaggcctgggccccgccctgctgggcgtgttctgccacaccgacctgagaaagaacctgaccgtggacgagggcaccatgaaggtggaggtgctgcccgccctgaccgacaactacatgtacctggtgatcgacgacgagaccaaggaggccgccatcgtggaccccgtgcagccccagaaggtggtggacgccgccagaaagcacggcgtgaagctgaccaccgtgctgaccacccaccaccactgggaccacgccggcggcaacgagaagctggtgaagctggagagcggcctgaaggtgtacggcggcgacgacagaatcggcgccctgacccacaagatcacccacctgagcaccctgcaggtgaccccctgcctgtggctggccgccggcagcagcatgaagggcctgagaatgagatgcgtgaagctgtgctggagaagctgggccggcagccccagaacccaggagagcaccgtggccaccagcacccccagcaccaccagcagcctgcacgccacctggagccccgccatgccccccagcggcagaagctggcccggccccagaagaagcaccgccagcggcagcccccagtgccaccccccctggcagagaagcctgcccaccacccccagctag

SEQ ID NO: 315785 - protein, 316 aa, Artificial Sequence
  derived and/or modified sequence
MSAEVETSEGVDESEKKNSGALEKENQMRMADLSELLKEGTKEAHDRAENTQFVKDFLKGNIKKELFKLATTALYFTYSALEEEMERNKDHPAFAPLYFPMELHRKEALTKDMEYFFGENWEEQVQCPKAAQKYVERIHYIGQNEPELLVAHAYTRYMGDLSGGQVLKKVAQRALKLPSTGEGTQFYLFENVDNAQQFKQLYRARMNALDLNMKTKERIVEEANKAFEYNMQIFNELDQAGSTLARETLEDGFPVHDGKGDMRKCPFYAAEQDKGALEGSSCPFRTAMAVLRKPSLQFILAAGVALAAGLLAWYYM

SEQ ID NO: 315786 - DNA, 1692 bp, Artificial Sequence
  derived and/or modified sequence
gccggcctcgcgccagtccgctgggctgcagggactgcggcgcctgagggagtcgctgacgggcacgctgactggaggctggcggacaggcgacagcgacctgcggcaggaccagaggagcgagagcagcaagaaccacacccagcagcaatgtcagcggaagtggaaacctcagagggggtagacgagtcagaaaaaaagaactctggggccctagaaaaggagaaccaaatgagaatggctgacctctcggagctcctgaaggaagggaccaaggaagcacacgaccgggcagaaaacacccagtttgtcaaggacttcttgaaaggcaacattaagaaggagctgtttaagctggccaccacggcactttacttcacatactcagccctcgaggaggaaatggagcgcaacaaggaccatccagcctttgcccctttgtacttccccatggagctgcaccggaaggaggcgctgaccaaggacatggagtatttctttggtgaaaactgggaggagcaggtgcagtgccccaaggctgcccagaagtacgtggagcggatccactacatagggcagaacgagccggagctactggtggcccatgcatacacccgctacatgggggatctctcggggggccaggtgctgaagaaggtggcccagcgagcactgaaactccccagcacaggggaagggacccagttctacctgtttgagaatgtggacaatgcccagcagttcaagcagctctaccgggccaggatgaacgccctggacctgaacatgaagaccaaagagaggatcgtggaggaggccaacaaggcttttgagtataacatgcagatattcaatgaactggaccaggccggctccacactggccagagagaccttggaggatgggttccctgtacacgatgggaaaggagacatgcgtaaatgccctttctacgctgctgaacaagacaaaggtgccctggagggcagcagctgtcccttccgaacagctatggctgtgctgaggaagcccagcctccagttcatcctggccgctggtgtggccctagctgctggactcttggcctggtactacatgtgaagcacccatcatgccacaccggtaccctcctcccgactgaccactggcctacccctttctccagccctgactaaactaccacctcaggtgactttttaaaaaatgctgggtttaagaaaggcaaccaataaaagccagatgctagagcctctgcctgacagcatcctctctatgggccatattccgcactgggcacaggccgtcaccctgggagcagtcggcacagtgcagcaagcctggcccccgacccagctctactccaggcttccacacttctgggccctaggctgcttccggtagtccctgtttttgcagtacatgggtgactatctcccctgttggaggtgagtggcctgtaagtccaagctgtgcgagggggccttgctggatgctgctgtacaacttctgggcctctcttggaccctgggagtgagggtgggtgtgggtggaagcctcagaggccttgggagctcatccctctcacccagaatccctctaaccccttgggtgcggtttgctcagccccagcttatctcctcctccgcgctgtgtaaatgctccagcactcaataaagtgggctttgcaagcta

SEQ ID NO: 315787 - DNA, 1644 bp, Artificial Sequence
  derived and/or modified sequence
attgtccactaaggtctggcaggtctgattgcctcttttcaggcactgagtggtggggtatgccatcctcccctgctggaaccagccttggcctgccctgttagtcatcaaaaatagatctcaccagggaacaatcttctcaggttgttgtgtaatttgagtgagccaagatggagtctcgctctgttgcccaggctggagtgcagtggatcagtctagctcattgcagcctccacctcctgggttcaagagattctcctgcctcagcctcctgtgtagctgggattacagagtcttactttgtcggccaggctggagtgcagtggcatgatctcgactcactgcaacctctgtctcccaggctcaagaaatcctcctacatcagcctcccaagtagctgggattacaggctggagtgcagtggctccatctcggctcactgcaacctccgcctcccaggttcaagcgattctcctgcctcagcctcctgagtagctgggattacaggaccagaggagcgagagcagcaagaaccacacccagcagcaatgtcagcggaagtggaaacctcagagggggtagacgagtcagaaaaaaagaactctggggccctagaaaaggagaaccaaatgagaatggctgacctctcggagctcctgaaggaagggaccaaggaagcacacgaccgggcagaaaacacccagtttgtcaaggacttcttgaaaggcaacattaagaaggagctgtttaagctggccaccacggcactttacttcacatactcagccctcgaggaggaaatggagcgcaacaaggaccatccagcctttgcccctttgtacttccccatggagctgcaccggaaggaggcgctgaccaaggacatggagtatttctttggtgaaaactgggaggagcaggtgcagtgccccaaggctgcccagaagtacgtggagcggatccactacatagggcagaacgagccggagctactggtggcccatgcatacacccgctacatgggggatctctcggggggccaggtgctgaagaaggtggcccagcgagcactgaaactccccagcacaggggaagggacccagttctacctgtttgagaatgtggacaatgcccagcagttcaagcagctctaccgggccaggatgaacgccctggacctgaacatgaagaccaaagagaggatcgtggaggaggccaacaaggcttttgagtataacatgcagatattcaatgaactggaccaggccggctccacactggccagagagaccttggaggatgggttccctgtacacgatgggaaaggagacatgcgtaaatgccctttctacgctgctgaacaagacaaaggtgccctggagggcagcagctgtcccttccgaacagctatggctgtgctgaggaagcccagcctccagttcatcctggccgctggtgtggccctagctgctggactcttggcctggtactacatgtgaagcacccatcatgccacaccggtaccctcctcccgactgaccactggcctacccctttctccagccctgactaaactaccacctcaggtgactttttaaaaaatgctgggtttaagaaaggcaaccaataaaagccagatgctag

SEQ ID NO: 315788 - DNA, 1712 bp, Artificial Sequence
  derived and/or modified sequence
gtgagtttgtgtaaatccagttagaccaaaatgagcgaggtggagagcctcttaaccggatgctacgggtgatgactgggaggaggagaaaaattacctctttatcttgcatgaacatcttaattttcaggaccagaggagcgagagcagcaagaaccacacccagcagcaatgtcagcggaagtggaaacctcagagggggtagacgagtcagaaaaaaagaactctggggccctagaaaaggagaaccaaatgagaatggctgacctctcggagctcctgaaggaagggaccaaggaagcacacgaccgggcagaaaacacccagtttgtcaaggacttcttgaaaggcaacattaagaaggagctgtttaagctggccaccacggcactttacttcacatactcagccctcgaggaggaaatggagcgcaacaaggaccatccagcctttgcccctttgtacttccccatggagctgcaccggaaggaggcgctgaccaaggacatggagtatttctttggtgaaaactgggaggagcaggtgcagtgccccaaggctgcccagaagtacgtggagcggatccactacatagggcagaacgagccggagctactggtggcccatgcatacacccgctacatgggggatctctcggggggccaggtgctgaagaaggtggcccagcgagcactgaaactccccagcacaggggaagggacccagttctacctgtttgagaatgtggacaatgcccagcagttcaagcagctctaccgggccaggatgaacgccctggacctgaacatgaagaccaaagagaggatcgtggaggaggccaacaaggcttttgagtataacatgcagatattcaatgaactggaccaggccggctccacactggccagagagaccttggaggatgggttccctgtacacgatgggaaaggagacatgcgtaaatgccctttctacgctgctgaacaagacaaaggtgccctggagggcagcagctgtcccttccgaacagctatggctgtgctgaggaagcccagcctccagttcatcctggccgctggtgtggccctagctgctggactcttggcctggtactacatgtgaagcacccatcatgccacaccggtaccctcctcccgactgaccactggcctacccctttctccagccctgactaaactaccacctcaggtgactttttaaaaaatgctgggtttaagaaaggcaaccaataaaagccagatgctagagcctctgcctgacagcatcctctctatgggccatattccgcactgggcacaggccgtcaccctgggagcagtcggcacagtgcagcaagcctggcccccgacccagctctactccaggcttccacacttctgggccctaggctgcttccggtagtccctgtttttgcagtacatgggtgactatctcccctgttggaggtgagtggcctgtaagtccaagctgtgcgagggggccttgctggatgctgctgtacaacttctgggcctctcttggaccctgggagtgagggtgggtgtgggtggaagcctcagaggccttgggagctcatccctctcacccagaatccctctaaccccttgggtgcggtttgctcagccccagcttatctcctcctccgcgctgtgtaaatgctccagcactcaataaagtgggctttgcaagct

SEQ ID NO: 315789 - DNA, 1752 bp, Artificial Sequence
  derived and/or modified sequence
attgtccactaaggtctggcaggtctgattgcctcttttcaggcactgagtggtggggtatgccatcctcccctgctggaaccagccttggcctgccctgttagtcatcaaaaatagatctcaccagggaacaatcttctcaggttgttgtgtaatttgagtgagccaaggaccagaggagcgagagcagcaagaaccacacccagcagcaatgtcagcggaagtggaaacctcagagggggtagacgagtcagaaaaaaagaactctggggccctagaaaaggagaaccaaatgagaatggctgacctctcggagctcctgaaggaagggaccaaggaagcacacgaccgggcagaaaacacccagtttgtcaaggacttcttgaaaggcaacattaagaaggagctgtttaagctggccaccacggcactttacttcacatactcagccctcgaggaggaaatggagcgcaacaaggaccatccagcctttgcccctttgtacttccccatggagctgcaccggaaggaggcgctgaccaaggacatggagtatttctttggtgaaaactgggaggagcaggtgcagtgccccaaggctgcccagaagtacgtggagcggatccactacatagggcagaacgagccggagctactggtggcccatgcatacacccgctacatgggggatctctcggggggccaggtgctgaagaaggtggcccagcgagcactgaaactccccagcacaggggaagggacccagttctacctgtttgagaatgtggacaatgcccagcagttcaagcagctctaccgggccaggatgaacgccctggacctgaacatgaagaccaaagagaggatcgtggaggaggccaacaaggcttttgagtataacatgcagatattcaatgaactggaccaggccggctccacactggccagagagaccttggaggatgggttccctgtacacgatgggaaaggagacatgcgtaaatgccctttctacgctgctgaacaagacaaaggtgccctggagggcagcagctgtcccttccgaacagctatggctgtgctgaggaagcccagcctccagttcatcctggccgctggtgtggccctagctgctggactcttggcctggtactacatgtgaagcacccatcatgccacaccggtaccctcctcccgactgaccactggcctacccctttctccagccctgactaaactaccacctcaggtgactttttaaaaaatgctgggtttaagaaaggcaaccaataaaagccagatgctagagcctctgcctgacagcatcctctctatgggccatattccgcactgggcacaggccgtcaccctgggagcagtcggcacagtgcagcaagcctggcccccgacccagctctactccaggcttccacacttctgggccctaggctgcttccggtagtccctgtttttgcagtacatgggtgactatctcccctgttggaggtgagtggcctgtaagtccaagctgtgcgagggggccttgctggatgctgctgtacaacttctgggcctctcttggaccctgggagtgagggtgggtgtgggtggaagcctcagaggccttgggagctcatccctctcacccagaatccctctaaccccttgggtgcggtttgctcagccccagcttatctcctcctccgcgctgtgtaaatgctccagcactcaataaagtgggctttgcaagct

SEQ ID NO: 315790 - DNA, 1848 bp, Artificial Sequence
  derived and/or modified sequence
catctctaggccccgccccgcgctgcgtgcccacgttgcgccggcctcgcgccagtccgctgggctgcagggactgcggcgcctgagggagtcgctgacgggcacgctgactggaggctggcggacaggcgacagcgacctgcggcagagtcttgctgcgacacccaggctggagtgcaatggcgctatctcggctcactgcaacctccgcttcccggattcaagcgattctcctgcctcagcctcccgagtaggtgggactacaggaccagaggagcgagagcagcaagaaccacacccagcagcaatgtcagcggaagtggaaacctcagagggggtagacgagtcagaaaaaaagaactctggggccctagaaaaggagaaccaaatgagaatggctgacctctcggagctcctgaaggaagggaccaaggaagcacacgaccgggcagaaaacacccagtttgtcaaggacttcttgaaaggcaacattaagaaggagctgtttaagctggccaccacggcactttacttcacatactcagccctcgaggaggaaatggagcgcaacaaggaccatccagcctttgcccctttgtacttccccatggagctgcaccggaaggaggcgctgaccaaggacatggagtatttctttggtgaaaactgggaggagcaggtgcagtgccccaaggctgcccagaagtacgtggagcggatccactacatagggcagaacgagccggagctactggtggcccatgcatacacccgctacatgggggatctctcggggggccaggtgctgaagaaggtggcccagcgagcactgaaactccccagcacaggggaagggacccagttctacctgtttgagaatgtggacaatgcccagcagttcaagcagctctaccgggccaggatgaacgccctggacctgaacatgaagaccaaagagaggatcgtggaggaggccaacaaggcttttgagtataacatgcagatattcaatgaactggaccaggccggctccacactggccagagagaccttggaggatgggttccctgtacacgatgggaaaggagacatgcgtaaatgccctttctacgctgctgaacaagacaaaggtgccctggagggcagcagctgtcccttccgaacagctatggctgtgctgaggaagcccagcctccagttcatcctggccgctggtgtggccctagctgctggactcttggcctggtactacatgtgaagcacccatcatgccacaccggtaccctcctcccgactgaccactggcctacccctttctccagccctgactaaactaccacctcaggtgactttttaaaaaatgctgggtttaagaaaggcaaccaataaaagccagatgctagagcctctgcctgacagcatcctctctatgggccatattccgcactgggcacaggccgtcaccctgggagcagtcggcacagtgcagcaagcctggcccccgacccagctctactccaggcttccacacttctgggccctaggctgcttccggtagtccctgtttttgcagtacatgggtgactatctcccctgttggaggtgagtggcctgtaagtccaagctgtgcgagggggccttgctggatgctgctgtacaacttctgggcctctcttggaccctgggagtgagggtgggtgtgggtggaagcctcagaggccttgggagctcatccctctcacccagaatccctctaaccccttgggtgcggtttgctcagccccagcttatctcctcctccgcgctgtgtaaatgctccagcactcaataaagtgggctttgcaagct

SEQ ID NO: 315791 - DNA, 2147 bp, Artificial Sequence
  derived and/or modified sequence
caaaactcggtctcaaaaaaagaaaaatcattctgtcattctggccgctgtttgaagaatgcgaataatgcaacagggagatcagatacaagactggtaaccgaggtgtcagagttgagactcagtttcgcagattgcattggcaagtgaccaagtgggtggtgccacggttgacaaccctatttcttacatcactgagtggatgtacaaggattaaaccacactggggaagaaaagtgctcaaccctgaggcaccctcacacacctcggctcttgtgaacactagtgttcctgccgaagcacgcctacttaccccgctgagcagagcctgagcctgcaacctccagagacctggggaaagccacatactccgcttcccgcccccggcaagggcgtgtcagctacaaggggcgtgtcatctctaggccccgccccgcgctgcgtgcccacgttgcgccggcctcgcgccagtccgctgggctgcagggactgcggcgcctgagggagtcgctgacgggcacgctgactggaggctggcggacaggcgacagcgacctgcggcaggaccagaggagcgagagcagcaagaaccacacccagcagcaatgtcagcggaagtggaaacctcagagggggtagacgagtcagaaaaaaagaactctggggccctagaaaaggagaaccaaatgagaatggctgacctctcggagctcctgaaggaagggaccaaggaagcacacgaccgggcagaaaacacccagtttgtcaaggacttcttgaaaggcaacattaagaaggagctgtttaagctggccaccacggcactttacttcacatactcagccctcgaggaggaaatggagcgcaacaaggaccatccagcctttgcccctttgtacttccccatggagctgcaccggaaggaggcgctgaccaaggacatggagtatttctttggtgaaaactgggaggagcaggtgcagtgccccaaggctgcccagaagtacgtggagcggatccactacatagggcagaacgagccggagctactggtggcccatgcatacacccgctacatgggggatctctcggggggccaggtgctgaagaaggtggcccagcgagcactgaaactccccagcacaggggaagggacccagttctacctgtttgagaatgtggacaatgcccagcagttcaagcagctctaccgggccaggatgaacgccctggacctgaacatgaagaccaaagagaggatcgtggaggaggccaacaaggcttttgagtataacatgcagatattcaatgaactggaccaggccggctccacactggccagagagaccttggaggatgggttccctgtacacgatgggaaaggagacatgcgtaaatgccctttctacgctgctgaacaagacaaaggtgccctggagggcagcagctgtcccttccgaacagctatggctgtgctgaggaagcccagcctccagttcatcctggccgctggtgtggccctagctgctggactcttggcctggtactacatgtgaagcacccatcatgccacaccggtaccctcctcccgactgaccactggcctacccctttctccagccctgactaaactaccacctcaggtgactttttaaaaaatgctgggtttaagaaaggcaaccaataaaagccagatgctagagcctctgcctgacagcatcctctctatgggccatattccgcactgggcacaggccgtcaccctgggagcagtcggcacagtgcagcaagcctggcccccgacccagctctactccaggcttccacacttctgggccctaggctgcttccggtagtccctgtttttgcagtacatgggtgactatctcccctgttggaggtgagtggcctgtaagtccaagctgtgcgagggggccttgctggatgctgctgtacaacttctgggcctctcttggaccctgggagtgagggtgggtgtgggtggaagcctcagaggccttgggagctcatccctctcacccagaatccctctaaccccttgggtgcggtttgctcagccccagcttatctcctcctccgcgctgtgtaaatgctccagcactcaataaagtgggctttgcaagcta

SEQ ID NO: 315792 - protein, 672 aa, Artificial Sequence
  derived and/or modified sequence
MAAPAEPCAGQGVWNQTEPEPAATSLLSLCFLRTAGVWVPPMYLWVLGPIYLLFIHHHGRGYLRMSPLFKAKMVAAIPGSLEPGNVLGFALIVLCTSSVAVALWKIQQGTPEAPEFLIHPTVWLTTMSFAVFLIHTERKKGVQSSGVLFGYWLLCFVLPATNAAQQASGAGFQSDPVRHLSTYLCLSLVVAQFVLSCLADQPPFFPEDPQQSNPCPETGAAFPSKATFWWVSGLVWRGYRRPLRPKDLWSLGRENSSEELVSRLEKEWMRNRSAARRHNKAIAFKRKGGSGMKAPETEPFLRQEGSQWRPLLKAIWQVFHSTFLLGTLSLIISDVFRFTVPKLLSLFLEFIGDPKPPAWKGYLLAVLMFLSACLQTLFEQQNMYRLKVLQMRLRSAITGLVYRKVLALSSGSRKASAVGDVVNLVSVDVQRLTESVLYLNGLWLPLVWIVVCFVYLWQLLGPSALTAIAVFLSLLPLNFFISKKRNHHQEEQMRQKDSRARLTSSILRNSKTIKFHGWEGAFLDRVLGIRGQELGALRTSGLLFSVSLVSFQVSTFLVALVVFAVHTLVAENAMNAEKAFVTLTVLNILNKAQAFLPFSIHSLVQARVSFDRLVTFLCLEEVDPGVVDSSSSGSAAGKDCITIHSATFAWSQESPPCLHRVLLYHAGWSAMA

SEQ ID NO: 315793 - protein, 441 aa, Artificial Sequence [sequence omitted]

SEQ ID NO: 315794 - protein, 871 aa, Artificial Sequence
  derived and/or modified sequence
MAAPAEPCAGQGVWNQTEPEPAATSLLSLCFLRTAGVWVPPMYLWVLGPIYLLFIHHHGRGYLRMSPLFKAKMVLGFALIVLCTSSVAVALWKIQQGTPEAPEFLIHPTVWLTTMSFAVFLIHTERKKGVQSSGVLFGYWLLCFVLPATNAAQQASGAGFQSDPVRHLSTYLCLSLVVAQFVLSCLADQPPFFPEDPQQSNPCPETGAAFPSKATFWWVSGLVWRGYRRPLRPKDLWSLGRENSSEELVSRLEKEWMRNRSAARRHNKAIAFKRKGGSGMKAPETEPFLRQEGSQWRPLLKAIWQVFHSTFLLGTLSLIISDVFRFTVPKLLSLFLEFIGDPKPPAWKGYLLAVLMFLSACLQTLFEQQNMYRLKVLQMRLRSAITGLVYRKVLALSSGSRKASAVGDVVNLVSVDVQRLTESVLYLNGLWLPLVWIVVCFVYLWQLLGPSALTAIAVFLSLLPLNFFISKKRNHHQEEQMRQKDSRARLTSSILRNSKTIKFHGWEGAFLDRVLGIRGQELGALRTSGLLFSVSLVSFQVSTFLVALVVFAVHTLVAENAMNAEKAFVTLTVLNILNKAQAFLPFSIHSLVQARVSFDRLVTFLCLEEVDPGVVDSSSSGSAAGKDCITIHSATFAWSQESPPCLHRINLTVPQGCLLAVVGPVGAGKSSLLSALLGELSKVEGFVSIEGAVAYVPQEAWVQNTSVVENVCFGQELDPPWLERVLEACALQPDVDSFPEGIHTSIGEQGMNLSGGQKQRLSLARAVYRKAAVYLLDDPLAALDAHVGQHVFNQVIGPGGLLQGTKQNLGPAPRTPEAPLQAGGPSLDARGPSSQSLRRTVPLQKPRQRFLWMTLTGQDGQQERTASNTAG

SEQ ID NO: 315795 - DNA, 792 bp, Artificial Sequence
  derived and/or modified sequence
atgagcttcgccgtgttcctgatccacaccaagagaaagaagggcgtgcagagcagcggcgtgctgttcggctactggctgctgtgcttcgtgctgcccgccaccaacgccgcccagcaggccagcggcgccggcttccagagcgaccccgtgagacacctgagcacctacctgtgcctgagcctggtggtggcccagttcgtgctgagctgcctggccgaccagccccccttcttccccgaggacccccagcagagcaacccctgccccgagaccggcgccgccttccccagcaaggccaccttctggtgggtgagcggcctggtgtggagaggctacagaagacccctgagacccaaggacctgtggagcctgggcagagagaacagcagcgaggagctggtgagcagactggagaaggagtggatgagaaacagaagcgccgccagaggccacaacaaggccatcgccttcaagagaaagggcggcagcggcatggaggcccccgagaccgagcccttcctgagacaggagggcagccagtggagacccctgctgaaggccatctggcaggtgttccacagcaccttcctgctgggcaccctgagcctggtgatcagcgacgtgttcagattcaccgtgcccaagctgctgagcctgttcctggagttcatcggcgaccccaagccccccgcctggaagggctacctgctggccgtgctgatgttcctgagcgcctgcctgcagaccctgttcgagcagcagaacatgtacagactgaaggtgctgtag

SEQ ID NO: 315796 - DNA, 792 bp, Artificial Sequence
  derived and/or modified sequence
atgtccttcgccgtgttcctgatccataccaagagaaagaagggcgttcagagttccggcgtgctgtttgggtactggcttctttgttttgttttacctgctacaaatgcagctcaacaagcatctggagctggatttcagagcgacccagtccggcaccttagcacatacttgtgtctgtcactggtagtggcccagttcgtcctgtcttgtttggccgaccagccaccattcttcccagaggatccccagcagagcaacccctgcccagaaaccggagcagcttttccgagcaaggctactttctggtgggtgtctggcctggtgtggcgaggatacagaagaccacttagacccaaggacttatggagtctgggacgcgagaactcttctgaagagttagtttcccggctggaaaaggaatggatgaggaaccgcagtgctgctagaggacacaataaggctatcgctttcaagcggaagggcgggagcggaatggaggcacctgaaacggagccttttctcaggcaggaaggtagccagtggaggccactgcttaaggctatttggcaagtgtttcactccacctttctcctgggcaccctctcattggtgatctccgatgtatttcggttcactgtgcccaagctgctttctttatttttggaattcatcggagacccaaagccacctgcctggaaaggctatctgctggctgtgcttatgttcctttcagcttgcctccagaccctgtttgaacagcagaacatgtataggctaaaagtcttgtag

SEQ ID NO: 315797 - DNA, 792 bp, Artificial Sequence
  derived and/or modified sequence
atgagctttgctgtgttcctgatccacaccaagaggaagaagggcgtgcagagcagtggagtgctgtttggctactggctgctgtgctttgtgctgcctgccaccaatgctgcccagcaggccagcggggccggcttccagagcgaccctgtgcgccacctgagcacctacctgtgcctgagcctggtggtggcccagtttgtgctgagctgcctggccgaccagccccccttcttccctgaggacccccagcagagcaacccctgcccagagaccggggccgccttccccagcaaggccaccttctggtgggtgtctggcctggtgtggaggggctaccgccggcccctgcggcccaaggacctgtggagcctgggccgggagaacagcagcgaggagctggtgtcccggctggagaaggagtggatgaggaacagatctgctgcccggggccacaacaaggccatcgccttcaagaggaaaggaggcagcggcatggaggcccctgagacagagcccttcctgcggcaggagggcagccagtggaggcccctgctgaaggccatctggcaggtgttccacagcaccttcctgctgggcaccctgagcctggtgatcagtgatgtgttccgcttcaccgtgcccaagctgctgagcctcttcctggagttcatcggggaccccaagcccccagcctggaagggctacctgctggccgtgctgatgttcctgagcgcctgcctgcagaccctgtttgagcagcagaacatgtaccgcctgaaggtgctgtag

SEQ ID NO: 315798 - DNA, 792 bp, Artificial Sequence
  derived and/or modified sequence
atgagcttcgccgtgttcctgatccacaccaagcggaagaagggcgtgcagtctagcggcgtcctattcggatactggctgctatgcttcgtgcttccagctacaaatgccgctcaacaagcctccggtgcagggtttcagtcggatccagtccgccacttgagtacatatctttgtcttagcctagtggtcgcccagtttgtgctctcgtgtcttgctgaccaacctcccttcttccccgaggatccgcagcagagcaacccttgtcctgagacaggggctgctttcccctctaaggcgacgttctggtgggtgtccgggctggtgtggaggggctatcgacgcccccttcgccctaaggatctttggtctctcggccgagaaaacagttccgaggagctggtcagcaggctggagaaagaatggatgcggaacaggtccgccgctcgaggacacaacaaggccattgctttcaaaagaaagggcgggagtggcatggaggctcctgagactgagccgttcttacgacaggaaggctcacagtggcggcccctgcttaaggcgatttggcaggttttccatagtacctttctgctgggcaccctcagcctggtcattagcgacgtgtttcgtttcactgtcccaaagctgcttagcctcttcttagagttcatcggggaccccaaaccgccagcatggaagggctacttgctcgctgtcctgatgttcctttctgcatgtctacagacactgtttgagcagcaaaatatgtacaggttaaaggtgctatag

SEQ ID NO: 315799 - DNA, 792 bp, Artificial Sequence
  derived and/or modified sequence
atgtctttcgctgtctttctcatccacaccaaacgcaagaagggcgttcaaagcagcggcgtgctcttcgggtactggttgctgtgcttcgtgctgcccgcaaccaatgccgctcaacaagcaagcggcgctggttttcagtcagaccctgtcaggcacctgtctacatatctctgtttgagcctggtggtcgcccagtttgtactctcatgtctcgccgatcagcctccatttttcccggaagaccctcagcaaagtaatccctgccccgaaactggcgctgccttcccatccaaagccactttttggtgggtgagcggcctggtttggcgaggctaccgccgtcccctacgccctaaagatctgtggagcctagggagagagaattccagcgaagaattggtttctcgactggagaaagagtggatgcgcaaccgctcagctgcccgagggcataacaaggcaatcgcgttcaaaaggaaggggggatccggtatggaggccccagagaccgaacctttccttaggcaggaaggctcccagtggcgccctctcttgaaagcaatttggcaggtctttcacagcacctttctgctcggcaccttgtcactcgtcatcagcgatgtctttagattcactgttcctaaactgctgagcctcttcctggaattcatcggcgatccaaaacctccggcatggaaggggtacctgttggccgttctgatgttcctgagcgcatgcctgcagaccctgttcgaacagcagaatatgtaccgcctcaaggttctatag

SEQ ID NO: 315800 - DNA, 1582 bp, Artificial Sequence
  derived and/or modified sequence
ctcttctccggcaggatcgcggccgagcagtctgcccagagacttagcgacagacagacgctgggacccacgacgacagaaggcgccgatggccgcgcctgctgagccctgcgcggggcagggggtctggaaccagacagagcctgaacctgccgccaccagcctgctgagcctgtgcttcctgagaacagcaggggtctgggtaccccccatgtacctctgggtccttggtcccatctacctcctcttcatccaccaccatggccggggctacctccggatgttccccactcttcaaagccaagatgagaaaccaaaatatattagagagaccctagagacttactggcccaacagagagttgcttcttgatttcatagcaaggattgaaaaatgacttggagaaaggatagttttttacctggtgcttggattcgccctcatagtcctgtgtacctccagcgtggctgtcgctctttggaaaatccaacagggaacgcctgaggccccagaattcctcattcatcctactgtgtggctcaccacgatgagcttcgcagtgttcctgattcacaccaagaggaaaaagggagtccagtcatctggagtgctgtttggttactggcttctctgctttgtcttgccagctaccaacgctgcccagcaggcctccggagcgggcttccagagcgaccctgtccgccacctgtccacctacctatgcctgtctctggtggtggcacagtttgtgctgtcctgcctggcggatcaaccccccttcttccctgaagacccccagcagtctaacccctgtccagagactggggcagccttcccctccaaagccacgttctggtgggtttctggcctggtctggaggggatacaggaggccactgagaccaaaagacctctggtcgcttgggagagaaaactcctcagaagaacttgtttcccggcttgaaaaggagtggatgaggaaccgcagtgcagcccgggggcacaacaaggcaatagcatttaaaaggaaaggcggcagtggcatggaggctccagagactgagcccttcctacggcaagaagggagccagtggcgcccactgctgaaggccatctggcaggtgttccattctaccttcctcctggggaccctcagcctcgtcatcagtgatgtcttcaggttcactgtccccaagctgctcagccttttcctggagtttattggtgatcccaagcctccagcctggaagggctacctcctcgccgtgctgatgttcctctcggcctgcctgcaaacgctgtttgagcagcagaacatgtacaggctcaaggtgctgtagatgaggctgcggtcggccatcactggcctggtgtacagaaaggcatccacagcatatctgaagaaatattcagaagttaactaatctcagatgatttcagcaggagtaaagaagagaaacagactcagaaatgccattacaacagttaattatgtcaaatttatcaccctgattgatcacgcagcattaacctcaagaacgccaagccaagtttttttgacaaatgtgagccaaggtttccga

SEQ ID NO: 315801 - protein, 884 aa, Artificial Sequence
  derived and/or modified sequence
MRCLAPRPAGSYLSEPQGSSQCATMELGPLEGGYLELLNSDADPLCLYHFYDQMDLAGEEEIELYSEPDTDTINCDQFSRLLCDMEGDEETREAYANIAELDQYVFQDSQLEGLSKDIFIEHIGPDEVIGESMEMPAEVGQKSQKRPFPEELPADLKHWKPVPFSSSSLSCLNLPEGPIQFVPTISTLPHGLWQISEAGTGVSSIFIYHGEVPQASQVPPPSGFTVHGLPTSPDRPGSTSPFAPSATDLPSMPEPALTSRANMTEHKTSPTQCPAAGEVSNKLPKWPEPVEQFYRSLQDTYGAEPAGPDGILVEVDLVQARLERSSSKSLERELATPDWAERQLAQGGLAEVLLAAKEHRRPRETRVIAVLGKAGQGKSYWAGAVSRAWACGRLPQYDFVFSVPCHCLNRPGDAYGLQDLLFSLGPQPLVAADEVFSHILKRPDRVLLILDGFEELEAQDGFLHSTCGPAPAEPCSLRGLLAGLFQKKLLRGCTLLLTARPRGRLVQSLSKADALFELSGFSMEQAQAYVMRYFESSGMTEHQDRALTLLRDRPLLLSHSHSPTLCRAVCQLSEALLELGEDAKLPSTLTGLYVGLLGRAALDSPPGALAELAKLAWELGRRHQSTLQEDQFPSADVRTWAMAKGLVQHPPRAAESELAFPSFLLQCFLGALWLALSGEIKDKELPQYLALTPRKKRPYDNWLEGVPRFLAGLIFQPPARCLGALLGPSAAASVDRKQKVLARYLKRLQPGTLRARQLLELLHCAHEAEEAGIWQHVVQELPGRLSFLGTRLTPPDAHVLGKALEAAGQDFSLDLRSTGICPSGLGSLVGLSCVTRFRWGEGLGRDILVLGINCGLGAKPSALWGSFSMQSSRVGQNGFSPFLR

SEQ ID NO: 315802 - DNA, 2655 bp, Artificial Sequence
  derived and/or modified sequence
atgcgatgtctcgcccccagacccgccgggtcctacctgagcgagcctcagggcagctcacagtgtgcaactatggagctggggccattggaaggaggttacctcgagctgctgaactctgacgcggatcccttgtgcttataccacttttacgaccagatggatctcgcaggagaggaggagatcgaactgtactccgagcctgacaccgataccattaactgcgatcagttttccagactgttgtgcgacatggaaggtgacgaagagaccagagaggcttacgccaacatcgctgagctggaccaatatgttttccaagacagtcaactcgagggactttcgaaggacatcttcatcgaacacataggccctgacgaggtcatcggggagtcgatggagatgcctgccgaggttggccagaagagtcaaaagcggccattccctgaagagctgcctgccgaccttaagcattggaagccagtgccattttcctcctctagcctgtcatgtctcaacctacctgaaggccctatccaattcgttccgaccatcagcacccttcctcacgggctctggcagatttcagaggccggaacgggagtgtcaagtatctttatttatcacggggaggtgcctcaagcaagtcaagtgcctccgccgtccggctttaccgtgcatggactgccgaccagccctgacaggcccggaagcacgtccccttttgccccatcagccacagatctgcctagtatgcctgagcctgctctcacatcacgggcaaacatgacagagcataagacatcaccaacgcagtgcccagcagcgggtgaggtgtcaaataagctgcccaaatggccagagccggtagagcagttctatcggtcattgcaggacacctacggggccgaacccgctggtcctgatgggattttggtagaggtggacctggttcaggcccgtctggagagatcttcgagcaaatcactggagagagaactagccacccctgattgggccgagcggcagctggcacagggcggtctagctgaagtactgctagctgccaaggagcaccgccggccacgagaaacgcgggtcatcgctgtgttgggaaaagctggacagggtaaatcctactgggcaggtgccgtgtcacgcgcatgggcttgcgggagattgccgcaatatgactttgtgtttagcgtcccatgccactgcctcaaccgtcctggcgatgcatacggactgcaggacctcttgttctcactcgggccacagcccttagtcgctgccgacgaagtattttcgcatattctgaagcgccccgacagagtgctgctcattctcgatggttttgaagaactggaagcgcaggatgggttcctgcacagtacgtgtggacccgcccctgctgaaccctgcagcctgcgcggcttacttgcgggcctgttccagaagaagctgttacgcgggtgtacgctgctcctgacggcccgccccaggggacgcctcgtgcaatcccttagcaaagccgacgcacttttcgaactgagtggattttctatggagcaagcccaggcctacgtcatgcgttactttgaatccagcggtatgacagaacatcaggatagagcccttacattgttgcgcgaccgaccactgctgctgagccatagtcacagcccaacactgtgccgagccgtttgccaactgtctgaggctctgctggagctgggcgaagatgctaaactgccaagcacactcactggcctatacgtgggcctcttgggaagggcggcccttgatagcccgccaggagcattagcagaacttgccaaattagcttgggagcttggacgacggcatcaatccacactccaggaggaccagttcccgagtgctgacgtgagaacttgggctatggccaagggccttgttcagcatccccccagagctgctgaatccgagttagcctttccttcttttctgctgcaatgtttcctgggagccctatggctcgctctatccggagaaattaaagacaaagagctgccccaatacctggcactgaccccccggaaaaaacggccatacgataattggctcgagggggtcccccgattcctggccggcctgattttccagcctcccgcccgatgcctgggagcccttctcggccctagcgccgcggcttcggtggatcggaaacaaaaggttttagctagatacttgaagcgtctccagcccggcacgctgagagcacggcaactactggagctgctgcactgtgcacacgaggctgaagaggctggtatctggcagcacgtagtgcaggagctgcccggaaggttatcttttttgggcacaagactcacgccaccagatgcacacgttctcggtaaagccctcgaagctgcagggcaggacttctccttggacttacgctctaccggcatctgccccagcggacttggatccctggtcggactttcctgtgttacaagattccgttggggagaaggcctgggaagagatattctggtgttagggattaactgcggcctcggagcaaaaccctctgccctttggggatcattttcaatgcagtcttccagagttggtcaaaacgggttctcaccattcctgaggtag

SEQ ID NO: 315803 - DNA, 2655 bp, Artificial Sequence
  derived and/or modified sequence
atgcgctgcctggcccccaggcctgctggcagctacctgtctgagccccagggcagcagccagtgtgccaccatggagctgggccccctggagggcggctacctggagctgctgaacagtgatgctgaccccctgtgcctgtaccacttctatgaccagatggacctggccggggaggaggagattgagctgtacagcgagccagacacagacaccatcaactgtgaccagttcagccggctgctgtgtgacatggagggagatgaggagacccgggaggcctatgccaacattgctgagctggaccagtatgtgttccaggacagccagctggagggcctgagcaaggacatcttcatcgagcacatcggcccagatgaggtgattggagagagcatggagatgcctgctgaggtgggccagaagagccagaagaggcccttccctgaggagctgcctgctgacctgaagcactggaagcctgtgcccttcagcagcagcagcctgagctgcctgaacctgcctgagggccccatccagtttgtgcccaccatcagcaccctgccccacggcctgtggcagatcagcgaggccggcaccggggtgagcagcatcttcatctaccatggagaggtgccccaggccagccaggtgcccccacccagcggcttcaccgtgcacggcctgcccaccagcccagaccggcccggcagcaccagcccctttgcccccagcgccacagacctgcccagcatgcctgagcccgccctgaccagccgggccaacatgacagagcacaagaccagccccacccagtgcccagctgctggggaggtgagcaacaagctgcccaagtggccagagcctgtggagcagttctaccgcagcctgcaggacacctatggagctgagcccgccggcccagatggcatcctggtggaggtggacctggtgcaggcccggctggagaggagcagcagcaagagcctggagcgggagctggccaccccagactgggccgagcggcagctggcccagggcggcctggccgaggtgctgctggccgccaaggagcaccggcggccccgggagaccagggtgattgctgtgctgggcaaggccggccagggcaagagctactgggccggggctgtgtcccgggcctgggcctgtggccgcctgccccagtatgactttgtgttttctgtgccctgccactgcctgaacagacctggagatgcctacggcctgcaggacctgctcttcagcctgggcccccagcccctggtggccgcagatgaggtgttcagccacatcctgaagaggccagacagagtgctgctgatcctggatggctttgaggagctggaggcccaggacggcttcctgcacagcacctgtggccctgccccagctgagccctgcagcctgcggggcctgctggccggcctcttccagaagaagctgctgcggggctgcaccctgctgctgacagcccggccccggggccgcctggtgcagagcctgagcaaggcagatgccctgtttgagctgagcggcttctccatggagcaggcccaggcctacgtgatgagatactttgagagcagcggcatgacagagcaccaggaccgggccctgaccctgctgcgggaccggcccctgctgctgagccacagccacagccccaccctgtgcagagctgtgtgccagctgtctgaggccctgctggagctgggagaagatgccaagctgcccagcaccctgaccggcctgtatgtgggcctgctgggccgggccgccctggacagccccccaggggccctggccgagctggccaagctggcctgggagctgggcagaagacaccagagcaccctgcaggaggaccagttccccagcgcagatgtgaggacctgggccatggccaagggcctggtgcagcacccccccagggctgctgagagcgagctggccttccccagcttcctgctgcagtgcttcctgggcgccctgtggctggccctgtctggagagatcaaggacaaggagctgccccagtacctggccctgacccccaggaagaagaggccctatgacaactggctggagggcgtgccccgcttcctggccggcctcatcttccagcccccagcccgctgcctgggcgccctgctgggccccagcgctgctgcctctgtggacaggaagcagaaggtgctggcccgctacctgaagaggctgcagcccggcaccctgcgggcccggcagctgctggagctgctgcactgtgcccacgaggccgaggaggccggcatctggcagcacgtggtgcaggagctgcccggccgcctgtccttcctgggcacccggctgaccccaccagatgcccacgtgctgggcaaggccctggaggccgccggccaggacttcagcctggacctgcggagcacaggcatctgccccagcggcctgggcagcctggtgggcctgagctgtgtgacccgcttccgctggggcgagggcctgggccgggacatcctggtgctgggcatcaactgtggcctgggcgccaagcccagcgccctgtggggcagcttctccatgcagagcagccgggtgggccagaatggcttcagccccttcctgaggtag

SEQ ID NO: 315804 - DNA, 2655 bp, Artificial Sequence
  derived and/or modified sequence
atgcggtgcctggccccccggcccgccggcagctacctgagcgagccacagggctctagccaatgcgccaccatggagttgggacccctggaaggaggatatctcgaactccttaatagtgacgccgacccattatgtctgtatcatttttacgatcagatggacttggccggcgaagaagaaattgaactttattccgaacccgataccgacacaatcaattgcgaccagtttagccgactgctatgcgacatggagggagacgaagagacccgagaagcatacgccaatatcgctgaattagatcaatatgtcttccaggactcccagttggaggggctgagcaaggatatcttcattgaacacattggacccgacgaagtgatcggagagtcgatggagatgcctgccgaggttgggcagaagtctcagaagagacctttcccagaagagctcccagccgaccttaagcattggaagccagtcccttttagcagcagttccttgtcgtgtctgaacttaccagagggtcccatacaatttgtgcctaccatttctacattgccacatgggctctggcagattagcgaggcaggcactggagtgagctcaatctttatataccatggggaagttcctcaagcctcacaggtgcctcccccttcaggtttcacggtccatggcctccccacatcccccgacagaccagggtccacgtcaccttttgcgccatcagccaccgacctaccctcaatgcccgaacccgcactgaccagcagagccaacatgacggaacataagacaagcccgacacaatgccccgccgctggtgaggtgagtaataaattacctaaatggcctgagcccgtggaacagttttatagaagtctgcaggatacatacggggctgaacctgccgggccggatggtattctcgttgaggtggatctggtccaggcaagactggagcggtccagctcaaagagcctggagagagagctcgcaacaccagactgggcggagagacaactggcacagggtggactcgccgaagtcctacttgcagccaaggagcacagaaggcctagagagacaagagtgatagcagttttgggaaaggcggggcagggtaaaagctattgggcaggcgctgtgtctcgtgcatgggcatgcgggagacttccccagtacgatttcgtcttctctgtgccttgccactgcctgaacagaccaggcgacgcatatgggttgcaggatctgttattttcactggggccacaaccgctagtcgctgcggacgaagttttcagccacattctgaaaaggccggaccgggttttactaattctggatggatttgaagagcttgaagcacaggacggttttctgcattccacctgcggtcctgcacctgcggagccatgttccctacggggactgctcgctgggttgttccagaaaaaactactccgcgggtgtacccttttgctcacagctcgcccccgaggtcgcctggtgcagagtttgagcaaggcagatgccctgtttgagctgagcgggttctcaatggagcaggcgcaggcatatgtgatgcgctacttcgaatcttccggtatgacagaacaccaagaccgcgcgcttacacttctcagggatcgccccctgctgctgtcgcacagccacagtcctacgctctgtagggccgtttgtcagttatccgaggctctgcttgagctcggagaagacgctaaactgccttccacactgacaggcctttatgttggcctcttggggagggctgccttggatagcccgccaggagccctcgccgaactggctaaattggcttgggagcttggccggcgccaccagtcaaccctgcaagaggatcagtttcctagcgccgacgtgcgaacttgggccatggccaaaggcctcgttcagcacccaccaagggccgccgagtcagagcttgcttttccctcatttctcctgcagtgcttcttgggcgcgctttggctggccctttctggagaaattaaagacaaggaactgccgcagtaccttgcactgacgccacggaaaaagcggccctacgataattggctggagggtgtgcctcgcttcctcgcaggtctgatttttcagcctcctgctaggtgtcttggtgcgctgctgggcccatccgcagccgcttctgttgaccgaaagcagaaagtactcgctcgatacctgaagcggctccagcctgggacactgcgcgcccgccagctgttggaactgctgcactgcgctcacgaggcagaagaggccggaatttggcagcatgtggtgcaagaacttcccggccgtctgtctttcctcggcactaggctgacaccccccgacgcacacgtgctcggcaaagctctggaggccgcaggacaggatttctccctcgatctgaggtctactggaatttgcccttctgggctgggctctcttgtgggcttatcttgcgtgacccgattccgctggggtgaagggctgggtcgggacatccttgtcttaggtataaattgcgggttgggtgctaagcctagtgccctttgggggtcatttagcatgcagagctcccgtgtgggacagaacggatttagcccatttctgaggtag

SEQ ID NO: 315805 - DNA, 2655 bp, Artificial Sequence
  derived and/or modified sequence
atgcgatgtctcgcgccacgtccggcaggctcttacttaagcgaacctcagggctccagtcagtgtgccacaatggaactgggccctttggaaggtggatatctcgagctgttgaattccgacgctgatcccctgtgtctgtaccacttttacgaccagatggacttggccggagaggaggagatcgaactctattctgagccagataccgacacaattaactgtgatcagttctcccggctcctgtgcgacatggaaggcgacgaagagactcgggaggcttacgccaacattgctgagctggatcagtacgtgtttcaggactctcagttagaaggtttgtccaaggatatcttcatcgagcacatcgggcctgatgaggtgatcggggaatccatggagatgcccgcagaggtcggacaaaaaagccaaaaaagacctttccccgaggaacttcctgcagacctgaagcactggaagcctgtccctttcagctcttcatcgctgagttgcctcaacctgccagagggacccattcagtttgtgcccactatttccactctgcctcatggcctgtggcaaatcagtgaggccggtaccggtgtgtcttcaatcttcatctaccacggcgaagtaccacaggccagtcaggtcccacctccctcggggtttaccgtccacgggctgccgaccagtcctgacaggcctggctcaacctcaccttttgccccatccgccacagatcttcctagcatgcctgagccagcgctgacctcaagagcgaatatgaccgaacataaaacctcccccacccagtgccctgcggcaggagaagtgtctaataaactgcccaagtggccagaacctgtggagcaattctacagatcgttacaggatacatacggtgcagagccggctggtcctgacgggatcctcgtggaagttgacctggtacaagctcgccttgaacgcagtagtagcaagagcctggaacgcgaactggccacacctgactgggccgaacgtcaactggcccagggcggactggccgaagtgctgctagccgcaaaggagcatcggcgacccagagaaacccgtgtgatcgccgtcctgggcaaggctggccagggaaaatcctactgggctggcgcagtgtcaagggcctgggcctgtggaagactcccacagtatgatttcgtgttcagtgtgccttgtcactgtctgaatcggccaggtgatgcctatggcctgcaggatttgttgtttagcctggggcctcagccactcgtggctgctgatgaggttttcagtcacattcttaagagacctgaccgggtgctcctcatcttggacggctttgaggagttggaggctcaagacggatttctacacagtacctgcggtcctgcccctgccgagccctgttccctccggggactgctcgccggactctttcagaagaaactactacgcggatgtaccctactgctaacagcacgtcctcggggaaggcttgtacagtctctgtcgaaggccgacgcgctgtttgaactaagcggttttagcatggaacaggcccaggcatacgtaatgaggtatttcgaatcctctggaatgaccgagcaccaggaccgagcgctcacgctgcttcgcgacagacctctcttactgtcccatagtcacagcccgacgctctgcagagcagtgtgccagctgtccgaggccctgcttgaattaggtgaagatgcgaagttaccatctacgcttactgggctgtatgtgggccttctgggcagagccgcactcgactctcccccaggcgcactggccgaactcgccaagctggcttgggaacttgggcgacgacatcagtctacactgcaagaggaccagtttccttcagcggacgtgcgaacatgggccatggccaagggactggttcagcacccacctcgagcagcagagtccgaactcgccttcccatcattccttctgcagtgtttcctaggcgcactgtggctagcgttgtcaggggagattaaggacaaagagttaccacagtacctggcgctcactcccaggaaaaagaggccctatgataactggcttgagggtgtgccccgttttctggccggactcatatttcagcctcctgcaagatgtctaggcgcattattgggcccatccgccgctgcctcggtggatagaaagcagaaagttctggcaaggtatctaaaacgactccaacctggtaccctccgggctcgacagctcttagaactactgcactgcgcacatgaagctgaggaggccggaatatggcaacatgttgtgcaggagctcccaggaaggctttctttcttgggaacacgactgactccacccgatgcccacgtgctaggcaaagctctggaagctgcaggccaagacttctcgttagatctgagatccacaggcatttgccccagtggattagggagcctggttggccttagctgcgtcactcgatttcggtggggcgagggtctgggccgtgacattttggtgctgggtattaactgtggactgggggcaaagcctagtgcactctggggcagttttagcatgcagtcatcacgcgtgggccagaacggattttccccatttctgcgttag

SEQ ID NO: 315806 - DNA, 3363 bp, Artificial Sequence
  derived and/or modified sequence
tgatgaggctgtgtgcttctgagctgggcatccgaaggcatccttggggaagctgagggcacgaggaggggctgccagactccgggagctgctgcctggctgggattcctacacaatgcgttgcctggctccacgccctgctgggtcctacctgtcagagccccaaggcagctcacagtgtgccaccatggagttggggcccctagaaggtggctacctggagcttcttaacagcgatgctgaccccctgtgcctctaccacttctatgaccagatggacctggctggagaagaagagattgagctctactcagaacccgacacagacaccatcaactgcgaccagttcagcaggctgttgtgtgacatggaaggtgatgaagagaccagggaggcttatgccaatatcgcggaactggaccagtatgtcttccaggactcccagctggagggcctgagcaaggacattttcatagagcacataggaccagatgaagtgatcggtgagagtatggagatgccagcagaagttgggcagaaaagtcagaaaagacccttcccagaggagcttccggcagacctgaagcactggaagccagtgcctttctccagttcctcgttgagctgcctgaatctccctgagggacccatccagtttgtccccaccatctccactctgccccatgggctctggcaaatctctgaggctggaacaggggtctccagtatattcatctaccatggtgaggtgccccaggccagccaagtaccccctcccagtggattcactgtccacggcctcccaacatctccagaccggccaggctccaccagccccttcgctccatcagccactgacctgcccagcatgcctgaacctgccctgacctcccgagcaaacatgacagagcacaagacgtcccccacccaatgcccggcagctggagaggtctccaacaagcttccaaaatggcctgagccggtggagcagttctaccgctcactgcaggacacgtatggtgccgagcccgcaggcccggatggcatcctagtggaggtggatctggtgcaggccaggctggagaggagcagcagcaagagcctggagcgggaactggccaccccggactgggcagaacggcagctggcccaaggaggcctggctgaggtgctgttggctgccaaggagcaccggcggccgcgtgagacacgagtgattgctgtgctgggcaaagctggtcagggcaagagctattgggctggggcagtgagccgggcctgggcttgtggccggcttccccagtacgactttgtcttctctgtcccctgccattgcttgaaccgtccgggggatgcctatggcctgcaggatctgctcttctccctgggcccacagccactcgtggcggccgatgaggttttcagccacatcttgaagagacctgaccgcgttctgctcatcctagacggcttcgaggagctggaagcgcaagatggcttcctgcacagcacgtgcggaccggcaccggcggagccctgctccctccgggggctgctggccggccttttccagaagaagctgctccgaggttgcaccctcctcctcacagcccggccccggggccgcctggtccagagcctgagcaaggccgacgccctatttgagctgtccggcttctccatggagcaggcccaggcatacgtgatgcgctactttgagagctcagggatgacagagcaccaagacagagccctgacgctcctccgggaccggccacttcttctcagtcacagccacagccctactttgtgccgggcagtgtgccagctctcagaggccctgctggagcttggggaggacgccaagctgccctccacgctcacgggactctatgtcggcctgctgggccgtgcagccctcgacagcccccccggggccctggcagagctggccaagctggcctgggagctgggccgcagacatcaaagtaccctacaggaggaccagttcccatccgcagacgtgaggacctgggcgatggccaaaggcttagtccaacacccaccgcgggccgcagagtccgagctggccttccccagcttcctcctgcaatgcttcctgggggccctgtggctggctctgagtggcgaaatcaaggacaaggagctcccgcagtacctagcattgaccccaaggaagaagaggccctatgacaactggctggagggcgtgccacgctttctggctgggctgatcttccagcctcccgcccgctgcctgggagccctactcgggccatcggcggctgcctcggtggacaggaagcagaaggtgcttgcgaggtacctgaagcggctgcagccggggacactgcgggcgcggcagctgctggagctgctgcactgcgcccacgaggccgaggaggctggaatttggcagcacgtggtacaggagctccccggccgcctctcttttctgggcacccgcctcacgcctcctgatgcacatgtactgggcaaggccttggaggcggcgggccaagacttctccctggacctccgcagcactggcatttgcccctctggattggggagcctcgtgggactcagctgtgtcacccgtttcaggtggggtgaggggcttggaagagacatccttgtgttgggcattaactgcggtcttggtgccaagcccagtgctctgtggggttcttttagtatgcagagcagccgggtggggcagaatggattctctccatttttaagatgaggatgttgaggctcagagaggggcagccacttgccacacagcaagtgagaggcaatggcattctcccagtcaatatttgaaggcccgccatgtgccagtcactggggtatgtctagaatctgagactgacctgggctcaaatttgttttattctttccaccccctgagcacgccaccgttttcttatgctaagagtaaagccatggcctccccttggactctctgcctccattctctcctcttccactccattttgtattcagcaaccagaccaatcttctcagaacttgaatctgattgtatcccatccctgcttacaatccttcagggacactccaccactgtcaggatgaaggctaaattccttaatttggtttcattaagtcggtctgcaatctgcttgagcatttcagcttaatcgccagaggattgcttccatatttccccctaaacatactttacccaagctgtaaggtcctacataattgtgccaataatttagcagtgagcttcctggtagccgaagcaaaaagggaaagaaaaccactgtgtgagttgtgagaaagtaggaatcaataaaggctggagtggtc

SEQ ID NO: 315807 - DNA, 2655 bp, Artificial Sequence
  derived and/or modified sequence
atgagatgcctggcccccagacccgccggcagctacctgagcgagccccagggcagcagccagtgcgccaccatggagctgggccccctggagggcggctacctggagctgctgaacagcgacgccgaccccctgtgcctgtaccacttctacgaccagatggacctggccggcgaggaggagatcgagctgtacagcgagcccgacaccgacaccatcaactgcgaccagttcagcagactgctgtgcgacatggagggcgacgaggagaccagagaggcctacgccaacatcgccgagctggaccagtacgtgttccaggacagccagctggagggcctgagcaaggacatcttcatcgagcacatcggccccgacgaggtgatcggcgagagcatggagatgcccgccgaggtgggccagaagagccagaagagacccttccccgaggagctgcccgccgacctgaagcactggaagcccgtgcccttcagcagcagcagcctgagctgcctgaacctgcccgagggccccatccagttcgtgcccaccatcagcaccctgccccacggcctgtggcagatcagcgaggccggcaccggcgtgagcagcatcttcatctaccacggcgaggtgccccaggccagccaggtgcccccccccagcggcttcaccgtgcacggcctgcccaccagccccgacagacccggcagcaccagccccttcgcccccagcgccaccgacctgcccagcatgcccgagcccgccctgaccagcagagccaacatgaccgagcacaagaccagccccacccagtgccccgccgccggcgaggtgagcaacaagctgcccaagtggcccgagcccgtggagcagttctacagaagcctgcaggacacctacggcgccgagcccgccggccccgacggcatcctggtggaggtggacctggtgcaggccagactggagagaagcagcagcaagagcctggagagagagctggccacccccgactgggccgagagacagctggcccagggcggcctggccgaggtgctgctggccgccaaggagcacagaagacccagagagaccagagtgatcgccgtgctgggcaaggccggccagggcaagagctactgggccggcgccgtgagcagagcctgggcctgcggcagactgccccagtacgacttcgtgttcagcgtgccctgccactgcctgaacagacccggcgacgcctacggcctgcaggacctgctgttcagcctgggcccccagcccctggtggccgccgacgaggtgttcagccacatcctgaagagacccgacagagtgctgctgatcctggacggcttcgaggagctggaggcccaggacggcttcctgcacagcacctgcggccccgcccccgccgagccctgcagcctgagaggcctgctggccggcctgttccagaagaagctgctgagaggctgcaccctgctgctgaccgccagacccagaggcagactggtgcagagcctgagcaaggccgacgccctgttcgagctgagcggcttcagcatggagcaggcccaggcctacgtgatgagatacttcgagagcagcggcatgaccgagcaccaggacagagccctgaccctgctgagagacagacccctgctgctgagccacagccacagccccaccctgtgcagagccgtgtgccagctgagcgaggccctgctggagctgggcgaggacgccaagctgcccagcaccctgaccggcctgtacgtgggcctgctgggcagagccgccctggacagcccccccggcgccctggccgagctggccaagctggcctgggagctgggcagaagacaccagagcaccctgcaggaggaccagttccccagcgccgacgtgagaacctgggccatggccaagggcctggtgcagcacccccccagagccgccgagagcgagctggccttccccagcttcctgctgcagtgcttcctgggcgccctgtggctggccctgagcggcgagatcaaggacaaggagctgccccagtacctggccctgacccccagaaagaagagaccctacgacaactggctggagggcgtgcccagattcctggccggcctgatcttccagccccccgccagatgcctgggcgccctgctgggccccagcgccgccgccagcgtggacagaaagcagaaggtgctggccagatacctgaagagactgcagcccggcaccctgagagccagacagctgctggagctgctgcactgcgcccacgaggccgaggaggccggcatctggcagcacgtggtgcaggagctgcccggcagactgagcttcctgggcaccagactgaccccccccgacgcccacgtgctgggcaaggccctggaggccgccggccaggacttcagcctggacctgagaagcaccggcatctgccccagcggcctgggcagcctggtgggcctgagctgcgtgaccagattcagatggggcgagggcctgggcagagacatcctggtgctgggcatcaactgcggcctgggcgccaagcccagcgccctgtggggcagcttcagcatgcagagcagcagagtgggccagaacggcttcagccccttcctgagatag

SEQ ID NO: 315808 - protein, 1416 aa, Artificial Sequence
  derived and/or modified sequence
MALRGFCSADGSDPLWDWNVTWNTSNPDFTKCFQNTVLVWVPCFYLWACFPFYFLYLSRHDRGYIQMTPLNKTKTALGFLLWIVCWADLFYSFWERSRGIFLAPVFLVSPTLLGITMLLATFLIQLERRKGVQSSGIMLTFWLVALVCALAILRSKIMTALKEDAQVDLFRDITFYVYFSLLLIQLVLSCFSDRSPLFSETIHDPNPCPESSASFLSRITFWWITGLIVRGYRQPLEGSDLWSLNKEDTSEQVVPVLVKNWKKECAKTRKQPVKVVYSSKDPAQPKESSKVDANEEVEALIVKSPQKEWNPSLFKVLYKTFGPYFLMSFFFKAIHDLMMFSGPQILKLLIKFVNDTKAPDWQGYFYTVLLFVTACLQTLVLHQYFHICFVSGMRIKTAVIGAVYRKALVITNSARKSSTVGEIVNLMSVDAQRFMDLATYINMIWSAPLQVILALYLLWLNLGPSVLAGVAVMVLMVPVNAVMAMKTKTYQVAHMKSKDNRIKLMNEILNGIKVLKLYAWELAFKDKVLAIRQEELKVLKKSAYLSAVGTFTWVCTPFLVALCTFAVYVTIDENNILDAQTAFVSLALFNILRFPLNILPMVISSIVQASVSLKRLRIFLSHEELEPDSIERRPVKDGGGTNSITVRNATFTWARSDPPTLNGITFSIPEGALVAVVGQVGCGKSSLLSALLAEMDKVEGHVAIKTRILVTHSMSYLPQVDVIIVMSGGKISEMGSYQELLARDGAFAEFLRTYASTEQEQDAEENGVTGVSGPGKEAKQMENGMLVTDSAGKQLQRQLSSSSSYSGDISRHHNSTAELQKAEAKKEETWKLMEADKAQTGQVKLSVYWDYMKAIGLFISFLSIFLFMCNHVSALASNYWLSLWTDDPIVNGTQEHTKVRLSVYGALGISQGIAVFGYSMAVSIGGILASRCLHVDLLHSILRSPMSFFERTPSGNLVNRFSKELDTVDSMIPEVIKMFMGSLFNVIGACIVILLATPIAAIIIPPLGLIYFFVQRFYVASSRQLKRLESVSRSPVYSHFNETLLGVSVIRAFEEQERFIHQSDLKVDENQKAYYPSIVANRWLAVRLECVGNCIVLFAALFAVISRHSLSAGLVGLSVSYSLQVTTYLNWLVRMSSEMETNIVAVERLKEYSETEKEAPWQIQETAPPSSWPQVGRVEFRNYCLRYREDLDFVLRHINVTINGGEKVGIVGRTGAGKSSLTLGLFRINESAEGEIIIDGINIAKIGLHDLRFKITIIPQDPVLFSGSLRMNLDPFSQYSDEEVWTSLELAHLKDFVSALPDKLDHECAEGGENLSVGQRQLVCLARALLRKTKILVLDEATAAVDLETDDLIQSTIRTQFEDCTVLTIAHRLNTIMDYTRVIVLDKGEIQEYGAPSDLLQQRGLFYSMAKDAGLV

SEQ ID NO: 315809 - protein, 1215 aa, Artificial Sequence
  derived and/or modified sequence
MSFFFKAIHDLMMFSGPQILKLLIKFVNDTKAPDWQGYFYTVLLFVTACLQTLVLHQYFHICFVSGMRIKTAVIGAVYRKALVITNSARKSSTVGEIVNLMSVDAQRFMDLATYINMIWSAPLQVILALYLLWLNLGPSVLAGVAVMVLMVPVNAVMAMKTKTYQVAHMKSKDNRIKLMNEILNGIKVLKLYAWELAFKDKVLAIRQEELKVLKKSAYLSAVGTFTWVCTPFLVALCTFAVYVTIDENNILDAQTAFVSLALFNILRFPLNILPMVISSIVQASVSLKRLRIFLSHEELEPDSIERRPVKDGGGTNSITVRNATFTWARSDPPTLNGITFSIPEGALVAVVGQVGCGKSSLLSALLAEMDKVEGHVAIKGSVAYVPQQAWIQNDSLRENILFGCQLEEPYYRSVIQACALLPDLEILPSGDRTEIGEKGVNLSGGQKQRVSLARAVYSNADIYLFDDPLSAVDAHVGKHIFENVIGPKGMLKNKTRILVTHSMSYLPQVDVIIVMSGGKISEMGSYQELLARDGAFAEFLRTYASTEQEQDAEENGSTVMDEEEAGVTGVSGPGKEAKQMENGMLVTDSAGKQLQRQLSSSSSYSGDISRHHNSTAELQKAEAKKEETWKLMEADKAQTGQVKLSVYWDYMKAIGLFISFLSIFLFMCNHVSALASNYWLSLWTDDPIVNGTQEHTKVRLSVYGALGISQGIAVFGYSMAVSIGGILASRCLHVDLLHSILRSPMSFFERTPSGNLVNRFSKELDTVDSMIPEVIKMFMGSLFNVIGACIVILLATPIAAIIIPPLGLIYFFVQRFYVASSRQLKRLESVSRSPVYSHFNETLLGVSVIRAFEEQERFIHQSDLKVDENQKAYYPSIVANRWLAVRLECVGNCIVLFAALFAVISRHSLSAGLVGLSVSYSLQVTTYLNWLVRMSSEMETNIVAVERLKEYSETEKEAPWQIQETAPPSSWPQVGRVEFRNYCLRYREDLDFVLRHINVTINGGEKVGIVGRTGAGKSSLTLGLFRINESAEGEIIIDGINIAKIGLHDLRFKITIIPQDPVLFSGSLRMNLDPFSQYSDEEVWTSLELAHLKDFVSALPDKLDHECAEGGENLSVGQRQLVCLARALLRKTKILVLDEATAAVDLETDDLIQSTIRTQFEDCTVLTIAHRLNTIMDYTRVIVLDKGEIQEYGAPSDLLQQRGLFYSMAKDAGLV

SEQ ID NO: 315810 - protein, 207 aa, Artificial Sequence
  derived and/or modified sequence
MEIIRSNFKSNLHKVYQAIEEADFFAIDGEFSGISDGPSVSALTNGFDTPEERYQKLKKHSMDFLLFQFGLCTFKYDYTDSKSSPDVKFVCQSSSIDFLASQGFDFNKVFRNGIPYLNQEEERQLREQYDEKRSQANGAGALSYVSPNTSKCPVTIPEDQKKFIDQVVEKIEDLLQSEENKNLDLEPCTGFQRKLIYQTLSWKRSDI

SEQ ID NO: 315811 - DNA, 624 bp, Artificial Sequence
  derived and/or modified sequence
atggagatcattagaagcaatttcaagagcaaccttcataaagtctatcaggccatcgaagaggcagactttttcgcgatcgatggagagttttcgggcatctctgacggcccatcagtgagtgccctgaccaacggcttcgacacccccgaagagagatatcaaaagctgaaaaagcactctatggattttctgttattccagtttggcctgtgcactttcaagtacgattatacggattctaagagctcgcctgatgtgaagtttgtttgtcagtcgagttctattgatttcttagcctcccaggggttcgattttaataaggtgtttcgcaatggtatcccatacttgaatcaggaggaagaacggcaattgcgggagcagtacgacgagaagaggtcgcaagcaaatggagccggggccctcagctatgtctctcctaacacctctaagtgccccgttacgattccagaagaccaaaaaaagtttatagaccaggtggtggaaaaaatcgaagacctcctccagtcagaagaaaacaaaaatctagatttggaaccctgtaccggttttcaacgcaaactgatctaccaaactctgtcctggaagaggagcgacatctag

SEQ ID NO: 315812 - DNA, 624 bp, Artificial Sequence
  derived and/or modified sequence
atggagatcatccgcagcaacttcaagagcaacctgcacaaggtgtaccaggccatcgaggaggccgacttctttgccattgatggagagttcagcggcatcagtgatggccccagcgtgtctgccctgaccaatggatttgacaccccagaggagcgctaccagaagctgaagaagcacagcatggacttcctgctcttccagtttggcctgtgcaccttcaagtatgactacacagacagcaagagcagcccagatgtgaagtttgtgtgccagagcagcagcattgacttcctggccagccagggctttgacttcaacaaggtgttcagaaatggcatcccctacctgaaccaggaggaggagcggcagctgcgggagcagtatgatgagaagaggagccaggccaatggagctggggccctgtcctatgtgagccccaacaccagcaaatgtcctgtgaccatccctgaggaccagaagaagttcatcgaccaggtggtggagaagattgaggacctgctgcagagcgaggagaacaagaacctggacctggagccctgcaccggcttccagaggaagctgatctaccagaccctgtcctggaagagaagtgacatctag

SEQ ID NO: 315813 - DNA, 624 bp, Artificial Sequence
  derived and/or modified sequence
atggagatcatccggagcaacttcaagagcaacctgcacaaggtgtaccaggcaattgaagaggcagacttttttgcaatagatggagagttcagtggaatttcggacggccccagcgtaagcgccctgactaacggattcgatactcccgaggaaaggtatcagaagctcaaaaagcactcaatggactttctgctgtttcagtttggcctgtgtaccttcaagtacgattacactgattccaaatcatcaccagacgtgaagttcgtttgccagtcctcctcaatcgactttctcgccagccaaggctttgacttcaataaggtgtttcgcaacggaattccatatttgaatcaggaagaggagcgccagctccgggagcagtatgatgagaaacgttctcaggcgaacggcgctggtgcactatcatacgtgagccccaatacttccaagtgtccagtcactattcccgaagaccagaaaaaattcattgaccaggtcgtggaaaaaattgaggatctgttgcagagcgaggagaacaagaacttggatctggagccctgcacaggtttccagaggaagttgatttatcagaccttaagctggaaacgatccgacatatag

SEQ ID NO: 315814 - DNA, 808 bp, Artificial Sequence
  derived and/or modified sequence
agctactgccgcagtcgccgcggaattcggcgagtagaaccgctgaggcgggcgcgggcccgggtggggccaaggttccggccactctgcagaatggagataatcaggagcaattttaagagtaatcttcacaaagtgtaccaggccatagaggaggccgacttcttcgccatcgatggggagttttcaggaatcagtgatggaccttcagtctctgcattaacaaatggttttgacactccagaagagaggtatcagaagcttaaaaagcattccatggactttttgctatttcagtttggcctttgcacttttaagtatgactacacagattcaaaatcctcaccagatgtcaaatttgtttgtcagagctccagcattgactttctagcaagccagggatttgattttaataaagtttttcgaaatggaattccatatttaaatcaggaagaagaaagacagttaagagagcagtatgatgaaaaacgttcacaggcgaatggtgcaggagctctgtcctatgtatctcctaacacttcaaaatgtcctgtcacgattcctgaggatcaaaagaagtttattgaccaagtggtagagaaaatagaggatttattacaaagtgaagaaaacaagaacttggatttagagccatgtaccgggttccaaagaaaactaatttatcagactttgagctggaaaaggagcgatatatagttatcagcaaagtagatgaagaagaacgcaaaagaagagagcagcagaaacatgccaaagaacaggaggagctgaatgatgctgtgggatt

SEQ ID NO: 315815 - DNA, 624 bp, Artificial Sequence
  derived and/or modified sequence
atggagattattaggtctaactttaaatccaacctccacaaggtgtatcaggctattgaagaggccgacttttttgcaattgatggcgagtttagcggcatttccgatgggcctagtgtatcagctctgaccaatggatttgatactcctgaggagagataccaaaagctgaagaagcactccatggacttcctcctgtttcagttcggcctgtgcacatttaagtacgattataccgactccaagtccagtcccgatgtgaagttcgtgtgtcagagcagcagcatcgacttcctagcgagccagggcttcgatttcaataaagtgtttcggaacggaatcccctacctgaatcaggaagaggaacggcagctgcgcgagcaatacgatgaaaagagatctcaggcaaacggggctggagccctgtcctatgtgtcgcctaataccagtaagtgccctgttacaatcccggaggaccagaagaagttcatcgaccaggttgttgagaagattgaggatctactccagagtgaggaaaataaaaacctggaccttgaaccatgcaccggatttcagcgcaaactcatttaccagacactttcgtggaagcggagcgatatctag

SEQ ID NO: 315816 - DNA, 624 bp, Artificial Sequence
  derived and/or modified sequence
atggagatcatcagaagcaacttcaagagcaacctgcacaaggtgtaccaggccatcgaggaggccgacttcttcgccatcgacggcgagttcagcggcatcagcgacggccccagcgtgagcgccctgaccaacggcttcgacacccccgaggagagataccagaagctgaagaagcacagcatggacttcctgctgttccagttcggcctgtgcaccttcaagtacgactacaccgacagcaagagcagccccgacgtgaagttcgtgtgccagagcagcagcatcgacttcctggccagccagggcttcgacttcaacaaggtgttcagaaacggcatcccctacctgaaccaggaggaggagagacagctgagagagcagtacgacgagaagagaagccaggccaacggcgccggcgccctgagctacgtgagccccaacaccagcaagtgccccgtgaccatccccgaggaccagaagaagttcatcgaccaggtggtggagaagatcgaggacctgctgcagagcgaggagaacaagaacctggacctggagccctgcaccggcttccagagaaagctgatctaccagaccctgagctggaagagaagcgacatctag

SEQ ID NO: 315817 - DNA, 1383 bp, Artificial Sequence
  derived and/or modified sequence
atggccttccagacccaggccggcgcccagatccccatcgagagactggccagcgagagagccatcaccgtgaaggtgcccaacaacagcgactgggccgccagaggccacagaagcagcgccaacagcgtggtggtgcagccccaggccagcgtgggcgccgtggtgaccctggacagcagcaaccccgccgccgtgctgcacctgcagctgaactacaccctgctggacggcagatacctgagcgaggagcccgagccctacctggccgtgtacctgcacagcgagcccagacccaacgagcacaactgcagcgccagcagaagaatcagacccgagagcctgcagggcgccgaccacagaccctacaccttcttcatcagccccggcaccagagaccccgtgggcagctacagactgaacctgagcagccacttcagactgagcgccctggaggtgagcgtgggcctgtacaccagcctgtgccagtacttcagcgaggaggacgtggtgtggagaaccgagggcctgctgcccctggaggagaccagccccagacaggccgtgtgcctgaccagacacctgaccgccttcggcgccagcctgttcgtgccccccagccacgtgagattcgtgttccccgagcccaccgccgacgtgaactacatcgtgatgctgacctgcgccgtgtgcctggtgacctacatggtgatggccgccatcctgcacaagctggaccagctggacgccagcagaggcagagccatccccttctgcggccagagaggcagattcaagtacgagagcagcagcagacaggccggcgccggcgcccaggtgcccagacccacctgggccagctgctgcatgggctggaccgccggcgccgccaccggcacctggatggccaccgagcccagcaccgccaccgcctggaccagcagcggcagcccccccagaaccgcctgggtggcctgcggcagaagcgagtgcggcaccaccaagggcagcgccctgcccggcagctgcagcaccagcagcagcggcacctgcagaagacacaccgcccccagcagctggagcatgaccggcttcagatggagaagaagacccaccggcgcctggtggagaagaagatgctggcccagagtgacccagccctgctgcgccagcggcgcctgctggtggctgagctgcagcgccgccagcctgaccagcaccagcggcagcccctacggcaccggcagactggtggccgtgagcctggccagcagaggcccccccgccgccttcagcagcagcgccagcagctgggcccccaccccctgcggcaccggcctgctggtgaccctgcccaccgccagaggcatgtgccccggctag

SEQ ID NO: 315818 - DNA, 1383 bp, Artificial Sequence
  derived and/or modified sequence
atggccttccagacccaggccggggcccagatccccatcgagcggctggccagcgagcgggccatcaccgtgaaggtgcccaacaacagcgactgggccgcccggggccacaggagcagcgccaacagcgtggtggtgcagccccaggcctctgtgggcgctgtggtgaccctggacagcagcaacccagctgctgtgctgcacctgcagctgaactacaccctgctggatggccgctacctgtctgaggagcctgagccctacctggccgtgtacctgcacagcgagccccggcccaatgagcacaactgcagcgccagccgccgcatccggcctgagagcctgcagggcgctgaccaccggccctacaccttcttcatcagccctggcacccgggaccctgtgggcagctaccgcctgaacctgagcagccacttccggctgagcgccctggaggtgtctgtgggcctgtacaccagcctgtgccagtacttcagcgaggaggatgtggtgtggaggacagagggcctgctgcccctggaggagaccagcccccggcaggccgtgtgcctgaccaggcacctgacagccttcggggccagcctgtttgtgccccccagccacgtgcgctttgtgtttcctgagcccacagcagatgtgaactacatcgtgatgctgacctgtgctgtgtgcctggtgacctacatggtgatggccgccatcctgcacaagctggaccagctggatgccagccggggccgggccatccccttctgtggccagaggggccgcttcaagtatgagagcagcagccggcaggccggggccggggcccaggtgccccggcccacctgggccagctgctgcatgggctggacagctggggccgccaccggcacctggatggccacagagcccagcacagccacagcctggaccagcagcggcagcccccccaggacagcctgggtggcctgtggccgctcagaatgtggcaccaccaagggcagcgccctgcccggcagctgcagcaccagcagcagcggcacctgccgccgccacacagcccccagctcctggagcatgacaggcttccgctggaggagaagacccaccggggcctggtggaggcggcgctgctggccccgggtgacccagccctgctgtgccagcggggcctgctggtggctgagctgcagcgctgccagcctgaccagcaccagcggcagcccctacggcaccggccgcctggtggccgtgtccctggccagccggggccccccagctgccttcagcagcagcgccagctcctgggcccccaccccctgtggcaccggcctgctggtgaccctgcccacagcccggggcatgtgccctggatag

SEQ ID NO: 315819 - DNA, 1383 bp, Artificial Sequence
  derived and/or modified sequence
atggccttccagacccaggccggcgcccagatccccatcgagcggcttgcttctgagcgggccatcacagtgaaagtcccaaacaatagtgactgggcagccagaggccatcggagttcggccaactccgttgtcgtccaaccccaggccagtgtgggtgcagtcgtcacgttagacagcagcaacccagccgccgtcctgcacctccagctaaactatacacttctggatggccggtacctttcagaagaaccagagccatatcttgctgtatacctgcatagtgagccgcggcccaacgagcataactgctcagcatctcgccggataaggcctgagagcctccaaggcgccgatcacaggccctatacgttttttattagccccgggactagagatcccgtgggcagttataggttaaacctctcaagccatttccggttaagcgcactggaagtgagcgtcggcctctacacaagcctctgtcagtatttttccgaagaagatgtggtgtggaggacagaaggtctcctgcctctggaagaaacctctccaaggcaagccgtgtgtctcactaggcatctcaccgctttcggagcgagtttatttgtcccgccttcccacgtgcggttcgtattccccgagccaactgcggatgtgaactacatcgtgatgctgacatgtgcggtttgcttggtcacatacatggtgatggcggccattctacacaaactggatcaactcgatgcgagccgaggcagagctattccgttctgcggccagaggggacgcttcaagtacgaatccagcagcagacaggccggtgccggagcccaggtacctaggccaacttgggcctcatgttgcatgggctggacagcaggagctgcgactggcacttggatggccactgagccctccaccgccacagcatggaccagtagtggtagtccgccgagaacggcctgggtggcctgcggacgctcagagtgcggaacgaccaaaggctcagcattgcccgggtcctgttcaacttcgtcctcaggtacgtgcaggcgacatacggcaccaagcagttggtctatgaccgggttccggtggcggaggcggcctaccggagcctggtggaggcgaagatgctggccacgggtcacacagccctgttgcgcttccggagcttgttggtggctctcttgctctgcagcttctcttacaagcacctctggctccccgtacggtactggcagattagtcgccgtctcgctggcgtcacggggccctcccgctgctttttcctcctccgcttcgagttgggccccgactccatgtgggacagggctcctggttaccttgcctacagctagagggatgtgtccagggtag

SEQ ID NO: 315820 - DNA, 1383 bp, Artificial Sequence
  derived and/or modified sequence
atggccttccagacacaggcaggggcccagatccctattgaacgcctggcgtccgaaagggcaatcacagtgaaagtccccaataacagcgactgggcagcaagaggccaccgatcatcggccaacagtgtcgtggtgcagccccaggcctccgtcggcgcagtcgtgacacttgactcaagtaatcccgcggctgtactgcacctgcaacttaactatactctcctcgacgggaggtacctgagcgaggaaccagagccataccttgccgtatacctccactccgagcctcgacctaacgaacacaactgtagcgcctcaagacgaatccgtcccgaaagcctccagggcgccgaccatagaccctacacattctttatttcaccagggacacgcgacccagttggctcctataggttaaacctgtctagccactttcggctgagcgcactggaagtatctgtggggctgtacacctccttatgccaatacttttcagaagaagacgttgtgtggcgtaccgagggtctgttgcccttagaggagacatccccgaggcaggcagtgtgccttactcggcacctaaccgcattcggcgcgagtctgtttgtacctcctagccacgtgaggtttgtcttccccgagccgaccgcagatgtcaattacattgttatgctgacatgtgcagtgtgccttgtcacctatatggtgatggctgctatattgcataaattggaccagctggacgcttccagaggccgcgcaatccccttctgtggacagcgggggaggttcaagtatgagagcagctcccgccaggccggcgccggagcccaagtgcctcggcccacatgggcctcatgctgcatggggtggacggccggcgctgccactggaacttggatggctaccgaaccatccaccgccaccgcttggacctcctccggttcaccaccaagaactgcctgggtcgcttgcggccgctctgaatgtggtaccaccaaaggatcagccctccccggatcctgctctacctcctcatccgggacatgccgccgccacaccgcccctagttcctggtctatgaccggattccggtggcggcgacgcccaacaggagcgtggtggaggaggagatgttggcctagggtcacgcagccttgttgtgcgagcggcgcatgctggtggctcagctgttctgctgcttccctcacttccacctcagggagcccctatgggaccggacgcctggtcgctgtctctttagcatcaagagggccacctgcggcattcagtagctcggcatccagctgggcccctactccttgtgggacaggattgcttgtgacattacctactgccaggggaatgtgtccaggctag

SEQ ID NO: 315821 - DNA, 1383 bp, Artificial Sequence
  derived and/or modified sequence
atggcgtttcagacccaagccggtgcccagatacccattgagagactcgcaagcgaaagggcgatcacagtgaaagtgcctaacaattcagattgggccgctcgcggtcaccgaagctctgcgaattccgtcgtggttcagccccaggctagtgtgggagccgtggtcacccttgacagctccaaccccgctgctgtcctgcacctgcagttgaattatactctgttggatggacgttacttatccgaggagcccgaaccctatctggctgtttatctgcatagcgagccacgccctaatgagcacaactgttctgcttctaggaggattaggccagaatccctccagggagccgaccatagaccttacacttttttcatctcaccaggaacccgggaccccgtaggctcctatcggctgaatctgtcctctcatttccgtctgtccgcgctggaggtttctgtcgggctgtacacctcactgtgccagtatttttcagaggaagatgttgtgtggcgcaccgaaggtctactgccgctagaggagacctcccctaggcaggccgtgtgtctgacccggcatctgacggctttcggggcaagtctctttgtgccacctagccacgttcggttcgtgttcccagaacccaccgccgatgtgaactacattgttatgttgacttgcgccgtttgtctggtgacatacatggttatggccgctattctgcataaactcgaccagctggatgctagtcgcggtcgggctatacccttctgtggacagcggggtcggtttaagtatgagagctcttcacggcaggccggtgccggagcccaggttccacggccaacatgggcttcgtgctgtatgggctggaccgctggagcggcaacaggcacttggatggcaactgaaccatcaaccgcaactgcctggacatcttcaggtagtccccctagaaccgcttgggtcgcctgtggcaggagcgaatgcgggaccaccaaggggtctgcccttccaggctcctgttcaaccagcagcagcggaacctgtaggagacatacagccccaagtagttggagtatgacaggctttcgctggcgcagacggccaactggggcttggtggcgtagaaggtgttggcccagggtaacccagccatgctgtgcttccggcgcttgttggtggctgtcctgctctgcagcctccctgacctccaccagcggatctccctatgggaccggccgactcgtagctgtgtctctagccagccgcggtccgccagctgcatttagctccagtgcgtcttcctgggcacctacaccgtgtggaaccggtctactcgtgactttgcccaccgctcggggtatgtgtcctggctag

SEQ ID NO: 315822 - DNA, 10914 bp, Artificial Sequence
  derived and/or modified sequence
atgccccccgcagcccccgctcgactcgcccttgctctgggcctcggactgtggcttggggcactggccggcgggcccgggagaggctgcggaccttgcgagccgccgtgtctatgcgggccagctcccggcgccgcatgcagagtcaattgttccgggcgcggactccggaccctcggacccgccctcaggattcctgccgacgctaccgcactaactgcgatggctaaagccgatggggacgttaagaaatatggatccaaacggggcgctctcgccttaacccacggacactcacttcttagggatgtgagtcacaatctcttacgggccctggacgtgggacttttggctaatctgtcagccctggctgaactcgatatttcgaacaacaaaatcagtacgctggaggagggtatttttgccaatctcttcaacctctccgagatcaacctcagcggcaacccatttgagtgcgactgtgggttggcttggctgccacgatgggccgaggaacaacaggtccgggttgtccagcccgaagctgctacctgcgcaggccccggctccctcgctggccagccactcctgggcatacctctgttggattccggctgcggcgccaccctggtcggcccccacggtcctctagcgtccggacagctcgctgcattccatatcgcagcaccactccctgtcacagctacccgttgggatttcggtgacggtagtgccgaggtggacgcggctggccccgcggcctctcacaggtacgtacttccgggcaggtatcacgtgactgctgttctcgccctcggcgctggatctgctctgttaggcaccgacgtgcaggtggaggccgcaccagccgctttggagctggtgtgtccaagcagcgtccagagcgatgaatccctggatctgtcgatccaaaaccgcggagggtccggactggaagcagcttattctatcgtggctcttggcgaggaacctgcacgcgccgttcatcctctttgtccttcggacaccgagatttttccaggaaatggacattgctatcgccttgtagtcgagaaagcagcttggttgcaggcacaggagcaatgccaggcttgggcgggcgccgccctagctatggtggactccccggccgtgcagcgctttctggtgtcaagagtaaccagaagcctcgatgtatggataggtttttctacggttcaaggagtggaagtcgggcctgcccctcaaggtgaggccttctccctggaaagctgccagaattggttacccggagaacctcaccccgcaacggcagagcattgcgtgcgcctcggaccaactggatggtgcaatacggatctctgctcagctcctcactcctacgtatgtgaattacaaccaggcggacccgtgcaggatgccgagaaccttttagttggagcacccagcggtgacttgcaggggcccctgaccccactggcccagcaggacggcctgtccgccccacatgaaccagtcgaggcaggaatgggatccgtggaactccgccggcctcccgcacaccaggtgatggtgtttcctgggctgagactgagccgagaggcctttcttaccactgctgaatttggtacccaggagctgcgcaggccagcccaactcagacttcaggtctacagacttttgtccacagccggaactccagagaacgggagcgaaccggagagtaggtcaccggataaccgaactcagctggcccctgcctgtatgcccggtgggaggtggtgtcctggcgccaacatctgcctcccgcttgacgcctcttgccatcctcaggcttgtgccaacggctgcactgaaggagaacatgttgtggacgtggtagtggagaacagtgcatcaagggctaatctctccttgagggttactgccgaagagccaatttgtggtctccgggctactccctctcccgaagctcgagtcctccagggagtgctggtacgatacagtcccgtggttgaggccggttccgacatggtgttccggtggactataaatgacaaacagagtctgacctttcaaaatgtagtctttaatgtcatctatcagagcgctgccgtgttcaagctttcactaactgctagcaaccacgtcagcaatgttacagtcaactacaacgtaacagtggaaagaatgaaccgcatgcaaggactgcaggtttcaacggtgccagccgttctctctcctaacgccacactggccctgactgccggtgtactcgtcgactccgccgttgaagtcgctttcctttggaccttcggagatggtgagcaagctttacatcagttccagcccccatataacgaatcctttcctgtgcccgaccccagtgtggcccaggtcctcgtggaacacaacgttatgcacacgtatgctgccccgggcgaatatctgctgacagtgctagcaagcaatgcctttgagaatctgactcaacaagtacccgtgtccgtgagagcctccctaccaagcgtggcggttggcgtgtctgacggggtactctcccagccagccgcaaatcacacctacgcaagtcgagggacctaccatgtacggctggaagtgaacaatactgtgagcggcgccgccgcccaggcagacgtccgagtcttcgaggagctgcgggggctgagtgttgacatgtccctggcagttgagcaaggcgcacctgtcgtagtctctgcagcagtgcaaactggcgacaatataacttggacgtttgacatgggcgatggaaccgttttgtcaggccctgaagccacagtggaacacgtctacttacgtgcccagaactgcacagtcacagtgggcgcagcgtcacctgccgggcacctggcccgaagcctccatgtactcgtgtttgttcttgaggtgctgagagtggaacccgccgcgtgcattccaacacaaccggatgctcgcttaacagcctacgtgaccggtaacccagcgcactacctatttgattggacattcggtgacgggtcttcaaacacaaccgtgcggggctgtccaaccgttacacacaactttactaggtctgggaccttccccttagccttagtcctgtccagccgggtcaacagggcacattacttcacctccatctgcgttgaacctgaggtcgggaatgtcacactacaacctgaacggcagtttgtccagttgggggacgaggcgtggctggtcgcctgtgcgtggccccccttcccgtacaggtacacatgggacttcgggaccgaagaggctgcccctactcgggcgaggggccccgaagtgacatttatctatagagacccaggatcgtacctcgtgaccgtgacagcaagcaacaacatttctgctgcaaacgacagtgcgttagtggaagtacaggaacccgtgctcgtgacctctattaaagtcaatggaagtctcgggttggaactccagcagccctacttgttttctgctgtagggaggggccgccctgcctcgtacctgtgggacttaggcgacggcggatggctggaggggccggaggtcacacatgcatataatagcaccggagatttcacgggacccggcccgggtaggcaacggcaacgcttactcgcccaccgagaagccggcacttatcacgtgcaactccgagctacaaacatgctggggagcgcatgggcagactgtaccatggacttcgtggaaccagtcggttggctgatggttgccgcctcgcctaaccctgcagccgtcaataccagcgtgacactttcagctgagctggccggcggttccggggtcgtctacacctggtcactcgaggaaggactgtcttgggagacctctgagcccttcaccacccactcctttccaactcccgggctccatctggtgacaatgactgcagggaaccctctgggttccgcaaatgccaccgtggaagttgacgttcaagtcccggtgtctggacttagtataagggcttctgaaccaggggggagcttcgtcgcagcagggtcttccgtgcccttctggggccagctagctactgggacaaatgttagctggtgttgggccgtccccggtgggtcctctaagcgtggaccacacgtcacgatggtttttccagatgcgggaactttctctattcggctgaacgcctcaaatgcagtgtcctgggtcagtgcgacttacaatctcactgcagaggaacccatcgtggggctggtcctatgggccagcagcaaagtggtggcccccggacaacttgttcactttcaaattctgctggccgcaggcagcgccgttacatttagactgcaggataccgacgagccaagggccgagcattcttatttgcgcccaggcgattaccgagtccaggttaatgcctccaacttagtgagctttttcgtagcccaggccacggtgacagttcaggtgctagcctgtcgggagcccgaggttgatgtcgtgttacctctgcaggtacttatgagacgcagtcagagaaactatctggaggcccacgtagatcttcgcgactgtgtcacctaccaaactgagtacagatgggaagtctatcggacggcctcgtgtcagcggccagggcggcccgctcgcgtcgccttacctggagtggacgtgtcaagaccacgactggttctgccccgcctcgccctacccgtgggacactattgctttgtatttgttgtctcattcggtgacactcctttaacacagtcgattcaggcgaacgttactgtggccccagagcgattagtgccaattattgagggcggttcttaccgcgtgtggtccgacacccgtgacctcgtcctcgacggctctgaatcctatgatcctaacttggaggacggggaccagacacctttaagcttccactgggcatgtgttgcgtccacgcagcgcgaggccggcggctgtgccttaaatttcggaccacgtgggagcagcactgttacaatccctagggaacggctggctgctggagtggagtacacattctcacttacagtgtggaaagctggcaggaaagaggaagccacgaaccagacagtcttgattcgatctggacgagtgcccattgtgtcactcgaatgtgtgtcttgcaaggcgcaagccgtctacgaagtgagtagatcctcctatgtctatcttgagggcaggtgtttaaattgttcctcagggtcaaagcgcggacgctgggctgctcgaacattctctaataaaacattggtgttagacgaaaccaccacctcgaccggtagtgctgggatgcgtcttgtgttacggcgcggcgtgctgagggatggagaaggatacacttttacgctcacagtgctggggagaagtggtgaggaagagggatgcgccagtattcggttaagtcccaataggccgccactgggaggatcctgcagactgttcccattgggcgctgtgcatgccctcaccactaaagtgcactttgagtgtacagggtggcacgatgcagaggacgccggagctcctctcgtgtacgccctcctcttaaggcggtgcaggcagggtcactgcgaggagttctgtgtctacaaaggatctctgtcctcgtacggagctgtgctgccccccggattcagaccccattttgaggtggggctcgccgttgtcgtccaggaccagcttggggctgcggtggttgctttgaaccggtcgttagccatcactctccctgaaccaaatgggagtgctaccgggctgactgtgtggctgcacggattaacggccagtgtcctaccaggactcctccgacaagccgatccgcagcacgtcattgagtatagtttagctctggtaacagttctgaatgagcacagggcacaaattcgcaagaacatcacagagactttggtctctctcagggtacacaccgttgacgacatccagcagatcgccgccgctttggcacagtgcatgggtccatcccgggagctggtgtgtaggtcatgtttgaagcagactctgcataaactcgaggccatgatgttaattctccaagctgaaactactgctgggacagtgacccccacagcgataggggactccatcttaaacataaccggcgatctcatccacttagcttcctcagatgtgcgcgcccctcagcctagcgaattaggcgccgaaagcccatctaggatggtggcgagccaagcctacaacctcacctcagccctcatgcggatattgatgaggtcaagagtgctgaatgaggagccactgactctcgccggggaagaaatcgtggcacagggtaagcgatctgatcctcgttccctcctgtgctacggaggcgcaccaggacctggttgtcacttttcgatcccagaggcgttttccggcgctttggctaacctgtctgacgtcgtgcaactcatctttctggtggattcgaacccgtttccttttggctacatcagtaattacaccgtgtcaaccaaggtggctagtatggcgtttcagacgcaagcaggagcccagattccaattgaacgcctagctagcgaacgagcgatcacggtcaaagtgcctaacaacagtgactgggctgctaggggccaccgaagctcagctaatagtgccaatagcgtagtggtgcagccacaagcgtccgtaggtgcagtcgtgacccttgatagtagcaaccccgctgctggactgcacctgcagctaaattacacattgctggatgggcattacctgagtgaagaacccgagccatatctggccgtctatttacacagcgagccccgcccaaacgagcacaactgttcagcaagcaggcggatccgccccgagtcccttcagggcgccgatcatcggccttacacattttttatctcacccggatcacgggaccccgccgggtcctatcatttaaacttaagctcacactttcggtggagcgctctgcaggtgtctgtgggcctgtataccagtctgtgtcaatacttctccgaggaggacatggtatggcgcaccgaggggcttctgccactggaggagacaagccccaggcaggctgtgtgcctcacccgccatctcacagcatttggcgcatcacttttcgtgcctccaagccacgtccggtttgtattccctgaaccaactgccgacgtgaattacattgtcatgctcacttgtgcagtatgtctggtgacctatatggttatggccgcaatcctgcacaagttagaccagctagacgccagccgaggccgggccatccccttttgtggtcaacgtggccgctttaagtacgagatcctggtcaaaaccggatggggccgcggatctggcacgactgcacatgtagggatcatgctgtacggcgtggactctcggagcggccacaggcatctcgacggagatcgggcattccatcggaatagcttggacatcttcaggattgctactccacactctctggggtctgtctggaagatcagggtttggcatgacaacaagggcctgtctcccgcctggttcttgcaacacgtgatcgtgcgagatctgcagacggccagatcagctttttttttagtcaatgattggctcagcgtcgagacggaggcgaacggggggctcgtcgagaaggaggtcctcgcagccagcgatgctgctctcctgaggtttagacgcctacttgtggctgagctgcagcgcggattctttgataagcacatatggttgagtatctgggataggccaccaaggtcacgcttcactcggattcagagagctacctgttgcgtgcttttgatctgccttttccttggggctaacgccgtgtggtatggcgccgttggcgatagcgcctacagtactgggcacgtatccagactctccccgcttagcgtggacaccgtggccgtggggctggtgagtagcgtcgttgtttatcctgtttatctggccattctgtttctgtttaggatgtctcggtccaaggtggcgggcagtccctctcctacgccagccgggcagcaggtactggacattgattcttgtctggatagctcagtcctagattcctctttcttaacctttagcgggttgcacgctgaggccttcgtaggccagatgaagtctgatctgtttctggatgattccaaaagcctggtatgctggcctagcggagaaggcactctgagctggcctgatctcctctcagatccgagcatagtagggagtaacctccggcagcttgctaggggccaagctggacacggattgggaccagaggaagatggctttagtcttgcctcaccttatagcccagcaaaaagtttcagcgcgagcgatgaagacctgatccagcaggtgctggctgagggggtcagctcccctgcgccgacacaggatacccacatggagacagacctcctgtcgtcactaagtagcacgcctggcgagaagaccgagacccttgcgttgcaacgcttaggggagttgggccccccctctccaggactgaattgggagcaaccccaagctgcgcggctgagccgaacggggttggtagaaggactgcggaaacgtctgttaccagcttggtgcgccagccttgctcacggattgtctctgcttttggtggccgtggcggtcgcagtctctggctgggtgggcgcatctttccctcctggcgtgtctgtggcgtggcttctgagctcttcagcctcttttttggcctcattcctgggttgggagcctctaaaggtgctgttggaggccctatactttagtctggtcgctaaaagactccacccagacgaggatgataccctagtggaatcacccgcagtcacgccggttagcgcgcgggtgcctcgggtgcgtccccctcatggatttgcactcttcttggccaaggaagaagcgagaaaggtcaagcgactgcacggcatgttgagatccctgctcgtgtatatgctgttcctgctggtgactctccttgcatcatacggagatgctagttgccacggccacgcttacaggttacagtccgccatcaaacaagagctgcactctcgcgcttttttggccatcactagatccgaggagttgtggccctggatggctcacgtgctcctgccgtacgtgcatggtaaccagagcagtcctgagctaggtccaccccgcctgagacaggtgagattgcaagaagcactctatcctgaccctccaggcccccgcgtgcacacctgttcagctgcagggggctttagcacgagcgattacgatgtgggatgggagtctccccataacggctcaggcacttgggcctattctgctccagacctgcttggtgcttggagctggggctcttgtgccgtgtacgactcaggagggtacgtgcaggaattggggctaagtctggaggagtccagagaccggctaagatttctacagttgcataattggctcgacaataggtcaagggcggtatttctggaattgaccaggtacagtcctgctgtcggtctgcacgcagcagtgaccctgagactggaatttcctgcagcaggcagagctctagcggctctcagtgtccgcccattcgccctgcgccgcttgagcgcagggcttagcctgccactcttaacgagcgtgtgtttgttgttgttcgccgtgcattttgccgtcgcggaagcacggacatggcatcgggaagggagatggagagtgctacggctaggcgcatgggcaagatggcttctcgtcgccctgaccgccgcgactgccctggtccggctcgcccagttgggagcggcagacagacagtggacaaggttcgtccgaggccgaccaagacgcttcaccagctttgatcaagttgcacagttgtcttccgcagcccgcggccttgcagcatctttgctgttcctactcttagtaaaggcagcccagcaattgagattcgtgcgccagtggagtgtgttcggcaagactctgtgtagagctcttccagaattgctcggcgtgacgctaggactcgtggtccttggggtggcctatgctcagttggctattcttcttgtgtcttcctgcgtggatagcctttggagtgtggcccaggcattgctggtattatgccctggaactgggctttccaccctttgtccagccgaatcctggcacttgtcgccattgctttgcgtgggattatgggcccttagactgtggggcgccctgaggcttggcgctgttatcctgcgttggagataccacgcactccggggagagctctaccgccccgcctgggagccacaggactacgaaatggtagagctgtttctgagaaggctccgcctgtggatgggactatcgaaggtgaaagagttcaggcacaaggtgcggttcgagggaatggaaccactgccaagtcggagctctagaggaagtaaagtgagtcccgatgtgcctccgccttctgcagggagcgatgcttctcacccgtccacatccagtagccagctggatggcctgtctgtttctttgggtagattaggtacccggtgtgaaccggaaccttctcggcttcaggccgtgttcgaggcacttctgacacaattcgatcgcctcaatcaggcaactgaggatgtgtatcaactcgagcaacagctccattccctgcagggcaggcgctcgtctcgagcaccggcaggctccagtaggggaccttctcccggcctcagaccagcactgccttcccggttagcacgagcttctaggggcgtggacctggccactggtccatcacgcaccccccttagggcgaaaaataaggttcacccaagttccacttag

SEQ ID NO: 315823 - DNA, 10914 bp, Artificial Sequence
  derived and/or modified sequence
atgcccccagctgccccagcccggctggccctggccctgggcctgggcctgtggctgggcgccctggccggcggccctggccggggctgcggcccctgtgagcccccctgcctgtgtggccctgcccctggagctgcctgccgggtgaactgcagcggccggggcctgcggaccctgggccctgccctgcgcatcccagcagatgccacagccctgacagccatggccaaggcagatggagatgtgaagaagtatggcagcaagagaggagccctggccctgacccacggccacagcctgctgagagatgtgagccacaacctgctgcgggccctggatgtgggcctgctggccaacctgagcgccctggccgagctggacatcagcaacaacaagatcagcaccctggaggagggcatctttgccaacctcttcaacctgtctgagatcaacctgagcggcaacccctttgaatgtgactgtggcctggcctggctgccccgctgggccgaggagcagcaggtgcgggtggtgcagcctgaggccgccacctgtgccggccctggcagcctggccggccagcccctgctgggcatccccctgctggacagcggctgtggggccaccctggtgggcccccacggccccctggccagcggccagctggccgccttccacatcgccgcccccctgcctgtgacagccacccgctgggactttggagatggcagcgctgaggtggatgctgctggccctgctgccagccaccgctacgtgctgcccggccgctaccacgtgacagctgtgctggccctgggcgccggcagcgccctgctgggcacagatgtgcaggtggaggccgccccagctgccctggagctggtgtgccccagctctgtgcagagtgatgagagcctggacctgagcatccagaacagaggaggcagcggcctggaggccgcctacagcatcgtggccctgggggaggagcccgcccgggctgtgcaccccctgtgccccagcgacacagagatcttccctggaaatggccactgctaccgcctggtggtggagaaggccgcctggctgcaggcccaggagcagtgccaggcctgggccggggccgccctggccatggtggacagccctgctgtgcagcgcttcctggtgtcccgggtgaccaggagcctggatgtgtggattggcttcagcacagtgcagggcgtggaggtgggccctgccccccagggcgaggccttcagcctggagagctgccagaactggctgcccggggagccccacccagccacagctgagcactgtgtgcggctgggccccaccggctggtgcaacacagacctgtgcagcgccccccacagctatgtgtgtgagctgcagcccggcggccctgtgcaggatgctgagaacctgctggtgggcgcccccagcggggacctgcagggccccctgacccccctggcccagcaggacggcctgagcgcccctcatgagcctgtggaggccggcatgggctctgtggagctgcggcggcccccagcccaccaggtgatggtgtttcctggcctgcggctgagccgggaggccttcctgaccacagctgagtttggcacccaggagctgcggcggcctgcccagctgcggctgcaggtgtaccgcctgctgagcacagctggcaccccagaaaatggaagtgagcctgagagccgcagcccagacaacagaacccagctggccccagcctgcatgcctgggggccgctggtgccctggggccaacatctgcctgcccctggatgccagctgccacccccaggcctgtgccaacggctgcacagaaggagagcacgtggtggatgtggtggtggagaacagcgccagccgggccaacctgagcctgcgggtgacagctgaggagcccatctgtggcctgcgggccacccccagccctgaggcccgggtgctgcagggcgtgctggtgcgctacagccctgtggtggaggccggcagtgacatggtgttccgctggaccatcaatgacaagcagagcctgaccttccagaatgtggtgttcaacgtcatctaccagagcgctgctgtgttcaagctgagcctgacagccagcaaccacgtgtccaatgtgacagtgaactacaacgtgacagtggagaggatgaacaggatgcagggcctgcaggtgtccacagtgcctgctgtgctgagccccaatgccaccctggccctgacagctggggtgctggtggacagcgctgtggaggtggccttcctgtggacctttggagatggagagcaggccctgcaccagttccagcccccctacaatgaaagcttccctgtgcctgaccccagcgtggcccaggtgctggtggagcacaacgtgatgcacacctatgctgcccctggagagtacctgctgactgtgctggccagcaatgcctttgagaacctgacccagcaggtgcctgtgtctgtgcgggccagcctgcccagcgtggccgtgggcgtgtctgatggagtgctgagccagcctgctgccaaccacacctacgccagccggggcacctaccacgtgcggctggaggtgaacaacacagtgtctggagctgctgcccaggctgatgtgcgggtgtttgaggagctgcggggcctgtctgtggacatgagcctggccgtggagcagggcgcccctgtggtggtgtctgctgctgtgcagacaggagacaacatcacctggacctttgacatgggagatggcaccgtgctgagcggccctgaggccaccgtggagcacgtgtacctgcgggcccagaactgcaccgtgacagtgggcgccgccagccctgctggccacctggcccggagcctgcacgtgctggtgtttgtgctggaggtgctgcgggtggagcctgctgcctgcatccccacccagccagatgcccggctgacagcctacgtgactggaaatcctgcccactacctgtttgactggacctttggagatggcagcagcaacaccaccgtgcggggctgccccaccgtgacccacaacttcaccaggagcggcaccttccccctggccctggtgctgagcagccgggtgaacagagcccactacttcaccagcatctgtgtggagcctgaggtgggcaatgtgaccctgcagcctgagcggcagtttgtgcagctgggagatgaggcctggctggtggcctgtgcctggccacccttcccctaccgctacacctgggactttggaacagaggaggccgcccccacccgggcccggggccctgaggtgaccttcatctacagagatcctggcagctacctggtgacagtgacagccagcaacaacatctctgctgccaatgacagcgccctggtggaggtgcaggagcctgtgctggtgaccagcatcaaggtgaatggcagcctgggcctggagctgcagcagccctacctgttctctgctgtgggccggggccggcctgccagctacctgtgggacctgggagatggcggctggctggagggccctgaggtgacccacgcctacaacagcactggagacttcaccggccctggccctggccggcagaggcagaggctgctggcccaccgggaggccggcacctaccacgtgcagctgcgggccaccaacatgctgggcagcgcctgggccgactgcaccatggactttgtggagcctgtgggctggctgatggtggccgccagccccaacccagctgctgtgaacacctctgtgaccctgtctgctgagctggccggcggcagcggcgtggtgtacacctggagcctggaggagggcctgtcctgggagaccagcgagcccttcaccacccacagcttccccaccccaggcctgcacctggtgaccatgacagctggcaaccccctgggcagcgccaatgccaccgtggaggtggatgtgcaggtgcctgtgtctggcctgagcatccgggccagcgagcccggcggcagctttgtggccgccggcagctctgtgcccttctggggccagctggccaccggcaccaacgtgtcctggtgctgggccgtgcctgggggcagcagcaagaggggcccccacgtgaccatggtgtttcctgatgctggcaccttcagcatccggctgaatgccagcaatgctgtgtcctgggtgtctgccacctacaacctgacagctgaggagcccatcgtgggcctggtgctgtgggccagcagcaaggtggtggcccctggccagctggtgcacttccagatcctgctggccgccggcagcgctgtgaccttccggctgcaggacacagatgagcccagggctgagcacagctacctgcggcctggggactacagagtgcaggtgaatgccagcaacctggtgtccttctttgtggcccaggccaccgtgacagtgcaggtgctggcctgccgggagcctgaggtggatgtggtgctgcccctgcaggtgctgatgagaagaagccagaggaactacctggaggcccacgtggacctgcgggactgtgtgacctaccagacagagtaccgctgggaggtgtacagaacagccagctgccagaggcctggccggcctgcccgggtggccctgcccggggtggatgtgtcccggccccggctggtgctgccccggctggccctgcctgtgggccactactgctttgtgtttgtggtgtcctttggagacacccccctgacccagagcatccaggccaacgtgacagtggcccctgagcggctggtgcccatcattgaaggaggcagctacagagtgtggagcgacacccgggacctggtgctggatggcagcgagagctatgaccccaacctggaggatggagaccagacccccctgtccttccactgggcctgtgtggccagcacccagcgggaggccggcggctgtgccctgaactttggcccccggggcagcagcacagtgaccatcccccgggagcggctggccgccggcgtggagtacaccttcagcctgactgtgtggaaggccggcaggaaggaggaggccaccaaccagacagtgctgatccgcagcggccgggtgcccatcgtgtccctggagtgtgtgtcctgcaaggcccaggccgtgtatgaggtgagccgcagcagctatgtgtacctggagggccgctgcctgaactgcagcagcggcagcaagaggggccgctgggccgcccggaccttcagcaacaagaccctggtgctggatgagaccaccaccagcactggatctgctggcatgaggctggtgctgcggcggggcgtgctgagagatggagagggctacaccttcaccctgactgtgctgggccgctctggagaggaggagggctgtgccagcatccggctgagccccaacagaccacccctgggcggcagctgccgcctcttccccctgggcgctgtgcacgccctgaccaccaaggtgcactttgaatgtacaggctggcatgatgctgaagatgctggggcccccctggtgtatgccctgctgctgcggcgctgccggcagggccactgtgaggagttctgtgtgtacaagggcagcctgagcagctatggagctgtgctgcccccaggcttccggccccactttgaggtgggcctggccgtggtggtgcaggaccagctgggcgctgctgtggtggccctgaacagaagcctggccatcaccctgcctgagcccaatggaagtgccaccggcctgactgtgtggctgcacggcctgacagcctctgtgctgcccggcctgctgcggcaggccgacccccagcacgtgattgagtacagcctggccctggtgacagtgctgaatgagcaccgggcccagatcaggaagaacatcacagagaccctggtgtccctgcgggtgcacacagtggatgacatccagcagattgctgctgccctggcccagtgcatgggccccagccgggagctggtgtgccgcagctgcctgaagcagaccctgcacaagctggaggccatgatgctgatcctgcaggccgagaccacagctggcaccgtgacccccacagccatcggggacagcatcctgaacatcactggagacctgatccacctggccagcagtgatgtgcgggccccccagcccagcgagctgggcgctgagagccccagcaggatggtggccagccaggcctacaacctgaccagcgccctgatgaggatcctgatgaggagccgggtgctgaatgaggagcccctgaccctggccggggaggagatcgtggcccagggcaagagaagtgaccccaggagcctgctgtgctatggaggagcccctggccctggctgccacttcagcatccctgaggccttcagcggggccctggccaacctgagtgatgtggtgcagctgatcttcctggtggacagcaaccccttccccttcggctacatcagcaactacacagtgtccaccaaggtggcctccatggccttccagacccaggccggggcccagatccccatcgagcggctggccagcgagcgggccatcaccgtgaaggtgcccaacaacagcgactgggccgcccggggccacaggagcagcgccaacagcgccaacagcgtggtggtgcagccccaggcctctgtgggcgctgtggtgaccctggacagcagcaacccagctgctggcctgcacctgcagctgaactacaccctgctggatggccactacctgtctgaggagcctgagccctacctggccgtgtacctgcacagcgagccccggcccaatgagcacaactgcagcgccagccgccgcatccggcctgagagcctgcagggcgctgaccaccggccctacaccttcttcatcagccctggcagccgggaccctgctggcagctaccacctgaacctgagcagccacttccgctggagcgccctgcaggtgtctgtgggcctgtacaccagcctgtgccagtacttcagcgaggaggacatggtgtggaggacagagggcctgctgcccctggaggagaccagcccccggcaggccgtgtgcctgaccaggcacctgacagccttcggggccagcctgtttgtgccccccagccacgtgcgctttgtgtttcctgagcccacagcagatgtgaactacatcgtgatgctgacctgtgctgtgtgcctggtgacctacatggtgatggccgccatcctgcacaagctggaccagctggatgccagccggggccgggccatccccttctgtggccagaggggccgcttcaagtatgagatcctggtgaagacaggctggggccggggcagcggcaccacagcccacgtgggcatcatgctgtatggagtggacagccgcagcggccaccgccacctggatggagaccgggccttccacaggaacagcctggacatcttcagaattgccaccccccacagcctgggctctgtgtggaagatccgggtgtggcatgacaacaagggcctgagccctgcctggttcctgcagcacgtgattgtgcgggacctgcagacagcccggagcgccttcttcctggtgaatgactggctgtctgtggagacagaggccaatggaggcctggtggagaaggaggtgctggccgccagtgatgctgccctgctgcgcttccggcggctgctggtggccgagctgcagaggggcttctttgacaagcacatctggctgagcatctgggacaggcctcccaggagccgcttcacccgcatccagagggccacctgctgcgtgctgctgatctgcctcttcctgggcgccaatgctgtgtggtacggggctgtgggggacagcgcctacagcacaggccacgtgtcccggctgagccccctgtctgtggacacagtggccgtgggcctggtgtcctctgtggtggtgtaccctgtgtacctggccatcctcttcctgttcaggatgagccgcagcaaggtggccggcagccccagccccaccccagctggccagcaggtgctggacatcgacagctgcctggacagctctgtgctggacagcagcttcctgaccttcagcggcctgcatgctgaggcctttgtgggccagatgaagagtgacctcttcctggatgacagcaagagcctggtgtgctggcccagcggggagggcaccctgtcctggccagacctgctgagtgaccccagcatcgtgggcagcaacctgcggcagctggcccggggccaggccggccacggcctgggccctgaggaggatggcttcagcctggccagcccctacagccctgccaagagcttcagcgccagtgatgaggacctgatccagcaggtgctggccgagggcgtgagcagccctgcccccacccaggacacccacatggagacagacctgctgagcagcctgagcagcaccccaggagagaagacagagaccctggccctgcagaggctgggggagctgggcccccccagccctggcctgaactgggagcagccccaggccgcccggctgagcaggacaggcctggtggagggcctgaggaagaggctgctgcctgcctggtgtgccagcctggcccacggcctgagcctgctgctggtggccgtggccgtggccgtgtctggctgggtgggcgccagcttccccccaggagtgtctgtggcctggctgctgagcagcagcgccagcttcctggccagcttcctgggctgggagcccctgaaggtgctgctggaggccctgtacttcagcctggtggccaagaggctgcacccagatgaagatgacaccctggtggagagccctgctgtgacccctgtgtctgcccgggtgccccgggtgcggcccccccacggctttgccctcttcctggccaaggaggaggccaggaaggtgaagaggctgcacggcatgctgcggagcctgctggtgtacatgctgttcctgctggtgaccctgctggccagctatggagatgccagctgccacggccacgcctaccgcctgcagagcgccatcaagcaggagctgcacagccgggccttcctggccatcaccaggtctgaggagctgtggccctggatggcccacgtgctgctgccctacgtgcacggcaaccagagcagccctgagctgggccccccccggctgcggcaggtgcggctgcaggaggccctgtacccagaccccccaggcccccgggtgcacacctgcagcgctgctgggggcttcagcaccagtgactatgatgtgggctgggagagcccccacaacggcagcggcacctgggcctacagcgccccagacctgctgggcgcctggagctggggcagctgtgctgtgtatgacagcggcggctacgtgcaggagctgggcctgagcctggaggagagccgggaccggctgcgcttcctgcagctgcacaactggctggacaacagaagcagagctgtgttcctggagctgacccgctacagccctgctgtgggcctgcatgctgctgtgaccctgcggctggagttccctgctgctggccgggccctggccgccctgtctgtgcggccctttgccctgcggcggctgtctgctggcctgagcctgcccctgctgacctctgtgtgcctgctgctgtttgctgtgcactttgctgtggccgaggcccggacctggcaccgggagggccgctggagggtgctgcggctgggcgcctgggcccgctggctgctggtggccctgacagctgccacagccctggtgcggctggcccagctgggcgctgctgaccggcagtggaccaggtttgtgcggggccggccccggcgcttcaccagctttgaccaggtggcccagctgagcagcgctgcccggggcctggccgccagcctgctcttcctgctgctggtgaaggccgcccagcagctgcgctttgtgcggcagtggagcgtgtttgggaagaccctgtgccgggccctgcctgagctgctgggcgtgaccctgggcctggtggtgctgggcgtggcctatgcccagctggccatcctgctggtgagcagctgtgtggacagcctgtggagcgtggcccaggccctgctggtgctgtgccccggcaccggcctgagcaccctgtgcccagctgagagctggcacctgagccccctgctgtgtgtgggcctgtgggccctgcggctgtggggcgccctgcggctgggcgctgtgatcctgcgctggagataccacgccctgcggggggagctgtacagacctgcctgggagccccaggactatgagatggtggagctgttcctgcggcggctgcggctgtggatgggcctgagcaaggtgaaggagttccgccacaaggtgcgctttgagggcatggagcccctgcccagccgcagcagccggggcagcaaggtgtccccagatgtgcccccaccttctgctggcagtgatgccagccaccccagcaccagcagcagccagctggatggcctgtctgtgtccctgggccgcctgggcacccgctgtgagcctgagcccagccggctgcaggccgtgtttgaggccctgctgacccagtttgaccggctgaaccaggccacagaagatgtgtaccagctggagcagcagctgcacagcctgcagggcagaagaagcagccgggccccagctggcagcagccggggccccagccctggcctgcggcctgccctgcccagccggctggcccgggccagccggggcgtggacctggccaccggccccagcaggacccccctgcgggccaagaacaaggtgcaccccagcagcacctag

SEQ ID NO: 315824 - DNA, 10914 bp, Artificial Sequence
  derived and/or modified sequence
atgccccccgccgcccccgcccggctggccctggccctgggcctgggtttatggctcggcgccctggcgggagggccagggcgcggctgcggcccgtgcgaacctccctgcttatgcggaccggcacccggcgctgcatgtagagtcaactgtagtggtcgagggctccggacacttggacccgctctgagaatccctgccgatgcaactgccctaacagccatggctaaggccgacggagacgtgaaaaagtatggcagtaaacgcggggcgttggcccttacccacggtcactctttgttgcgggacgtgtcgcacaatctccttcgggctctagacgtaggtctgctcgcaaatctctccgccctggctgagctcgatatatccaacaataagatctctactttagaggaagggatctttgcaaatctgttcaatctttcagagattaatctgtccgggaatccattcgagtgtgattgcgggctagcctggctgccccggtgggcggaggagcagcaggtacgggtggtgcagcccgaggccgctacttgcgcaggccccggttcactcgctggacagccactgctaggaatcccacttctggacagtgggtgtggtgcaactcttgtgggcccgcacggtcccttagctagcggccagctcgctgctttccatatagccgcacctctgccggtgacagccacacgatgggacttcggggacggatctgccgaggtcgacgccgccggaccagcagctagccatcggtatgttctgccaggacggtatcatgttaccgcagttctggccctgggggctggcagcgcactgctggggacagatgtgcaggttgaagctgctcccgccgcgctggaactggtgtgcccgagctcagtgcagtctgatgagtccttagatctctctatccagaatcgggggggctccgggttggaagcggcttactccatcgtcgctctgggcgaggagcctgctagagcagtgcacccactttgcccgtcagacactgaaatttttcctggaaatggtcattgctacagactggttgtggagaaagctgcctggctacaggcccaggaacagtgccaggcctgggccggggcggccttagctatggtcgattcaccagccgtccaaaggttcctggtctcaagggttacgaggtcccttgacgtgtggatcggattttcaactgtgcagggggtggaggttggaccggctccgcagggagaggcattctctttagaaagctgtcagaattggctgcctggggaaccacacccagctacagcagagcattgcgttcgactaggaccaacgggatggtgtaacacggacctatgtagtgcaccgcattcttatgtctgtgagttgcagccaggcgggccggtgcaggatgctgagaatctgttggtgggtgcacccagcggggacctccaggggcccctcaccccccttgcccaacaagatggcttgtctgcaccacacgaacccgttgaagctggtatgggttccgttgaattgagaaggccacctgcccaccaggtcatggttttccctggcctgaggctctcgagggaagctttcctgacaaccgccgaattcggaactcaggagctccggaggcctgctcagcttcgtcttcaggtgtacagactgctgtccactgccggtacccctgagaacggaagcgaaccagaatcgaggtctccagacaatcgcacccagttggcgcctgcgtgtatgcccggcggccgatggtgtcccggggccaatatctgcctacctttagacgcctcttgccaccctcaagcatgtgccaatggctgtaccgagggggagcacgtcgtggatgtcgtggtcgaaaattcagcctccagggcaaatctatcccttcgcgtcacggcagaagagcccatatgtggcctgagggctacaccctccccggaggcgagagtgttgcagggcgtgcttgtccgttactcccctgttgtcgaagctggtagtgatatggtgtttcgatggacaatcaatgataagcagtcgctcacattccagaacgtggtcttcaacgtcatctaccaatccgccgctgtatttaagttatccctcaccgcctcgaaccacgtatccaacgtcacggtcaactacaatgtgactgtggagcggatgaatcgcatgcaggggttgcaggtgagcactgtgcccgccgtgctgagtcccaacgccacccttgcccttacagcaggagtgctcgtggactctgccgttgaggtcgccttcctgtggacgtttggcgacggcgagcaggcgctgcaccagttccagccaccatacaacgaatcgttcccagttcccgaccctagcgtcgctcaggtactggtcgaacataacgtgatgcatacatacgccgcaccaggagagtatctgctaaccgtactggcctcaaacgcgtttgagaatctgacacagcaggtccctgtttccgttagagcctcgctgccttctgtcgctgtcggtgtatcagatggtgtgctttctcaacctgccgccaatcacacatacgcgagccgcgggacctatcacgtgaggctcgaagtgaacaataccgtgtcgggcgccgcggcacaagctgacgtgcgggtgttcgaagaactgagaggccttagtgtcgacatgagcctggccgtcgagcagggtgcccccgtggtcgtgtctgcggctgtgcagacgggcgacaatattacgtggactttcgatatgggggatggcactgtgctctccggcccagaagccaccgtggagcatgtctacctgcgggcccagaattgcactgtgactgtgggagccgctagccccgcaggacacctagctagatcgcttcacgtcctcgttttcgtattggaagttctgcgcgtagaacccgctgcctgtatacccacccagccagacgctagactgacagcgtacgtgaccggcaaccccgcgcattacctctttgactggactttcggggatggctcatcaaatactaccgttagagggtgtcccaccgttacccacaatttcaccagatcaggaactttcccactggcactggtgctatccagtcgagtcaaccgggcccattattttacctccatttgtgtagaacctgaggtcggtaacgtgacgctgcagccagagcggcagttcgtccaactcggcgacgaggcctggctagtggcatgcgcctggcctccttttccttataggtacacctgggactttggcacagaagaggccgctcctacccgggcgaggggacctgaggtgacctttatctacagagatcccggtagttacttagtgaccgtgacagcatctaataatatttctgccgccaacgattctgctttggtggaagtgcaggagcccgtgctagttactagcattaaggtgaacggctcgttaggactcgaactccagcagccgtatctgttctctgctgtcggccgcggacgtccagcgtcatacctttgggatcttggagatggtggatggctggagggcccggaggtcactcatgcctataatagcactggagacttcacaggacccggccctggtaggcagcggcagcgcttactggctcatcgtgaagctgggacttatcatgtgcaacttcgggccacaaacatgctgggttcagcttgggccgattgtactatggattttgtagaacctgtggggtggcttatggtagctgcttctcccaatcccgccgctgtgaacacatccgtcaccctaagcgcggagctggccggagggagcggagtggtgtacacgtggtcgctggaggagggcctgtcctgggagacctctgaaccttttaccactcattctttccctacccctggcctccacctggttacaatgactgcggggaacccactgggctccgccaatgccacagtggaggttgacgttcaggtgcccgtctccggcctgtctattcgggcttctgaaccaggcggatccttcgttgcagccggctcatcggtgcccttctggggacagttagcaacaggcacaaacgtctcttggtgttgggcagttccaggaggctctagtaagcggggcccccacgtaaccatggtgttcccggacgcgggaacattcagcatacgcttaaacgcgagcaatgctgtgagctgggtgtcagctacatataacctgactgccgaggaacctatcgtgggactcgttctctgggcctctagtaaggtggtcgcccccgggcagttggtacacttccagatcttgttggccgctgggagcgccgtgactttccgactgcaggacaccgatgagcccagagcagagcacagctatctgaggcccggggactacagggttcaggtgaacgccagtaacctcgtaagctttttcgttgcccaagccacagtaacagtgcaagtgcttgcatgtcgagaacctgaagtagatgtggttctgccactgcaggtccttatgcgacggagtcagcggaactatctggaagcacacgtggatcttagggattgtgtaacctatcagacagaatacaggtgggaggtgtatagaaccgccagctgtcagcggcctggtagacctgcacgtgttgccctccctggcgtggacgtaagtaggccacgcttagttttgcccaggctagcactgccggtcggccactattgctttgtttttgtggtgtctttcggagacacacctcttacacaatccatacaggctaatgtgaccgtggccccagaacgactcgtgcctatcattgagggagggagctatcgggtatggtccgacacgcgggatctagtgctcgacggctcagaatcctacgatccgaaccttgaggacggggatcagactcctctgtccttccactgggcctgtgttgcctctactcaacgggaggccggtggctgtgcactcaatttcggcccccgcggatcttccacagttacaattcctcgggagcgcctcgccgcaggcgttgagtatacttttagtctgaccgtgtggaaagccggccgaaaggaggaagcaaccaatcagactgttctcattagaagcgggagggtccccatagtgtccctggagtgtgtttcctgcaaagctcaggcagtgtacgaagtgagtcgatcctcctatgtgtatttagaggggcggtgcctgaactgttctagcggaagtaagcggggaaggtgggccgcaaggaccttttccaacaagaccttagtcttggacgaaaccaccacaagtaccgggagtgccggtatgcgtctcgtactgaggaggggagtcctaagagatggtgaagggtacaccttcaccctgaccgttctagggagatccggcgaagaagagggatgcgctagtattaggctgagcccaaatcggccgcctctgggtggatcctgccggctgttccccctgggagccgttcatgcgctcaccaccaaggttcactttgaatgtactggatggcatgacgcagaggacgcaggggcccctctggtatacgcgctgttgctgcggcggtgtcggcagggacattgcgaggagttttgcgtgtacaaggggagcctttcttcctatggggcggtactgccacctggcttccggcctcacttcgaagtaggactcgcggtggtcgttcaagaccagttgggcgccgccgtcgtggcccttaatcgctctcttgccatcacgctcccagaaccgaatgggtccgccacagggctcaccgtgtggcttcatggcttaacagcctccgttctgccgggactcctgagacaggccgatccccagcatgtgatcgaatattctttggcactggttactgtcttgaacgagcacagggctcagattcgcaagaacatcaccgagacattggtgtcgcttcgggtgcacacagtggatgacatacaacaaattgctgcggcccttgcccagtgtatgggtccctccagagagctggtatgtcgctcttgtctgaaacagacactgcacaagcttgaagcaatgatgctgattttacaggctgagaccactgccggtaccgtgacacctacagcgatcggcgactccatcctgaacattaccggcgatctgatccacctcgccagctccgacgttcgcgctccgcagcctagcgagctgggagctgagtctccttcacgaatggtggcttcccaagcatacaatttgacgtcagctctgatgcgaattcttatgcgatcaagagtgctaaatgaggagcccctgactctcgcaggcgaggagattgtcgctcagggaaaacggtctgaccccaggtcactgctctgttatgggggagcaccgggtcctggatgccacttctccatacctgaagccttctctggggctctcgcgaacctgagtgatgtggttcagcttatctttctggtagatagtaacccttttccctttggctacatatccaattacaccgtctcaactaaagtggcttcaatggcattccaaacgcaggctggagcccagattcccatagagcgcttggcttcagaacgagctataactgtcaaagtgccaaataacagtgattgggcggccagaggacatcggagtagcgcgaacagcgcgaattctgttgtcgtgcagccacaggctagcgtgggggccgttgtgactcttgattctagcaaccccgccgctgggctccacctgcagctgaattacactctgctggatggccattatcttagcgaggaaccagagccttacctagcagtctaccttcactcagaaccgaggccaaacgaacacaactgcagtgcctcccgtagaatcagacctgaatcattgcagggggccgaccacagaccttacaccttttttatctcaccgggcagccgggatcctgccgggtcttatcatctgaatctgagttcccacttcagatggagcgctttgcaggtctctgttggcctttacacttccctgtgtcagtacttctccgaggaagacatggtgtggaggactgagggcctccttccactcgaagagacaagtcctaggcaggctgtctgcctaaccagacacttgaccgccttcggggcctccctgttcgtgccacccagccacgtgaggttcgttttcccggagcctacagccgatgtcaattatatcgtgatgctgacatgcgccgtctgtttagtgacctatatggttatggctgctatcctgcataaacttgaccaattagatgcctctaggggccgggcaattcccttttgcggccagcggggtagatttaagtatgaaatcctcgtcaagactggctgggggcgggggtcaggcaccacagcccacgtcggtatcatgctgtacggtgtggacagccgctccggccatcgacacctggatggggacagagcatttcacagaaattcattggacatcttccgtatcgctacaccacattcattagggtctgtgtggaaaatcagggtctggcatgataataagggactcagccccgcttggttcctgcagcatgtcatcgtcagggacctgcagaccgctagaagtgccttttttttggtcaacgactggctgtcagtagagaccgaagccaacggtgggctcgtggaaaaggaggtcctggccgcctccgacgctgccttgcttagatttcggagactgctggtagcagagctgcagcgcggatttttcgacaagcacatttggctgagcatttgggatcgccccccacggtctcgcttcactcggattcagcgcgccacctgctgtgtgcttcttatctgcctattcttgggagctaacgctgtgtggtatggtgctgtgggtgattcggcatactcaacagggcacgttagccgattgtcacccctgtccgtcgacaccgtggcagtaggtctggtgtcaagcgttgtggtctatcctgtgtatctcgccatcttgttcctgttccgcatgtcccggagcaaggtcgccggcagccccagccccacgcccgctggccagcaggtcctggacatcgacagctgccttgattcatcggttctggatagctcatttttaactttttcgggcctccacgcagaggcatttgtaggacagatgaaaagcgatttgttcctggatgacagcaagtccctagtgtgttggcccagcggggagggcacgcttagctggcctgatcttctatcagaccccagcattgtaggaagcaacttgagacagctggcacggggacaggctggccacgggctgggcccagaagaggacggattcagtcttgcctctccatacagccctgccaaatcattcagcgccagcgacgaagacctgatccagcaagtgctggcagaaggagtgtcaagtccagccccaacacaggacacacacatggagaccgacttattaagctccctgtcctccactcctggtgagaagacagaaacgctggctctgcagagactgggagagctgggcccaccctcaccagggcttaactgggagcagccacaggccgcgcgcctctcgagaacagggttggtcgagggcttgcgcaaaagactcctaccagcatggtgcgccagcctggcacatggactctcactgttgctggttgctgttgcggtggcagtttctggttgggtgggcgccagtttcccccccggagtatccgtggcctggctgctgtccagcagcgcttcatttctggcctctttcctggggtgggagcccttgaaagtactgctcgaggccctgtattttagtctggtggcaaagagattgcaccccgacgaggatgatacattggtggaaagcccagcggtaactcctgtgagcgccagggtgcctcgtgttagacccccacacgggttcgccctgtttctcgcaaaggaagaagccagaaaagtcaaacggttacatggcatgttaaggagcctcctcgtctacatgttattcctgctcgtgacgctccttgcaagctatggcgatgcctcctgccatgggcacgcctatcgtctgcagagtgctatcaaacaagaactccattctcgggccttcctcgcaattacacgatccgaagagctttggccatggatggcccatgtgttactcccatatgtgcatggcaatcagtcttcacctgaactcgggccccctcgactcagacaagtgcgtttacaggaggccctctatccagacccacctggacccagggtccatacctgtagcgccgcaggagggttctccacaagtgattatgatgttggatgggaatccccacacaatggctctggtacttgggcctacagcgcacctgatttgcttggagcctggtcctggggcagttgtgccgtgtacgactcaggagggtatgtccaggagctcggcctttctctcgaggaatcccgcgatcggcttagattccttcagcttcataattggctcgataatcggtctcgggctgtctttctcgaactgacgcgctactcgcccgcggttggcctgcacgcagctgtgactctacgcctggagttccccgcggccgggcgggccctggcagctctatccgtgcggccatttgcactgcgccgtttgtcagccggactgtcactacctcttctgacttctgtctgcctgctattgtttgctgtgcactttgccgtggcagaagcaaggacatggcaccgcgagggcagatggcgagtgttaaggctcggggcctgggccaggtggctcctggtcgccctcacggccgctacagccctggtgagactggcccaactgggcgccgcagaccgacaatggactaggttcgtccgggggaggccaaggcgtttcacatcattcgatcaagtcgcccagcttagctctgcagccaggggcttggcggcaagtttgttatttcttctcctagtgaaagccgcccaacaactgcggttcgtgcggcagtggtcagtttttggcaaaactctgtgtagagcccttcccgaactccttggtgtgacactgggtttggttgtgctcggcgtggcttacgcccagctggcaatactactggtctcgagctgtgtggactctctttggtccgtcgcccaggccctgctcgtcctgtgtcccggcacgggtctctcaactctgtgtccagccgaatcttggcacctaagccctctgttgtgtgttggcctgtgggcactaagactctggggagccctgcgtctgggagcagttattctgcgatggcggtaccatgcgctgcgtggagaactgtacagaccagcatgggaaccccaagattatgaaatggtggagttgttcctccgcaggttacggttgtggatgggcctaagcaaggttaaggagtttcgccacaaagtacggtttgagggaatggagccgttaccatctcgctccagccggggcagcaaagttagccccgacgttcccccccccagtgctggttcagatgcatcccaccccagcacatcaagttcccagctcgacggcctatcagtgtcattaggcaggctgggaactcggtgcgagcctgaaccatcgcgactccaggctgttttcgaggcactgctgacgcagtttgatcggctgaaccaggctactgaagatgtctatcagttggaacaacaactgcattccctccaggggcgaaggtccagtcgtgctcccgccggtagctcgaggggaccttctcctggtctacgccccgctctgccaagccggctggcccgagcctcaagaggtgtagatctggctacagggccctctagaaccccgttaagagccaagaataaagtgcaccctagcagtacctag

SEQ ID NO: 315825 - DNA, 12140 bp, Artificial Sequence
  derived and/or modified sequence
gcactgcagcgccagcgtccgagcgggcggccgagctcccggagcggcctggccccgagccccgagcgggcgtcgctcagcagcaggtcgcggccgcagccccatccagccccgcgcccgccatgccgtccgcgggccccgcctgagctgcggcctccgcgcgcgggcgggcctggggacggcggggccatgcgcgcgctgccctaacgatgccgcccgccgcgcccgcccgcctggcgctggccctgggcctgggcctgtggctcggggcgctggcggggggccccgggcgcggctgcgggccctgcgagcccccctgcctctgcggcccagcgcccggcgccgcctgccgcgtcaactgctcgggccgcgggctgcggacgctcggtcccgcgctgcgcatccccgcggacgccacagcgctaacggcgatggcaaaagcagatggagacgtgaaaaagtacgggagcaagcgaggggctctggccctgacccacggccactcactcctcagagacgtctcccacaacctgctccgggcgctggacgttgggctcctggcgaacctctcggcgctggcagagctggatataagcaacaacaagatttctacgttagaagaaggaatatttgctaatttatttaatttaagtgaaataaacctgagtgggaacccgtttgagtgtgactgtggcctggcgtggctgccgcgatgggcggaggagcagcaggtgcgggtggtgcagcccgaggcagccacgtgtgctgggcctggctccctggctggccagcctctgcttggcatccccttgctggacagtggctgtggggccaccctggtggggccccacggacctctggcctctggccagctagcagccttccacatcgctgccccgctccctgtcactgccacacgctgggacttcggagacggctccgccgaggtggatgccgctgggccggctgcctcgcatcgctatgtgctgcctgggcgctatcacgtgacggccgtgctggccctgggggccggctcagccctgctggggacagacgtgcaggtggaagcggcacctgccgccctggagctcgtgtgcccgtcctcggtgcagagtgacgagagcctcgacctcagcatccagaaccgcggtggttcaggcctggaggccgcctacagcatcgtggccctgggcgaggagccggcccgagcggtgcacccgctctgcccctcggacacggagatcttccctggcaacgggcactgctaccgcctggtggtggagaaggcggcctggctgcaggcgcaggagcagtgtcaggcctgggccggggccgccctggcaatggtggacagtcccgccgtgcagcgcttcctggtctcccgggtcaccaggagcctagacgtgtggatcggcttctcgactgtgcagggggtggaggtgggcccagcgccgcagggcgaggccttcagcctggagagctgccagaactggctgcccggggagccacacccagccacagccgagcactgcgtccggctcgggcccaccgggtggtgtaacaccgacctgtgctcagcgccgcacagctacgtctgcgagctgcagcccggaggcccagtgcaggatgccgagaacctcctcgtgggagcgcccagtggggacctgcagggacccctgacgcctctggcacagcaggacggcctctcagccccgcacgagcccgtggaggctgggatggggtctgtggagctgaggcggccccctgcccaccaggtcatggtattcccgggcctgcgtctgagccgtgaagccttcctcaccacggccgaatttgggacccaggagctccggcggcccgcccagctgcggctgcaggtgtaccggctcctcagcacagcagggaccccggagaacggcagcgagcctgagagcaggtccccggacaacaggacccagctggcccccgcgtgcatgccagggggacgctggtgccctggagccaacatctgcttgccgctggacgcctcctgccacccccaggcctgcgccaatggctgcactgagggggagcacgtggtggacgtggtggtggaaaacagcgccagccgggccaacctcagcctgcgggtgacggcggaggagcccatctgtggcctccgcgccacgcccagccccgaggcccgtgtactgcagggagtcctagtgaggtacagccccgtggtggaggccggctcggacatggtcttccggtggaccatcaacgacaagcagtccctgaccttccagaacgtggtcttcaatgtcatttatcagagcgcggcggtcttcaagctctcactgacggcctccaaccacgtgagcaacgtcaccgtgaactacaacgtaaccgtggagcggatgaacaggatgcagggtctgcaggtctccacagtgccggccgtgctgtcccccaatgccacgctagcactgacggcgggcgtgctggtggactcggccgtggaggtggccttcctgtggacctttggggatggggagcaggccctccaccagttccagcctccgtacaacgagtccttcccggttccagacccctcggtggcccaggtgctggtggagcacaatgtcatgcacacctacgctgccccaggtgagtacctcctgaccgtgctggcatctaatgccttcgagaacctgacgcagcaggtgcctgtgagcgtgcgcgcctccctgccctccgtggctgtgggtgtgagtgacggcgtcctgagccagccggctgccaaccacacctatgcctcgaggggcacctaccacgtgcgcctggaggtcaacaacacggtgagcggtgcggcggcccaggcggatgtgcgcgtctttgaggagctccgcggactcagcgtggacatgagcctggccgtggagcagggcgcccccgtggtggtcagcgccgcggtgcagacgggcgacaacatcacgtggaccttcgacatgggggacggcaccgtgctgtcgggcccggaggcaacagtggagcatgtgtacctgcgggcacagaactgcacagtgaccgtgggtgcggccagccccgccggccacctggcccggagcctgcacgtgctggtcttcgtcctggaggtgctgcgcgttgaacccgccgcctgcatccccacgcagcctgacgcgcggctcacggcctacgtcaccgggaacccggcccactacctcttcgactggaccttcggggatggctcctccaacacgaccgtgcgggggtgcccgacggtgacacacaacttcacgcggagcggcacgttccccctggcgctggtgctgtccagccgcgtgaacagggcgcattacttcaccagcatctgcgtggagccagaggtgggcaacgtcaccctgcagccagagaggcagtttgtgcagctcggggacgaggcctggctggtggcatgtgcctggcccccgttcccctaccgctacacctgggactttggcaccgaggaagccgcccccacccgtgccaggggccctgaggtgacgttcatctaccgagacccaggctcctatcttgtgacagtcaccgcgtccaacaacatctctgctgccaatgactcagccctggtggaggtgcaggagcccgtgctggtcaccagcatcaaggtcaatggctcccttgggctggagctgcagcagccgtacctgttctctgctgtgggccgtgggcgccccgccagctacctgtgggatctgggggacggtgggtggctcgagggtccggaggtcacccacgcttacaacagcacaggtgacttcaccgggcccggccctggccggcagcggcaaaggcttctcgctcaccgtgaggccggcacctaccatgtgcagctgcgggccaccaacatgctgggcagcgcctgggccgactgcaccatggacttcgtggagcctgtggggtggctgatggtggccgcctccccgaacccagctgccgtcaacacaagcgtcaccctcagtgccgagctggctggtggcagtggtgtcgtatacacttggtccttggaggaggggctgagctgggagacctccgagccatttaccacccatagcttccccacacccggcctgcacttggtcaccatgacggcagggaacccgctgggctcagccaacgccaccgtggaagtggatgtgcaggtgcctgtgagtggcctcagcatcagggccagcgagcccggaggcagcttcgtggcggccgggtcctctgtgcccttttgggggcagctggccacgggcaccaatgtgagctggtgctgggctgtgcccggcggcagcagcaagcgtggccctcatgtcaccatggtcttcccggatgctggcaccttctccatccggctcaatgcctccaacgcagtcagctgggtctcagccacgtacaacctcacggcggaggagcccatcgtgggcctggtgctgtgggccagcagcaaggtggtggcgcccgggcagctggtccattttcagatcctgctggctgccggctcagctgtcaccttccgcctgcaggacacagatgagcccagggccgagcactcctacctgaggcctggggactaccgcgtgcaggtgaacgcctccaacctggtgagcttcttcgtggcgcaggccacggtgaccgtccaggtgctggcctgccgggagccggaggtggacgtggtcctgcccctgcaggtgctgatgcggcgatcacagcgcaactacttggaggcccacgttgacctgcgcgactgcgtcacctaccagactgagtaccgctgggaggtgtatcgcaccgccagctgccagcggccggggcgcccagcgcgtgtggccctgcccggcgtggacgtgagccggcctcggctggtgctgccgcggctggcgctgcctgtggggcactactgctttgtgtttgtcgtgtcatttggggacacgccactgacacagagcatccaggccaatgtgacggtggcccccgagcgcctggtgcccatcattgagggtggctcataccgcgtgtggtcagacacacgggacctggtgctggatgggagcgagtcctacgaccccaacctggaggacggcgaccagacgccgctcagtttccactgggcctgtgtggcttcgacacagagggaggctggcgggtgtgcgctgaactttgggccccgcgggagcagcacggtcaccattccacgggagcggctggcggctggcgtggagtacaccttcagcctgaccgtgtggaaggccggccgcaaggaggaggccaccaaccagacggtgctgatccggagtggccgggtgcccattgtgtccttggagtgtgtgtcctgcaaggcacaggccgtgtacgaagtgagccgcagctcctacgtgtacttggagggccgctgcctcaattgcagcagcggctccaagcgagggcggtgggctgcacgtacgttcagcaacaagacgctggtgctggatgagaccaccacatccacgggcagtgcaggcatgcgactggtgctgcggcggggcgtgctgcgggacggcgagggatacaccttcacgctcacggtgctgggccgctctggcgaggaggagggctgcgcctccatccgcctgtcccccaaccgcccgccgctggggggctcttgccgcctcttcccactgggcgctgtgcacgccctcaccaccaaggtgcacttcgaatgcacgggctggcatgacgcggaggatgctggcgccccgctggtgtacgccctgctgctgcggcgctgtcgccagggccactgcgaggagttctgtgtctacaagggcagcctctccagctacggagccgtgctgcccccgggtttcaggccacacttcgaggtgggcctggccgtggtggtgcaggaccagctgggagccgctgtggtcgccctcaacaggtctttggccatcaccctcccagagcccaacggcagcgcaacggggctcacagtctggctgcacgggctcaccgctagtgtgctcccagggctgctgcggcaggccgatccccagcacgtcatcgagtactcgttggccctggtcaccgtgctgaacgagcaccgagcccagatacgcaagaacatcacggagactctggtgtccctgagggtccacactgtggatgacatccagcagatcgctgctgcgctggcccagtgcatggggcccagcagggagctcgtatgccgctcgtgcctgaagcagacgctgcacaagctggaggccatgatgctcatcctgcaggcagagaccaccgcgggcaccgtgacgcccaccgccatcggagacagcatcctcaacatcacaggagacctcatccacctggccagctcggacgtgcgggcaccacagccctcagagctgggagccgagtcaccatctcggatggtggcgtcccaggcctacaacctgacctctgccctcatgcgcatcctcatgcgctcccgcgtgctcaacgaggagcccctgacgctggcgggcgaggagatcgtggcccagggcaagcgctcggacccgcggagcctgctgtgctatggcggcgccccagggcctggctgccacttctccatccccgaggctttcagcggggccctggccaacctcagtgacgtggtgcagctcatctttctggtggactccaatccctttccctttggctatatcagcaactacaccgtctccaccaaggtggcctcgatggcattccagacacaggccggcgcccagatccccatcgagcggctggcctcagagcgcgccatcaccgtgaaggtgcccaacaactcggactgggctgcccggggccaccgcagctccgccaactccgccaactccgttgtggtccagccccaggcctccgtcggtgctgtggtcaccctggacagcagcaaccctgcggccgggctgcatctgcagctcaactatacgctgctggacggccactacctgtctgaggaacctgagccctacctggcagtctacctacactcggagccccggcccaatgagcacaactgctcggctagcaggaggatccgcccagagtcactccagggtgctgaccaccggccctacaccttcttcatttccccggggagcagagacccagcggggagttaccatctgaacctctccagccacttccgctggtcggcgctgcaggtgtccgtgggcctgtacacgtccctgtgccagtacttcagcgaggaggacatggtgtggcggacagaggggctgctgcccctggaggagacctcgccccgccaggccgtctgcctcacccgccacctcaccgccttcggcgccagcctcttcgtgcccccaagccatgtccgctttgtgtttcctgagccgacagcggatgtaaactacatcgtcatgctgacatgtgctgtgtgcctggtgacctacatggtcatggccgccatcctgcacaagctggaccagttggatgccagccggggccgcgccatccctttctgtgggcagcggggccgcttcaagtacgagatcctcgtcaagacaggctggggccggggctcaggtaccacggcccacgtgggcatcatgctgtatggggtggacagccggagcggccaccggcacctggacggcgacagagccttccaccgcaacagcctggacatcttccggatcgccaccccgcacagcctgggtagcgtgtggaagatccgagtgtggcacgacaacaaagggctcagccctgcctggttcctgcagcacgtcatcgtcagggacctgcagacggcacgcagcgccttcttcctggtcaatgactggctttcggtggagacggaggccaacgggggcctggtggagaaggaggtgctggccgcgagcgacgcagcccttttgcgcttccggcgcctgctggtggctgagctgcagcgtggcttctttgacaagcacatctggctctccatatgggaccggccgcctcgtagccgtttcactcgcatccagagggccacctgctgcgttctcctcatctgcctcttcctgggcgccaacgccgtgtggtacggggctgttggcgactctgcctacagcacggggcatgtgtccaggctgagcccgctgagcgtcgacacagtcgctgttggcctggtgtccagcgtggttgtctatcccgtctacctggccatcctttttctcttccggatgtcccggagcaaggtggctgggagcccgagccccacacctgccgggcagcaggtgctggacatcgacagctgcctggactcgtccgtgctggacagctccttcctcacgttctcaggcctccacgctgaggcctttgttggacagatgaagagtgacttgtttctggatgattctaagagtctggtgtgctggccctccggcgagggaacgctcagttggccggacctgctcagtgacccgtccattgtgggtagcaatctgcggcagctggcacggggccaggcgggccatgggctgggcccagaggaggacggcttctccctggccagcccctactcgcctgccaaatccttctcagcatcagatgaagacctgatccagcaggtccttgccgagggggtcagcagcccagcccctacccaagacacccacatggaaacggacctgctcagcagcctgtccagcactcctggggagaagacagagacgctggcgctgcagaggctgggggagctggggccacccagcccaggcctgaactgggaacagccccaggcagcgaggctgtccaggacaggactggtggagggtctgcggaagcgcctgctgccggcctggtgtgcctccctggcccacgggctcagcctgctcctggtggctgtggctgtggctgtctcagggtgggtgggtgcgagcttccccccgggcgtgagtgttgcgtggctcctgtccagcagcgccagcttcctggcctcattcctcggctgggagccactgaaggtcttgctggaagccctgtacttctcactggtggccaagcggctgcacccggatgaagatgacaccctggtagagagcccggctgtgacgcctgtgagcgcacgtgtgccccgcgtacggccaccccacggctttgcactcttcctggccaaggaagaagcccgcaaggtcaagaggctacatggcatgctgcggagcctcctggtgtacatgctttttctgctggtgaccctgctggccagctatggggatgcctcatgccatgggcacgcctaccgtctgcaaagcgccatcaagcaggagctgcacagccgggccttcctggccatcacgcggtctgaggagctctggccatggatggcccacgtgctgctgccctacgtccacgggaaccagtccagcccagagctggggcccccacggctgcggcaggtgcggctgcaggaagcactctacccagaccctcccggccccagggtccacacgtgctcggccgcaggaggcttcagcaccagcgattacgacgttggctgggagagtcctcacaatggctcggggacgtgggcctattcagcgccggatctgctgggggcatggtcctggggctcctgtgccgtgtatgacagcgggggctacgtgcaggagctgggcctgagcctggaggagagccgcgaccggctgcgcttcctgcagctgcacaactggctggacaacaggagccgcgctgtgttcctggagctcacgcgctacagcccggccgtggggctgcacgccgccgtcacgctgcgcctcgagttcccggcggccggccgcgccctggccgccctcagcgtccgcccctttgcgctgcgccgcctcagcgcgggcctctcgctgcctctgctcacctcggtgtgcctgctgctgttcgccgtgcacttcgccgtggccgaggcccgtacttggcacagggaagggcgctggcgcgtgctgcggctcggagcctgggcgcggtggctgctggtggcgctgacggcggccacggcactggtacgcctcgcccagctgggtgccgctgaccgccagtggacccgtttcgtgcgcggccgcccgcgccgcttcactagcttcgaccaggtggcgcagctgagctccgcagcccgtggcctggcggcctcgctgctcttcctgcttttggtcaaggctgcccagcagctacgcttcgtgcgccagtggtccgtctttggcaagacattatgccgagctctgccagagctcctgggggtcaccttgggcctggtggtgctcggggtagcctacgcccagctggccatcctgctcgtgtcttcctgtgtggactccctctggagcgtggcccaggccctgttggtgctgtgccctgggactgggctctctaccctgtgtcctgccgagtcctggcacctgtcacccctgctgtgtgtggggctctgggcactgcggctgtggggcgccctacggctgggggctgttattctccgctggcgctaccacgccttgcgtggagagctgtaccggccggcctgggagccccaggactacgagatggtggagttgttcctgcgcaggctgcgcctctggatgggcctcagcaaggtcaaggagttccgccacaaagtccgctttgaagggatggagccgctgccctctcgctcctccaggggctccaaggtatccccggatgtgcccccacccagcgctggctccgatgcctcgcacccctccacctcctccagccagctggatgggctgagcgtgagcctgggccggctggggacaaggtgtgagcctgagccctcccgcctccaagccgtgttcgaggccctgctcacccagtttgaccgactcaaccaggccacagaggacgtctaccagctggagcagcagctgcacagcctgcaaggccgcaggagcagccgggcgcccgccggatcttcccgtggcccatccccgggcctgcggccagcactgcccagccgccttgcccgggccagtcggggtgtggacctggccactggccccagcaggacaccccttcgggccaagaacaaggtccaccccagcagcacttagtcctccttcctggcgggggtgggccgtggagtcggagtggacaccgctcagtattactttctgccgctgtcaaggccgagggccaggcagaatggctgcacgtaggttccccagagagcaggcaggggcatctgtctgtctgtgggcttcagcactttaaagaggctgtgtggccaaccaggacccagggtcccctccccagctcccttgggaaggacacagcagtattggacggtttctagcctctgagatgctaatttatttccccgagtcctcaggtacagcgggctgtgcccggccccaccccctgggcagatgtcccccactgctaaggctgctggcttcagggagggttagcctgcaccgccgccaccctgcccctaagttattacctctccagttcctaccgtactccctgcaccgtctcactgtgtgtctcgtgtcagtaatttatatggtgttaaaatgtgtatatttttgtatgtcactattttcactagggctgaggggcctgcgcccagagctggcctcccccaacacctgctgcgcttggtaggtgtggtggcgttatggcagcccggctgctgcttggatgcgagcttggccttgggccggtgctgggggcacagctgtctgccaggcactctcatcaccccagaggccttgtcatcctcccttgccccaggccaggtagcaagagagcagcgcccaggcctgctggcatcaggtctgggcaagtagcaggactaggcatgtcagaggaccccagggtggttagaggaaaagactcctcctgggggctggctcccagggtggaggaaggtgactgtgtgtgtgtgtgtgtgcgcgcgcgcacgcgcgagtgtgctgtatggcccaggcagcctcaaggccctcggagctggctgtgcctgcttctgtgtaccacttctgtgggcatggccgcttctagagcctcgacacccccccaacccccgcaccaagcagacaaagtcaataaaagagctgtctgactgc

SEQ ID NO: 315826 - DNA, 10914 bp, Artificial Sequence
  derived and/or modified sequence
atgcctcctgccgctccagctcgcctggctctcgccttgggtctagggctgtggttaggcgcactggccggtggcccaggacggggatgcggcccatgcgaacccccatgtctgtgtggcccagctcctggagccgcatgtagagttaactgtagtggcagggggctgcgcaccttgggccctgccttacggattcctgccgacgctaccgctctgaccgctatggcaaaagctgatggagatgtcaaaaaatacggaagcaagcgcggagccctggccctcacacacggccactccctgcttcgggacgtaagccataacctgttgagagccctcgacgtcggcctgctcgctaatttatcagcactggccgaactggacattagcaataataaaatctccaccctcgaggagggcatctttgccaacctttttaacctctcagagatcaacctgtctggaaacccttttgaatgtgactgtgggctggcatggctcccaaggtgggcggaggagcagcaagtgcgcgtggtgcagcccgaagccgcaacctgcgctggacctggctcgctggctggtcaacctctgttaggaataccactccttgacagcggttgtggtgcaaccctggtgggtccccatggccctcttgcctccgggcagcttgcagccttccacatcgcggcaccactgcccgtcaccgccaccaggtgggatttcggagatggatcggccgaagtcgacgctgcgggtcccgctgccagtcaccgttatgtgcttccaggcaggtatcacgtaaccgccgtgttggctctgggcgctgggtcagctctccttggaaccgacgtgcaagtcgaagcagcccctgctgccctggaactggtctgtcccagttccgtgcagagtgacgagtcactggacttgtccatccagaacagaggtggcagcggcctcgaagccgcatacagtatcgttgcgcttggcgaagagccagctcgggctgtgcaccctctctgcccaagcgatacggaaatatttccaggaaacggacactgctatcggctggtggtcgaaaaggctgcttggttacaggcacaagaacagtgccaggcgtgggccggtgccgcactggccatggttgacagccctgccgtacaacgatttctggtgtctcgtgttactcgaagcctggacgtctggattggcttttctaccgtacagggcgtcgaagtgggacctgctcctcaaggagaggctttttcccttgaatcctgccagaattggctccctggggagccacatccagccacggccgagcactgcgtgcggctcggtcctactggctggtgtaacacagacctctgcagcgcgcctcacagctacgtgtgcgagcttcagcccggaggacccgtgcaagatgcagaaaatttgctcgtaggagccccaagtggcgatctacagggaccccttacccctctggcccagcaggacggcctctctgcccctcacgagcctgtcgaagcaggcatggggtccgtggagctgaggcggccacccgctcaccaggtgatggtcttccccggactaaggctatctagagaggcctttttgaccaccgcggagtttggaactcaagaactgagacgacccgcacagttaaggctgcaagtttaccgcctcctttccactgctggtacgcccgagaatggctccgaacccgagtcacggagcccagataaccgcactcagctagccccagcatgtatgccaggtggaagatggtgccccggagccaacatatgcctgcccctggatgccagctgtcatcctcaggcctgcgctaacgggtgcacagagggggagcacgtcgtagacgttgtcgtggagaattccgcatctcgggctaatctcagcttacgggtgaccgccgaagaacctatctgcggtctgagagctacaccttcacccgaggctcgagtgctgcagggcgtgctggtccgctacagcccggtggttgaggctggctcagatatggtgttccgatggaccatcaatgacaaacagtctctcacctttcaaaatgtagtcttcaacgtgatctaccagtcggcagccgtgttcaagctctcccttacagccagcaaccatgtgagcaacgtcacagtgaactataatgtgacagtggagcggatgaatcgcatgcagggcctacaggtcagcaccgttcccgctgtcctaagccctaatgctactctcgccctcacagctggggtgctggtggatagtgcggttgaggtcgcttttctttggacgtttggggatggcgagcaggccctgcaccagttccagccaccctataacgaaagttttccggtcccagatccaagtgttgcccaggtacttgtcgagcacaatgtcatgcacacgtacgccgctccaggggagtatttactgacggtgctggcctcaaacgcttttgagaatctgacccagcaggtgccagtcagcgttcgggcatcattgccttcagtagctgtgggggtgtcagatggcgtcctctctcaaccagctgctaatcacacatatgcctccagggggacctatcacgtgcgactggaggtgaataatactgtgtcaggggcagcggctcaggccgacgtgcgtgttttcgaagagctccggggtctgtctgtcgatatgagccttgctgtggagcagggggcaccagtggtagtctctgcagctgtgcagacgggcgataatatcacatggacattcgacatgggagatggcacagtcctttctgggcctgaagcgacagtggaacacgtatatctccgcgcacaaaactgcactgttactgtaggcgcagcaagccccgcaggacatctggcaagatctctgcacgtgctggtctttgtgctcgaagtgttaagagtggagccagccgcttgtatacccacacagccggacgcacggctcaccgcctacgttacaggcaatcctgcccactaccttttcgattggacctttggagacggttcctcaaatactactgtgcgcggatgccccaccgtcacacacaacttcaccaggtccggcaccttcccactggcacttgtgctctcaagtagggtcaaccgagctcattacttcacctctatttgtgtcgaacctgaagtggggaatgtgacactgcagccagagaggcagttcgtacagcttggtgacgaggcgtggctcgtggcctgcgcttggccgccatttccctacaggtatacctgggactttggcaccgaggaagctgcccctactcgcgctcgtggaccagaggtcacttttatttacagggaccctggctcatatctggtgacagtcaccgccagcaacaacataagtgctgccaacgattctgctctcgttgaagtccaggaacccgtgcttgttacgtccatcaaggttaacggaagcctgggactggagcttcagcagccctatctgttctccgctgtgggcagggggaggcctgcctcttacctgtgggacctcggggatgggggatggctggaagggccagaggtgacacatgcttacaacagcaccggtgatttcaccgggcctgggccaggtcgccagaggcagcgactgctggctcatcgtgaggccggtacttaccatgttcagctaagagccacgaatatgctcggaagcgcctgggcagactgcacaatggatttcgtcgagccggtgggttggcttatggtagctgctagtccaaatccagctgcagtgaacacctccgtcacactaagtgctgagttggccggaggatctggggttgtctatacctggtccctggaagagggattaagctgggagacctccgagccttttactacccatagctttccgactcccggtctgcacctggtcacaatgacagccggaaatcctttgggcagtgctaacgccaccgtggaggtggacgtgcaggttccagtcagcgggctgagtattcgcgcaagtgaacccggtggttccttcgtcgccgctggttctagtgtgccgttctggggtcaattggctacagggactaacgtctcctggtgttgggccgtgccaggcggtagcagcaaaagaggtccacacgttacgatggtttttccagatgccggtacctttagcatccgcttgaatgcttcaaacgccgtaagctgggtctcagctacttacaatctcacggctgaagagcccatcgtaggcctggtgctctgggcaagcagcaaggtggtggctccagggcagctggtgcacttccagatcctgctggccgcaggaagcgctgtgacatttcgcctgcaggacaccgatgagccaagagccgagcactcatacctgcggccaggcgactacagggtgcaggtgaacgcatctaaccttgtcagcttcttcgtggctcaggctactgtcacagtgcaggtgttggcttgtcgcgagcctgaagtggacgtggtgctgcccctgcaggtcttaatgcggaggtctcagagaaactatctcgaagcccatgttgacttgcgtgactgcgtgacataccagaccgaatatcggtgggaggtttatcgcacggcatcttgccagcggcctggcaggccagctcgggtcgccctgccgggagtggatgtgtctcggcctcggttagtactcccgcgactggctctcccggtgggacactattgctttgtttttgtcgttagtttcggggatacgccgctgacccagtctattcaggcaaatgtgacagtggccccagagcgcctagtccctataattgaggggggtagctaccgggtgtggtcggacacacgagatctggtattggacggctcagagtcttacgaccctaatctcgaagacggcgaccaaacaccattgtcgttccactgggcttgtgttgcctccacccagagggaggccggtgggtgtgccctcaattttggacctcgcggaagcagcacggtcaccatcccacgggaacgactcgctgccggagttgagtatacctttagtttaacagtgtggaaggcgggaagaaaggaagaggctactaaccagaccgtgctaatcagatctgggagggtccccatagtgtccttagagtgcgtcagctgcaaagctcaggccgtctacgaggtatcacgatcgtcatacgtgtacctcgaaggtagatgtctgaactgcagctctgggagtaagcgcggacgctgggctgccagaactttctcaaacaagaccttagtcttggacgagactaccacaagcaccggatccgcagggatgcgcctcgtgttgcgtcggggagttctcagagatggagagggatacacattcactctgactgtcctcggcagatcaggggaagaggagggatgtgcttccatccgtctcagccctaatcgcccacccctcggcggatcttgcaggctctttcctctgggggctgttcacgctctgacaacgaaggtacatttcgagtgtacggggtggcacgatgccgaagatgccggagctcccctcgtctacgcccttcttctccgtagatgcagacagggtcattgcgaggaattctgtgtttacaaggggtccctgtccagttatggagctgtgctcccacccggattccggcctcactttgaggtcggactggcggttgtggtccaagaccagctcggtgctgctgtggtggctcttaatcggtcattagcgataacgcttccagaaccaaatggaagcgccaccggactgacagtgtggctccacgggctcactgcatctgtcttgccagggcttctccgccaggctgacccccaacatgtaatcgaatattccctcgccctagtgacagtcctgaacgagcatcgcgctcagatccgcaagaacattacagaaacattggtgtctctgcgcgtgcataccgtggatgatattcaacagattgccgctgctttagcccagtgcatgggaccctcaagagagcttgtctgtagatcttgccttaagcagaccctccacaagcttgaagccatgatgttaattctgcaggccgagacaaccgccggaactgttacccctaccgcgatcggagattccatcctgaatatcacgggtgatttgattcacctggccagtagcgacgtcagagcccctcaaccatccgaactcggagctgagtcgccgtccaggatggtggcctcacaggcctataacctcacgtccgccctcatgcgcattttgatgcgcagcagggtactgaacgaagaaccccttacactggcaggcgaagagatcgtggcccagggcaaacggagcgatcctcggagcctgctttgctacggcggagccccagggccagggtgtcatttcagcattccagaggcattcagcggtgcactggccaacctgtcagatgtggtccagctcatatttctggtggattcaaaccctttccccttcgggtacatctccaactacacagtatcaaccaaggtcgcatctatggcctttcagacacaggctggagcccagattcctatcgagcgactggcttcagaaagggccatcacggtgaaagtcccaaacaattcagactgggcagcgagaggccaccgatcgtcagcaaactccgcaaattcagttgtggtgcagccccaggctagtgtgggagccgtggtgacgctggactctagtaaccctgccgctggactacatctgcaattaaactatacgctactggacggccattatctgtcagaggaacccgaaccctatcttgcagtgtacttgcatagcgaacctcggccaaacgagcacaactgtagcgccagtagaagaattcgaccagaatccctacaaggtgctgatcataggccctacacgttttttatcagtccaggctccagggaccctgccggatcataccacctaaatctgtcgtcacatttccgctggtccgcccttcaggtgtcagtgggactgtatacttccctctgtcagtatttttctgaggaagacatggtctggcgtactgaaggactgctgcccctggaggaaacctcccccagacaggccgtctgcctgaccaggcatctaacagcattcggggcttcgctcttcgtccctccctcacacgtaagattcgtattccccgaacctaccgccgacgtgaactacatcgtgatgttgacatgcgccgtctgcttggtcacgtacatggtgatggccgcaattttacataaactcgaccaacttgacgctagtcggggtagggctataccattttgtggacagaggggacggtttaaatatgagattttagtcaagacaggatggggcaggggctcaggcacgactgctcatgtgggcataatgctgtacggcgtggattctcgaagcgggcaccggcaccttgatggcgatcgcgctttccaccggaactccctggacatcttccgaatcgctacccctcatagcctgggatccgtctggaagattagggtttggcatgacaacaaggggctcagccccgcttggtttttgcagcacgtcatcgttagagatctgcagacagcacgatcggcattcttcctggtgaatgattggctatctgttgagaccgaggccaatggaggtttagtggaaaaggaggtgctggctgcgagtgatgctgctttactgcgattccgccgactgttggtcgctgagctgcagcggggtttttttgataagcatatctggctgagcatttgggatcggcctccgaggagccggttcacccggatccaaagggcaacttgctgtgttctattaatatgtttattcctaggcgctaacgctgtgtggtatggggctgtgggggacagcgcttattccactgggcacgtgagccgattgtcccctttatcggtcgacaccgtcgcggtgggtcttgtgagctcggtcgttgtttaccccgtatatctggccatcttgtttctgtttcggatgagccgcagcaaggtggctgggagcccttcccccacgcctgctggccaacaggtactggacattgacagttgcctggacagttctgtcttggactctagctttctgaccttttcaggactgcatgctgaggccttcgttggccagatgaaaagcgacttgttcttagacgattctaaatcactggtttgctggccttctggggagggaacactctcctggccggacctgctctcagatccctccatcgtcgggtcaaatctgcggcagctggccagaggccaggctggtcatggcctgggaccggaggaggatggtttctctctggccagtccttattcacccgcaaagtcattcagtgcctcagatgaggatctgatacagcaggtgctggctgagggcgtgagttcaccagcacctactcaggatacccacatggagactgacctgctcagcagcctgagctcaacaccaggggagaaaacagagacactcgccctgcagcgtttaggagagctcgggcctccgtctcctggcctgaattgggaacagccccaggctgccaggctatcgcggaccgggctggttgaaggcttacggaagaggctccttccagcctggtgtgcatcactggcccatggtttatccctgttgttggttgccgttgctgtggcggttagcgggtgggtgggtgcctcattcccaccaggtgtgtctgttgcgtggctcctgtcctcaagcgctagttttttggcttctttccttggatgggagccactcaaggtcctgctcgaagcactttacttctccctcgtggcaaagcggttgcacccagacgaagatgacactctggtagaaagcccagcggttactcctgtcagtgcccgagtaccaagagttcgcccaccgcacggcttcgctctgttccttgccaaagaggaagcaagaaaagtgaagagactccacgggatgctccgaagcctgcttgtgtacatgctgtttcttctggtcaccctcctggcctcttacggtgatgcgagttgccacgggcacgcataccgcctccagtcggcaataaaacaggagttacactcaagagcttttctcgccataactaggagtgaggaactgtggccatggatggctcacgtactgctcccctacgtgcacggtaaccagtcaagcccagagctcggccctcccaggcttcgacaagtacggctccaggaagctctgtaccccgacccccctgggcctcgggtccacacttgttcagcagccggaggtttctcaaccagcgactatgatgtggggtgggagtcgccccacaacgggtcaggaacgtgggcttatagtgctccggaccttttaggcgcttggtcatgggggtcctgcgctgtttatgacagtgggggatatgtgcaggaactcggcttatcattagaggaatctcgtgaccgtttacgctttctgcagcttcataactggttagataaccgatcccgagctgtgttcctggagctgacccgatactctcctgccgtgggcctgcacgccgctgtgacactccgcttggaatttcctgccgcaggaagagctctggccgcattaagtgtccgtccgttcgcacttagacgcctctcggcgggtctcagcctgcccctgctgacttctgtctgtctgcttttgtttgccgtgcacttcgccgtggctgaagcaaggacttggcaccgcgagggtcgctggcgcgtgctgcgattgggcgcatgggcgcgatggttgctcgttgcattgactgctgcgacagccttggtccggctggcccagctgggagcagccgatcgtcagtggacccggtttgtgcggggtagacccaggcgctttacatcttttgaccaagtggctcagctgtcatcggcagcaaggggtctggctgcgagcctgctgtttctattgctcgtgaaagcggcacaacagctgagattcgtccggcagtggagcgtattcggtaagacgctgtgccgagccctgcccgagctgctaggcgtgactctcggccttgttgtactgggagtagcatatgcccagttggccattctactggtcagtagttgcgtcgacagcctgtggtctgtcgctcaggccttgctggtattgtgccctgggactggcctgtctactttgtgtcccgctgagtcatggcacctgagtcctctcctgtgtgtgggtctttgggccctacggttatggggggcactcaggttgggcgcagtgatccttagatggcgataccacgccctgcggggagaattgtataggcctgcctgggagccccaagattatgagatggttgaacttttcctgaggaggcttaggctttggatgggcctgtcaaaggttaaggagtttagacacaaggtaaggtttgagggcatggagcccctgccgtcacgcagtagtcggggtagcaaagtctcgccagatgtgccgcctcctagcgccggaagtgatgccagccaccccagcacaagttcatcccaactggacggattgagtgttagcctcgggaggcttggcaccagatgcgaaccggagccctccaggctgcaagcggtgtttgaggctttgttaacgcagtttgacaggctcaaccaggcgaccgaggacgtctaccagctggagcagcagctgcactcacttcaaggtagaagaagttctcgagcaccagccggatcaagccggggtccttcccccggattacggcctgcgttgccctctcggcttgctcgtgcctcaaggggcgtggatttagctactggcccaagccgtacacctcttcgagcaaagaataaggttcacccatccagcacctag

SEQ ID NO: 315827 - DNA, 10914 bp, Artificial Sequence
  derived and/or modified sequence
atgccccccgccgcccccgccagactggccctggccctgggcctgggcctgtggctgggcgccctggccggcggccccggcagaggctgcggcccctgcgagcccccctgcctgtgcggccccgcccccggcgccgcctgcagagtgaactgcagcggcagaggcctgagaaccctgggccccgccctgagaatccccgccgacgccaccgccctgaccgccatggccaaggccgacggcgacgtgaagaagtacggcagcaagagaggcgccctggccctgacccacggccacagcctgctgagagacgtgagccacaacctgctgagagccctggacgtgggcctgctggccaacctgagcgccctggccgagctggacatcagcaacaacaagatcagcaccctggaggagggcatcttcgccaacctgttcaacctgagcgagatcaacctgagcggcaaccccttcgagtgcgactgcggcctggcctggctgcccagatgggccgaggagcagcaggtgagagtggtgcagcccgaggccgccacctgcgccggccccggcagcctggccggccagcccctgctgggcatccccctgctggacagcggctgcggcgccaccctggtgggcccccacggccccctggccagcggccagctggccgccttccacatcgccgcccccctgcccgtgaccgccaccagatgggacttcggcgacggcagcgccgaggtggacgccgccggccccgccgccagccacagatacgtgctgcccggcagataccacgtgaccgccgtgctggccctgggcgccggcagcgccctgctgggcaccgacgtgcaggtggaggccgcccccgccgccctggagctggtgtgccccagcagcgtgcagagcgacgagagcctggacctgagcatccagaacagaggcggcagcggcctggaggccgcctacagcatcgtggccctgggcgaggagcccgccagagccgtgcaccccctgtgccccagcgacaccgagatcttccccggcaacggccactgctacagactggtggtggagaaggccgcctggctgcaggcccaggagcagtgccaggcctgggccggcgccgccctggccatggtggacagccccgccgtgcagagattcctggtgagcagagtgaccagaagcctggacgtgtggatcggcttcagcaccgtgcagggcgtggaggtgggccccgccccccagggcgaggccttcagcctggagagctgccagaactggctgcccggcgagccccaccccgccaccgccgagcactgcgtgagactgggccccaccggctggtgcaacaccgacctgtgcagcgccccccacagctacgtgtgcgagctgcagcccggcggccccgtgcaggacgccgagaacctgctggtgggcgcccccagcggcgacctgcagggccccctgacccccctggcccagcaggacggcctgagcgccccccacgagcccgtggaggccggcatgggcagcgtggagctgagaagaccccccgcccaccaggtgatggtgttccccggcctgagactgagcagagaggccttcctgaccaccgccgagttcggcacccaggagctgagaagacccgcccagctgagactgcaggtgtacagactgctgagcaccgccggcacccccgagaacggcagcgagcccgagagcagaagccccgacaacagaacccagctggcccccgcctgcatgcccggcggcagatggtgccccggcgccaacatctgcctgcccctggacgccagctgccacccccaggcctgcgccaacggctgcaccgagggcgagcacgtggtggacgtggtggtggagaacagcgccagcagagccaacctgagcctgagagtgaccgccgaggagcccatctgcggcctgagagccacccccagccccgaggccagagtgctgcagggcgtgctggtgagatacagccccgtggtggaggccggcagcgacatggtgttcagatggaccatcaacgacaagcagagcctgaccttccagaacgtggtgttcaacgtgatctaccagagcgccgccgtgttcaagctgagcctgaccgccagcaaccacgtgagcaacgtgaccgtgaactacaacgtgaccgtggagagaatgaacagaatgcagggcctgcaggtgagcaccgtgcccgccgtgctgagccccaacgccaccctggccctgaccgccggcgtgctggtggacagcgccgtggaggtggccttcctgtggaccttcggcgacggcgagcaggccctgcaccagttccagcccccctacaacgagagcttccccgtgcccgaccccagcgtggcccaggtgctggtggagcacaacgtgatgcacacctacgccgcccccggcgagtacctgctgaccgtgctggccagcaacgccttcgagaacctgacccagcaggtgcccgtgagcgtgagagccagcctgcccagcgtggccgtgggcgtgagcgacggcgtgctgagccagcccgccgccaaccacacctacgccagcagaggcacctaccacgtgagactggaggtgaacaacaccgtgagcggcgccgccgcccaggccgacgtgagagtgttcgaggagctgagaggcctgagcgtggacatgagcctggccgtggagcagggcgcccccgtggtggtgagcgccgccgtgcagaccggcgacaacatcacctggaccttcgacatgggcgacggcaccgtgctgagcggccccgaggccaccgtggagcacgtgtacctgagagcccagaactgcaccgtgaccgtgggcgccgccagccccgccggccacctggccagaagcctgcacgtgctggtgttcgtgctggaggtgctgagagtggagcccgccgcctgcatccccacccagcccgacgccagactgaccgcctacgtgaccggcaaccccgcccactacctgttcgactggaccttcggcgacggcagcagcaacaccaccgtgagaggctgccccaccgtgacccacaacttcaccagaagcggcaccttccccctggccctggtgctgagcagcagagtgaacagagcccactacttcaccagcatctgcgtggagcccgaggtgggcaacgtgaccctgcagcccgagagacagttcgtgcagctgggcgacgaggcctggctggtggcctgcgcctggccccccttcccctacagatacacctgggacttcggcaccgaggaggccgcccccaccagagccagaggccccgaggtgaccttcatctacagagaccccggcagctacctggtgaccgtgaccgccagcaacaacatcagcgccgccaacgacagcgccctggtggaggtgcaggagcccgtgctggtgaccagcatcaaggtgaacggcagcctgggcctggagctgcagcagccctacctgttcagcgccgtgggcagaggcagacccgccagctacctgtgggacctgggcgacggcggctggctggagggccccgaggtgacccacgcctacaacagcaccggcgacttcaccggccccggccccggcagacagagacagagactgctggcccacagagaggccggcacctaccacgtgcagctgagagccaccaacatgctgggcagcgcctgggccgactgcaccatggacttcgtggagcccgtgggctggctgatggtggccgccagccccaaccccgccgccgtgaacaccagcgtgaccctgagcgccgagctggccggcggcagcggcgtggtgtacacctggagcctggaggagggcctgagctgggagaccagcgagcccttcaccacccacagcttccccacccccggcctgcacctggtgaccatgaccgccggcaaccccctgggcagcgccaacgccaccgtggaggtggacgtgcaggtgcccgtgagcggcctgagcatcagagccagcgagcccggcggcagcttcgtggccgccggcagcagcgtgcccttctggggccagctggccaccggcaccaacgtgagctggtgctgggccgtgcccggcggcagcagcaagagaggcccccacgtgaccatggtgttccccgacgccggcaccttcagcatcagactgaacgccagcaacgccgtgagctgggtgagcgccacctacaacctgaccgccgaggagcccatcgtgggcctggtgctgtgggccagcagcaaggtggtggcccccggccagctggtgcacttccagatcctgctggccgccggcagcgccgtgaccttcagactgcaggacaccgacgagcccagagccgagcacagctacctgagacccggcgactacagagtgcaggtgaacgccagcaacctggtgagcttcttcgtggcccaggccaccgtgaccgtgcaggtgctggcctgcagagagcccgaggtggacgtggtgctgcccctgcaggtgctgatgagaagaagccagagaaactacctggaggcccacgtggacctgagagactgcgtgacctaccagaccgagtacagatgggaggtgtacagaaccgccagctgccagagacccggcagacccgccagagtggccctgcccggcgtggacgtgagcagacccagactggtgctgcccagactggccctgcccgtgggccactactgcttcgtgttcgtggtgagcttcggcgacacccccctgacccagagcatccaggccaacgtgaccgtggcccccgagagactggtgcccatcatcgagggcggcagctacagagtgtggagcgacaccagagacctggtgctggacggcagcgagagctacgaccccaacctggaggacggcgaccagacccccctgagcttccactgggcctgcgtggccagcacccagagagaggccggcggctgcgccctgaacttcggccccagaggcagcagcaccgtgaccatccccagagagagactggccgccggcgtggagtacaccttcagcctgaccgtgtggaaggccggcagaaaggaggaggccaccaaccagaccgtgctgatcagaagcggcagagtgcccatcgtgagcctggagtgcgtgagctgcaaggcccaggccgtgtacgaggtgagcagaagcagctacgtgtacctggagggcagatgcctgaactgcagcagcggcagcaagagaggcagatgggccgccagaaccttcagcaacaagaccctggtgctggacgagaccaccaccagcaccggcagcgccggcatgagactggtgctgagaagaggcgtgctgagagacggcgagggctacaccttcaccctgaccgtgctgggcagaagcggcgaggaggagggctgcgccagcatcagactgagccccaacagaccccccctgggcggcagctgcagactgttccccctgggcgccgtgcacgccctgaccaccaaggtgcacttcgagtgcaccggctggcacgacgccgaggacgccggcgcccccctggtgtacgccctgctgctgagaagatgcagacagggccactgcgaggagttctgcgtgtacaagggcagcctgagcagctacggcgccgtgctgccccccggcttcagaccccacttcgaggtgggcctggccgtggtggtgcaggaccagctgggcgccgccgtggtggccctgaacagaagcctggccatcaccctgcccgagcccaacggcagcgccaccggcctgaccgtgtggctgcacggcctgaccgccagcgtgctgcccggcctgctgagacaggccgacccccagcacgtgatcgagtacagcctggccctggtgaccgtgctgaacgagcacagagcccagatcagaaagaacatcaccgagaccctggtgagcctgagagtgcacaccgtggacgacatccagcagatcgccgccgccctggcccagtgcatgggccccagcagagagctggtgtgcagaagctgcctgaagcagaccctgcacaagctggaggccatgatgctgatcctgcaggccgagaccaccgccggcaccgtgacccccaccgccatcggcgacagcatcctgaacatcaccggcgacctgatccacctggccagcagcgacgtgagagccccccagcccagcgagctgggcgccgagagccccagcagaatggtggccagccaggcctacaacctgaccagcgccctgatgagaatcctgatgagaagcagagtgctgaacgaggagcccctgaccctggccggcgaggagatcgtggcccagggcaagagaagcgaccccagaagcctgctgtgctacggcggcgcccccggccccggctgccacttcagcatccccgaggccttcagcggcgccctggccaacctgagcgacgtggtgcagctgatcttcctggtggacagcaaccccttccccttcggctacatcagcaactacaccgtgagcaccaaggtggccagcatggccttccagacccaggccggcgcccagatccccatcgagagactggccagcgagagagccatcaccgtgaaggtgcccaacaacagcgactgggccgccagaggccacagaagcagcgccaacagcgccaacagcgtggtggtgcagccccaggccagcgtgggcgccgtggtgaccctggacagcagcaaccccgccgccggcctgcacctgcagctgaactacaccctgctggacggccactacctgagcgaggagcccgagccctacctggccgtgtacctgcacagcgagcccagacccaacgagcacaactgcagcgccagcagaagaatcagacccgagagcctgcagggcgccgaccacagaccctacaccttcttcatcagccccggcagcagagaccccgccggcagctaccacctgaacctgagcagccacttcagatggagcgccctgcaggtgagcgtgggcctgtacaccagcctgtgccagtacttcagcgaggaggacatggtgtggagaaccgagggcctgctgcccctggaggagaccagccccagacaggccgtgtgcctgaccagacacctgaccgccttcggcgccagcctgttcgtgccccccagccacgtgagattcgtgttccccgagcccaccgccgacgtgaactacatcgtgatgctgacctgcgccgtgtgcctggtgacctacatggtgatggccgccatcctgcacaagctggaccagctggacgccagcagaggcagagccatccccttctgcggccagagaggcagattcaagtacgagatcctggtgaagaccggctggggcagaggcagcggcaccaccgcccacgtgggcatcatgctgtacggcgtggacagcagaagcggccacagacacctggacggcgacagagccttccacagaaacagcctggacatcttcagaatcgccaccccccacagcctgggcagcgtgtggaagatcagagtgtggcacgacaacaagggcctgagccccgcctggttcctgcagcacgtgatcgtgagagacctgcagaccgccagaagcgccttcttcctggtgaacgactggctgagcgtggagaccgaggccaacggcggcctggtggagaaggaggtgctggccgccagcgacgccgccctgctgagattcagaagactgctggtggccgagctgcagagaggcttcttcgacaagcacatctggctgagcatctgggacagaccccccagaagcagattcaccagaatccagagagccacctgctgcgtgctgctgatctgcctgttcctgggcgccaacgccgtgtggtacggcgccgtgggcgacagcgcctacagcaccggccacgtgagcagactgagccccctgagcgtggacaccgtggccgtgggcctggtgagcagcgtggtggtgtaccccgtgtacctggccatcctgttcctgttcagaatgagcagaagcaaggtggccggcagccccagccccacccccgccggccagcaggtgctggacatcgacagctgcctggacagcagcgtgctggacagcagcttcctgaccttcagcggcctgcacgccgaggccttcgtgggccagatgaagagcgacctgttcctggacgacagcaagagcctggtgtgctggcccagcggcgagggcaccctgagctggcccgacctgctgagcgaccccagcatcgtgggcagcaacctgagacagctggccagaggccaggccggccacggcctgggccccgaggaggacggcttcagcctggccagcccctacagccccgccaagagcttcagcgccagcgacgaggacctgatccagcaggtgctggccgagggcgtgagcagccccgcccccacccaggacacccacatggagaccgacctgctgagcagcctgagcagcacccccggcgagaagaccgagaccctggccctgcagagactgggcgagctgggcccccccagccccggcctgaactgggagcagccccaggccgccagactgagcagaaccggcctggtggagggcctgagaaagagactgctgcccgcctggtgcgccagcctggcccacggcctgagcctgctgctggtggccgtggccgtggccgtgagcggctgggtgggcgccagcttcccccccggcgtgagcgtggcctggctgctgagcagcagcgccagcttcctggccagcttcctgggctgggagcccctgaaggtgctgctggaggccctgtacttcagcctggtggccaagagactgcaccccgacgaggacgacaccctggtggagagccccgccgtgacccccgtgagcgccagagtgcccagagtgagacccccccacggcttcgccctgttcctggccaaggaggaggccagaaaggtgaagagactgcacggcatgctgagaagcctgctggtgtacatgctgttcctgctggtgaccctgctggccagctacggcgacgccagctgccacggccacgcctacagactgcagagcgccatcaagcaggagctgcacagcagagccttcctggccatcaccagaagcgaggagctgtggccctggatggcccacgtgctgctgccctacgtgcacggcaaccagagcagccccgagctgggcccccccagactgagacaggtgagactgcaggaggccctgtaccccgacccccccggccccagagtgcacacctgcagcgccgccggcggcttcagcaccagcgactacgacgtgggctgggagagcccccacaacggcagcggcacctgggcctacagcgcccccgacctgctgggcgcctggagctggggcagctgcgccgtgtacgacagcggcggctacgtgcaggagctgggcctgagcctggaggagagcagagacagactgagattcctgcagctgcacaactggctggacaacagaagcagagccgtgttcctggagctgaccagatacagccccgccgtgggcctgcacgccgccgtgaccctgagactggagttccccgccgccggcagagccctggccgccctgagcgtgagacccttcgccctgagaagactgagcgccggcctgagcctgcccctgctgaccagcgtgtgcctgctgctgttcgccgtgcacttcgccgtggccgaggccagaacctggcacagagagggcagatggagagtgctgagactgggcgcctgggccagatggctgctggtggccctgaccgccgccaccgccctggtgagactggcccagctgggcgccgccgacagacagtggaccagattcgtgagaggcagacccagaagattcaccagcttcgaccaggtggcccagctgagcagcgccgccagaggcctggccgccagcctgctgttcctgctgctggtgaaggccgcccagcagctgagattcgtgagacagtggagcgtgttcggcaagaccctgtgcagagccctgcccgagctgctgggcgtgaccctgggcctggtggtgctgggcgtggcctacgcccagctggccatcctgctggtgagcagctgcgtggacagcctgtggagcgtggcccaggccctgctggtgctgtgccccggcaccggcctgagcaccctgtgccccgccgagagctggcacctgagccccctgctgtgcgtgggcctgtgggccctgagactgtggggcgccctgagactgggcgccgtgatcctgagatggagataccacgccctgagaggcgagctgtacagacccgcctgggagccccaggactacgagatggtggagctgttcctgagaagactgagactgtggatgggcctgagcaaggtgaaggagttcagacacaaggtgagattcgagggcatggagcccctgcccagcagaagcagcagaggcagcaaggtgagccccgacgtgcccccccccagcgccggcagcgacgccagccaccccagcaccagcagcagccagctggacggcctgagcgtgagcctgggcagactgggcaccagatgcgagcccgagcccagcagactgcaggccgtgttcgaggccctgctgacccagttcgacagactgaaccaggccaccgaggacgtgtaccagctggagcagcagctgcacagcctgcagggcagaagaagcagcagagcccccgccggcagcagcagaggccccagccccggcctgagacccgccctgcccagcagactggccagagccagcagaggcgtggacctggccaccggccccagcagaacccccctgagagccaagaacaaggtgcaccccagcagcacctag

SEQ ID NO: 315828 - protein, 460 aa, Artificial Sequence
  derived and/or modified sequence
MAFQTQAGAQIPIERLASERAITVKVPNNSDWAARGHRSSANSVVVQPQASVGAVVTLDSSNPAAVLHLQLNYTLLDGRYLSEEPEPYLAVYLHSEPRPNEHNCSASRRIRPESLQGADHRPYTFFISPGTRDPVGSYRLNLSSHFRLSALEVSVGLYTSLCQYFSEEDVVWRTEGLLPLEETSPRQAVCLTRHLTAFGASLFVPPSHVRFVFPEPTADVNYIVMLTCAVCLVTYMVMAAILHKLDQLDASRGRAIPFCGQRGRFKYESSSRQAGAGAQVPRPTWASCCMGWTAGAATGTWMATEPSTATAWTSSGSPPRTAWVACGRSECGTTKGSALPGSCSTSSSGTCRRHTAPSSWSMTGFRWRRRPTGAWWRRRCWPRVTQPCCASGACWWLSCSAASLTSTSGSPYGTGRLVAVSLASRGPPAAFSSSASSWAPTPCGTGLLVTLPTARGMCPG

SEQ ID NO: 315829 - protein, 3637 aa, Artificial Sequence
  derived and/or modified sequence
MPPAAPARLALALGLGLWLGALAGGPGRGCGPCEPPCLCGPAPGAACRVNCSGRGLRTLGPALRIPADATALTAMAKADGDVKKYGSKRGALALTHGHSLLRDVSHNLLRALDVGLLANLSALAELDISNNKISTLEEGIFANLFNLSEINLSGNPFECDCGLAWLPRWAEEQQVRVVQPEAATCAGPGSLAGQPLLGIPLLDSGCGATLVGPHGPLASGQLAAFHIAAPLPVTATRWDFGDGSAEVDAAGPAASHRYVLPGRYHVTAVLALGAGSALLGTDVQVEAAPAALELVCPSSVQSDESLDLSIQNRGGSGLEAAYSIVALGEEPARAVHPLCPSDTEIFPGNGHCYRLVVEKAAWLQAQEQCQAWAGAALAMVDSPAVQRFLVSRVTRSLDVWIGFSTVQGVEVGPAPQGEAFSLESCQNWLPGEPHPATAEHCVRLGPTGWCNTDLCSAPHSYVCELQPGGPVQDAENLLVGAPSGDLQGPLTPLAQQDGLSAPHEPVEAGMGSVELRRPPAHQVMVFPGLRLSREAFLTTAEFGTQELRRPAQLRLQVYRLLSTAGTPENGSEPESRSPDNRTQLAPACMPGGRWCPGANICLPLDASCHPQACANGCTEGEHVVDVVVENSASRANLSLRVTAEEPICGLRATPSPEARVLQGVLVRYSPVVEAGSDMVFRWTINDKQSLTFQNVVFNVIYQSAAVFKLSLTASNHVSNVTVNYNVTVERMNRMQGLQVSTVPAVLSPNATLALTAGVLVDSAVEVAFLWTFGDGEQALHQFQPPYNESFPVPDPSVAQVLVEHNVMHTYAAPGEYLLTVLASNAFENLTQQVPVSVRASLPSVAVGVSDGVLSQPAANHTYASRGTYHVRLEVNNTVSGAAAQADVRVFEELRGLSVDMSLAVEQGAPVVVSAAVQTGDNITWTFDMGDGTVLSGPEATVEHVYLRAQNCTVTVGAASPAGHLARSLHVLVFVLEVLRVEPAACIPTQPDARLTAYVTGNPAHYLFDWTFGDGSSNTTVRGCPTVTHNFTRSGTFPLALVLSSRVNRAHYFTSICVEPEVGNVTLQPERQFVQLGDEAWLVACAWPPFPYRYTWDFGTEEAAPTRARGPEVTFIYRDPGSYLVTVTASNNISAANDSALVEVQEPVLVTSIKVNGSLGLELQQPYLFSAVGRGRPASYLWDLGDGGWLEGPEVTHAYNSTGDFTGPGPGRQRQRLLAHREAGTYHVQLRATNMLGSAWADCTMDFVEPVGWLMVAASPNPAAVNTSVTLSAELAGGSGVVYTWSLEEGLSWETSEPFTTHSFPTPGLHLVTMTAGNPLGSANATVEVDVQVPVSGLSIRASEPGGSFVAAGSSVPFWGQLATGTNVSWCWAVPGGSSKRGPHVTMVFPDAGTFSIRLNASNAVSWVSATYNLTAEEPIVGLVLWASSKVVAPGQLVHFQILLAAGSAVTFRLQDTDEPRAEHSYLRPGDYRVQVNASNLVSFFVAQATVTVQVLACREPEVDVVLPLQVLMRRSQRNYLEAHVDLRDCVTYQTEYRWEVYRTASCQRPGRPARVALPGVDVSRPRLVLPRLALPVGHYCFVFVVSFGDTPLTQSIQANVTVAPERLVPIIEGGSYRVWSDTRDLVLDGSESYDPNLEDGDQTPLSFHWACVASTQREAGGCALNFGPRGSSTVTIPRERLAAGVEYTFSLTVWKAGRKEEATNQTVLIRSGRVPIVSLECVSCKAQAVYEVSRSSYVYLEGRCLNCSSGSKRGRWAARTFSNKTLVLDETTTSTGSAGMRLVLRRGVLRDGEGYTFTLTVLGRSGEEEGCASIRLSPNRPPLGGSCRLFPLGAVHALTTKVHFECTGWHDAEDAGAPLVYALLLRRCRQGHCEEFCVYKGSLSSYGAVLPPGFRPHFEVGLAVVVQDQLGAAVVALNRSLAITLPEPNGSATGLTVWLHGLTASVLPGLLRQADPQHVIEYSLALVTVLNEHRAQIRKNITETLVSLRVHTVDDIQQIAAALAQCMGPSRELVCRSCLKQTLHKLEAMMLILQAETTAGTVTPTAIGDSILNITGDLIHLASSDVRAPQPSELGAESPSRMVASQAYNLTSALMRILMRSRVLNEEPLTLAGEEIVAQGKRSDPRSLLCYGGAPGPGCHFSIPEAFSGALANLSDVVQLIFLVDSNPFPFGYISNYTVSTKVASMAFQTQAGAQIPIERLASERAITVKVPNNSDWAARGHRSSANSANSVVVQPQASVGAVVTLDSSNPAAGLHLQLNYTLLDGHYLSEEPEPYLAVYLHSEPRPNEHNCSASRRIRPESLQGADHRPYTFFISPGSRDPAGSYHLNLSSHFRWSALQVSVGLYTSLCQYFSEEDMVWRTEGLLPLEETSPRQAVCLTRHLTAFGASLFVPPSHVRFVFPEPTADVNYIVMLTCAVCLVTYMVMAAILHKLDQLDASRGRAIPFCGQRGRFKYEILVKTGWGRGSGTTAHVGIMLYGVDSRSGHRHLDGDRAFHRNSLDIFRIATPHSLGSVWKIRVWHDNKGLSPAWFLQHVIVRDLQTARSAFFLVNDWLSVETEANGGLVEKEVLAASDAALLRFRRLLVAELQRGFFDKHIWLSIWDRPPRSRFTRIQRATCCVLLICLFLGANAVWYGAVGDSAYSTGHVSRLSPLSVDTVAVGLVSSVVVYPVYLAILFLFRMSRSKVAGSPSPTPAGQQVLDIDSCLDSSVLDSSFLTFSGLHAEAFVGQMKSDLFLDDSKSLVCWPSGEGTLSWPDLLSDPSIVGSNLRQLARGQAGHGLGPEEDGFSLASPYSPAKSFSASDEDLIQQVLAEGVSSPAPTQDTHMETDLLSSLSSTPGEKTETLALQRLGELGPPSPGLNWEQPQAARLSRTGLVEGLRKRLLPAWCASLAHGLSLLLVAVAVAVSGWVGASFPPGVSVAWLLSSSASFLASFLGWEPLKVLLEALYFSLVAKRLHPDEDDTLVESPAVTPVSARVPRVRPPHGFALFLAKEEARKVKRLHGMLRSLLVYMLFLLVTLLASYGDASCHGHAYRLQSAIKQELHSRAFLAITRSEELWPWMAHVLLPYVHGNQSSPELGPPRLRQVRLQEALYPDPPGPRVHTCSAAGGFSTSDYDVGWESPHNGSGTWAYSAPDLLGAWSWGSCAVYDSGGYVQELGLSLEESRDRLRFLQLHNWLDNRSRAVFLELTRYSPAVGLHAAVTLRLEFPAAGRALAALSVRPFALRRLSAGLSLPLLTSVCLLLFAVHFAVAEARTWHREGRWRVLRLGAWARWLLVALTAATALVRLAQLGAADRQWTRFVRGRPRRFTSFDQVAQLSSAARGLAASLLFLLLVKAAQQLRFVRQWSVFGKTLCRALPELLGVTLGLVVLGVAYAQLAILLVSSCVDSLWSVAQALLVLCPGTGLSTLCPAESWHLSPLLCVGLWALRLWGALRLGAVILRWRYHALRGELYRPAWEPQDYEMVELFLRRLRLWMGLSKVKEFRHKVRFEGMEPLPSRSSRGSKVSPDVPPPSAGSDASHPSTSSSQLDGLSVSLGRLGTRCEPEPSRLQAVFEALLTQFDRLNQATEDVYQLEQQLHSLQGRRSSRAPAGSSRGPSPGLRPALPSRLARASRGVDLATGPSRTPLRAKNKVHPSST

SEQ ID NO: 315830 - protein, 1230 aa, Artificial Sequence
  derived and/or modified sequence
MVAASPNPAAVNTSVTLSAELAGGSGVVYTWSLEEGLSWETSEPFTTHSFPTPGLHLVTMTAGNPLGSANATVEVDVQVPVSGLSIRASEPGGSFVAAGSSVPFWGQLATGTNVSWCWAVPGGSSKRGPHVTMVFPDAGTFSIRLNASNAVSWVSATYNLTAEEPIVGLVLWASSKVVAPGQLVHFQILLAAGSAVTFRLQVGGANPEVLPGPRFSHSFPRVGDHVVSVRGKNHVSWAQAQVRIVVLEAVSGLQVPNCCEPGIATGTERNFTARVQRGSRVAYAWYFSLQKVQGDSLVILSGRDVTYTPVAAGLLEIQVRAFNALGSENRTLVLEVQDAVQYVALQSGPCFTNRSAQFEAATSPSPRRVAYHWDFGDGSPGQDTDEPRAEHSYLRPGDYRVQVNASNLVSFFVAQATVTVQVLACREPEVDVVLPLQVLMRRSQRNYLEAHVDLRDCVTYQTEYRWEVYRTASCQRPGRPARVALPGVDVSRPRLVLPRLALPVGHYCFVFVVSFGDTPLTQSIQANVTVAPERLVPIIEGGSYRVWSDTRDLVLDGSESYDPNLEDGDQTPLSFHWACVASTQREAGGCALNFGPRGSSTVTIPRERLAAGVEYTFSLTVWKAGRKEEATNQTVLIRSGRVPIVSLECVSCKAQAVYEVSRSSYVYLEGRCLNCSSGSKRGRWAARTFSNKTLVLDETTTSTGSAGMRLVLRRGVLRDGEGYTFTLTVLGRSGEEEGCASIRLSPNRPPLGGSCRLFPLGAVHALTTKVHFECTGWHDAEDAGAPLVYALLLRRCRQGHCEEFCVYKGSLSSYGAVLPPGFRPHFEVGLAVVVQDQLGAAVVALNRSLAITLPEPNGSATGLTVWLHGLTASVLPGLLRQADPQHVIEYSLALVTVLNEYERALDVAAEPKHERQHRAQIRKNITETLVSLRVHTVDDIQQIAAALAQCMGPSRELVCRSCLKQTLHKLEAMMLILQAETTAGTVTPTAIGDSILNITGDLIHLASSDVRAPQPSELGAESPSRMVASQAYNLTSALMRILMRSRVLNEEPLTLAGEEIVAQGKRSDPRSLLCYGGAPGPGCHFSIPEAFSGALANLSDVVQLIFLVDSNPFPFGYISNYTVSTKAPPTPPTPLWSSPRPPSVLWSPWTAATLRPGCICSSTIRCWTATTCLRNLSPTWQSTYTRSPGPMSTTARLAGGSAQSHSRVLTTGPTPSSFPRGAETQRGVTI

SEQ ID NO: 315831 - protein, 402 aa, Artificial Sequence
  derived and/or modified sequence
MIVPAAPYLPGLIQGNQEAAAAPDTMAQPYASAQFAPPQNGIPAEYTAPHPHPAPEYTGQTTVPEHTLNLYPPAQTHSEQSPADTSAQTVSGTATQTDDAAPTDGQPQTQPSENTENKSQPKRLHVSNIPFRFRDPDLRQMFGQFGKILDVEIIFNERGSKGFGFVTFENSADADRAREKLHGTVVEGRKIEVNNATARVMTNKKTVNPYTNGWKLNPVVGAVYSPEFYAGTVLLCQANQEGSSMYSAPSSLVYTSAMPGFPYPAATAAAAYRGAHLRGRGRTVYNTFRAAAPPPPIPAYGGVVYQDGFYGADIYGGYAAYRYAQPTPATAAAYSDSYGRVYAADPYHHALAPAPTYGVGAMNAFAPLTDAKTRSHADDVGLVLSSLQASIYRGGYNRFAPY

SEQ ID NO: 315832 - DNA, 4099 bp, Artificial Sequence
  derived and/or modified sequence
accttccattttggtagcttcaactttgcagctgctgtgtctcttcgtcgtctgggaagaaaactttcacattaagagttgctgatgcggattttctttctttcctctcccggcgttgatgagtgcttggctcctgacagaagggatttggctcccagctttgtagttcggaagaagttgggtctatagatttccccctaactctccattgatgtgttgagcttcagagggaataataactctacgtaaagcatgctggcgtctcaaggagttctcctgcatccttatggcgtgcctatgattgtaccggcagctccttaccttcctggactgattcagggtaatcaggaagcagccgctgcccctgacacaatggctcagccttacgcttcggcccagtttgctcccccgcagaacggtatccccgcggaatacacggcccctcatccccaccccgcgccagagtacacaggccagaccacggttcccgagcacacattaaacctgtaccctcccgcccagacgcactccgagcagagcccggcggacacgagcgctcagaccgtctctggcaccgccacacagacagatgacgcagcaccgacggatggccagccccagacacaaccttctgaaaacacggaaaacaagtctcagcccaagcggctgcatgtctccaatatccccttcaggttccgggatccggacctcagacaaatgtttggtcaatttggtaaaatcttagatgttgaaattatttttaatgagcgaggctcaaagggatttggtttcgtaactttcgaaaatagtgccgatgcggacagggcgagggagaaattacacggcaccgtggtagagggccgtaaaatcgaggtaaataatgccacagcacgtgtaatgacaaataaaaagaccgtcaacccttatacaaatggctggaaattgaatccagttgtgggtgcagtctacagtcccgaattctatgcaggcacggtcctgttgtgccaggccaaccaggagggatcttccatgtacagtgcccccagttcacttgtatatacttctgcaatgccaggcttcccgtatccagcagccaccgccgcggccgcctaccgaggggcgcacctgcgaggccgcggtcgcaccgtgtacaacaccttcagggccgcggcgcccccgcccccgatcccggcctacggcggtgttgtttaccaggatggattttatggtgcagacatttatggtggttatgctgcataccgctacgcccagcctacccctgccactgccgctgcctacagtgacagttacggacgagtttatgctgccgacccctaccaccacgcacttgctccagcccccacctacggcgttggtgccatgaatgcttttgcacctttgactgatgccaagactaggagccatgctgatgatgtgggtctcgttctttcttcattgcaggctagtatataccgagggggatacaaccgttttgctccatactaaatgacaaaaccataaaaaccttccaatgtggggagaaaggaagctttccgaggcctgagtattgcaatacatgcagtagtacatcattttagcaactctaaaaaaaaaaaaaatacaaataaaaaggaaaaaaaattacattttttatcttatacctcagatattttgttctgtgtattttaatattgtgggtctttaatttctgaaggttccgtagtttggttgctggctgtaggagtttttgtggttgatctagacagatgctagataatgaataaaaactggtttagggccatatccagagtgctatattatgtaaatgaattatatatgctgaatattaagctactggggttatcagctatttgggaagagtgtaagtgactacagtagtcatttttttctgcacctgcattattttattttgcgaaaggggaggttgggaggggcttaggggattggaactggggtttggctgaaagaaaaaaaaaaaaatgtaactgatgaatctaaacgacccactgcaccaacaatcatttatcaatggttctaagttactcattgccagttcaagccaaaggtcatgttgttaagggggtgcttctagtagcacttgtgcatctgagttgaatgaagctgtgcaaacccaccctttaaaccattccacccggcagtattcagcttcttaaccagtcgctatttaggaaaaaaaacccactagttaggccatcaacaagcattctttttatatttcttccagtataataaattattgatatcactgctgacttttatattatgggagggaaaaaataacattaataaaaaggtgataaaaaagcactgtttctatttttttctttttttccaaaaaaagaaagtaataaaaacttaaattctttgtaccagttaaaaaaaatgtataaaatttacatctgtgcagtggagttgttaagttctagaaacagtctatgaagctttagttttagcctagtagaacaactgttagagacagacgtataatttttatggaattacatgataatcatattcggatttatagaagcattttacaagtattgcaatcattgagtagagataatcatggtattttcatcagcttggtactttttgaaacgtgactgcgttgtgtgaacaatctgcaatttttcagtccgtgagatcctgcccttccacctctttcccatacccccaaggattatctcaaaatgatctctttagttctgtctccaaggcccaggacacttgtcagaaggatgcaaaaaaagaaaaaagtacatccaccctcttaatcccaaaagaacaaagtctccccacctttctcggatgcagggccagagtgacacagccgaaaaattgcagtttgtctgtacttctgtttgaactttccacgttgtcctgtttacaagttaacttaagttggggtatccgtcacgggtcttcctgttttgtatttaaataaaaacaacagcagcaggctgtccctgagtagttttgctgccataggttaagtcctcatgtgtacagtgcaggccctgtggcccgcacttcagtaagttatcaactctcaccgctgtgaacctgccaatccgctgtaacaactctgctttaaaacaaaaccaaacaaaactttaaaaaaaaatgtgtgatccagctttctcttgccatcctatgtgcatgccgtaagatcagttggatattaaaccatcaataaagtttcacaagatttgaaaacaaagtttctgtagcttcgatacctaagacagacgatagtgatcttgaaaagagaaaagggggaggggggagctacttatcagccaaaagcatataaagtgttcttttcaccagacttctttgggtgggtgaggggaggggcaagagggtgttttatagcatcactaagacattctcattcccccacctggaaaacagtgttatggcaatgggtgcctggttgatgttcttaaaggaaacgaattattaaaacactatgacatcctccagagggaagaaagagtaggagcagggggctatggagaataaatttctcccaattgccgcctcagatttcaaaatccagaatttgtattgtgtttcgaatcacaaacatagaattcttactgtgttggttaaagtaaaattcatttgcagttttgattttcatcaatgagctgtactttcccccatgactgtatgtagttttaataaaatcatttagagtgagtgagtgccaaccgatgttgcagaatcttttgtctaggcactccaagatgccaataagtcattttaaaatgtatgtcagagatgtaaacaaacattttggattttttttaaacagtatttatttggaatgttttcatttatctaaataactattgctattatgaattatggaaaattaatattatgtgtggcatatagtgacttcttaacacacacatcacgcaatctgcaaacccagaaaatgtgtatatctgtctttagaaattagtgtttatatcacttacagtggtttgtgaataaagaaaactggtttgtaatatcaaaaaaataaaagcttagtctgaaaagg

SEQ ID NO: 315833 - DNA, 1209 bp, Artificial Sequence
  derived and/or modified sequence
atgatcgtgcccgctgctccttatctaccaggtctcatccagggtaaccaggaggctgccgctgcaccagatactatggcacaaccatacgcatctgcccaatttgcaccaccccagaatgggatcccggctgaatatactgccccacacccgcacccagctccggagtataccggacagactaccgtgccagagcacacgctgaatctgtacccccctgcccagacacactccgaacagtcccccgctgacaccagcgctcagactgtttccggaacggccacccaaacggacgatgccgcacctacagatggccagccccagacccagccctctgagaacaccgagaataagagtcagcccaagcgtctgcacgtgtcgaacatcccatttagatttagagaccccgatttgaggcagatgttcggccagttcggcaagattctggacgttgaaataatcttcaatgagcggggaagcaaaggtttcggcttcgttacctttgagaactcagctgacgccgatagagctagagagaagctccatggtaccgtcgtagagggacgcaagattgaagtcaacaacgctacagctcgggttatgactaataaaaaaacggtcaacccgtacaccaacggctggaaactgaaccctgtggttggagccgtgtactcgccagaattttacgcaggcacagtccttttgtgtcaggctaaccaggagggcagctcaatgtattcagccccctcttccctggtctataccagcgctatgccgggattcccatatcctgccgccactgccgccgcagcatatcggggcgcccatctgcgtggacgtggacgcaccgtgtacaatacgtttagagcagccgcaccaccacccccaattcccgcatacggaggagtggtttaccaggacgggttttacggcgcagatatttacgggggctacgcggcctatagatacgcacagccaacgcccgccaccgcagcggcctactcagatagttatggaagagtgtatgctgctgacccgtaccaccacgcgctggctcccgcccccacttatggggttggtgccatgaacgcgtttgccccactgactgatgctaagactagaagtcacgctgacgacgtggggctggtactcagctctctgcaggcatccatctacaggggcggttataatagattcgcaccgtattag

SEQ ID NO: 315834 - DNA, 1209 bp, Artificial Sequence
  derived and/or modified sequence
atgattgtgcctgctgccccctacctgcccggcctcatccagggcaaccaggaggccgctgctgccccagacaccatggcccagccctatgccagcgcccagtttgccccaccccagaatggcatcccagctgagtacacagccccccacccccacccagcccctgagtacacaggccagaccaccgtgcctgagcacaccctgaacctgtaccccccagcccagacccacagcgagcagagccctgctgacaccagcgcccagacagtgtctggaacagccacccagacagatgatgctgcccccacagatggccagccccagacccagcccagtgaaaatacagagaacaagagccagcccaagaggctgcacgtgagcaacatccccttccgcttccgggaccctgacctgcggcagatgtttggccagtttgggaagatcctggatgtggagatcatcttcaatgaaagaggcagcaaaggatttggatttgtgacctttgaaaattctgcagatgctgaccgggcccgggagaagctgcacggcaccgtggtggagggcaggaagattgaggtgaacaatgccacagcccgggtgatgaccaacaagaagacagtgaacccctacaccaacggctggaagctgaaccctgtggtgggcgctgtgtacagccctgagttctacgccggcaccgtgctgctgtgccaggccaaccaggagggcagctccatgtacagcgcccccagcagcctggtgtacaccagcgccatgcctggcttcccctacccagctgccacagctgctgctgcctacagaggagcccacctgcggggccggggccgcacagtgtacaacaccttccgggctgctgcccctcctccacccatcccagcctacggcggcgtggtgtaccaggacggcttctacggggctgacatctatggaggctatgctgcctaccgctatgcccagcccaccccagccacagctgctgcctacagcgacagctatggccgggtgtatgctgctgacccctaccaccacgccctggccccagcccccacctatggagtgggcgccatgaatgcctttgcccccctgacagatgccaagaccaggagccatgctgatgatgtgggcctggtgctgagcagcctgcaggccagcatctaccggggcggctacaacagatttgccccctactag

SEQ ID NO: 315835 - DNA, 1209 bp, Artificial Sequence
  derived and/or modified sequence
atgatcgtgcccgccgccccctacctgcccggcctgatccagggcaatcaggaggccgcggccgcacccgacacgatggctcaaccatacgcgtccgcacagttcgcaccaccacaaaacggaattcccgccgagtataccgcaccgcacccccatcctgctcctgaatacactgggcagaccacggtgccagaacacactttaaatctgtacccacctgctcaaactcatagtgaacagtccccagccgacactagcgcccagacagtatctggtacagcaacccagacagacgacgccgccccaaccgacggccagcctcaaacgcagccttccgagaatacagaaaacaaaagccagcccaagcgcctgcacgtgagcaatatccccttcaggttccgagaccccgatcttaggcagatgttcggccagttcggtaaaattttggacgtggagattattttcaatgagagaggatccaagggatttggcttcgtaacgtttgaaaacagcgccgatgccgaccgagcgcgcgagaaactgcatggcaccgttgtagaggggcgaaaaattgaggttaataatgccacagcacgtgtaatgaccaacaaaaagaccgtgaatccttacaccaatggttggaagctgaatccagtggtcggagctgtgtattcaccagagttctacgccggcactgtactcttgtgccaggccaatcaagagggatcatctatgtacagcgcaccatcatcactcgtatacacttcagccatgcccggttttccttacccagctgctaccgcagccgcagcttatcgaggggcccacctgagagggagagggcggaccgtctataatacctttagagcggccgctccccccccgcccatcccagcatatggcggcgtagtttatcaggatggattctacggggcagacatatatggcggctacgccgcgtatcgatatgcccagcctactccagcgactgccgctgcgtactcagactcatacggccgcgtttacgctgccgatccatatcatcacgccctggctcccgctcctacttacggggtaggtgccatgaacgctttcgcgcctctaacggacgccaagacaaggtcccacgcagacgatgtgggcctggtgcttagctccctccaggcgtccatatataggggcggctataaccggttcgccccatattag

SEQ ID NO: 315836 - DNA, 1209 bp, Artificial Sequence
  derived and/or modified sequence
atgatagttcctgccgcaccgtatctgcccggacttattcagggaaatcaggaagctgcagctgcccctgacacgatggcacagccatatgctagcgcccaattcgcccctcctcaaaacggcataccagctgaatatacagcaccgcatccccaccctgcccctgagtacaccggccagacaactgtacctgaacacacccttaacctatatccacctgcccagactcattccgaacagagtccagccgatacctcagcccagacagtttcaggcaccgctacacagaccgacgatgccgcaccaactgatggccaaccgcagactcagcctagtgagaatacggaaaacaaatctcaaccaaagagactgcacgtatctaacattccttttcgatttcgggatcctgacctccggcagatgtttgggcagttcggaaaaattctggatgtcgagattatcttcaacgaaagagggagtaaagggttcggttttgtaaccttcgaaaactctgccgatgcagatagagcgagggagaagttacacggaacagtagtcgaggggagaaagattgaggtcaataatgctactgccagagtgatgactaacaagaagacagtgaatccatatacaaatggctggaaactgaacccagtagtgggggcagtttattcgccagagttctatgcagggaccgtgctgctctgccaggccaatcaggaaggttcttccatgtattccgctccatcctcgctcgtgtacacgtcagctatgccagggttcccgtaccctgcggcaacagcagctgcagcttaccgcggagcgcatctgcgcggacggggacgcaccgtctacaatacattcagagctgccgctccgccacccccaattcctgcgtacgggggagtcgtgtaccaagatgggttttacggggctgatatctacggcggttatgcagcttaccggtacgcacaaccaaccccggcaacagctgccgcatactcagactcctacgggagggtatacgctgcagacccgtaccatcacgcacttgccccagcaccgacctacggagtaggcgcaatgaatgcgttcgccccattgacagatgccaagacaaggagccacgccgacgacgtgggccttgtgttgagctctcttcaggccagcatctacagaggtggctacaacagatttgctccctactag

SEQ ID NO: 315837 - DNA, 1209 bp, Artificial Sequence
  derived and/or modified sequence
atgatcgtgcccgccgccccctacctgcccggcctgatccagggcaaccaggaggccgccgccgcccccgacaccatggcccagccctacgccagcgcccagttcgcccccccccagaacggcatccccgccgagtacaccgccccccacccccaccccgcccccgagtacaccggccagaccaccgtgcccgagcacaccctgaacctgtacccccccgcccagacccacagcgagcagagccccgccgacaccagcgcccagaccgtgagcggcaccgccacccagaccgacgacgccgcccccaccgacggccagccccagacccagcccagcgagaacaccgagaacaagagccagcccaagagactgcacgtgagcaacatccccttcagattcagagaccccgacctgagacagatgttcggccagttcggcaagatcctggacgtggagatcatcttcaacgagagaggcagcaagggcttcggcttcgtgaccttcgagaacagcgccgacgccgacagagccagagagaagctgcacggcaccgtggtggagggcagaaagatcgaggtgaacaacgccaccgccagagtgatgaccaacaagaagaccgtgaacccctacaccaacggctggaagctgaaccccgtggtgggcgccgtgtacagccccgagttctacgccggcaccgtgctgctgtgccaggccaaccaggagggcagcagcatgtacagcgcccccagcagcctggtgtacaccagcgccatgcccggcttcccctaccccgccgccaccgccgccgccgcctacagaggcgcccacctgagaggcagaggcagaaccgtgtacaacaccttcagagccgccgccccccccccccccatccccgcctacggcggcgtggtgtaccaggacggcttctacggcgccgacatctacggcggctacgccgcctacagatacgcccagcccacccccgccaccgccgccgcctacagcgacagctacggcagagtgtacgccgccgacccctaccaccacgccctggcccccgcccccacctacggcgtgggcgccatgaacgccttcgcccccctgaccgacgccaagaccagaagccacgccgacgacgtgggcctggtgctgagcagcctgcaggccagcatctacagaggcggctacaacagattcgccccctactag

SEQ ID NO: 315838 - DNA, 636 bp, Artificial Sequence
  derived and/or modified sequence
atgctgcggcagagctgcagcttccctgtgaccagcctgcctgccctgggcggcgtgtgtggccgggagggcgctggagctgaggtgcccccagctgcctgtggctgtgagggccgggaccctgacacagagaggagctgtggccgcagcagcactggaggctgcagcccctgcagcggccctggccccagcagccccaggaccagcagaggagccctgagccccagcctgggccgcctcttcccccacctgcaggtggtgatcaagctgcgcatccagctggccccagctgtgcacctggccctgcccacctgcagcctgctgaccagcagcccccccctggagggctgctgccaccggctgaatgaggaggccgaggtgcagaggggcttccggcccatcgctgtggagctggagtttgagaaccagcccctgggcgctgagacccggctgagaaatggaagaagagctggggtgaagaggtctgagggccggggccaggtgcggcccggccaggtgcgcagcacaggccctgagggcggcctgaccaggatggagaggaaggccgcccggctgcagtgggacagcggcagcatcaagatgtctgaaaatgagcagctgtgggaggagccctag

SEQ ID NO: 315839 - protein, 485 aa, Artificial Sequence
  derived and/or modified sequence
MRDNRAVSLCQQEWMCPGPAQRALYRGATQRKDSHVSLATGVPWGYEETKTLLAILSSSQFYGKLQTCQQNSQIYRAMAEGLWEQGFLRTPEQCRTKFKSLQLSYRKVRRGRVPEPCIFYEEMNALSGSWASAPPMASDAVPGQEGSDIEAGELNHQNGEPTEVEDGTVDGADRDEKDFRNPGQEVRKLDLPVLFPNRLGFEFKNEIKKENLKWDDSEEVEINKALQRKSRGVYWHSELQKGLESEPTSRRQCRNSPGESEEKTPSQEKMSHQSFCARDKACTHILCGKNCSQSVHSPHKPALKLEKVSQCPECGKTFSRSSYLVRHQRIHTGEKPHKCSECGKGFSERSNLTAHLRTHTGERPYQCGQCGKSFNQSSSLIVHQRTHTGEKPYQCIVCGKRFNNSSQFSAHRRIHTGESPYKCAVCGKIFNNSSHFSAHRKTHTGEKPYRCSHCERGFTKNSALTRHQTVHMKAVLSSQEGRDAL

SEQ ID NO: 315840 - protein, 697 aa, Artificial Sequence
  derived and/or modified sequence
MMAAVKSTEAHPSSNKDPTQGQKSALQGNSPDSEASRQRFRQFCYQEVTGPHEAFSKLWELCCQWLRPKTHSKEEILELLVLEQFLTILPEEIQTWVREQHPENGEEAVALVEDVQRAPGQQVLDSEKDLKVLMKEMAPLGATRESLRSQWKQEVQPEEPTFKGSQSSHQRPGEQSEAWLAPQAPRNLPQNTGLHDQETGAVVWTAGSQGPAMRDNRAVSLCQQEWMCPGPAQRALYRGATQRKDSHVSLATGVPWGYEETKTLLAILSSSQFYGKLQTCQQNSQIYRAMAEGLWEQGFLRTPEQCRTKFKSLQLSYRKVRRGRVPEPCIFYEEMNALSGSWASAPPMASDAVPGQEGSDIEAGELNHQNGEPTEVEDGTVDGADRDEKDFRNPGQEVRKLDLPVLFPNRLGFEFKNEIKKENLKWDDSEEVEINKALQRKSRGVYWHSELQKGLESEPTSRRQCRNSPGESEEKTPSQEKMSHQSFCARDKACTHILCGKNCSQSVHSPHKPALKLEKVSQCPECGKTFSRSSYLVRHQRIHTGEKPHKCSECGKGFSERSNLTAHLRTHTGERPYQCGQCGKSFNQSSSLIVHQRTHTGEKPYQCIVCGKRFNNSSQFSAHRRIHTGESPYKCAVCGKIFNNSSHFSAHRKTHTGEKPYRCSHCERGFTKNSALTRHQTVHMKAVLSSQEGRDAL

SEQ ID NO: 315841 - protein, 256 aa, Artificial Sequence
  derived and/or modified sequence
MAAVKSTEAHPSSNKDPTQGQKSALQGNSPDSEASRQRFRQFCYQEVTGPHEAFSKLWELCCQWLRPKTHSKEEILELLVLEQFLTILPEEIQTWVREQHPENGEEAVALVEDVQRAPGQQVLDSEKDLKVLMKEMAPLGATRESLRSQWKQEVQPEEPTFKGSQSSHQRPGEQSEAWLAPQAPRNLPQNTGLHDQETGAVVWTAGSQGPAMRDNRAVSLCQQEWMCPGPAQRALYRGATQRKDSHVSLATGALGL

SEQ ID NO: 315842 - protein, 408 aa, Artificial Sequence
  derived and/or modified sequence
MAEGLWEQGFLRTPEQCRTKFKSLQLSYRKVRRGRVPEPCIFYEEMNALSGSWASAPPMASDAVPGQEGSDIEAGELNHQNGEPTEVEDGTVDGADRDEKDFRNPGQEVRKLDLPVLFPNRLGFEFKNEIKKENLKWDDSEEVEINKALQRKSRGVYWHSELQKGLESEPTSRRQCRNSPGESEEKTPSQEKMSHQSFCARDKACTHILCGKNCSQSVHSPHKPALKLEKVSQCPECGKTFSRSSYLVRHQRIHTGEKPHKCSECGKGFSERSNLTAHLRTHTGERPYQCGQCGKSFNQSSSLIVHQRTHTGEKPYQCIVCGKRFNNSSQFSAHRRIHTGESPYKCAVCGKIFNNSSHFSAHRKTHTGEKPYRCSHCERGFTKNSALTRHQTVHMKAVLSSQEGRDAL

SEQ ID NO: 315843 - DNA, 3044 bp, Artificial Sequence
  derived and/or modified sequence
gtaatgggcggagcgaatcgcgccgctgacttccggcccggaggctgagggagaatgtttgataggtttatattgtctttttccatcctcttcagacatccttcaaagttgagccctttttttccgctgtgagtctctacacatgtctgacactctcatgtcccacggattacagaaagacattccttgcaggagaacatggcttcccagtgatgtgggaaagatggactctgatctccagggtagaagtggcaaccagagtaagccagttcgttgaagcaaatgatggctgcagtgaagagtaccgaggcacacccatcctcaaacaaggatcccacacagggccagaaatcagccctccagggtaacagccctgactccgaggcctcccgtcagcgcttcaggcagttttgctaccaggaggtaactggcccacatgaagcttttagcaaactctgggaactctgttgtcagtggctgaggccgaagacccactcaaaagaggaaatcctggagctgctggttttggagcagtttctgactatcttgccagaggagatccagacctgggtgagggagcagcatccagaaaacggcgaggaagctgtggctctggttgaggatgtacagagagctcctggacaacagcctggcttgctcctcaggctcccaggaacctgcctcaaaacacaggtctccacgaccaggagacaggtgctgtggtctggacagctgggtcccaggctagagtggtgctattttatcggtagcagcagctccagtgttgttacagggaccagccatgcgtgacaacagagctgtatccctctgtcagcaagaatggatgtgcccaggccctgcacaaagggccctctacaggggtgccacccagaggaaggacagtcacgtctcgctggcaacaggtgtgccctggggctatgaagagaccaagacgctcctggctattcttagtagttctcaattttatggaaaactccagacctgtcagcagaacagccagatctacagggccatggcggaaggactctgggagcagggttttctgcggaccccagaacagtgtcgcaccaagttcaaaagcctacagttgagttaccgcaaagtgaggagaggccgtgtgcctgagccttgtatcttttatgaggaaatgaatgctctttcaggctcctgggcctctgcacctcctatggcaagcgatgctgttcctggccaagaaggaagtgatattgaggctggagagctgaatcaccagaatggggaacccacggaggtagaagatggcactgtggatggtgcagacagggatgaaaaggacttcaggaatcctggccaggaagtcaggaaactagacctgccagtgctgttcccaaacagacttggttttgagttcaagaacgagattaaaaaagaaaatctaaaatgggatgattcagaggaagtagaaataaacaaggctttacagagaaagtccagaggagtttattggcactctgagctacaaaaaggcttggagagtgagccaacatcaagaaggcaatgtagaaattctccaggggagagtgaggagaaaaccccatcccaggagaagatgagtcaccagagtttttgtgccagggacaaagcctgtacacatatcctctgtgggaaaaactgctctcagagtgtgcactctccccacaagccagcgctcaaactggaaaaagtatctcaatgtcctgaatgtgggaaaacctttagccgaagttcttatcttgttcggcatcaaagaatccacacaggcgagaagcctcacaagtgcagtgagtgcgggaagggctttagtgagcgctccaacctcactgcccacctacgaactcacacaggggagaggccctatcagtgtgggcaatgtgggaaaagcttcaaccagagttccagcctcattgtccaccagaggacccataccggggaaaagccttaccagtgcattgtctgtggaaagagattcaacaacagttcccagttcagtgctcaccggcgcatccacactggggagagcccatacaagtgtgcagtgtgtgggaaaatcttcaacaatagctcccacttcagtgcccaccgaaaaacccacactggtgaaaagccttacaggtgttctcactgtgagagaggcttcactaagaactctgccctcacccgtcatcagacagtacacatgaaagcagtactctcatcacaggaaggaagagatgcgttatgagtgtgtcggtaaactgtcagattaagttcctcaggtcagcatgtatgagctttcttctgctgtggagagatctagccagtccctgactttgcaacagacctactgactactggatcttaagacccatgtctaggaccaggagtcagcataaggacgctgacctctcctggctgtgcctgtgactccagagtcctatcttactgtgacttaaagtttgatggagagaaagctgtaggatccataaattctaccaggaaaccagggtcttcctgttcctagcactgagaatgggcacccagtggtccaagaacactttctgggctaacatagtcctcacacagggctgagaaagaaagtgtctcctttcctggaaagcacatgtaaaagttaagggcctgaatctcttctaaaccaataattgacctctaggcacccaccgtaatactgctaccttcagggcagaagacactgctctttgtaacccagccaccaccaaaaagcaaacagaaagaaggaaggatggttaagccattggataatactgaatctgtttccctaagtgacttaaccttagagcaagcacaacatccaggttaattttttgtaagatttctccttttattattgccctcatcatagttcctgattgtctcttaaagtaagtggtttatagacattactatttctgataataatttacaaactactataaacaaatttataaacattactaatttctgatgaaaataaagttgtttctccctccaaaaaaaaaaaaaaaaaa

SEQ ID NO: 315844 - DNA, 2094 bp, Artificial Sequence
  derived and/or modified sequence
atgatggccgccgtgaagagcaccgaggcccaccccagcagcaacaaggaccccacccagggccagaagagcgccctgcagggcaacagccccgacagcgaggccagcagacagagattcagacagttctgctaccaggaggtgaccggcccccacgaggccttcagcaagctgtgggagctgtgctgccagtggctgagacccaagacccacagcaaggaggagatcctggagctgctggtgctggagcagttcctgaccatcctgcccgaggagatccagacctgggtgagagagcagcaccccgagaacggcgaggaggccgtggccctggtggaggacgtgcagagagcccccggccagcaggtgctggacagcgagaaggacctgaaggtgctgatgaaggagatggcccccctgggcgccaccagagagagcctgagaagccagtggaagcaggaggtgcagcccgaggagcccaccttcaagggcagccagagcagccaccagagacccggcgagcagagcgaggcctggctggccccccaggcccccagaaacctgccccagaacaccggcctgcacgaccaggagaccggcgccgtggtgtggaccgccggcagccagggccccgccatgagagacaacagagccgtgagcctgtgccagcaggagtggatgtgccccggccccgcccagagagccctgtacagaggcgccacccagagaaaggacagccacgtgagcctggccaccggcgtgccctggggctacgaggagaccaagaccctgctggccatcctgagcagcagccagttctacggcaagctgcagacctgccagcagaacagccagatctacagagccatggccgagggcctgtgggagcagggcttcctgagaacccccgagcagtgcagaaccaagttcaagagcctgcagctgagctacagaaaggtgagaagaggcagagtgcccgagccctgcatcttctacgaggagatgaacgccctgagcggcagctgggccagcgccccccccatggccagcgacgccgtgcccggccaggagggcagcgacatcgaggccggcgagctgaaccaccagaacggcgagcccaccgaggtggaggacggcaccgtggacggcgccgacagagacgagaaggacttcagaaaccccggccaggaggtgagaaagctggacctgcccgtgctgttccccaacagactgggcttcgagttcaagaacgagatcaagaaggagaacctgaagtgggacgacagcgaggaggtggagatcaacaaggccctgcagagaaagagcagaggcgtgtactggcacagcgagctgcagaagggcctggagagcgagcccaccagcagaagacagtgcagaaacagccccggcgagagcgaggagaagacccccagccaggagaagatgagccaccagagcttctgcgccagagacaaggcctgcacccacatcctgtgcggcaagaactgcagccagagcgtgcacagcccccacaagcccgccctgaagctggagaaggtgagccagtgccccgagtgcggcaagaccttcagcagaagcagctacctggtgagacaccagagaatccacaccggcgagaagccccacaagtgcagcgagtgcggcaagggcttcagcgagagaagcaacctgaccgcccacctgagaacccacaccggcgagagaccctaccagtgcggccagtgcggcaagagcttcaaccagagcagcagcctgatcgtgcaccagagaacccacaccggcgagaagccctaccagtgcatcgtgtgcggcaagagattcaacaacagcagccagttcagcgcccacagaagaatccacaccggcgagagcccctacaagtgcgccgtgtgcggcaagatcttcaacaacagcagccacttcagcgcccacagaaagacccacaccggcgagaagccctacagatgcagccactgcgagagaggcttcaccaagaacagcgccctgaccagacaccagaccgtgcacatgaaggccgtgctgagcagccaggagggcagagacgccctgtag

SEQ ID NO: 315845 - DNA, 771 bp, Artificial Sequence
  derived and/or modified sequence
atggccgccgtgaagagcaccgaggcccaccccagcagcaacaaggaccccacccagggccagaagagcgccctgcagggcaacagccccgacagcgaggccagcagacagagattcagacagttctgctaccaggaggtgaccggcccccacgaggccttcagcaagctgtgggagctgtgctgccagtggctgagacccaagacccacagcaaggaggagatcctggagctgctggtgctggagcagttcctgaccatcctgcccgaggagatccagacctgggtgagagagcagcaccccgagaacggcgaggaggccgtggccctggtggaggacgtgcagagagcccccggccagcaggtgctggacagcgagaaggacctgaaggtgctgatgaaggagatggcccccctgggcgccaccagagagagcctgagaagccagtggaagcaggaggtgcagcccgaggagcccaccttcaagggcagccagagcagccaccagagacccggcgagcagagcgaggcctggctggccccccaggcccccagaaacctgccccagaacaccggcctgcacgaccaggagaccggcgccgtggtgtggaccgccggcagccagggccccgccatgagagacaacagagccgtgagcctgtgccagcaggagtggatgtgccccggccccgcccagagagccctgtacagaggcgccacccagagaaaggacagccacgtgagcctggccaccggcgccctgggcctgtag

SEQ ID NO: 315846 - DNA, 2094 bp, Artificial Sequence
  derived and/or modified sequence
atgatggccgccgtgaaatctacagaagctcacccttcgtcgaataaggaccctactcaaggacagaaatcggccttgcagggtaattctccggactctgaggccagccgacagaggtttcgtcagttttgttaccaggaagtgacaggacctcacgaagccttcagcaagttatgggaactgtgctgccagtggctccgccctaagactcactctaaggaggaaattctcgaacttctggtgctagaacagttcctaacgattcttcctgaggagattcagacttgggttagagaacagcatccagagaacggggaagaggcggtcgctctcgtcgaggacgtgcaacgggcccctggtcaacaggttctggatagtgagaaagatctgaaagtcttaatgaaggaaatggcccctcttggggccactcgggagtcgcttcgcagccaatggaaacaggaagtgcagcctgaagagcctacctttaagggttctcagagttcccaccagagacccggagaacagagcgaggcctggctggcaccccaagcaccacgaaacctccctcagaataccggtctgcacgatcaggagactggggccgttgtctggacagctggctctcaaggcccagctatgagagataacagggcagtgtcgctgtgtcaacaggaatggatgtgcccaggcccggctcagcgagccctatataggggagcgactcagcggaaagattcccacgtgtccctggcaactggggtgccttggggctacgaagaaacaaaaacccttcttgccatcttaagctcgtcccaattctatggcaagttgcagacatgtcaacaaaactcgcaaatttatcgtgcaatggccgagggcttgtgggagcaggggttcctgcggacaccggagcaatgccgcactaagtttaaaagcctccaactgtcttaccgcaaagtgaggaggggccgggtgccggaaccatgcatcttttatgaggagatgaatgcattgtcaggctcctgggcctccgccccgccaatggctagcgacgctgtacccggtcaggaaggatcagacattgaggccggagagctcaatcaccagaatggggagccgacagaagtggaggacggtaccgtcgatggagccgacagggacgaaaaggacttccggaatccgggccaggaggtgagaaagctagatttaccagtcctgttccccaatcgtctggggttcgagtttaagaatgagataaaaaaagaaaacctcaagtgggatgatagcgaagaggtggaaattaataaggccctccagcgcaagtcccgcggcgtgtactggcactccgaactccagaaggggctggaatcagaacctacctcaaggaggcagtgcagaaactcgcccggagagtctgaagaaaagaccccctctcaagaaaagatgagccaccaatcattttgcgcacgcgacaaagcttgcacacacatcctttgtggaaagaattgttcccagtccgtccacagccctcataagccagccctgaaactggaaaaggtgtctcagtgccccgagtgtggcaagacattctcacgcagctcctatctcgtgcggcatcagcggattcatacgggggagaagcctcacaagtgttctgaatgtggtaaagggttcagcgagcgatccaacctgacagcccatctgagaacccatactggcgagcgcccctaccaatgtggacagtgtggaaagtccttcaatcagtcgagctcccttattgtccaccaaagaactcataccggcgaaaaaccctatcagtgtattgtgtgcggcaaacgcttcaacaatagctcccagttcagtgcacacaggcgcattcacaccggggaatcaccctacaagtgtgctgtgtgcgggaagatatttaataactcttctcacttcagtgcacatcgcaaaacacacacgggcgaaaaaccatacaggtgctcccactgcgaacgaggattcacaaaaaattctgccctaactcgccaccagaccgtgcacatgaaagcagtcctgtctagtcaagaaggaagggatgctctgtag

SEQ ID NO: 315847 - DNA, 2094 bp, Artificial Sequence
  derived and/or modified sequence
atgatggccgctgtcaaatctaccgaggcacaccccagctccaataaggatcccacacagggacaaaaaagtgcgttgcaggggaacagtccagacagcgaagcctcccgacagcggttccgccagttttgctaccaagaggtgaccggaccgcacgaggcattcagcaagttatgggagctgtgttgccagtggctgcgtccaaaaacccactctaaagaggaaatcctggaactgctcgtcctcgagcagtttctgaccattctaccagaggaaatacagacgtgggtgcgggagcagcaccccgagaacggagaagaagccgtggctctcgtggaggatgtgcagcgggcccccgggcagcaggtcctggattcagaaaaagatctgaaagtgcttatgaaggagatggcgccactcggtgctaccagagagtctctacgaagccagtggaagcaagaggttcaacccgaagagccgacattcaaaggttctcaatcctctcaccagcgacctggggagcagagcgaggcctggctggcccctcaggctccccgaaacctacctcagaacacaggactgcacgatcaagagaccggggcagtggtgtggaccgcaggaagccagggcccagccatgcgtgacaacagggccgtttccctgtgccaacaagagtggatgtgcccaggtccagctcagagagctttataccgtggggcaacccagaggaaggactctcatgtaagtttggccacgggcgttccctgggggtatgaggagaccaaaactctgttagctatactatctagcagtcagttctacggcaaacttcagacctgtcaacaaaactcccagatctaccgggctatggccgaaggcctgtgggagcaaggcttcctgcggacgcccgaacagtgcaggacaaaatttaaatccctccagttgtcatatagaaaagtccgaagaggccgagtgccagagccatgtatcttttatgaggaaatgaacgccctgtccggtagttgggcctccgccccgcctatggcttcagacgccgtcccaggccaggaagggtctgacattgaggcaggggagctgaatcatcagaacggcgagcccacagaggtagaggacggcactgtcgatggggccgaccgcgacgaaaaggatttcagaaacccaggtcaggaagtaagaaagttggatctgcccgtcctcttccctaaccgcttggggtttgagtttaaaaacgaaatcaagaaggagaacctcaaatgggacgattcagaagaggtggagattaataaagccttgcagcgaaagtcccgcggggtttactggcacagtgagttgcaaaaagggttagagagtgagcccacaagtcgaagacaatgtcgcaacagtcctggagaaagtgaggagaaaacccctagccaggagaagatgagccatcagtcgttttgcgctcgcgataaagcctgtacccacatcctgtgtggaaagaattgctctcagtccgtgcatagtccacacaaacctgcgctgaagttggagaaagtcagtcagtgtccagagtgtggaaaaacttttagtcggtcttcctatctggtgaggcaccagcgcatccacacaggcgaaaaaccccataagtgcagtgagtgtggtaaggggttctctgaacgctccaaccttactgcacatcttaggacccatacaggagagaggccttaccagtgcggtcaatgcgggaagagcttcaaccagtcctcctctctaatagtacatcagcggacacacacaggtgagaagccatatcagtgtatcgtgtgtgggaagcggttcaataacagttcccaatttagcgcccataggcggattcataccggcgagtcgccatacaagtgtgcagtgtgtggaaagatattcaataacagctcacatttcagtgcccataggaagacgcacaccggcgagaagccctacaggtgtagtcattgcgagcggggattcaccaagaattctgccctaacgaggcaccagactgtccacatgaaggctgttttatcaagccaggaaggacgtgacgcattgtag

SEQ ID NO: 315848 - DNA, 771 bp, Artificial Sequence
  derived and/or modified sequence
atggccgccgttaaatcaaccgaggcgcacccatcttcaaacaaagaccccactcagggacagaaaagcgcacttcaggggaactctccagattcagaagcaagccgccagcgatttcgacagttctgctatcaagaggttacagggccgcacgaagccttctccaagttgtgggagttgtgttgccaatggctcagacctaagactcacagtaaggaggagattctggagctgctggtgttagagcaattcctgaccatattgccggaggaaatccaaacctgggtcagagagcaacaccctgaaaatggcgaggaagctgtggcactagtagaggacgtgcagagagcacctggccaacaggtcctcgactccgaaaaagacctgaaagtgttaatgaaggaaatggcccctctgggagctaccagggagtcactgcgtagccaatggaaacaggaggtgcagccagaggagcccacatttaagggaagccagtcaagccaccaacggcccggtgagcagtcagaggcctggctggcgcctcaggccccgcgaaacctccctcagaacaccggtctacatgatcaggagactggggcagtggtgtggacagccggctcgcagggtcccgccatgcgagacaatcgagcagtgagtttatgtcagcaggagtggatgtgccctggcccagctcagcgagccttgtataggggcgcaacccaaaggaaagactcccacgtatccttagctacgggagccctgggcctatag

SEQ ID NO: 315849 - DNA, 2094 bp, Artificial Sequence
  derived and/or modified sequence
atgatggctgctgtgaagagcacagaggcccaccccagcagcaacaaggaccccacccagggccagaagagcgccctgcagggcaacagcccagattctgaggccagccggcagcgcttccggcagttctgctaccaggaggtgacaggcccccatgaggccttcagcaagctgtgggagctgtgctgccagtggctgcggcccaagacccacagcaaggaggagatcctggagctgctggtgctggagcagttcctgaccatcctgcctgaggagatccagacctgggtgcgggagcagcacccagaaaatggagaggaggccgtggccctggtggaggatgtgcagagggcccctggccagcaggtgctggacagcgagaaggacctgaaggtgctgatgaaggagatggcccccctgggcgccacccgggagagcctgcggagccagtggaagcaggaggtgcagcctgaggagcccaccttcaagggcagccagagcagccaccagaggcctggagagcagagcgaggcctggctggccccccaggcccccaggaacctgccccagaacacaggcctgcatgaccaggagactggagctgtggtgtggacagctggcagccagggccctgccatgagggacaacagagctgtgtccctgtgccagcaggagtggatgtgccccggccctgcccagagggccctgtacagaggagccacccagaggaaggacagccacgtgtccctggccaccggggtgccctggggctatgaggagaccaagaccctgctggccatcctgagcagcagccagttctacggcaagctgcagacctgccagcagaacagccagatctaccgggccatggccgagggcctgtgggagcagggcttcctgcggaccccagagcagtgcaggaccaagttcaagagcctgcagctgagctacaggaaggtgagaagaggccgggtgcctgagccctgcatcttctatgaggagatgaatgccctgagcggctcctgggccagcgccccacccatggccagtgatgctgtgcccggccaggagggcagtgacattgaagctggggagctgaaccaccagaatggagagcccacagaggtggaggatggcaccgtggatggagctgacagagatgagaaggacttcaggaaccctggccaggaggtgaggaagctggacctgcctgtgctcttccccaaccggctgggctttgagttcaagaatgagatcaagaaggagaacctgaagtgggatgattctgaggaggtggagatcaacaaggccctgcagaggaagagccggggcgtgtactggcacagcgagctgcagaagggcctggagagcgagcccaccagccggcggcagtgcaggaacagccctggagagagcgaggagaagacccccagccaggagaagatgagccaccagagcttctgtgcccgggacaaggcctgcacccacatcctgtgtgggaagaactgcagccagagcgtgcacagcccccacaagccagccctgaagctggagaaggtgtcccagtgcccagaatgtgggaagaccttcagccgcagcagctacctggtgcgccaccagaggatccacactggagagaagccccacaagtgcagtgaatgtgggaagggcttcagcgagaggagcaacctgacagcccacctgcggacccacactggagagcggccctaccagtgtggccagtgtgggaagagcttcaaccagagcagcagcctgattgtgcaccagaggacccacactggagagaagccctaccagtgcatcgtgtgtgggaagcgcttcaacaacagcagccagttcagcgcccaccggcgcatccacactggagagagcccctacaagtgtgctgtgtgtgggaagatcttcaacaacagcagccacttcagcgcccacaggaagacccacactggagagaagccctaccgctgcagccactgtgagcggggcttcaccaagaacagcgccctgaccaggcaccagacagtgcacatgaaggctgtgctgagcagccaggagggcagagatgccctgtag

SEQ ID NO: 315850 - DNA, 771 bp, Artificial Sequence
  derived and/or modified sequence
atggctgctgtgaagagcacagaggcccaccccagcagcaacaaggaccccacccagggccagaagagcgccctgcagggcaacagcccagacagcgaggccagccggcagcgcttccggcagttctgctaccaggaggtgacaggcccccatgaggccttcagcaagctgtgggagctgtgctgccagtggctgcggcccaagacccacagcaaggaggagatcctggagctgctggtgctggagcagttcctgaccatcctgcctgaggagatccagacctgggtgcgggagcagcacccagaaaatggagaggaggccgtggccctggtggaggatgtgcagagggcccctggccagcaggtgctggacagcgagaaggacctgaaggtgctgatgaaggagatggcccccctgggcgccacccgggagagcctgcggagccagtggaagcaggaggtgcagcctgaggagcccaccttcaagggcagccagagcagccaccagaggcctggagagcagagcgaggcctggctggccccccaggcccccaggaacctgccccagaacacaggcctgcatgaccaggagaccggggctgtggtgtggacagctggcagccagggccctgccatgagggacaacagagctgtgtccctgtgccagcaggagtggatgtgccccggccctgcccagagggccctgtacagaggagccacccagaggaaggacagccacgtgtccctggccactggagccctgggcctgtag

SEQ ID NO: 315851 - DNA, 2094 bp, Artificial Sequence
  derived and/or modified sequence
atgatggccgccgtgaagagcaccgaggcccaccccagcagcaacaaagatcctacacagggtcaaaagtcggccctacagggaaatagtcccgactctgaagcctcacgtcaacggtttcgccagttctgttatcaagaagtgaccggaccccacgaagcatttagcaagctgtgggagttgtgttgtcagtggctgcggcccaaaactcacagcaaagaagagattcttgagctgttggtcctggagcagtttctgactatcctgcccgaagagatacagacctgggtacgagagcaacatcccgaaaacggtgaggaggccgttgccttggtcgaggacgtgcagcgggcaccgggtcagcaagtgctagactccgaaaaggacctcaaggtgctcatgaaggaaatggcaccacttggcgcaacacgggaaagcctaaggagccagtggaagcaggaagttcagcctgaagaaccaactttcaaggggtcacagagctcccaccagcgccctggcgagcagtctgaagcttggttggcaccacaggctccacgtaatctgcctcagaacactggacttcatgatcaggagacaggcgctgtggtgtggacggccgggagccaaggcccagcgatgcgagataatcgtgccgtctcgctgtgtcaacaggaatggatgtgtcccgggcctgcacagagagccctgtatcgcggcgctacccaacgtaaagattcacatgtcagtctggccaccggagtgccttgggggtatgaagagacaaagacccttctggcaatccttagtagctcccagttttacgggaaattgcagacctgtcagcagaatagccagatctaccgggcaatggcagagggcctgtgggaacagggtttcctgagaacaccagagcagtgcagaaccaagtttaagtcattacagctaagttaccggaaagtcagacgcggacgggttcccgaaccttgcattttctatgaagaaatgaatgctttgtccggctcgtgggcctctgcccctccgatggcctccgatgctgtgcctggacaagagggcagtgacatcgaggcaggcgagctgaaccatcagaacggggagccgaccgaggtggaagatggcactgtggacggcgccgatcgcgacgaaaaggatttccgtaaccccgggcaggaggtgaggaagctggacctgcctgtgctcttccccaaccgacttgggttcgaattcaagaacgagattaaaaaggagaaccttaagtgggatgattccgaggaagtggaaattaacaaagccctgcagcgcaagtcgagaggggtatactggcacagcgaactccagaaaggcctggaaagcgagcccaccagccgccggcagtgccgcaacagtccaggcgaatccgaagagaagactccctcccaagaaaaaatgagccatcagtcattctgcgctagggacaaggcctgcacacacatattatgtggcaaaaactgcagtcaatctgtccattcacctcataagcccgctctgaagcttgagaaggtcagccagtgccctgagtgcggcaagacattctcccgcagctcatatttagtgcggcaccagcggattcatacgggcgagaaaccccataagtgttctgagtgcggaaagggattttctgaaagatcgaacctcactgcacacctgaggacccatacaggtgaacggccctatcagtgtggccagtgcgggaaatctttcaatcaatcttcatccttaatcgtacaccagcgcactcatactggtgaaaaaccgtaccagtgtatcgtctgcggaaagagattcaataactcgagccagttttccgcacatcgccggatccatactggggaaagcccatacaagtgcgcggtgtgtgggaagattttcaacaatagctcccacttttcagctcacaggaaaacccacacgggagagaaaccatatcggtgttctcattgcgagagggggttcacaaaaaatagcgccttgacgcgccatcagacggttcatatgaaggccgtgctctcttctcaggaaggccgggacgctctgtag

SEQ ID NO: 315852 - DNA, 2094 bp, Artificial Sequence
  derived and/or modified sequence
atgatggccgccgtgaagagcaccgaggcccaccccagcagcaacaaggatcctacccaaggccagaagagcgctttacagggcaacagcccagattcagaggcctctcggcagcggtttagacagttctgctatcaagaagtgaccggtcctcacgaggccttctcaaagctgtgggaactgtgttgccagtggctgcgccctaaaacccattctaaagaggagatcctggaacttttagtgctggaacagtttctcaccatccttcccgaggaaatccagacctgggtgagggagcagcaccccgaaaatggggaagaagccgtcgccctcgtggaggatgtccaacgggctcctggacagcaggtactggacagtgaaaaagatctgaaggtgttaatgaaagaaatggcccctctgggagcgacccgcgagtcgcttagatctcagtggaagcaggaggtgcagcccgaggaacctaccttcaaaggcagccagagcagccatcaaagacctggagagcagtcagaggcttggctggcaccccaggctcctcggaacctgccacagaatactgggctgcatgaccaggaaactggcgccgtggtctggaccgccggctcacaggggcccgcaatgagagacaatcgagctgttagtctttgccaacaggagtggatgtgcccagggcccgcacagagagccctgtacaggggtgctacccagcggaaagacagccatgtatctttagcgaccggagtgccctgggggtatgaagagaccaagacactcctcgccatcctcagcagttcgcagttctatggtaagttacagacatgtcagcagaatagccagatttacagggcgatggccgaggggctgtgggaacaagggtttctgcgcacccctgagcagtgcaggacaaaatttaaaagcttacagctatcttaccgcaaggtacgacggggccgggtcccagagccgtgtatattttacgaggagatgaatgctctgtctggctcctgggcgagcgctccccccatggctagcgatgctgtgcctggtcaggaaggctcagatatcgaagctggggagttgaatcatcagaacggcgagcccaccgaggtcgaggatggtacagttgacggtgccgatagagatgaaaaggatttccggaacccaggccaggaagtccgcaaacttgatttgcccgttttgttccctaatagacttggctttgaatttaaaaacgagatcaaaaaagagaacttgaagtgggacgatagtgaagaggttgagattaataaggccctccagagaaagagcaggggagtgtactggcactctgagcttcagaaaggactcgagagtgagccgacttcaagacggcagtgccgcaatagtcccggagagagtgaggaaaaaactccgagtcaagagaaaatgagccaccaatcattctgtgcacgcgacaaggcttgcactcatatcctctgcggaaaaaattgcagccagtcagttcattcacctcataagccagcactcaagctggagaaggtttcgcagtgcccagaatgcgggaagacgttttcgcggtcatcgtatttggtcaggcaccagaggattcacacaggagagaaaccccacaagtgtagcgaatgtggaaagggcttcagcgagcgatccaatctcacagcgcatctgcgtacgcacaccggtgagaggccctaccaatgcggacagtgcgggaagtcctttaatcagagttccagcctgatcgttcaccaacgaacccacaccggcgagaagccgtaccagtgtattgtgtgtggaaagcgcttcaacaactcaagccagttcagtgcccataggcgtatccacactggcgaatccccatataagtgcgccgtttgtggaaagatattcaataattcctctcacttttccgctcataggaagacgcacactggcgaaaagccatatcggtgtagtcattgtgaaagaggattcacgaagaatagcgcattgaccaggcaccagaccgtgcacatgaaggccgtcctgtcctcccaggaggggagggacgcgctctag

SEQ ID NO: 315853 - DNA, 771 bp, Artificial Sequence
  derived and/or modified sequence
atggccgccgtgaagagcaccgaggcccaccccagcagcaacaaggatccaacacagggccagaaaagcgcgttgcaaggcaacagtccagatagtgaagcgtctagacagagatttagacagttctgctatcaggaagtgaccggaccccatgaggccttctccaagctgtgggaattgtgttgtcagtggcttagacctaagacccatagtaaggaggagatcctggaacttctcgtgctggagcaattcctgactatcctgccggaagaaatacaaacgtgggtgagggagcagcaccctgagaacggcgaggaggctgtggcgctcgttgaagatgtgcagagggcccccggccagcaggttctggactccgaaaaggacttaaaggtgctgatgaaagaaatggccccactcggggccacccgggaatctctccgcagtcagtggaagcaagaagtgcaaccagaagaaccaaccttcaagggaagccagagtagccaccagcggccgggtgagcagagcgaagcctggctggcccctcaagccccacgcaaccttcctcaaaacacgggcctgcacgatcaggaaactggcgcagtcgtttggactgctggaagccagggaccggccatgcgggacaatagagccgtttctttgtgccaacaggaatggatgtgccctgggccggcgcagcgagctttatatcgaggggctactcagagaaaggactcccatgtgtctctggcaaccggcgctttggggttatag

SEQ ID NO: 315854 - DNA, 2094 bp, Artificial Sequence
  derived and/or modified sequence
atgatggctgccgtcaagagtactgaagcccatccctcttcaaataaggatcctacccagggacaaaagtcagccctgcagggcaactctcctgattcagaggcatcaaggcagagattcagacaattctgttaccaggaggtgacaggcccacatgaggcattctccaaactgtgggagctgtgctgtcaatggcttaggccaaagacccactctaaagaggagatcctagagcttctggtcttggaacagttcctgaccattctacctgaggagatccaaacctgggtgcgggagcagcatccagaaaacggtgaggaagcggtcgcactggtggaagacgtgcagagggcaccagggcagcaggttctggattcagaaaaggacctgaaagtgctgatgaaagaaatggcacccctaggcgcaacacgggaaagtttgcgctctcagtggaagcaggaggtacagccagaggaaccaactttcaagggcagtcagagttcccatcagcgaccaggcgagcagtctgaggcctggctcgccccacaggcccctcgtaatctgccccagaatacaggtttgcacgatcaggagacaggtgctgtcgtttggacagccggaagccaaggtcctgctatgagagacaaccgggcagtctcactctgccagcaggagtggatgtgcccagggccagctcagagggcactatatagaggtgcaacccagcggaaggactctcacgtatctctggcaaccggagtgccatggggttacgaggaaacaaaaacccttctggctattttgagcagtagccagttttatgggaagctccagacctgccagcaaaacagtcaaatataccgcgctatggctgaggggctatgggagcaggggttcctcaggactcctgaacagtgtagaaccaaatttaagagcttgcagctgagttatcgaaaggtacgccgaggacgggtgccggagccttgcatcttctacgaagaaatgaacgctctgagtggtagctgggcttctgctcctcccatggcctccgatgcggtgcctggacaggagggatctgacattgaggcaggcgagctcaatcaccagaatggggaacccaccgaagttgaggacggaaccgttgacggagccgatagggatgaaaaggatttccgcaatccaggccaggaagtgcgcaagcttgacctgcctgtgctctttccaaataggttggggtttgaatttaaaaacgagataaagaaagagaaccttaaatgggacgacagcgaggaagtcgagatcaacaaggccctgcagagaaagtccaggggcgtttactggcattccgaactgcagaaggggctggagagcgaacccacctctcgtcgccagtgccgcaacagtcctggcgagtccgaagagaagaccccgtctcaggaaaagatgagccaccaatcgttttgcgctagagacaaggcctgcacgcatatcctgtgtggtaaaaactgttcacagtcagttcatagtccacataaaccggctttgaaactagagaaagtctcgcagtgtcctgaatgtgggaaaaccttttctcgcagctcctatcttgttcggcatcagagaatacacacaggcgagaaaccacacaagtgctccgagtgtggcaaaggctttagtgagagatccaaccttacggctcacctccgcacccataccggagaacgtccatatcagtgtggtcagtgcggtaaatcctttaaccagtcatccagcctcattgtgcaccagcggactcataccggcgaaaaaccttaccagtgcatcgtgtgcggtaagaggttcaataattcctctcagttctccgcacacagaaggattcacaccggggagtccccttacaagtgcgccgtatgcggcaaaatatttaataacagctctcatttcagcgcccacaggaagacgcacactggagagaagccttaccgatgctctcactgtgagaggggattcacgaaaaacagcgctttgacgcgccaccagactgtacacatgaaggctgtcttgtcttctcaggaggggcgagacgcattatag

SEQ ID NO: 315855 - DNA, 2094 bp, Artificial Sequence
  derived and/or modified sequence
atgatggcagccgtgaaatctaccgaagcacatccatccagcaacaaagaccctacccagggtcagaaatcagccctccagggtaattcaccagacagcgaagcttctcggcagcgtttccgacagttttgttaccaagaagttacagggccacacgaagccttctcgaagctgtgggagctgtgctgccagtggttgaggcctaagacacactctaaagaggagattctggagcttctcgtccttgaacaattcctgactatactccccgaagagatccaaacctgggtgcgggagcaacatcctgagaacggagaagaagccgtcgccctggtcgaggatgtgcaacgcgcacccggtcaacaggtactggatagcgagaaagacctcaaggtgctgatgaaggagatggcccctttgggggctacacgagagtcactgcggtcccagtggaaacaggaagtgcagccggaggagcccacatttaaaggtagccaatctagccaccagcgtcccggagagcagagcgaggcctggctcgccccacaggcaccgagaaatctgccccagaacacgggcctccatgaccaggagaccggtgccgtagtgtggaccgccggtagccagggacccgcaatgcgcgacaatagagccgtgagtctgtgccagcaggagtggatgtgtcccggtcccgctcagagggcactctatcgcggagctacacagcggaaagatagccacgtgagccttgccacgggggtcccttgggggtatgaagaaaccaagactctattggcgatcctctccagttcccagttttacggtaagctgcaaacgtgtcaacaaaattctcaaatctaccgagccatggcagagggactctgggagcaagggtttcttaggacccccgaacaatgtagaacaaaattcaagagcctgcaactctcttaccgaaaagtgcgcagggggagagtgcccgaaccttgtattttctacgaggaaatgaatgcattatcgggttcctgggcatccgccccaccaatggcttcagacgctgtgccaggacaggaagggtcggatatagaggctggcgagctcaatcatcaaaatggagaaccgacagaagttgaggatggtaccgttgacggtgccgaccgagatgagaaggatttccgcaacccaggccaggaggtaaggaaactagatcttccggtcctgttccccaataggctgggtttcgagttcaaaaacgagattaagaaagagaatttgaagtgggacgacagcgaagaggtcgaaattaataaagctctccagagaaaatcacgaggagtctattggcatagtgaacttcagaagggactggagtcagagcccacaagccgtaggcaatgtcggaattcacctggcgaatccgaggagaagacaccatctcaggagaagatgtctcaccaaagcttttgtgccagagacaaggcctgtactcatattctctgtggcaagaattgtagccaaagtgtacacagccctcacaagccagcactcaagctggagaaggtctctcagtgtccagaatgcggaaaaaccttcagtcgatcctcctacctcgtgcgtcatcaacgcatccacacaggcgagaagcctcacaaatgtagtgaatgcgggaagggtttctcagagcgaagcaacctcacagcacacctcaggacgcacacgggggagaggccgtaccagtgcggacagtgcgggaaaagctttaatcagagcagctcgctaattgtccatcaacgtacacacacaggagagaagccctaccagtgtatcgtatgtggaaaacgatttaacaattcatcacagttctctgctcatagacgcattcacaccggcgaatctccctacaaatgcgccgtgtgtggtaagatctttaataattccagccactttagtgctcatcgcaagacccatacaggcgagaaaccctatcggtgttcccactgcgagcggggattcacaaagaattccgctctaacacgccaccaaactgtacacatgaaggccgtgctttcatcacaggaaggcagggacgctttgtag

SEQ ID NO: 315856 - DNA, 771 bp, Artificial Sequence
  derived and/or modified sequence
atggccgctgttaagtctaccgaagctcaccctagttcaaataaggacccaacccagggccagaagtcagctctgcaaggcaactccccggactccgaagccagccggcagagattcaggcagttttgttatcaagaagtaacaggaccacacgaggcgttttctaagctatgggagctttgttgtcaatggctacggccaaagacacactcgaaggaggaaatcctggagctcctcgtccttgaacaatttttgacaattctgccggaggagatccagacttgggtccgggaacagcatccagagaacggcgaggaggccgtggccctggtggaggatgtacagagggctccagggcagcaggtgctggactccgaaaaggacttaaaggtcctgatgaaagagatggccccactgggcgctaccagagaaagcctgcgatcacagtggaagcaggaagttcagccagaagagccaacctttaaaggttcccaaagttctcaccagaggccgggagaacagagcgaagcgtggttggccccacaggctcctaggaatttgccccagaataccggcttgcacgatcaggagacaggagccgtcgtatggacagcaggctctcaggggccagcgatgagagacaacagggcagtgtcattgtgccagcaagagtggatgtgccccggtcctgcccagcgtgccttgtatcgaggagcaactcaacgcaaagacagtcatgtgtcgctggctacaggagctctcgggctctag

SEQ ID NO: 315857 - DNA, 3027 bp, Artificial Sequence
  derived and/or modified sequence
gtaatgggcggagcgaatcgcgccgctgacttccggcccggaggctgagggagaatgtttgataggtttatattgtctttttccatcctcttcagacatccttcaaagttgagccctttttttccgctgtgagtctctacacatgtctgacactctcatgtcccacggattacagaaagacattccttgcaggagaacatggcttcccagtgatgtgggaaagatggactctgatctccagggtagaagtggcaaccagagtaagccagttcgttgaagcaaatgatggctgcagtgaagagtaccgaggcacacccatcctcaaacaaggatcccacacagggccagaaatcagccctccagggtaacagccctgactccgaggcctcccgtcagcgcttcaggcagttttgctaccaggaggtaactggcccacatgaagcttttagcaaactctgggaactctgttgtcagtggctgaggccgaagacccactcaaaagaggaaatcctggagctgctggttttggagcagtttctgactatcttgccagaggagatccagacctgggtgagggagcagcatccagaaaacggcgaggaagctgtggctctggttgaggatgtacagagagctcctggacaacagcctggcttgctcctcaggctcccaggaacctgcctcaaaacacaggtctccacgaccaggagacaggtgctgtggtctggacagctgggtcccaggctagagtggtgctattttatcggtagcagcagctccagtgttgttacagggaccagccatgcgtgacaacagagctgtatccctctgtcagcaagaatggatgtgcccaggccctgcacaaagggccctctacaggggtgccacccagaggaaggacagtcacgtctcgctggcaacaggtgtgccctggggctatgaagagaccaagacgctcctggctattcttagtagttctcaattttatggaaaactccagacctgtcagcagaacagccagatctacagggccatggcggaaggactctgggagcagggttttctgcggaccccagaacagtgtcgcaccaagttcaaaagcctacagttgagttaccgcaaagtgaggagaggccgtgtgcctgagccttgtatcttttatgaggaaatgaatgctctttcaggctcctgggcctctgcacctcctatggcaagcgatgctgttcctggccaagaaggaagtgatattgaggctggagagctgaatcaccagaatggggaacccacggaggtagaagatggcactgtggatggtgcagacagggatgaaaaggacttcaggaatcctggccaggaagtcaggaaactagacctgccagtgctgttcccaaacagacttggttttgagttcaagaacgagattaaaaaagaaaatctaaaatgggatgattcagaggaagtagaaataaacaaggctttacagagaaagtccagaggagtttattggcactctgagctacaaaaaggcttggagagtgagccaacatcaagaaggcaatgtagaaattctccaggggagagtgaggagaaaaccccatcccaggagaagatgagtcaccagagtttttgtgccagggacaaagcctgtacacatatcctctgtgggaaaaactgctctcagagtgtgcactctccccacaagccagcgctcaaactggaaaaagtatctcaatgtcctgaatgtgggaaaacctttagccgaagttcttatcttgttcggcatcaaagaatccacacaggcgagaagcctcacaagtgcagtgagtgcgggaagggctttagtgagcgctccaacctcactgcccacctacgaactcacacaggggagaggccctatcagtgtgggcaatgtgggaaaagcttcaaccagagttccagcctcattgtccaccagaggacccataccggggaaaagccttaccagtgcattgtctgtggaaagagattcaacaacagttcccagttcagtgctcaccggcgcatccacactggggagagcccatacaagtgtgcagtgtgtgggaaaatcttcaacaatagctcccacttcagtgcccaccgaaaaacccacactggtgaaaagccttacaggtgttctcactgtgagagaggcttcactaagaactctgccctcacccgtcatcagacagtacacatgaaagcagtactctcatcacaggaaggaagagatgcgttatgagtgtgtcggtaaactgtcagattaagttcctcaggtcagcatgtatgagctttcttctgctgtggagagatctagccagtccctgactttgcaacagacctactgactactggatcttaagacccatgtctaggaccaggagtcagcataaggacgctgacctctcctggctgtgcctgtgactccagagtcctatcttactgtgacttaaagtttgatggagagaaagctgtaggatccataaattctaccaggaaaccagggtcttcctgttcctagcactgagaatgggcacccagtggtccaagaacactttctgggctaacatagtcctcacacagggctgagaaagaaagtgtctcctttcctggaaagcacatgtaaaagttaagggcctgaatctcttctaaaccaataattgacctctaggcacccaccgtaatactgctaccttcagggcagaagacactgctctttgtaacccagccaccaccaaaaagcaaacagaaagaaggaaggatggttaagccattggataatactgaatctgtttccctaagtgacttaaccttagagcaagcacaacatccaggttaattttttgtaagatttctccttttattattgccctcatcatagttcctgattgtctcttaaagtaagtggtttatagacattactatttctgataataatttacaaactactataaacaaatttataaacattactaatttctgatgaaaataaagttgtttctccctcca

SEQ ID NO: 315858 - DNA, 3048 bp, Artificial Sequence
  derived and/or modified sequence
gacatccttcaaagttgagccctttttttccgctgtgagtctctacacatgtctgacactctcatgtcccacggattacagaaagacattccttgcaggagaacatggcttcccagtgatgtgggaaagatggactctgatctccagggtagaagtggcaaccagagtaagccagttcgttgaagcaaatgatggctgcagtgaagagtaccgaggcacacccatcctcaaacaaggatcccacacagggccagaaatcagccctccagggtaacagccctgactccgaggcctcccgtcagcgcttcaggcagttttgctaccaggaggtaactggcccacatgaagcttttagcaaactctgggaactctgttgtcagtggctgaggccgaagacccactcaaaagaggaaatcctggagctgctggttttggagcagtttctgactatcttgccagaggagatccagacctgggtgagggagcagcatccagaaaacggcgaggaagctgtggctctggttgaggatgtacagagagctcctggacaacaggttctagattctgagaaggacttgaaagtactcatgaaggagatggcccctttgggagcaaccagagaatcactgagatcccaatggaaacaggaggttcagccagaggaaccgacttttaagggatcacagagctcacaccaaagaccaggggaacagtcagaagcctggcttgctcctcaggctcccaggaacctgcctcaaaacacaggtctccacgaccaggagacaggtgctgtggtctggacagctgggtcccagggaccagccatgcgtgacaacagagctgtatccctctgtcagcaagaatggatgtgcccaggccctgcacaaagggccctctacaggggtgccacccagaggaaggacagtcacgtctcgctggcaacaggtgtgccctggggctatgaagagaccaagacgctcctggctattcttagtagttctcaattttatggaaaactccagacctgtcagcagaacagccagatctacagggccatggcggaaggactctgggagcagggttttctgcggaccccagaacagtgtcgcaccaagttcaaaagcctacagttgagttaccgcaaagtgaggagaggccgtgtgcctgagccttgtatcttttatgaggaaatgaatgctctttcaggctcctgggcctctgcacctcctatggcaagcgatgctgttcctggccaagaaggaagtgatattgaggctggagagctgaatcaccagaatggggaacccacggaggtagaagatggcactgtggatggtgcagacagggatgaaaaggacttcaggaatcctggccaggaagtcaggaaactagacctgccagtgctgttcccaaacagacttggttttgagttcaagaacgagattaaaaaagaaaatctaaaatgggatgattcagaggaagtagaaataaacaaggctttacagagaaagtccagaggagtttattggcactctgagctacaaaaaggcttggagagtgagccaacatcaagaaggcaatgtagaaattctccaggggagagtgaggagaaaaccccatcccaggagaagatgagtcaccagagtttttgtgccagggacaaagcctgtacacatatcctctgtgggaaaaactgctctcagagtgtgcactctccccacaagccagcgctcaaactggaaaaagtatctcaatgtcctgaatgtgggaaaacctttagccgaagttcttatcttgttcggcatcaaagaatccacacaggcgagaagcctcacaagtgcagtgagtgcgggaagggctttagtgagcgctccaacctcactgcccacctacgaactcacacaggggagaggccctatcagtgtgggcaatgtgggaaaagcttcaaccagagttccagcctcattgtccaccagaggacccataccggggaaaagccttaccagtgcattgtctgtggaaagagattcaacaacagttcccagttcagtgctcaccggcgcatccacactggggagagcccatacaagtgtgcagtgtgtgggaaaatcttcaacaatagctcccacttcagtgcccaccgaaaaacccacactggtgaaaagccttacaggtgttctcactgtgagagaggcttcactaagaactctgccctcacccgtcatcagacagtacacatgaaagcagtactctcatcacaggaaggaagagatgcgttatgagtgtgtcggtaaactgtcagattaagttcctcaggtcagcatgtatgagctttcttctgctgtggagagatctagccagtccctgactttgcaacagacctactgactactggatcttaagacccatgtctaggaccaggagtcagcataaggacgctgacctctcctggctgtgcctgtgactccagagtcctatcttactgtgacttaaagtttgatggagagaaagctgtaggatccataaattctaccaggaaaccagggtcttcctgttcctagcactgagaatgggcacccagtggtccaagaacactttctgggctaacatagtcctcacacagggctgagaaagaaagtgtctcctttcctggaaagcacatgtaaaagttaagggcctgaatctcttctaaaccaataattgacctctaggcacccaccgtaatactgctaccttcagggcagaagacactgctctttgtaacccagccaccaccaaaaagcaaacagaaagaaggaaggatggttaagccattggataatactgaatctgtttccctaagtgacttaaccttagagcaagcacaacatccaggttaattttttgtaagatttctccttttattattgccctcatcatagttcctgattgtctcttaaagtaagtggtttatagacattactatttctgataataatttacaaactactataaacaaatttataaacattactaatttctgatgaaaataaagttgtttctccctcc

SEQ ID NO: 315859 - DNA, 3134 bp, Artificial Sequence
  derived and/or modified sequence
cgtgcgtaatgggcggagcgaatcgcgccgctgacttccggcccggaggctgagggagtttgtggagtcgcgagtgctggtgtccgacatccttcaaagttgagccctttttttccgctgtgagtctctacacatgtctgacactctcatgtcccacggattacagaaagacattccttgcaggagaacatggcttcccagtgatgtgggaaagatggactctgatctccagggtagaagtggcaaccagagtaagccagttcgttgaagcaaatgatggctgcagtgaagagtaccgaggcacacccatcctcaaacaaggatcccacacagggccagaaatcagccctccagggtaacagccctgactccgaggcctcccgtcagcgcttcaggcagttttgctaccaggaggtaactggcccacatgaagcttttagcaaactctgggaactctgttgtcagtggctgaggccgaagacccactcaaaagaggaaatcctggagctgctggttttggagcagtttctgactatcttgccagaggagatccagacctgggtgagggagcagcatccagaaaacggcgaggaagctgtggctctggttgaggatgtacagagagctcctggacaacaggttctagattctgagaaggacttgaaagtactcatgaaggagatggcccctttgggagcaaccagagaatcactgagatcccaatggaaacaggaggttcagccagaggaaccgacttttaagggatcacagagctcacaccaaagaccaggggaacagtcagaagcctggcttgctcctcaggctcccaggaacctgcctcaaaacacaggtctccacgaccaggagacaggtgctgtggtctggacagctgggtcccagggaccagccatgcgtgacaacagagctgtatccctctgtcagcaagaatggatgtgcccaggccctgcacaaagggccctctacaggggtgccacccagaggaaggacagtcacgtctcgctggcaacaggtgtgccctggggctatgaagagaccaagacgctcctggctattcttagtagttctcaattttatggaaaactccagacctgtcagcagaacagccagatctacagggccatggcggaaggactctgggagcagggttttctgcggaccccagaacagtgtcgcaccaagttcaaaagcctacagttgagttaccgcaaagtgaggagaggccgtgtgcctgagccttgtatcttttatgaggaaatgaatgctctttcaggctcctgggcctctgcacctcctatggcaagcgatgctgttcctggccaagaaggaagtgatattgaggctggagagctgaatcaccagaatggggaacccacggaggtagaagatggcactgtggatggtgcagacagggatgaaaaggacttcaggaatcctggccaggaagtcaggaaactagacctgccagtgctgttcccaaacagacttggttttgagttcaagaacgagattaaaaaagaaaatctaaaatgggatgattcagaggaagtagaaataaacaaggctttacagagaaagtccagaggagtttattggcactctgagctacaaaaaggcttggagagtgagccaacatcaagaaggcaatgtagaaattctccaggggagagtgaggagaaaaccccatcccaggagaagatgagtcaccagagtttttgtgccagggacaaagcctgtacacatatcctctgtgggaaaaactgctctcagagtgtgcactctccccacaagccagcgctcaaactggaaaaagtatctcaatgtcctgaatgtgggaaaacctttagccgaagttcttatcttgttcggcatcaaagaatccacacaggcgagaagcctcacaagtgcagtgagtgcgggaagggctttagtgagcgctccaacctcactgcccacctacgaactcacacaggggagaggccctatcagtgtgggcaatgtgggaaaagcttcaaccagagttccagcctcattgtccaccagaggacccataccggggaaaagccttaccagtgcattgtctgtggaaagagattcaacaacagttcccagttcagtgctcaccggcgcatccacactggggagagcccatacaagtgtgcagtgtgtgggaaaatcttcaacaatagctcccacttcagtgcccaccgaaaaacccacactggtgaaaagccttacaggtgttctcactgtgagagaggcttcactaagaactctgccctcacccgtcatcagacagtacacatgaaagcagtactctcatcacaggaaggaagagatgcgttatgagtgtgtcggtaaactgtcagattaagttcctcaggtcagcatgtatgagctttcttctgctgtggagagatctagccagtccctgactttgcaacagacctactgactactggatcttaagacccatgtctaggaccaggagtcagcataaggacgctgacctctcctggctgtgcctgtgactccagagtcctatcttactgtgacttaaagtttgatggagagaaagctgtaggatccataaattctaccaggaaaccagggtcttcctgttcctagcactgagaatgggcacccagtggtccaagaacactttctgggctaacatagtcctcacacagggctgagaaagaaagtgtctcctttcctggaaagcacatgtaaaagttaagggcctgaatctcttctaaaccaataattgacctctaggcacccaccgtaatactgctaccttcagggcagaagacactgctctttgtaacccagccaccaccaaaaagcaaacagaaagaaggaaggatggttaagccattggataatactgaatctgtttccctaagtgacttaaccttagagcaagcacaacatccaggttaattttttgtaagatttctccttttattattgccctcatcatagttcctgattgtctcttaaagtaagtggtttatagacattactatttctgataataatttacaaactactataaacaaatttataaacattactaatttctgatgaaaataaagttgtttctccctcca

SEQ ID NO: 315860 - DNA, 1462 bp, Artificial Sequence
  derived and/or modified sequence
gtcgcgagtgctggtgtccgacatccttcaaagttgagccctttttttccgctgtgagtctctacacatgtctgacactctcatgtcccacggattacagaaagacattccttgcaggagaacatggcttcccagtgatgtgggaaagatggactctgatctccagggtagaagtggcaaccagagtaagccagttcgttgaagcaaatgatggctgcagtgaagagtaccgaggcacacccatcctcaaacaaggatcccacacagggccagaaatcagccctccagggtaacagccctgactccgaggcctcccgtcagcgcttcaggcagttttgctaccaggaggtaactggcccacatgaagcttttagcaaactctgggaactctgttgtcagtggctgaggccgaagacccactcaaaagaggaaatcctggagctgctggttttggagcagtttctgactatcttgccagaggagatccagacctgggtgagggagcagcatccagaaaacggcgaggaagctgtggctctggttgaggatgtacagagagctcctggacaacaggttctagattctgagaaggacttgaaagtactcatgaaggagatggcccctttgggagcaaccagagaatcactgagatcccaatggaaacaggaggttcagccagaggaaccgacttttaagggatcacagagctcacaccaaagaccaggggaacagtcagaagcctggcttgctcctcaggctcccaggaacctgcctcaaaacacaggtctccacgaccaggagacaggtgctgtggtctggacagctgggtcccagggaccagccatgcgtgacaacagagctgtatccctctgtcagcaagaatggatgtgcccaggccctgcacaaagggccctctacaggggtgccacccagaggaaggacagtcacgtctcgctggcaacaggtgccctggggctatgaagagaccaagacgctcctggctattcttagtagttctcaattttatggaaaactccagacctgtcagcagaacagccagatctacagggccatggcggaaggactctgggagcagggttttctgcggaccccagaacagtgtcgcaccaagttcaaaagcctacagttgagttaccgcaaagtgaggagaggccgtgtgcctgagccttgtatcttttatgaggaaatgaatgctctttcaggctcctgggcctctgcacctcctatggcaagcgatgctgttcctggccaagaaggaagtgatattgaggctggagagctgaatcaccagaatggggaacccacggaggtagaagatggcactgtggatggtgcagacagggatgaaaaggacttcaggaatcctggccaggaagtcaggaaactagacctgccagtgctgttcccaaacagacttggttttgagttcaagaacgagatt

SEQ ID NO: 315861 - DNA, 1267 bp, Artificial Sequence
  derived and/or modified sequence
gcgaatcgcgccgctgacttccggcccggaggctgagggagtttgtggagtcgcgagtgctggtgtccggttctagattctgagaaggacttgaaagtactcatgaaggagatggcccctttgggagcaaccagagaatcactgagatcccaatggaaacaggaggttcagccagaggaaccgacttttaagggatcacagagctcacaccaaagaccaggggaacagtcagaaggctagagtggtgctattttatcggtagcagcagctccagtgttgttacagggaccagccatgcgtgacaacagagctgtatccctctgtcagcaagaatggatgtgcccaggccctgcacaaagggccctctacaggggtgccacccagaggaaggacagtcacgtctcgctggcaacaggtgtgccctggggctatgaagagaccaagacgctcctggctattcttagtagttctcaattttatggaaaactccagacctgtcagcagaacagccagatctacagggccatggcggaaggactctgggagcagggttttctgcggaccccagaacagtgtcgcaccaagttcaaaagcctacagttgagttaccgcaaagtgaggagaggccgtgtgcctgagccttgtatcttttatgaggaaatgaatgctctttcaggctcctgggcctctgcacctcctatggcaagcgatgctgttcctggccaagaaggaagtgatattgaggctggagagctgaatcaccagaatggggaacccacggaggtagaagatggcactgtggatggtgcagacagggatgaaaaggacttcaggaatcctggccaggaagtcaggaaactagacctgccagtgctgttcccaaacagacttggtaagactcccttggctctgatggtcaaaggatggcaaagtccactttagaggccattagcctagcagttgagtaggagctgtcactgatcctggcatcatcatcatcttgatgtgtgaccctatccaagttttggttttcatggagttaaaggttattccccttgcattttacagccctgattttgcatttgccaacctctttcaactaagttcatgtcatcttttcccatggagtttcactatgcattgtcagactgctggttaggcctccagaccaggtccatcttctccctttttctctagcatggccttgcctttcacagcctgagcctatgctggctgggtacttagcaccttgctttcttcctgtttg

SEQ ID NO: 315862 - protein, 215 aa, Artificial Sequence
  derived and/or modified sequence
MRDNRAVSLCQQEWMCPGPAQRALYRGATQRKDSHVSLATGVPWGYEETKTLLAILSSSQFYGKLQTCQQNSQIYRAMAEGLWEQGFLRTPEQCRTKFKSLQLSYRKVRRGRVPEPCIFYEEMNALSGSWASAPPMASDAVPGQEGSDIEAGELNHQNGEPTEVEDGTVDGADRDEKDFRNPGQEVRKLDLPVLFPNRLGKTPLALMVKGWQSPL

SEQ ID NO: 315863 - DNA, 1458 bp, Artificial Sequence
  derived and/or modified sequence
atgagagacaacagagccgtgagcctgtgccagcaggagtggatgtgccccggccccgcccagagagccctgtacagaggcgccacccagagaaaggacagccacgtgagcctggccaccggcgtgccctggggctacgaggagaccaagaccctgctggccatcctgagcagcagccagttctacggcaagctgcagacctgccagcagaacagccagatctacagagccatggccgagggcctgtgggagcagggcttcctgagaacccccgagcagtgcagaaccaagttcaagagcctgcagctgagctacagaaaggtgagaagaggcagagtgcccgagccctgcatcttctacgaggagatgaacgccctgagcggcagctgggccagcgccccccccatggccagcgacgccgtgcccggccaggagggcagcgacatcgaggccggcgagctgaaccaccagaacggcgagcccaccgaggtggaggacggcaccgtggacggcgccgacagagacgagaaggacttcagaaaccccggccaggaggtgagaaagctggacctgcccgtgctgttccccaacagactgggcttcgagttcaagaacgagatcaagaaggagaacctgaagtgggacgacagcgaggaggtggagatcaacaaggccctgcagagaaagagcagaggcgtgtactggcacagcgagctgcagaagggcctggagagcgagcccaccagcagaagacagtgcagaaacagccccggcgagagcgaggagaagacccccagccaggagaagatgagccaccagagcttctgcgccagagacaaggcctgcacccacatcctgtgcggcaagaactgcagccagagcgtgcacagcccccacaagcccgccctgaagctggagaaggtgagccagtgccccgagtgcggcaagaccttcagcagaagcagctacctggtgagacaccagagaatccacaccggcgagaagccccacaagtgcagcgagtgcggcaagggcttcagcgagagaagcaacctgaccgcccacctgagaacccacaccggcgagagaccctaccagtgcggccagtgcggcaagagcttcaaccagagcagcagcctgatcgtgcaccagagaacccacaccggcgagaagccctaccagtgcatcgtgtgcggcaagagattcaacaacagcagccagttcagcgcccacagaagaatccacaccggcgagagcccctacaagtgcgccgtgtgcggcaagatcttcaacaacagcagccacttcagcgcccacagaaagacccacaccggcgagaagccctacagatgcagccactgcgagagaggcttcaccaagaacagcgccctgaccagacaccagaccgtgcacatgaaggccgtgctgagcagccaggagggcagagacgccctgtag

SEQ ID NO: 315864 - DNA, 648 bp, Artificial Sequence
  derived and/or modified sequence
atgagagacaacagagccgtgagcctgtgccagcaggagtggatgtgccccggccccgcccagagagccctgtacagaggcgccacccagagaaaggacagccacgtgagcctggccaccggcgtgccctggggctacgaggagaccaagaccctgctggccatcctgagcagcagccagttctacggcaagctgcagacctgccagcagaacagccagatctacagagccatggccgagggcctgtgggagcagggcttcctgagaacccccgagcagtgcagaaccaagttcaagagcctgcagctgagctacagaaaggtgagaagaggcagagtgcccgagccctgcatcttctacgaggagatgaacgccctgagcggcagctgggccagcgccccccccatggccagcgacgccgtgcccggccaggagggcagcgacatcgaggccggcgagctgaaccaccagaacggcgagcccaccgaggtggaggacggcaccgtggacggcgccgacagagacgagaaggacttcagaaaccccggccaggaggtgagaaagctggacctgcccgtgctgttccccaacagactgggcaagacccccctggccctgatggtgaagggctggcagagccccctgtag

SEQ ID NO: 315865 - DNA, 1458 bp, Artificial Sequence
  derived and/or modified sequence
atgcgcgataaccgggcagtgtcattgtgccagcaggaatggatgtgcccaggcccagcgcagcgggccttgtaccgcggcgccacccagaggaaggattcccatgtgagtttagccaccggggtgccttggggatacgaggagaccaaaacactcctggccattttgtcctcttcgcagttttacggaaaactgcaaacctgtcaacagaacagccagatttatcgtgcaatggctgagggcctctgggagcaagggtttttaagaacgcctgagcagtgccggactaaattcaagtccctgcagctttcatacagaaaggtgcgaaggggcagagtgcccgagccgtgtattttctacgaagagatgaatgctctatctggcagttgggcttccgctccacccatggcttccgacgcagtgcccggccaggagggttctgatatagaggccggtgagctgaatcaccaaaatggggaacctacagaagtggaagacgggaccgtagacggcgccgaccgggatgagaaggatttcaggaatcccggccaggaggtgcggaagcttgacctgcctgtcctgttcccaaacaggctcggatttgagttcaagaatgagataaaaaaggagaacctgaagtgggacgactcagaggaagtagaaattaacaaggcactccaacgcaaaagtcgcggcgtgtattggcactccgagttgcagaaagggctggaatcagagccgacctcgaggaggcagtgcaggaattcacctggggagagtgaggaaaagaccccctcccaggaaaagatgtcacaccaaagcttttgtgcgagagacaaggcatgcacccacattctgtgcggaaaaaactgtagccagtcagtgcactctcctcataagcccgccctcaaattagagaaagtgtctcaatgtcctgagtgcggcaagacgttctccaggtccagctacttggttaggcaccaaagaatccatactggcgaaaaaccacataaatgcagcgagtgcgggaaaggattttccgagcgttcgaatctgactgcacatctcagaacacacactggcgaaagaccttatcaatgcggacagtgcggcaaatccttcaatcagtcctcaagtttaatcgtgcaccagcgtacacatacaggcgaaaaaccgtatcaatgcatcgtttgtgggaaacgattcaataatagttcacagtttagtgcacaccgccggatccacaccggcgagtccccgtataagtgcgccgtgtgtggcaaaatctttaacaattcatcccatttcagcgctcatcgaaagacccacacgggcgagaagccctacaggtgctcccactgtgagcgaggtttcaccaagaattccgccctaaccaggcaccagacagttcacatgaaagctgtcctgagtagccaggaaggacgcgacgctctctag

SEQ ID NO: 315866 - DNA, 648 bp, Artificial Sequence
  derived and/or modified sequence
atgcgggataaccgggccgtgtctttgtgtcagcaggagtggatgtgtcctggccccgcccagagagccctgtacaggggcgcaacacaacgaaaggacagccatgtgtccctcgctactggagttccttgggggtatgaagaaacaaaaacccttctggcaatactttccagcagtcagttttacggtaaactgcaaacctgccagcagaattcccagatctaccgtgctatggcggaagggctttgggaacagggcttccttcggactcctgagcaatgccggacaaagttcaagtctttgcagctgtcgtatcgtaaggtgagacgcggcagggtccctgagccgtgcattttttacgaagagatgaacgccctgtctgggtcctgggcctcagcccccccgatggcctcagatgctgtcccaggccaggaggggtccgatatcgaggccggcgagcttaaccatcagaatggggaaccgactgaagtggaggacgggacagtggatggcgccgacagggatgaaaaagacttccggaacccaggccaggaggtaaggaaactcgacctacctgtcctgttccccaatcgcttaggtaaaactcccctcgccttaatggtgaaagggtggcaaagtccgttgtag

SEQ ID NO: 315867 - DNA, 1458 bp, Artificial Sequence
  derived and/or modified sequence
atgagggacaacagagctgtgtccctgtgccagcaggagtggatgtgccccggccctgcccagagggccctgtacagaggagccacccagaggaaggacagccacgtgtccctggccaccggggtgccctggggctatgaggagaccaagaccctgctggccatcctgagcagcagccagttctacggcaagctgcagacctgccagcagaacagccagatctaccgggccatggccgagggcctgtgggagcagggcttcctgcggaccccagagcagtgcaggaccaagttcaagagcctgcagctgagctacaggaaggtgagaagaggccgggtgcctgagccctgcatcttctatgaggagatgaatgccctgagcggctcctgggccagcgccccacccatggccagtgatgctgtgcccggccaggagggcagtgacattgaagctggggagctgaaccaccagaatggagagcccacagaggtggaggatggcaccgtggatggagctgacagagatgagaaggacttcaggaaccctggccaggaggtgaggaagctggacctgcctgtgctcttccccaaccggctgggctttgagttcaagaatgagatcaagaaggagaacctgaagtgggatgattctgaggaggtggagatcaacaaggccctgcagaggaagagccggggcgtgtactggcacagcgagctgcagaagggcctggagagcgagcccaccagccggcggcagtgcaggaacagccctggagagagcgaggagaagacccccagccaggagaagatgagccaccagagcttctgtgcccgggacaaggcctgcacccacatcctgtgtgggaagaactgcagccagagcgtgcacagcccccacaagccagccctgaagctggagaaggtgtcccagtgcccagaatgtgggaagaccttcagccgcagcagctacctggtgcgccaccagaggatccacactggagagaagccccacaagtgcagtgaatgtgggaagggcttcagcgagaggagcaacctgacagcccacctgcggacccacactggagagcggccctaccagtgtggccagtgtgggaagagcttcaaccagagcagcagcctgattgtgcaccagaggacccacactggagagaagccctaccagtgcatcgtgtgtgggaagcgcttcaacaacagcagccagttcagcgcccaccggcgcatccacactggagagagcccctacaagtgtgctgtgtgtgggaagatcttcaacaacagcagccacttcagcgcccacaggaagacccacactggagagaagccctaccgctgcagccactgtgagcggggcttcaccaagaacagcgccctgaccaggcaccagacagtgcacatgaaggctgtgctgagcagccaggagggcagagatgccctgtag

SEQ ID NO: 315868 - DNA, 648 bp, Artificial Sequence
  derived and/or modified sequence
atgagggacaacagagctgtgtccctgtgccagcaggagtggatgtgccccggccctgcccagagggccctgtacagaggagccacccagaggaaggacagccacgtgtccctggccaccggggtgccctggggctatgaggagaccaagaccctgctggccatcctgagcagcagccagttctacggcaagctgcagacctgccagcagaacagccagatctaccgggccatggccgagggcctgtgggagcagggcttcctgcggaccccagagcagtgcaggaccaagttcaagagcctgcagctgagctacaggaaggtgagaagaggccgggtgcctgagccctgcatcttctatgaggagatgaatgccctgagcggctcctgggccagcgccccacccatggccagtgatgctgtgcccggccaggagggcagtgacattgaagctggggagctgaaccaccagaatggagagcccacagaggtggaggatggcaccgtggatggagctgacagagatgagaaggacttcaggaaccctggccaggaggtgaggaagctggacctgcctgtgctcttccccaaccggctgggcaagacccccctggccctgatggtgaagggctggcagagccccctgtag

SEQ ID NO: 315869 - DNA, 1458 bp, Artificial Sequence
  derived and/or modified sequence
atgcgggacaaccgggccgtgagcctgtgccagcaggagtggatgtgtcctggccccgcccagagagcgctatatcggggagcaacgcagcgaaaagacagccacgtgagtcttgctactggtgtcccttggggctatgaagaaactaagacactgctggcgattcttagctcctcccaattctatggaaaactgcagacgtgccagcagaatagccaaatttacagggccatggccgagggcctgtgggaacagggtttcctgcgcacccctgagcaatgcaggactaaattcaaaagtctgcagctgagttacaggaaagtaagaagggggcgcgtcccagagccgtgcatcttttatgaagagatgaatgcactcagcgggtcgtgggcctccgccccaccaatggcctcagacgcagtgcccggacaagaggggagcgacattgaggccggggagctgaatcatcagaacggcgagcccaccgaggtggaagatgggacagtggacggggcagaccgggacgagaaagatttccggaacccgggccaggaggttcgaaagctggatttacctgtgctcttccccaatcggctagggttcgaatttaagaatgagatcaagaaagaaaatctaaagtgggatgatagcgaagaagtggaaatcaataaagctcttcagcgaaagtctcggggcgtgtattggcatagcgaattacagaagggcctggagagcgaacctacttctagaaggcaatgtaggaacagcccaggtgaaagcgaagagaagaccccctctcaagagaagatgtcacaccaaagcttttgcgcccgtgataaagcgtgtacccacattttgtgtggaaagaactgtagccagtccgtgcatagtccacataagcccgctctgaaactagagaaagttagccaatgtccggagtgcgggaaaaccttctccaggtcctcttatcttgtcagacatcagcggatccacacaggcgagaagccccacaaatgttccgagtgcggcaagggcttctccgaacgatcaaacctaactgcccatcttcgaacgcataccggggagaggccctaccagtgtggccaatgtggtaagagcttcaatcagtctagcagtctgatcgtccaccagagaacacatacgggcgagaagccataccaatgcatagtttgcgggaagcgattcaacaacagctctcagttcagcgcacaccggaggatccacaccggggaatccccttacaaatgtgctgtgtgcggaaagatctttaacaattcatcacacttctccgctcataggaaaactcataccggggagaagccgtaccgctgttcccactgtgaacgcggcttcaccaaaaactcagccctgacccggcatcagacggtgcatatgaaggcggtgctttctagccaggaagggagggatgcattatag

SEQ ID NO: 315870 - DNA, 648 bp, Artificial Sequence
  derived and/or modified sequence
atgcgggacaaccgggccgtgagcctgtgccagcaggagtggatgtgccctggacccgcccagcgcgccctgtatcggggggccacacagaggaaagactcgcatgtcagcctggctactggcgtgccctggggctacgaggagacgaaaacgctgctcgccatactgagctcatctcagttctacggaaagctacagacatgccagcaaaattctcaaatttacagggctatggccgaggggctgtgggagcagggatttctccgtactcccgaacaatgccggactaaattcaagtccctccagctgtcatacagaaaagtcagaagaggccgagtgcctgaaccgtgcatcttctatgaggagatgaacgcactctccgggagctgggccagcgcacccccaatggctagcgatgcagtaccaggacaagaaggcagtgatattgaggctggcgaactcaaccaccagaacggcgagcccacagaagttgaggatggcaccgtggacggggccgatagggacgagaaggactttcgaaacccaggtcaggaagtcagaaagctagacctgccagtgctttttcccaaccggttgggcaaaaccccattggcccttatggtgaagggctggcaatccccactgtag

SEQ ID NO: 315871 - DNA, 1458 bp, Artificial Sequence
  derived and/or modified sequence
atgcgtgacaacagggctgtcagtctgtgccagcaagaatggatgtgtcccggaccggcacagagagcactgtatagaggcgcaactcaacgcaaggattcacatgttagcttggcaacaggagtgccttggggttatgaagaaactaaaaccctccttgccatcctcagtagtagtcagttctatgggaagctgcaaacatgccagcagaattcccagatttaccgcgcaatggcagaaggcctgtgggagcagggtttcttgcgtaccccagagcagtgccgcaccaaattcaagtcattacagctaagttaccggaaggtgcgccgaggccgagtccccgagccttgcatcttttatgaagagatgaatgccttgtcgggttcttgggcctctgcacctcccatggcctccgacgctgtgcccggacaggagggcagcgacattgaagccggagagctgaaccaccagaatggcgagccgacagaagtcgaagatggaaccgtcgatggagctgatcgggacgaaaaagattttaggaatcccggacaggaagtaaggaagcttgacctgcccgtgctgtttcctaacagactgggatttgagtttaaaaacgagatcaagaaggagaacctcaagtgggatgactccgaagaggtggaaatcaataaagccctccaaagaaagtccaggggggtctactggcactccgaactccagaagggattagagagcgaacctacgtcccgtcggcagtgtcgtaactcacctggcgagtctgaagagaaaacgcccagtcaggagaagatgtcccatcagagcttttgtgcccgagataaggcctgcacccacattctctgcgggaagaattgctcgcaatcggtacactctccccataaaccagccctgaaactcgaaaaagtgagccaatgcccggagtgtggaaagacattttcaagatcctcataccttgtgagacatcagagaatacacaccggggagaaaccccacaagtgctctgagtgcggaaaaggctttagcgagcgcagcaaccttacggcgcatctaagaacacatactggagagcgcccatatcagtgcggccagtgcgggaaaagcttcaaccagtcctcaagccttatagtgcatcagagaacacatactggagaaaagccctatcagtgtatagtatgtggtaagagattcaataattcatcacagttttctgcccacagacggatccacacaggcgagagcccctacaagtgtgcggtttgtggaaaaattttcaataattcatcgcacttctcagcccaccggaaaacccacacaggcgagaagccatacaggtgttctcactgtgagcggggtttcacaaaaaattccgccctcacgcgacaccaaaccgtgcatatgaaggctgtcctttcctcacaagaaggtagggacgcactatag

SEQ ID NO: 315872 - DNA, 648 bp, Artificial Sequence
  derived and/or modified sequence
atgcgggacaacagagccgtctcactgtgccagcaggaatggatgtgcccgggacccgcacagcgagcgctttatcggggagctactcaaagaaaagactcccacgtgagcctggccaccggcgttccgtgggggtacgaggagacgaagactctgctggccatactgagtagttcccaattttacggtaagctgcagacatgccagcaaaactctcagatttacagagccatggcagagggcttgtgggagcaggggttcctcaggaccccagagcaatgccggaccaagtttaagtccctgcagctgtcatatcgcaaggtgcggaggggcagggtgcctgaaccctgcatattttacgaggagatgaacgctctttccgggtcatgggctagtgcgccacctatggcctctgacgcagtgcctggtcaagaagggtcggacatcgaggctggagaactgaaccatcaaaacggggagcccactgaagttgaagatggaaccgtggacggagccgaccgagacgagaaagattttcgcaaccccggacaggaggtgcggaagctagatctgcccgttcttttccccaaccgcctcggaaagactcccttggccctgatggttaaaggctggcagtcacccctctag

SEQ ID NO: 315873 - DNA, 695 bp, Artificial Sequence
  derived and/or modified sequence
gcgaccatcgtttgtcgacgccgctgccaccgcctgcctgagagaagtcgtcgcggccgaccccgtcgcctccgccggctaccatgtccgcccaggcgcagatgcgggccctgctggaccagctcatgggcacggctcgggacggcaatggatcacttggagtcctttattgctgaatgtgatcggagaactgagctcgccaagaagcggctggcagaaacacaggaggaaatcagtgcggaagtttctgcaaaggcagaaaaagtacatgagttaaatgaagaaataggaaaactccttgctaaagccgaacagctaggggctgaaggtaatgtggatgaatcccagaagattcttatggaagtggaaaaagttcgtgcgaagaaaaaagaagctgaggaagaatacagaaattccatgcctgcatccagttttcagcagcaaaagctgcgtgtctgcgaggtctgttcagcctaccttggtctccatgacaatgaccgtcgcctggcagaccacttcggtggcaagttacacttggggttcattcagatccgagagaagcttgatcagttgaggaaaactgtcgctgaaaagcaggagaagagaaatcaggatcgcttgaggaggagagaggagagggaacgggaggagcgtctgagcaggaggtcgggatcaagaaccagagatcgcaggag

SEQ ID NO: 315874 - protein, 272 aa, Artificial Sequence
  derived and/or modified sequence
MDLGECTKIHDLALRADYEIASKERDLFFELDAMDHLESFIAECDRRTELAKKRLAETQEEISAEVSAKAEKVHELNEEIGKLLAKAEQLGAEGNVDESQKILMEVEKVRAKKKEAEEEYRNSMPASSFQQQKLRVCEVCSAYLGLHDNDRRLADHFGGKLHLGFIQIREKLDQLRKTVAEKQEKRNQDRLRRREEREREERLSRRSGSRTRDRRRSRSRDRRRRRSRSTSRERRKLSRSRSRDRHRRHRSRSRSHSRGHRRASRDRSAKYK

SEQ ID NO: 315875 - protein, 32 aa, Artificial Sequence
  derived and/or modified sequence
MDLGECTKIHDLALRADYEIASKERDLFFELD

SEQ ID NO: 315876 - DNA, 819 bp, Artificial Sequence
  derived and/or modified sequence
atggacctgggcgaatgtaccaagattcatgatctggcgttacgcgcagactacgaaattgcatccaaagagcgcgatttgtttttcgaactggatgctatggatcacctggagagcttcatagccgagtgtgatagaaggaccgagctcgcgaaaaagcgactggctgagacacaggaggagatttccgccgaggtctctgccaaggcagagaaagtgcacgagctgaacgaggagattggcaaattactcgcaaaggctgagcagttgggggccgaagggaacgtggatgaaagccagaaaatcttgatggaggtggagaaagtgagagccaagaagaaagaggccgaagaggaatacagaaatagtatgccggcaagcagttttcagcagcagaagcttagagtctgcgaggtttgttcggcgtatcttggccttcacgacaatgatcggcggcttgctgaccacttcgggggcaagcttcacctgggtttcattcaaatcagggaaaagctagaccagctacgcaagacagtcgccgaaaaacaagagaagagaaatcaagaccggttgaggcgtagggaagagcgagagcgggaggagaggctctctagaaggtctgggtctaggacaagagatcgcaggagatcccgttctagggacaggcgcaggaggcgatcccgtagcacatctcgtgagcggagaaaactctcacgctcgcgctctagagataggcaccgcaggcatcggagcaggtccagaagtcactctagaggacacagaagggcctccagagatcgtagtgctaaatacaaatag

SEQ ID NO: 315877 - DNA, 99 bp, Artificial Sequence
  derived and/or modified sequence
atggacctgggcgagtgtactaagatccatgaccttgccctgcgggctgactacgagattgcatccaaagaacgcgatttattttttgagctcgactag

SEQ ID NO: 315878 - DNA, 819 bp, Artificial Sequence
  derived and/or modified sequence
atggacctgggagaatgtaccaagatccatgacctggccctgcgggctgactatgagatcgccagcaaggagcgggacctcttctttgagctggatgccatggaccacctggagagcttcatcgcagaatgtgacagaagaacagagctggccaagaagaggctggccgagacccaggaggagatctctgctgaggtgtctgccaaggccgagaaggtgcatgagctgaatgaggagatcggcaagctgctggccaaggccgagcagctgggcgctgagggcaatgtggatgagagccagaagatcctgatggaggtggagaaggtgcgggccaagaagaaggaggccgaggaggagtacagaaattccatgcctgccagcagcttccagcagcagaagctgcgggtgtgtgaggtgtgcagcgcctacctgggcctgcatgacaatgaccggcggctggccgaccactttggaggcaagctgcacctgggcttcatccagatccgggagaagctggaccagctgaggaagacagtggccgagaagcaggagaagaggaaccaggaccggctgcggcggcgggaggagcgggagcgggaggagcggctgagcagaagaagtggcagcaggacccgggacagaagaagaagccgcagccgggacagaagaagaagaagaagccgcagcaccagccgggagaggaggaagctgagccgcagccgcagccgggacagacacagaagacacaggagccgcagccgcagccacagccggggccacagaagagccagccgggacagaagtgccaagtacaagtag

SEQ ID NO: 315879 - DNA, 99 bp, Artificial Sequence
  derived and/or modified sequence
atggacctgggagaatgtaccaagatccatgacctggccctgcgggctgactatgagatcgccagcaaggagcgggacctcttctttgagctggactag

SEQ ID NO: 315880 - DNA, 819 bp, Artificial Sequence
  derived and/or modified sequence
atggacctgggcgagtgcaccaagatccacgacctggccctgcgggcagattatgagatcgcctccaaagaacgagacttgttctttgaattagatgcaatggatcatctggagtcattcatcgctgagtgtgataggagaaccgaactggcaaagaagcggctggcagaaacccaggaggagataagtgctgaggtcagcgccaaagcggaaaaggtgcatgagctcaatgaagagataggaaagttactggctaaagccgagcagctaggagcggaaggaaacgtcgacgagtcccagaaaatcctcatggaggtggagaaggtgcgcgctaagaaaaaggaggccgaagaagaataccggaactccatgcccgccagttctttccaacagcagaaactccgtgtttgtgaggtctgttcagcctatcttgggctgcacgataacgacagacgtctcgcggatcacttcggaggcaaattacacttgggattcatacaaataagagaaaagctggaccagctgcgtaaaacagtggcggagaagcaggagaagcgcaaccaggataggctccgaagacgggaagagagagaacgtgaagagaggctgtctaggaggtccggtagtcgcactcgagaccgccggcggtctcgcagtagagaccgccggcggcggcgttctcgaagcacaagtagggaaaggagaaaactatcccgcagtcggagcagagacagacacagacgacaccgctcccggtcccgctctcatagccggggacatcggcgtgcctcccgagaccggtccgcaaagtataagtag

SEQ ID NO: 315881 - DNA, 99 bp, Artificial Sequence
  derived and/or modified sequence
atggacctgggcgagtgcaccaagatccacgacctggccctgcgggcagactacgagatcgcgagcaaagagagagatctgttcttcgaactcgattag

SEQ ID NO: 315882 - DNA, 819 bp, Artificial Sequence
  derived and/or modified sequence
atggatttgggagagtgcaccaagatacacgacctggccctgagggccgattatgaaatagcttccaaagagagggacctgttctttgagttggacgcaatggaccatctcgagagttttatcgccgaatgcgataggagaacagagttggccaagaaacgccttgccgaaacacaggaagagatctccgcagaggtgtcagcaaaagccgaaaaggtacacgaacttaacgaggaaattggtaagcttttagcaaaggcagagcaactgggcgctgagggaaatgtggacgaaagccagaagatcctgatggaagtcgagaaggtcagggccaagaagaaggaagcagaggaggagtatcgtaattccatgcccgctagctcctttcaacaacaaaagctgcgagtgtgcgaggtctgctctgcctatcttggcttgcacgataatgatcgccgactcgccgaccactttggtggcaaattgcacttgggcttcatccagatccgcgaaaagctagatcagttacgcaaaactgtcgcggaaaaacaggaaaagcgaaaccaggacaggttgcgaaggcgggaggaacgcgaacgagaggagcgcctatcgcgcaggagcggcagcaggacccgcgaccgccgaagatctcggagcagagaccgtaggcgcaggcggtctcggtcaacctcacgggagcggagaaagttgtctagatcacggtctagagataggcatcgtagacaccggtcgcgttcaagaagccatagcaggggccatcgaagggccagccgtgacaggtccgccaaatacaaatag

SEQ ID NO: 315883 - DNA, 99 bp, Artificial Sequence
  derived and/or modified sequence
atggatcttggagaatgcaccaagatacacgaccttgccctacgcgcagattacgagattgcgtcaaaggaaagggatctgttcttcgaactcgattag

SEQ ID NO: 315884 - DNA, 819 bp, Artificial Sequence
  derived and/or modified sequence
atggacctgggcgagtgcaccaagatccacgacctggccctgagagccgactacgagatcgccagcaaggagagagacctgttcttcgagctggacgccatggaccacctggagagcttcatcgccgagtgcgacagaagaaccgagctggccaagaagagactggccgagacccaggaggagatcagcgccgaggtgagcgccaaggccgagaaggtgcacgagctgaacgaggagatcggcaagctgctggccaaggccgagcagctgggcgccgagggcaacgtggacgagagccagaagatcctgatggaggtggagaaggtgagagccaagaagaaggaggccgaggaggagtacagaaacagcatgcccgccagcagcttccagcagcagaagctgagagtgtgcgaggtgtgcagcgcctacctgggcctgcacgacaacgacagaagactggccgaccacttcggcggcaagctgcacctgggcttcatccagatcagagagaagctggaccagctgagaaagaccgtggccgagaagcaggagaagagaaaccaggacagactgagaagaagagaggagagagagagagaggagagactgagcagaagaagcggcagcagaaccagagacagaagaagaagcagaagcagagacagaagaagaagaagaagcagaagcaccagcagagagagaagaaagctgagcagaagcagaagcagagacagacacagaagacacagaagcagaagcagaagccacagcagaggccacagaagagccagcagagacagaagcgccaagtacaagtag

SEQ ID NO: 315885 - DNA, 99 bp, Artificial Sequence
  derived and/or modified sequence
atggacctgggcgagtgcaccaagatccacgacctggccctgagagccgactacgagatcgccagcaaggagagagacctgttcttcgagctggactag

SEQ ID NO: 315886 - DNA, 1062 bp, Artificial Sequence
  derived and/or modified sequence
atgtacctcctgtggaagctgatgtggcgagagcccggtgcatacatttttctgcagaacccaccaggcctgccatcaatcgctgtgtgctggttcgttgggtgcttgtgcggatctaagcttgtaattgattggcataactatggatacagcatcatggggcttgtccacggtcccaaccaccccctggtgctcctggcgaagtggtacgagaaattcttcggtagacttagccacctaaatctctgcgtgaccaacgccatgagagaagatctggcagacaactggcacattagagctgttactgtctatgacaaaccagcctcattcttcaaggaaacccccctcgatctccaacataggctatttatgaaactcggttctatgcactccccttttcgagctcgctccgaacctgaagatcccgtgaccgaacgctcggcctttacagagagggatgcaggcagtggtctggtgactcggctgcgggaacggcccgcgctcctcgtgtcaagtacctcatggaccgaggacgaagatttcagcatacttctggctgccctggagaaatttgagcagctcaccctggacggccacaatctcccaagccttgtgtgtgtaataacgggaaaaggtcccctccgcgaatattatagtagactaatccaccagaagcacttccagcacatccaagtgtgtaccccttggctcgaggctgaagactacccccttctgttagggagtgccgacctaggcgtgtgcctgcacacctctagctctggcctggacctgcctatgaaagtggtggacatgttcggatgttgcctgcctgtgtgcgcagtgaactttaagtgcctgcatgagctagtaaagcacgaagagaatggactcgtgttcgaggacagcgaggagcttgccgcacagctccagatgttattcagcaacttcccggatcccgctgggaaattgaaccagtttcggaagaacttacgcgaaagccagcagttgaggtgggatgaatcttgggtacagacggttttacctctggttatggatacctag

SEQ ID NO: 315887 - DNA, 1062 bp, Artificial Sequence
  derived and/or modified sequence
atgtacctgctgtggaagctgatgtggagggagcccggggcctacatcttcctgcagaaccccccaggcctgcccagcattgctgtgtgctggtttgtgggctgcctgtgtggcagcaagctggtgattgactggcacaactacggctacagcatcatgggcctggtgcacggccccaaccaccccctggtgctgctggccaagtggtatgagaagttcttcggccgcctgagccacctgaacctgtgtgtgaccaatgccatgagggaggacctggccgacaactggcacatccgggctgtgacagtgtatgacaagccagccagcttcttcaaggagacccccctggacctgcagcacaggctcttcatgaagctgggctccatgcacagccccttccgggcccggtctgagcctgaggaccctgtgacagagaggtctgccttcacagaaagagatgctggcagcggcctggtgacccggctgcgggagaggcctgccctgctggtgagcagcacctcctggacagaagatgaggacttcagcatcctgctggccgccctggagaagtttgagcagctgaccctggatggccacaacctgcccagcctggtgtgtgtgatcaccgggaagggccccctgcgggagtactacagccgcctcatccaccagaagcacttccagcacatccaggtgtgcaccccctggctggaggccgaggactaccccctgctgctgggcagcgctgacctgggcgtgtgcctgcacaccagcagcagcggcctggacctgcccatgaaggtggtggacatgtttggctgctgcctgcctgtgtgtgctgtgaacttcaagtgcctgcacgagctggtgaagcatgaggagaatggcctggtgtttgaggacagcgaggagctggccgcccagctgcagatgctgttcagcaacttcccagaccctgctgggaagctgaaccagttcaggaagaacctgcgggagagccagcagctgcgctgggatgagagctgggtgcagacagtgctgcccctggtgatggacacctag

SEQ ID NO: 315888 - DNA, 1062 bp, Artificial Sequence
  derived and/or modified sequence
atgtacctgctgtggaagctgatgtggcgggagcccggcgcctacatctttctccaaaatccgccggggctgccaagcatcgcagtttgttggtttgtgggatgtctgtgcggctccaagctggtgatagactggcataattacggatattccatcatgggcctcgtgcacggtcccaatcatcccctcgtgctgctggccaaatggtacgaaaagttttttgggcggctgagccatctcaacctgtgtgtgacgaacgcaatgagggaggatctggcggacaattggcacattagggctgttacagtgtacgacaaacctgccagctttttcaaggagacccccctcgacctacagcaccgattatttatgaaactcggatcaatgcatagtcctttccgggcgaggtctgaaccagaagacccggtgactgagaggagtgcatttaccgaacgtgatgccgggagtggtctggtgacacggctcagggagcgccctgcgctattagtgtccagcaccagctggacggaagatgaggatttttcaatccttctggccgccttggaaaaatttgaacagctgactctggacgggcataacctgcccagcctggtttgtgtaatcacgggcaagggccctctgagagaatactatagcagactgattcaccagaagcatttccaacatatccaggtctgtaccccatggctcgaggctgaagattaccctttgctgcttggatctgccgacctcggtgtgtgcctgcatacttcttccagcgggctggacctgcccatgaaagtagtggatatgttcgggtgctgcctgccagtgtgtgccgtgaacttcaagtgcttgcacgaacttgtgaagcacgaggaaaatggcctggtttttgaggacagcgaggaactcgctgcacagctgcagatgctgtttagcaacttccccgaccctgccggcaaactgaatcaattccgtaaaaatcttagggagtctcaacagctccggtgggatgaatcctgggtccagaccgtacttcccctggtaatggacacatag

SEQ ID NO: 315889 - DNA, 1062 bp, Artificial Sequence
  derived and/or modified sequence
atgtacctactgtggaaactaatgtggcgcgaacctggcgcatatatatttcttcaaaatcctcctggtctgccctcaatagcagtttgctggttcgtggggtgcctatgcggttccaagctggtgatagattggcataactatggatactctattatgggcctggtgcacgggcctaaccatccgctggtactgcttgctaaatggtacgagaaattctttggcagactttcccatttgaatctatgcgtaacaaatgcgatgagagaagatttagctgataattggcacatccgcgctgtgaccgtttacgacaagcccgcttccttctttaaagagaccccactggatctgcagcatagactcttcatgaagctgggtagtatgcactctcctttccgggctcgctctgagccagaagatcctgttaccgaaaggagcgcatttactgagcgtgacgccggatccggactggtgacccgcttgcgcgagcgcccagctctgctcgtctcttctacatcttggacagaagacgaggacttcagtattctgcttgctgccctggagaaattcgagcagttaaccttagacggtcacaatctacctagcttagtctgtgttattactgggaagggcccactacgcgaatattactctagactgatccaccagaagcatttccaacatatccaggtgtgtaccccttggttagaggctgaagattatcccctgttgctcgggagcgccgacctgggggtgtgcctgcacacatccagttcgggacttgacctacccatgaaggtcgttgacatgtttggatgttgcctgcctgtttgtgccgtcaattttaaatgtcttcacgagcttgtcaagcatgaggagaacggcttggttttcgaagatagtgaagaactcgctgcccagcttcagatgctattcagtaattttccggatcctgctggcaaactcaaccagtttagaaagaatttgagagagagtcagcaactccgatgggacgagagctgggtgcagactgtgcttcccttggtgatggatacttag

SEQ ID NO: 315890 - DNA, 1062 bp, Artificial Sequence
  derived and/or modified sequence
atgtacctgctgtggaagctgatgtggagagagcccggcgcctacatcttcctgcagaacccccccggcctgcccagcatcgccgtgtgctggttcgtgggctgcctgtgcggcagcaagctggtgatcgactggcacaactacggctacagcatcatgggcctggtgcacggccccaaccaccccctggtgctgctggccaagtggtacgagaagttcttcggcagactgagccacctgaacctgtgcgtgaccaacgccatgagagaggacctggccgacaactggcacatcagagccgtgaccgtgtacgacaagcccgccagcttcttcaaggagacccccctggacctgcagcacagactgttcatgaagctgggcagcatgcacagccccttcagagccagaagcgagcccgaggaccccgtgaccgagagaagcgccttcaccgagagagacgccggcagcggcctggtgaccagactgagagagagacccgccctgctggtgagcagcaccagctggaccgaggacgaggacttcagcatcctgctggccgccctggagaagttcgagcagctgaccctggacggccacaacctgcccagcctggtgtgcgtgatcaccggcaagggccccctgagagagtactacagcagactgatccaccagaagcacttccagcacatccaggtgtgcaccccctggctggaggccgaggactaccccctgctgctgggcagcgccgacctgggcgtgtgcctgcacaccagcagcagcggcctggacctgcccatgaaggtggtggacatgttcggctgctgcctgcccgtgtgcgccgtgaacttcaagtgcctgcacgagctggtgaagcacgaggagaacggcctggtgttcgaggacagcgaggagctggccgcccagctgcagatgctgttcagcaacttccccgaccccgccggcaagctgaaccagttcagaaagaacctgagagagagccagcagctgagatgggacgagagctgggtgcagaccgtgctgcccctggtgatggacacctag

SEQ ID NO: 315891 - protein, 579 aa, Artificial Sequence
  derived and/or modified sequence
MSEARRDSTSSLQRKKPPWLKLDIPSAVPLTAEEPSFLQPLRRQAFLRSVSMPAETAHISSPHHELRRPVLQRQTSITQTIRRGTADWFGVSKDSDSTQKWQRKSIRHCSQRYGKLKPQVLRELDLPSQDNVSLTSTETPPPLYVGPCQLGMQKIIDPLARGRAFRVADDTAEGLSAPHTPVTPGAASLCSFSSSRSGFHRLPRRRKRESVAKMSFRAAAALMKGRSVRDGTFRRAQRRSFTPASFLEEDTTDFPDELDTSFFAREGILHEELSTYPDEVFESPSEAALKDWEKAPEQADLTGGALDRSELERSHLMLPLERGWRKQKEGAAAPQPKVRLRQEVVSTAGPRRGQRIAVPVRKLFAREKRPYGLGMVGRLTNRTYRKRIDSFVKRQIEDMDDHRPFFTYWLTFVHSLVTILAVCIYGIAPVGFSQHETVDSVLRNRGVYENVKYVQQENFWIGPSSVRTGLGAGPAGAGPGGARRGQEAPDCGRSSPSPAGGPHPPGRQVFALHAPGPAGAQLHSLGARAREALRLLRAQRQVGLRADLGGGVLGAFPRPGLPPSSARCSLFRPQIDSAE

SEQ ID NO: 315892 - protein, 232 aa, Artificial Sequence
  derived and/or modified sequence
  misc_feature (1)..(1): Xaa can be any naturally occurring amino acid
XRPCCIGTKGRCEITSREYCDFMRGYFHEEATLCSQVHCMDDVCGLLPFLNPEMTVLRDLEKLAGWHRIAIIYLLSGVTGNLASAIFLPYRAEVGPAGSQFGILACLFVELFQSWQILARPWRAFFKLLAVVLFLFTFGLLPWIDNFAHISGFISGLFLSFAFLPYISFGKFDLYRKRCQIIIFQVVFLGLLAGLVVLFYVYPVRCEWCEFLTCIPFTDKFCEKYELDAQLH

SEQ ID NO: 315893 - DNA, 573 bp, Artificial Sequence
  derived and/or modified sequence
atgtcagaggcgcgccgggactcaacaagttctctgcagcgcaagaaacctccgtggttaaaactggatataccctcggctgtgccccttacagctgaggagccctcattcctgcagcctctgcgacgccaggcattcctgagatcggtctcaatgcccgccgagaccgcacacatcagctcaccgcatcacgagctgaggcgaccagttcttcaacgccagacttcgatcactcaaacgattcgaagctcaagacaggttcgtttcggccgcgtgcacactttacccctgctgggccctcgtgcagcccgaagagcctttccacagagacaaagtctgtcctggtccctgctgcgaggcaccgcagactggttcggcgtgagcaaggatagtgatagtacccagaaatggcagcgcaagtccatccggcactgttcacaacgctacggcaaactcaagccccaagtcctgagggaattagacctgcccagtcaggacaatgtatcgttgaccagcactgaaaccccccctccactgtatgtcggcccctgccagctgggtatgcaaaaatag

SEQ ID NO: 315894 - DNA, 492 bp, Artificial Sequence
  derived and/or modified sequence
atgagcgaggccaggcgggattccacttcctcgctccaacgtaagaaacccccctggctgaagttggatatcccctcagcagtgcccttgaccgcagaggagccctcctttctgcagcccctgcggcggcaggctttcttacgctccgtgtcgatgcccgctgaaactgcgcatatttccagccctcaccacgagctccgcaggcctgtactgcagagacaaacatcgattacccagacaataaggaggggcaccgcagattggtttggcgtgtcaaaagactcggatagtactcagaagtggcagcggaagtccatacggcactgttcccaaaggtacggcaagcttaagcctcaggtcctccgggagcttgacctgcctagtcaggacaatgtttctctgacatcaacagagactcctcctcctctctacgttgggccttgtcagttggggatgcaaaaaataatcgacccgttggccaggggccggtag

SEQ ID NO: 315895 - DNA, 573 bp, Artificial Sequence
  derived and/or modified sequence
atgtctgaggcccggcgggacagcaccagcagcctgcagaggaagaagccaccctggctgaagctggacatccccagcgctgtgcccctgacagctgaggagcccagcttcctgcagcccctgcggcggcaggccttcctgcggtctgtgtccatgcctgctgagacagcccacatcagcagcccccaccacgagctgcggcggcctgtgctgcagaggcagaccagcatcacccagaccatccgcagcagccggcaggtgcgcttcggccgggtgcacaccctgcccctgctgggcccccgggccgcccggcgggccttcccccagaggcagagcctgtcctggagcctgctgcggggcacagctgactggtttggagtgtccaaggacagcgacagcacccagaagtggcagaggaagagcatccgccactgcagccagagatatggcaagctgaagccccaggtgctgcgggagctggacctgcccagccaggacaacgtgtccctgaccagcacagagaccccaccacccctgtatgtgggcccctgccagctgggcatgcagaagtag

SEQ ID NO: 315896 - DNA, 492 bp, Artificial Sequence
  derived and/or modified sequence
atgtctgaggcccggcgggacagcaccagcagcctgcagaggaagaagccaccctggctgaagctggacatccccagcgctgtgcccctgacagctgaggagcccagcttcctgcagcccctgcggcggcaggccttcctgcggtctgtgtccatgcctgctgagacagcccacatcagcagcccccaccacgagctgcggcggcctgtgctgcagaggcagaccagcatcacccagaccatccggcggggcacagctgactggtttggagtgtccaaggacagcgacagcacccagaagtggcagaggaagagcatccgccactgcagccagagatatggcaagctgaagccccaggtgctgcgggagctggacctgcccagccaggacaacgtgtccctgaccagcacagagaccccaccacccctgtatgtgggcccctgccagctgggcatgcagaagatcatcgaccccctggcccggggccgctag

SEQ ID NO: 315897 - DNA, 573 bp, Artificial Sequence
  derived and/or modified sequence
atgagcgaggcccggcgggacagcaccagcagcctgcagcggaagaagcctccctggctcaagctggatatacctagtgcagttcccctcaccgcagaggagccctcctttctgcagcccctgaggcgccaggcctttctccgatctgtctccatgccagccgaaaccgcccacatctcctcaccacaccacgagctgcgcaggccagtgttacagagacagacatctatcacacagacaatacgctcatctcgtcaggtccgcttcggtagagtgcacaccttgccactcttgggcccacgggccgcgaggagagccttcccccagcggcagagtttgagctggtctctgctgcggggaactgctgattggtttggcgtctcgaaagattcagatagtacacagaagtggcaacgcaagtccattcgtcattgctcccagaggtacggaaaactcaagccccaggtgttacgggaactggatttacccagccaggataacgtgtctcttacaagtaccgagactcctccccctttatacgtcgggccctgccagctcggtatgcaaaaatag

SEQ ID NO: 315898 - DNA, 492 bp, Artificial Sequence
  derived and/or modified sequence
atgagcgaggcccggcgggacagcaccagcagcctgcagcggaagaagcctccctggctgaagttggatatccccagtgccgtccccctcacagctgaggaaccttccttcctccagccactcaggcggcaggcattcctgaggtcggtctccatgccagcagaaaccgcccacattagcagcccccaccatgaactgcggagacctgtgctgcagaggcaaacgagtatcacccagaccattcgcaggggaaccgctgactggttcggtgtgtctaaggactctgacagcacacagaaatggcagcgcaagagcattagacattgctcgcaacggtacgggaagctaaagccacaagtgctgagggagctggacctgccatcccaggataacgtctctctgacttctaccgaaactccccctccactgtacgtcggcccatgtcagctcggtatgcagaaaattattgatcccctcgcccgcgggcggtag

SEQ ID NO: 315899 - DNA, 573 bp, Artificial Sequence
  derived and/or modified sequence
atgtcagaggcacgcagggattcaacatcctccctccagagaaaaaagcctccatggctaaaactggacattccaagtgcggtgcctctgactgctgaagagccaagttttctgcaacctctccgcagacaagcatttctgaggagcgtgtcgatgcctgctgagaccgcgcatatatcaagtccccatcacgaattgagacggccagtgctacaacggcaaacatccatcactcagacaatacggtccagtagacaagttcgatttgggagggtccatacactgccgctcttgggtcctcgcgctgcccgacgcgcatttcctcaacgccagtccctgagttggagcttactgcgaggtaccgccgactggtttggggtgtccaaggactcagattcaactcaaaaatggcaaagaaagagtattcgtcactgctcgcagaggtacggcaaactcaaaccccaggtattgcgggagctggatttgccttctcaggataacgtgagcctgactagcacagaaacacctccaccactgtacgtcgggccttgccaactaggaatgcagaaatag

SEQ ID NO: 315900 - DNA, 492 bp, Artificial Sequence
  derived and/or modified sequence
atgtctgaagcccgtcgcgactccacttcgtcccttcagaggaaaaaacctccctggctaaagctcgatatccctagcgctgtgcctctgaccgccgaggagccttccttcctgcagccactccgcagacaggcgtttctcagaagtgtgtctatgccagcggagaccgcgcacatttctagcccacaccatgagctccgtagaccagtgctccaacgtcagacaagcattacccagacaattaggcggggtaccgccgactggttcggggtatcaaaggatagcgactccacacagaaatggcagcggaagagtattcgccactgttctcagaggtatggaaagctgaagccacaggtcctgagagagcttgatctgccaagccaggacaatgttagccttacaagtacggagacaccaccgccactgtacgtgggtccttgtcagctcggaatgcagaaaatcatcgacccattggcaagaggacgatag

SEQ ID NO: 315901 - DNA, 1979 bp, Artificial Sequence
  derived and/or modified sequence
atgctcccaccacaggctggaagcggtgggatgagagttccaactgtggcctgcagagtgggctggcgggctggtccaggacaagagaaagtggtgccaggcctgccttgctctgccaggaaccatgagtgaggcccgcagggacagcacgagcagcctgcagcgcaagaagccaccctggctaaagctggacattccctctgcggtgcccctgacggcagaagagcccagcttcctgcagcccctgaggcgacaggctttcctgaggagtgtgagtatgccagccgagacagcccacatctcttcaccccaccatgagctccggcggccggtgctgcaacgccagacgtccatcacacagaccatccgcagcagccgacaagtacgcttcgggcgtgtccacactctgcccctcttgggtccccgggctgcccgcagggccttcccacagcgccagtctctctcttggtccctgctcagggggaccgccgactggtttggagtgagcaaggacagtgacagcacccagaaatggcagcgcaagagcatccgtcactgcagccagcgctacgggaagctgaagccccaggtcctccgggagctggacctgcccagccaggacaacgtgtcgctgaccagcaccgagacgccacccccactctacgtggggccatgccagctgggcatgcagaagatcatagaccccctggcccgtggccgtgccttccgtgtggcagatgacactgcggaaggcctgagtgccccacacactcccgtcacgccgggtgctgcctccctctgctccttctccagctcccgctcaggtttccaccggctcccgcggcggcgcaagcgagagtcggtggccaagatgagcttccgggcggccgcagcgctgatgaaaggccgctccgttagggatggcacctttcgccgggcacagcgtcgaagcttcactccagctagctttctggaggaggacacaactgatttccccgatgagctggacacatccttctttgcccgggaaggtatcctccatgaagagctgtccacatacccggatgaagttttcgagtccccatcggaggcagcgctaaaggactgggagaaggcaccggagcaggcggacctcaccggcggggccctggaccgcagcgagcttgagcgcagccacctgatgctgcccttggagcgaggctggcggaagcagaaggagggcgccgcagccccgcagcccaaggtgcggctccgacaggaggtggtgagcaccgcggggccgcgacggggccagcgtatcgcggtgccggtgcgcaagctcttcgcccgggagaagcggccgtatgggctgggcatggtgggacggctcaccaaccgcacctaccgcaagcgcatcgacagcttcgtcaagcgccagatcgaggacatggacgaccacaggcccttcttcacctactggcttaccttcgtgcactcgctcgtcaccatcctagccgtgtgcatctatggcatcgcgcccgtgggcttctcgcagcatgagacggtggactcggtgctgcggaaccgcggggtctacgagaacgtcaagtacgtgcagcaggagaacttctggatcgggcccagctcggtgaggacggggctgggggcggggccggcgggggcgggacctggaggtgcccggcgggggcaggaggccccggactgcggccgctcgtctccctcgcccgcaggaggccctcatccacctgggcgccaagttttcgccctgcatgcgccaggacccgcaggtgcacagcttcattcgctcggcgcgcgagcgcgagaagcactccgcctgctgcgtgcgcaacgacaggtcgggctgcgtgcagacctcggaggaggagtgctcggtgcgtttccccgcccgggactcccgccttcgtctgcccggtgttcgctcttcagacctcagatagactcggcagagtgatccttcg

SEQ ID NO: 315902 - DNA, 615 bp, Artificial Sequence
  derived and/or modified sequence
ctcatgctcccaccacaggctggaagcggtgggatgagagttccaactgtggcctgcagagtgggctggcgggctggtccaggacaagagaaagtggtgccaggcctgccttgctctgccaggaaccatgagtgaggcccgcagggacagcacgagcagcctgcagcgcaagaagccaccctggctaaagctggacattccctctgcggtgcccctgacggcagaagagcccagcttcctgcagcccctgaggcgacaggctttcctgaggagtgtgagtatgccagccgagacagcccacatctcttcaccccaccatgagctccggcggccggtgctgcaacgccagacgtccatcacacagaccatccgcagggggaccgccgactggtttggagtgagcaaggacagtgacagcacccagaaatggcagcgcaagagcatccgtcactgcagccagcgctacgggaagctgaagccccaggtcctccgggagctggacctgcccagccaggacaacgtgtcgctgaccagcaccgagacgccacccccactctacgtggggccatgccagctgggcatgcagaagatcatagaccccctggcccgtggccg

SEQ ID NO: 315903 - DNA, 573 bp, Artificial Sequence
  derived and/or modified sequence
atgagcgaggccagaagagacagcaccagcagcctgcagagaaagaagcccccctggctgaagctggacatccccagcgccgtgcccctgaccgccgaggagcccagcttcctgcagcccctgagaagacaggccttcctgagaagcgtgagcatgcccgccgagaccgcccacatcagcagcccccaccacgagctgagaagacccgtgctgcagagacagaccagcatcacccagaccatcagaagcagcagacaggtgagattcggcagagtgcacaccctgcccctgctgggccccagagccgccagaagagccttcccccagagacagagcctgagctggagcctgctgagaggcaccgccgactggttcggcgtgagcaaggacagcgacagcacccagaagtggcagagaaagagcatcagacactgcagccagagatacggcaagctgaagccccaggtgctgagagagctggacctgcccagccaggacaacgtgagcctgaccagcaccgagacccccccccccctgtacgtgggcccctgccagctgggcatgcagaagtag

SEQ ID NO: 315904 - DNA, 492 bp, Artificial Sequence
  derived and/or modified sequence
atgagcgaggccagaagagacagcaccagcagcctgcagagaaagaagcccccctggctgaagctggacatccccagcgccgtgcccctgaccgccgaggagcccagcttcctgcagcccctgagaagacaggccttcctgagaagcgtgagcatgcccgccgagaccgcccacatcagcagcccccaccacgagctgagaagacccgtgctgcagagacagaccagcatcacccagaccatcagaagaggcaccgccgactggttcggcgtgagcaaggacagcgacagcacccagaagtggcagagaaagagcatcagacactgcagccagagatacggcaagctgaagccccaggtgctgagagagctggacctgcccagccaggacaacgtgagcctgaccagcaccgagacccccccccccctgtacgtgggcccctgccagctgggcatgcagaagatcatcgaccccctggccagaggcagatag

SEQ ID NO: 315905 - DNA, 561 bp, Artificial Sequence
  derived and/or modified sequence
atgagccccgccgaccccggcaccgtggccaccatgagaaagcccagatgcagcctgcccgacgtgctgggcgtggccggcctggtgagaagaagaagaagatacgccctgagcggcagcgtgtggaagaagagaaccctgacctggagagtgagaagcttcccccagagcagccagctgagccaggagaccgtgagagtgctgatgagctacgccctgatggcctggggcatggagagcggcctgaccttccacgaggtggacagcccccagggccaggagcccgacatcctgatcgacttcgccagagccttccaccaggacagctaccccttcgacggcctgggcggcaccctggcccacgccttcttccccggcgagcaccccatcagcggcgacacccacttcgacgacgaggagacctggaccttcggcagcaaggccagccagcagctggagcaggagctggccggcggcagccccgtggacgaggagctgggcttcagcagaggctggagagtgaaccccctgggccccggcagccccgagagactgagctag

SEQ ID NO: 315906 - DNA, 561 bp, Artificial Sequence
  derived and/or modified sequence
atgtcccctgccgacccaggcactgttgccaccatgcggaaacctcgttgcagcttgcccgacgtgctcggggtggctggactcgtgcgcaggcgacgccgctacgcactcagtggaagcgtctggaaaaagaggactttaacttggagagtgcgatcttttcctcaatcttctcagctgagccaagagaccgtccgcgttctcatgtcttacgcccttatggcttggggcatggaatccggattgacctttcacgaggttgacagcccacagggccaagagcccgatattctgatagacttcgctagagcatttcaccaggactcataccccttcgatggactcggtggtacactcgctcacgctttctttccgggcgagcaccccatctccggcgatacccactttgacgatgaggagacatggacctttggcagcaaggcttcccaacagctggaacaagaactggctggcggctcacctgttgacgaagagctgggcttttctaggggctggagagtgaaccccctgggcccgggctccccagaacgcttaagttag

SEQ ID NO: 315907 - DNA, 561 bp, Artificial Sequence
  derived and/or modified sequence
atgagccctgctgaccccggcaccgtggccaccatgaggaagccccgctgcagcctgcctgatgtgctgggcgtggccggcctggtgagaagaagaagaagatatgccctgagcggctctgtgtggaagaagaggaccctgacctggagggtgcgctccttcccccagagcagccagctgagccaggagaccgtgcgggtgctgatgtcctatgccctgatggcctggggcatggagagcggcctgaccttccacgaggtggacagcccccagggccaggagccagacatcctgattgactttgcccgggccttccaccaggacagctacccctttgatggcctgggcggcaccctggcccacgccttcttccctggagagcaccccatcagcggggacacccactttgatgatgaggagacctggaccttcggcagcaaggccagccagcagctggagcaggagctggccggcggcagccctgtggatgaggagctgggcttcagccggggctggagggtgaaccccctgggccctggcagccctgagcggctgtcctag

SEQ ID NO: 315908 - DNA, 561 bp, Artificial Sequence
  derived and/or modified sequence
atgagccccgccgaccccggcaccgtggccaccatgcggaagccccggtgctccttgcccgacgtgctaggcgtggccgggctggtgcgacgcaggagacgctacgcactatccggaagcgtgtggaagaagcgcactctcacttggagagtcagatccttccctcagtcatcacaactcagccaggaaactgtgcgtgtgttaatgagctacgccttaatggcctgggggatggagtccgggctgacatttcacgaagtcgattccccccagggccaagaaccggacattttgattgacttcgccagggcgtttcaccaggactcctacccttttgacggtctcggtggaacccttgctcacgctttttttcccggcgagcatccgatttctggggacacacatttcgatgacgaggagacatggacatttggctccaaagcctcccagcagctggaacaggagctcgctggcggttctccggttgacgaggaattgggcttctctcgcgggtggcgggtcaacccattaggtcccggcagtcctgagaggctttcatag

SEQ ID NO: 315909 - DNA, 561 bp, Artificial Sequence
  derived and/or modified sequence
atgtcacctgccgatccgggaaccgttgctacaatgcgcaagccccgatgtagtctgcctgacgtgctgggggtcgcgggactggttagacgcagacgccgatatgcactgagcggaagtgtatggaagaaacggactctgacctggcgtgtgagaagctttccacagagttcccagctgtcacaggagacagttagggttctcatgtcttacgccctgatggcctggggcatggagtcgggactgaccttccacgaagttgactcacctcagggccaggagcctgacatattgatcgactttgctagagcattccaccaggactcatatcccttcgatggcctgggaggcacattggctcacgcattcttcccaggcgaacatcctatcagcggtgacactcacttcgacgatgaagagacctggactttcggttccaaagctagccaacagcttgaacaggaattggctggtggctccccagtcgacgaggaacttggcttctcccgcggttggagagtcaaccctctcggccctggcagcccggaaagactgtcctag

SEQ ID NO: 315910 - DNA, 631 bp, Artificial Sequence
  derived and/or modified sequence
accgccaaatgtctcccgcagacccagggacagtggccaccatgcgtaagccccgctgctccctgcctgacgtgctgggggtggcggggctggtcaggcggcgtcgccggtacgctctgagcggcagcgtgtggaagaagcgaaccctgacatggagggtacgttccttcccccagagctcccagctgagccaggagaccgtgcgggtcctcatgagctatgccctgatggcctggggcatggagtcaggcctcacatttcatgaggtggattccccccagggccaggagcccgacatcctcatcgactttgcccgcgccttccaccaggacagctaccccttcgacgggttggggggcaccctagcccatgccttcttccctggggagcaccccatctccggggacactcactttgacgatgaggagacctggacttttgggtcaaaagcctctcagcagctggagcaggagctggcaggcggctcaccggttgatgaggagctgggcttcagccggggctggcgtgtgaatcctctgggtcctggcagtcctgagcgcctgagctgaatacagagggaagaggctgggagcaaggccgggtgctggggccggcaggctgtgttctgaga

SEQ ID NO: 315911 - protein, 185 aa, Artificial Sequence
  derived and/or modified sequence
MRPDSPTMAAPAESLRRRKTGYSDPEPESPPAPGRGPAGSPAHLHTGTFWLTRIVLLKALAFVYFVAFLVAFHQNKQLIGDRGLLPCRVFLKNFQQYFQDRTSWEVFSYMPTILWLMDWSDMNSNLDLLALLGLGISSFVLITGCANMLLMAALWGLYMSLVNVGHVWCPSLASAISLPSMHGGQ

SEQ ID NO: 315912 - protein, 166 aa, Artificial Sequence
  derived and/or modified sequence
MAAPAESLRRRKTGYSDPEPESPPAPGRGPAGSPAHLHTGTFWLTRIVLLKALAFVYFVAFLVAFHQNKQLIGDRGLLPCRVFLKNFQQYFQDRTSWEVFSYMPTILWLMDWSDMNSNLDLLALLGLGISSFVLITGCANMLLMAALWGLYMSLVNVGHVWYSFGK

SEQ ID NO: 315913 - DNA, 630 bp, Artificial Sequence
  derived and/or modified sequence
atgctgagtagtcagctctgttgcgttcactccctgcccccaaccgccaatccagccgctctctgttctttggcccagcaaatgtttaccaatattcgcagcccctgtagtggaccccagggttccccaggtctgccaaggagaacgcacattcatctttggccccactcagcacacatgtacttcttggtgacatccagtttactgcctttccctctcatccagcccggatgttcccgcacccgattcaagaccctctgcagcctgcggcacacgtccgccccaacggaggaaggacatgggccagtccgccgtccatgtggcatgcattgtcttagtcatctgccacaccctagaggtcgtccccagggccacccaactcatatgagacccgctctccaacaggccttactgagccacccctccctgttacttccctggagatcctcccccgacagtgctgtgcaggttggcccatccatgatactgcggagaattcccatggcaggacatctatgcttcccccattggccccagctcttagattctcgagattgttgtacatacacatgcattaacactcccgtgcttaattcgcacatggtgcaggaaggagtgtgcggacaatag

SEQ ID NO: 315914 - DNA, 853 bp, Artificial Sequence
  derived and/or modified sequence
aacaatggcggcgcccgcggagtcgctgaggaggcggaagactgggtactcggatccggagcctgagtcgccgcccgcgccggggcgtggccccgcaggctctccggcccatctccacacgggcaccttctggctgacccggatcgtgctcctgaaggccctagccttcgtgtacttcgtggcattcctggtggctttccatcagaacaagcagctcatcggtgacagggggctgcttccctgcagagtgttcctgaagaacttccagcagtacttccaggacaggacgagctgggaagtcttcagctacatgcccaccatcctctggctgatggactggtcagacatgaactccaacctggacttgctggctcttctcggactgggcatctcgtctttcgtactgatcacgggctgcgccaacatgcttctcatggctgccctgtggggcctctacatgtccctggttaatgtgggccatgtctggtactctttcggtaagtgagatgcatttagagaaagctctgcgagagttgagcgttgtgtgtttggatgggagtcccagcttctggagacggggttcctggggatcttcctgtgccctctgtggacgctgtcaaggctgccccagcatacccccacatcccggattgtcctgtggggcttccggtggctgatcttcaggatcatgcttggagcaggcctgatcaagatccggggggaccggtgctggcgagacctcacctgcatggacttccactatgaggagaagtttgcaggctgtttcctgaggtctgggccagcagcaccgccatgccctgacccaccattcccctggccgcgggctgagtgt

SEQ ID NO: 315915 - DNA, 1053 bp, Artificial Sequence
  derived and/or modified sequence
atgagaggcgctgggttaatcaagatcagaggcgacagatgttggagagacctgacttgtatggacttccactacgaaacccagccaatgcccaacccagtggcatattatcttcatcatagcccatggtggtttcaccgcttcgaaaccttgagcaatcactttatagaattactcgtgccatttttcttatttctcgggcggagggcctgtataatccacggtgtgctgcagattttattccaggccgtccttatcgtgtccggcaatctgagcttccttaactggttgacgatggtaccctctttagcatgttttgacgacgcaactctgggcttcctgttcccaagtggaccaggcagcttgaaagaccgcgtgcttcaaatgcaacgggacatacgaggggccagacctgaaccaagatttggctccgtggtgaggagggctgctaacgtgtcgctgggtgtacttcttgcttggctgtccgtgccagttgtactaaatctgttgtcctcccggcaggtgatgaacactcatttcaattctctacacatcgtgaatacctacggagcttttggcagtattactaaagagcgagctgaggttattctgcagggcacagcctcatctaatgcctccgcacctgacgccatgtgggaagactatgaattcaaatgcaaacccggggaccctagccgcagaccttgtctcattagcccatatcactatcgtctggactggctaatgtggtttgccgcatttcagacctatgagcacaacgactggattatacatctggccggaaaacttctggcatctgatgctgaggcactgagcttacttgcacacaacccgttcgccgggagaccaccgcctcgctgggtccgtggagagcattaccgatacaagtttagtaggcccggcggccgccacgctgccgagggcaagtggtgggtgcgcaagcgaattggcgcctatttccccccactatcacttgaggagttacgaccctattttagggatcgaggatggccactgcccggcccattgtag

SEQ ID NO: 315916 - DNA, 993 bp, Artificial Sequence
  derived and/or modified sequence
atggacttccactacgaaacccagcccatgccgaacccagtggcatactatttgcaccactctccatggtggtttcatcgttttgaaaccctgtcaaaccactttatcgagctcctggttccattcttccttttcctcggaaggagggcctgtattatacatggcgtgctgcagatcttgtttcaggcagtgcttatcgtcagtggcaacctgtcatttcttaactggcttacaatggtccctagcctggcttgcttcgatgatgcaacgttgggctttctgttcccttcaggcccagggtcattaaaagaccgggtgcttcagatgcagcgggacattcggggcgcacgcccagagccacgattcggttcagtggtaaggcgggccgccaacgtatctttaggtgtcttgttggcctggttgagtgtccccgtggtactgaaccttctttcaagccgtcaggtgatgaacacacatttcaactctttacacatcgtcaacacatacggggcttttggatccatcactaaagagagagccgaggtgatcttgcagggaaccgcgtccagtaatgcaagcgcacccgatgctatgtgggaggattacgagttcaagtgcaaacccggcgatccctccaggagaccttgcttaatttcaccgtaccattacaggcttgattggctgatgtggtttgcagctttccagacttatgagcacaacgactggatcatccatcttgctgggaagctgctcgcatccgatgcggaagcgttatctctgcttgctcataacccgtttgctgggcgtcctccaccccggtgggtgcgaggtgaacactaccgctataaattctctagacctggcgggcgccacgccgctgaaggcaagtggtgggtccggaaacggatcggagcttacttcccgccactctccctagaggaattacgcccttactttagggaccgcggctggcctctgcctggcccgctctag

SEQ ID NO: 315917 - DNA, 792 bp, Artificial Sequence
  derived and/or modified sequence
atgcctaatcccgtcgcatattatctacatcatagcccctggtggttccaccgattcgaaactctgtcaaaccactttattgagctgctggtgcctttttttctgttcctgggacgccgggcatgtataatccatggcgtgctgcaaatactgttccaggccgtcttgattgtgtctgggaacctgtcttttctgaattggttgaccatggtcccttctttggcttgttttgacgatgcgactcttggcttcctgtttcctagcggtccaggttctctcaaagatcgcgtcctccagatgcaaagggacatacggggcgcgcgacctgaaccccgctttggttcggtggtgaggcgcgctgccaatgtgtccttgggtgtgctgcttgcgtggcttagcgttcccgttgttctcaacctgctctctagtcggcaggtgatgaatactcacttcaatagcttgcacatcgtgaatacttacggcgccttcggctctatcacaaaggaacgggcagaggtgatcttgcagggaaccgcaagctctaatgcgtctgctcccgatgccatgtgggaggattacgagtttaagtgcaaaccaggggatccttcccgacggccatgtttaatctccccgtatcattaccgcctggattggctgatgtggtttgccgctttccaaacctatgagcacaacgattggataatccacctggctgggaaactactggcatcagatgctgaggctctaagtctcctggcccacaacccatttgctgggaggccacctccatag

SEQ ID NO: 315918 - DNA, 1053 bp, Artificial Sequence
  derived and/or modified sequence
atgagaggagctggcctcatcaagatccggggggaccgctgctggagggacctgacctgcatggacttccactatgagacccagcccatgcccaaccctgtggcctactacctgcaccacagcccctggtggttccacagatttgagaccctgagcaaccacttcatcgagctgctggtgcccttcttcctgttcctgggccggcgggcctgcatcatccacggcgtgctgcagatcctcttccaggccgtgctgattgtgtctggcaacctgtccttcctgaactggctgaccatggtgcccagcctggcctgctttgatgatgccaccctgggcttcctgttccccagcggccctggcagcctgaaggacagagtgctgcagatgcagagggacatccggggggcccggcctgagccccgcttcggctctgtggtgagaagagctgccaacgtgtccctgggcgtgctgctggcctggctgtctgtgcctgtggtgctgaacctgctgagcagccggcaggtgatgaacacccacttcaacagcctgcacatcgtgaacacctatggagccttcggcagcatcaccaaggagcgggcagaggtgatcctgcagggcacagccagcagcaatgccagcgccccagatgccatgtgggaggactatgagttcaagtgcaagccaggggaccccagcagaagaccctgcctgatcagcccctaccactaccgcctggactggctgatgtggtttgctgccttccagacctatgagcacaatgactggatcatccacctggccggcaagctgctggccagtgatgctgaggccctgagcctgctggcccacaacccctttgctggccggcccccaccccgctgggtgcggggggagcactaccgctacaagttcagcaggcctgggggcagacatgctgctgagggcaagtggtgggtgaggaagagaattggagcctacttcccccccctgagcctggaggagctgcggccctacttccgggaccggggctggcccctgcccggccccctgtag

SEQ ID NO: 315919 - DNA, 993 bp, Artificial Sequence
  derived and/or modified sequence
atggacttccactatgagacccagcccatgcccaaccctgtggcctactacctgcaccacagcccctggtggttccacagatttgagaccctgagcaaccacttcatcgagctgctggtgcccttcttcctgttcctgggccggcgggcctgcatcatccacggcgtgctgcagatcctcttccaggccgtgctgattgtgtctggcaacctgtccttcctgaactggctgaccatggtgcccagcctggcctgctttgatgatgccaccctgggcttcctgttccccagcggccctggcagcctgaaggacagagtgctgcagatgcagagggacatccggggggcccggcctgagccccgcttcggctctgtggtgagaagagctgccaacgtgtccctgggcgtgctgctggcctggctgtctgtgcctgtggtgctgaacctgctgagcagccggcaggtgatgaacacccacttcaacagcctgcacatcgtgaacacctatggagccttcggcagcatcaccaaggagcgggcagaggtgatcctgcagggcacagccagcagcaatgccagcgccccagatgccatgtgggaggactatgagttcaagtgcaagccaggggaccccagcagaagaccctgcctgatcagcccctaccactaccgcctggactggctgatgtggtttgctgccttccagacctatgagcacaatgactggatcatccacctggccggcaagctgctggccagtgatgctgaggccctgagcctgctggcccacaacccctttgctggccggcccccaccccgctgggtgcggggggagcactaccgctacaagttcagcaggcctgggggcagacatgctgctgagggcaagtggtgggtgaggaagagaattggagcctacttcccccccctgagcctggaggagctgcggccctacttccgggaccggggctggcccctgcccggccccctgtag

SEQ ID NO: 315920 - DNA, 792 bp, Artificial Sequence
  derived and/or modified sequence
atgcccaaccctgtggcctactacctgcaccacagcccctggtggttccacagatttgagaccctgagcaaccacttcatcgagctgctggtgcccttcttcctgttcctgggcagaagagcctgcatcatccatggagtgctgcagatcctcttccaggccgtgctgattgtgtctggcaacctgtccttcctgaactggctgaccatggtgcccagcctggcctgctttgatgatgccaccctgggcttcctgttccccagcggccctggcagcctgaaggacagagtgctgcagatgcagagggacatccggggggcccggcctgagcccaggtttggatctgtggtgcggcgggccgccaacgtgtccctgggcgtgctgctggcctggctgtctgtgcctgtggtgctgaacctgctgagcagccggcaggtgatgaacacccacttcaacagcctgcacatcgtgaacacctacggggccttcggcagcatcaccaaggagagagctgaggtgatcctgcagggcacagccagcagcaatgccagcgccccagatgccatgtgggaggactatgagttcaagtgcaagccaggggaccccagccggcggccctgcctgatcagcccctaccactaccgcctggactggctgatgtggtttgctgccttccagacctatgagcacaatgactggatcatccacctggccggcaagctgctggccagtgatgctgaggccctgagcctgctggcccacaacccctttgctggccggcccccaccctag

SEQ ID NO: 315921 - DNA, 1947 bp, Artificial Sequence
  derived and/or modified sequence
atgcgtggagctggcctgatcaagatccggggggaccggtgctggcgagacctcacctgcatggacttccactatgagacccagccgatgcccaatcctgtggcgtactacctgcaccactcaccctggtggttccatcgcttcgagacgctcagcaaccacttcatcgagctcctggtgcccttcttcctcttcctcggccggcgggcgtgcatcatccacggggtgctgcagatcctgttccaggccgtcctcatcgtcagcgggaacctcagcttcctgaactggctgactatggtgcccagcctggcctgctttgatgacgccaccctgggattcttgttcccctctgggccaggcagcctgaaggaccgagttctgcagatgcagagggacatccgaggggcccggcccgagcccagattcggctccgtggtgcggcgtgcagccaacgtctcgctgggcgtcctgctggcctggctcagcgtgcccgtggtcctcaacttgctgagctccaggcaggtcatgaacacccacttcaactctcttcacatcgtcaacacttacggggccttcggaagcatcaccaaggagcgggcggaggtgatcctgcagggcacagccagctccaacgccagcgcccccgatgccatgtgggaggactacgagttcaagtgcaagccaggtgaccccagcagacggccctgcctcatctccccgtaccactaccgcctggactggctgatgtggttcgcggccttccagacctacgagcacaacgactggatcatccacctggctggcaagctcctggccagcgacgccgaggccttgtccctgctggcacacaaccccttcgcgggcaggcccccgcccaggtgggtccgaggagagcactacaggtacaagttcagccgtcctgggggcaggcacgccgccgagggcaagtggtgggtgcggaagaggatcggagcctacttccctccgctcagcctggaggagctgaggccctacttcagggaccgtgggtggcctctgcccgggcccctctagacgtgcaccagaaataaaggcgaagacccagcccctcggcggctcagcaacgtttgcccttccctgcgcccagcccaagctgggcatcgccaagagagacgtggagaggagagcggtgggacccagcccccagcacgggggtccagggtggggtctgttgtcacatactgtggcggctcccaggccctgcccacctggggccccacatccaggccaacccttgtcccaggcgccaggggctctgatctcccatccatcccaccctcctcccagaggcccagcctggggctgtgccgcccacaggagttgagacaatggccatcctgacaccttcctccactacagccctgaccatagacccagccaggtagctcttggggtctctagcgtcccagggcctggtttctgttccctcttcaatggtgtgttcccagccaggtcctgaccctcagagccaagtccctgtcacgtctggggcagccaaaccctcgccccacagggacctggacacgcccggccaggatgtggggttggatgggccattttctgtcctatccctcatctccacccccgccacagcctacacgcatcccacacatgcaggcacacacagcctgtgcacacatgtgttcttggcccggtttcatccccccatgactggtgtctgtgaggtgcagatggacacagcgcacacccagaccctccaccaggctgtgacctcgctgcctctgaggccttgacaaggcccctcaatcggaggacagccggccgtgcacactttcatcatcgtcggacaaacagcgtctactgcacatttttcttattcctattcttgagccatagctatggcatattcttctactattcctattataccacttaccagcttactcg

SEQ ID NO: 315922 - DNA, 2103 bp, Artificial Sequence
  derived and/or modified sequence
aatggcggcgcccgcggagtcgctgaggaggcggaagactgggtactcggatccggagcctgagtcgccgcccgcgccggggcgtggccccgcaggctctccggcccatctccacacgggcaccttctggctgacccggatcgtgctcctgaaggccctagccttcgtgtactggcctgatcaagatccggggggaccggtgctggcgagacctcacctgcatggacttccactatgagacccagccgatgcccaatcctgtggcgtactacctgcaccactcaccctggtggttccatcgcttcgagacgctcagcaaccacttcatcgagctcctggtgcccttcttcctcttcctcggccggcgggcgtgcatcatccacggggtgctgcagatcctgttccaggccgtcctcatcgtcagcgggaacctcagcttcctgaactggctgactatggtgcccagcctggcctgctttgatgacgccaccctgggattcttgttcccctctgggccaggcagcctgaaggaccgagttctgcagatgcagagggacatccgaggggcccggcccgagcccagattcggctccgtggtgcggcgtgcagccaacgtctcgctgggcgtcctgctggcctggctcagcgtgcccgtggtcctcaacttgctgagctccaggcaggtcatgaacacccacttcaactctcttcacatcgtcaacacttacggggccttcggaagcatcaccaaggagcgggcggaggtgatcctgcagggcacagccagctccaacgccagcgcccccgatgccatgtgggaggactacgagttcaagtgcaagccaggtgaccccagcagacggccctgcctcatctccccgtaccactaccgcctggactggctgatgtggttcgcggccttccagacctacgagcacaacgactggatcatccacctggctggcaagctcctggccagcgacgccgaggccttgtccctgctggcacacaaccccttcgcgggcaggcccccgcccaggtgggtccgaggagagcactacaggtacaagttcagccgtcctgggggcaggcacgccgccgagggcaagtggtgggtgcggaagaggatcggagcctacttccctccgctcagcctggaggagctgaggccctacttcagggaccgtgggtggcctctgcccgggcccctctagacgtgcaccagaaataaaggcgaagacccagcccctcggcggctcagcaacgtttgcccttccctgcgcccagcccaagctgggcatcgccaagagagacgtggagaggagagcggtgggacccagcccccagcacgggggtccagggtggggtctgttgtcacatactgtggcggctcccaggccctgcccacctggggccccacatccaggccaacccttgtcccaggcgccaggggctctgatctcccatccatcccaccctcctcccagaggcccagcctggggctgtgccgcccacaggagttgagacaatggccatcctgacaccttcctccactacagccctgaccatagacccagccaggtagctcttggggtctctagcgtcccagggcctggtttctgttccctcttcaatggtgtgttcccagccaggtcctgaccctcagagccaagtccctgtcacgtctggggcagccaaaccctcgccccacagggacctggacacgcccggccaggatgtggggttggatgggccattttctgtcctatccctcatctccacccccgccacagcctacacgcatcccacacatgcaggcacacacagcctgtgcacacatgtgttcttggcccggtttcatccccccatgactggtgtctgtgaggtgcagatggacacagcgcacacccagaccctccaccaggctgtgacctcgctgcctctgaggccttgacaaggcccctcaatcggaggacagccggccgtgcacactttcatcatcgtcggacaaacagcgtctactgcacatttttcttattcctattcttgagccatagctatggcatattcttctactattcctattataccacttaccagctt

SEQ ID NO: 315923 - DNA, 1053 bp, Artificial Sequence
  derived and/or modified sequence
atgcggggcgccggcctgatcaagatccggggcgaccggtgctggcgagatctcacctgcatggacttccactatgaaacccagccaatgcccaacccagttgcatattatctacatcattctccctggtggtttcaccggtttgagaccttgtcaaaccatttcattgaattactagtgccattctttctgttcctgggcagacgggcctgtattatccacggagtgctgcagatacttttccaggctgttctgatcgtaagcggaaacctatccttcttgaattggctgacaatggtgcctagcctcgcttgctttgatgacgccactctgggtttcctgttccctagcggcccaggcagtctgaaagaccgtgtgttacaaatgcagcgggatatcagaggggctaggcctgaaccaaggttcgggtcggtagttcgccgggctgctaacgtgtctctcggagtcctccttgcctggttatccgtccctgtggttctcaatctgttaagctccaggcaggttatgaatacccatttcaacagcctgcatatcgtcaatacctacggagcctttgggtctattactaaggagcgtgcggaagtgatcctgcaaggcaccgctagcagcaacgcttccgcgcctgatgccatgtgggaggattacgaatttaagtgcaaacctggggaccccagtcgccggccatgtcttatcagcccttaccattaccgcctggattggctgatgtggtttgcagccttccaaacatacgagcataacgactggatcatccatctggcgggaaagttgctggcatcagatgccgaggccctgagcttgctggctcacaatccatttgcaggtcggccacctcctagatgggtcaggggagaacactacagatacaagtttagtagacccggaggacgccatgcagcggagggcaaatggtgggtgaggaagcgaataggggcctattttccaccccttagcctggaggagctgcggccttattttcgggatagaggttggccacttcctggacccctgtag

SEQ ID NO: 315924 - DNA, 993 bp, Artificial Sequence
  derived and/or modified sequence
atggacttccactacgagacccagcccatgcccaaccccgtggcctactatcttcatcatagcccctggtggtttcataggtttgagaccctgtctaaccatttcatcgagttgttggtgccattctttctctttctcggacggcgagcttgtatcatacatggcgtccttcagatcctgtttcaggctgtcctaatcgtttccggcaacctatctttcctgaattggctgactatggtgcctagcctcgcatgcttcgacgacgctaccctgggcttcttattcccgtcaggcccaggttccctgaaggatagggtcctgcagatgcaacgcgatattcgaggggctagacctgagccacggtttggaagcgtagtgagacgcgctgcaaatgttagcctgggcgtcctactggcttggcttagtgtgccagtggtgctaaatctgttgagcagccggcaggtgatgaacacacactttaactctctccacatcgttaacacgtatggtgcatttggatccatcacaaaagaacgcgcagaagtcatactgcaggggaccgcgagctcaaatgcctccgcccccgatgccatgtgggaggattacgagtttaagtgtaagccaggtgacccttcgagaaggccttgccttatttctccttatcactataggctggactggttgatgtggttcgcagcctttcagacctatgagcataacgattggatcatccacctagccggaaaacttctcgcttccgacgcggaagcactcagtctcttggcgcacaatcctttcgctggcaggccaccaccaaggtgggtgagaggagaacactatagatacaaattttcaagaccagggggcaggcatgctgccgaaggcaaatggtgggtccggaaaaggataggggcatacttcccgccgttgtctcttgaggaactacggccctacttcagggatcgaggctggccactccctggcccactttag

SEQ ID NO: 315925 - DNA, 792 bp, Artificial Sequence
  derived and/or modified sequence
atgcccaaccccgtggcctactacctgcaccacagcccctggtggtttcataggttcgaaacactgtccaaccattttatagaactgttggttcctttcttcttgtttttagggcgcagagcatgtatcatccacggagtgctccagatattgttccaggctgtgttgatagtgtccggtaacttgtcttttttgaactggcttaccatggtccccagcttggcttgtttcgacgatgctaccctgggatttctcttcccttccgggcctggatcattgaaggacagagtacttcaaatgcagcgcgacatcaggggggccaggccagaacccaggttcggaagcgtcgtacgacgcgccgctaacgttagtctaggcgtcctcctcgcatggctttccgtgcccgtggtcctaaaccttctgtccagcaggcaggtgatgaacactcattttaactcgctgcatattgtcaatacctacggcgcctttgggtcgatcaccaaagagcgtgccgaggtcatcctgcaaggcactgcctcatctaatgcatctgccccagacgccatgtgggaggattacgaattcaaatgtaagcctggggatccttccaggcgaccatgtctgataagcccgtaccactaccgacttgactggctgatgtggtttgccgcctttcagacttatgagcataacgattggatcattcacctggccggaaagcttctcgcctccgatgcagaagcacttagcctgctagcccacaacccattcgctggccgaccacccccatag

SEQ ID NO: 315926 - DNA, 1053 bp, Artificial Sequence
  derived and/or modified sequence
atgcgaggggctgggctgatcaagatcagaggcgatagatgttggcgggatttgacgtgcatggattttcactacgagacacagcctatgcccaatcctgtggcttattacttgcaccatagtccctggtggttccaccggtttgaaacccttagtaatcacttcatcgaattgctcgtccccttcttccttttcctgggacgcagggcttgtattatccatggagtcctgcagatcctgtttcaagcagtgctcatagtttcaggcaatctgagctttctgaactggctaaccatggtgccaagcctggcctgttttgatgatgccactctggggtttctgtttcccagtggcccaggttccttgaaggacagggttctgcagatgcaaagagacatccggggagctcgacctgagccaagatttggctccgtggtgcgcagggccgcaaacgtttctctgggcgtgctcttggcttggctgtccgtccctgtggtattgaatttgctcagctctcggcaggtgatgaacacacacttcaactcactccacatcgttaatacttatggagccttcggctccatcaccaaagaacgagccgaggttattttacaaggcacggccagcagtaatgctagcgcaccagatgcgatgtgggaggattacgagtttaagtgtaaacctggagacccaagccgcagaccatgcttaatatccccttatcattaccgactcgactggctgatgtggtttgccgcatttcagacctacgaacacaacgattggattattcacctcgctggtaagctcctggcaagcgatgcagaggccctcagtttactcgcgcacaacccattcgcgggacggccaccaccgagatgggtgcggggagagcactatcggtacaagttctcacgccctgggggacgccacgctgcagaaggcaaatggtgggttagaaagaggatcggcgcatattttccacccctgtctctggaggaactcagaccttattttcgagaccgtggttggcccctgccaggtcccctttag

SEQ ID NO: 315927 - DNA, 993 bp, Artificial Sequence
  derived and/or modified sequence
atggactttcattacgagacacaacccatgcctaaccccgtggcgtactatctgcaccattctccgtggtggttccacagatttgaaacactctcaaatcacttcatcgagctgttggttccattcttcctgttcctaggaaggcgcgcatgcatcattcatggggttctgcagattctgtttcaggctgtgctcatcgtgagtggaaacctgagttttcttaactggttgacaatggtgccttccttggcctgctttgatgatgccactctgggctttctattccccagcggaccaggaagcttgaaggacagagtactccagatgcagcgtgatattaggggcgctcgcccagagccacgcttcggaagtgtcgtcagacgcgctgcgaacgtgtctttaggggtgctgttggcgtggttgtcagtgcccgtcgttttaaacctattatcatcaaggcaggtgatgaacacacatttcaattctctccatatcgtgaacacctacggtgcattcggcagcatcacgaaggagcgcgcagaggtgattttgcagggcaccgcaagttccaacgcttcggctcccgatgccatgtgggaggactacgagtttaaatgtaaaccaggagatcccagtagaaggccctgcctcatatctccataccactatcgcctagattggttgatgtggtttgctgcattccagacatacgagcacaatgactggattatccacctagctgggaagctcttggcatccgatgccgaagccctctctctgctcgcccataatccatttgctgggagacctccacctcggtgggtcagaggagagcactatcgctacaaattttcacgccctggcggaaggcatgcagctgaggggaaatggtgggtgaggaaaagaattggagcgtactttccaccattgagcctggaggaacttcggccttacttcagagatcgcggatggccacttcccggacccctatag

SEQ ID NO: 315928 - DNA, 792 bp, Artificial Sequence
  derived and/or modified sequence
atgcctaacccagtggcctattatctgcaccactctccttggtggttccataggttcgagaccctcagcaatcattttattgagctgctggtgccttttttcttgtttctcgggcgacgagcctgtatcatacacggagtcctacaaattttattccaggccgttctgatcgtgtcagggaatttgtccttccttaattggttgacaatggtgccatccctagcctgctttgacgatgccacattgggcttcttatttccaagcggccctggcagtctaaaggatcgagtcctgcaaatgcagcgcgatatcagaggcgctagacccgagccaaggtttggttcggtagtgagacgcgctgccaatgtctcgctcggcgttcttctcgcctggctctcagtcccggtagtcctaaatctgctgtcttctcggcaggtcatgaatactcattttaacagcctccacatcgtgaacacatacggggcattcgggtcgatcaccaaggagcgcgctgaagtgatactgcagggcaccgcctccagtaatgctagtgctccagatgccatgtgggaggactatgaatttaaatgcaagcccggagacccaagtagaaggccatgcctcatcagcccttatcactatagacttgactggctgatgtggttcgccgcattccagacctatgagcataacgactggattatccacctggccggtaaactgctggcatcagatgctgaagccctctccctgttggcgcataacccctttgccggaaggcccccaccttag

SEQ ID NO: 315929 - DNA, 1053 bp, Artificial Sequence
  derived and/or modified sequence
atgagaggcgccggcctgatcaagatcagaggcgacagatgctggagagacctgacctgcatggacttccactacgagacccagcccatgcccaaccccgtggcctactacctgcaccacagcccctggtggttccacagattcgagaccctgagcaaccacttcatcgagctgctggtgcccttcttcctgttcctgggcagaagagcctgcatcatccacggcgtgctgcagatcctgttccaggccgtgctgatcgtgagcggcaacctgagcttcctgaactggctgaccatggtgcccagcctggcctgcttcgacgacgccaccctgggcttcctgttccccagcggccccggcagcctgaaggacagagtgctgcagatgcagagagacatcagaggcgccagacccgagcccagattcggcagcgtggtgagaagagccgccaacgtgagcctgggcgtgctgctggcctggctgagcgtgcccgtggtgctgaacctgctgagcagcagacaggtgatgaacacccacttcaacagcctgcacatcgtgaacacctacggcgccttcggcagcatcaccaaggagagagccgaggtgatcctgcagggcaccgccagcagcaacgccagcgcccccgacgccatgtgggaggactacgagttcaagtgcaagcccggcgaccccagcagaagaccctgcctgatcagcccctaccactacagactggactggctgatgtggttcgccgccttccagacctacgagcacaacgactggatcatccacctggccggcaagctgctggccagcgacgccgaggccctgagcctgctggcccacaaccccttcgccggcagacccccccccagatgggtgagaggcgagcactacagatacaagttcagcagacccggcggcagacacgccgccgagggcaagtggtgggtgagaaagagaatcggcgcctacttcccccccctgagcctggaggagctgagaccctacttcagagacagaggctggcccctgcccggccccctgtag

SEQ ID NO: 315930 - DNA, 993 bp, Artificial Sequence
  derived and/or modified sequence
atggacttccactacgagacccagcccatgcccaaccccgtggcctactacctgcaccacagcccctggtggttccacagattcgagaccctgagcaaccacttcatcgagctgctggtgcccttcttcctgttcctgggcagaagagcctgcatcatccacggcgtgctgcagatcctgttccaggccgtgctgatcgtgagcggcaacctgagcttcctgaactggctgaccatggtgcccagcctggcctgcttcgacgacgccaccctgggcttcctgttccccagcggccccggcagcctgaaggacagagtgctgcagatgcagagagacatcagaggcgccagacccgagcccagattcggcagcgtggtgagaagagccgccaacgtgagcctgggcgtgctgctggcctggctgagcgtgcccgtggtgctgaacctgctgagcagcagacaggtgatgaacacccacttcaacagcctgcacatcgtgaacacctacggcgccttcggcagcatcaccaaggagagagccgaggtgatcctgcagggcaccgccagcagcaacgccagcgcccccgacgccatgtgggaggactacgagttcaagtgcaagcccggcgaccccagcagaagaccctgcctgatcagcccctaccactacagactggactggctgatgtggttcgccgccttccagacctacgagcacaacgactggatcatccacctggccggcaagctgctggccagcgacgccgaggccctgagcctgctggcccacaaccccttcgccggcagacccccccccagatgggtgagaggcgagcactacagatacaagttcagcagacccggcggcagacacgccgccgagggcaagtggtgggtgagaaagagaatcggcgcctacttcccccccctgagcctggaggagctgagaccctacttcagagacagaggctggcccctgcccggccccctgtag
